United States Patent Application Publication US 2008/0050393 A1 - sequence listing, part 26

SEQ ID NO: 90136 - DNA, 6051 bp, Homo sapiens
atggcggctgccccctccgcgctgcttctgctgccgccctttccagtcctctctacctatcggctccagagccgcagtcgtccttccgccccagagaccgatgatagtcgagttgggggcattatgagaggagagaaaaactactacttccgtggagctgcgggggaccacggttcctgccccactacaacttcgcctctggcctcggccctcttgatgccctcggaggcagtctcaagcagctggtctgagtctggaggcggtttgtcagggggagatgaagaggacactcggctccttcaactcctccgcactgcccgggatccttctgaggccttccaggctttgcaagctgctttgccgcggcggggcggtcgacttggcttcccccgacgcaaggaagctttgtatcgggcactgggccgagtgcttgtggaaggaggtagtgatgagaagcggctctgcttgcaacttctctcggacgttctccggggtcagggggaggcaggccagcttgaagaggcctttagcttagcacttttgcctcaactagttgtctcgttacgggaagagaatccagccctgcggaaagatgcgctgcagatccttcatatatgtctgaaacgtagtcctggagaggtgctgagaacgcttatacaacaaggactggaaagtaccgatgcccgacttagagcttccacagcactactgcttcccatcttgcttactactgaggacttgttgcttggtctggatctcaccgaggtgataatatccctagcccgaaagcttggtgatcaggagacagaagaagaatctgagacagctttctccgcacttcaacaaattggggagcgacttggccaagacaggtttcaatcttacatttctcgtctgccctctgccctgaggagacactacaatcgccgcctggagtcccagtttggaagtcaggttccttattatttggaacttgaagcctctggatttcctgaagatccccttccctgtgcagtgactctttccaacagcaatcttaaatttgggattattcctcaggagctgcattcacgattattggatcaggaagactataagaaccggacccaggccgtcgaagaactaaagcaggtgctgggaaaatttaaccctagttctactcctcattctagtcttgttggcttcattagtttgctatataatttgttagacgattctaacttcaaagtggtgcatggcacacttgaagtcctgcatttactggttattcgccttggagagcaggtacagcagttcttgggaccagttatagcagcttctgtcaaagtgctggcggacaacaagttggtgatcaaacaagaatacatgaaaatcttcctcaagctaatgaaggaagtaggacctcagcaggtgctttgtttactcctggaacatctcaaacataagcattccagagtgagagaggaggtggtgaacatttgcatctgctccctgctgacctatcctagtgaggattttgacttgcccaaactgtcctttgatcttgccccagctcttgtagatagcaaacgcagggtacgccaagcagctttagaagcttttgccgtattggcatcatcaatgggctcaggtaaaaccagcatcctttttaaagctgtggatacagttgaactgcaagataatggagatggagtgatgaatgctgtgcaggccagattggctaggaaaaccttaccaaggctcacagagcagggatttgtggaatatgcagtactgatgccatcttctgccgggggtaggtcaaaccatttggcacatggagcagatacggactggcttttggctggtaacagaactcagagtgcacactgtcactgtggtgaccacgtgagggatagcatgcacatttatggatcttacagcccaactatctgtacccgaagggtattaagtgcaggaaaaggaaaaaataaattaccatgggaaaatgagcaacctggaatcatgggagaaaaccagacctccacttccaaggatatagagcagttttcaacatatgatttcatcccatctgcaaaattaaagctttctcaaggaatgccagtcaatgatgatttatgttttagcagaaaaagagtatcaagaaacttatttcagaatagtcgggattttaacccagattgtcttcctttatgtgctgctggtactactgggactcatcaaacaaatctttctgggaaatgtgcacaacttggattttcacaaatatgtggtaaaactggcagtgtgggttctgacttacaattcctagggacaactagcagtcatcaagaaaaagtgtatgctagcctcaattttggcagtaagacacagcaaacatttggtagtcaaacagagtgtacttcctcaaatggtcaaaatccaagtccaggagcttacatccttccatcctatcctgtctcatcacctcgaactagtccaaagcatacatctcctcttattatatctccaaagaagtctcaagataattctgttaatttctcaaattcctggcctcttaaaagcttcgaaggactatcaaagcccaagtcccacagaagaagcttgtcagcccaaaaatcgtctgaatcctacgggtaggaaatcatgggagaaaattctcaagaaaaacctcccagttcagcttacacctgcccttggtgagatcgccatcttcccgacgaggtctaaatgggacaaagcctgttcctcccatacccaaggggaataagccttttgcctgataaagctgatttaagcacagtgggacacaaaaagaaagagcctgatgatatttggaagtgtgaaaaagatagtcttccaattgatctttcagaattaaatttcaaggataaagatttggatcaagaagagatgcatagctctcttaggtcccttcgtaatagtgcagctaagaaaagagcaaaactgagtggcagtacttcagatcttgaaagccctgattctgcaatgaagctcgacttgacgatggactccccgtctctgtcttcctcaccaaacatcaattcttacagtgaaagtggagtttacagccaagaatcattgacttcttctctgtctacaactccccaggggaagagaataatgtcagacatatttccaacatttgggtcaaaaccttgtccaacaagactttcttctgcaaagaaaaaaatttctcatattgctgaacaaagccccagtgcagggtcatcatcaaatccacagcaaatttccagttttgacttcacaaccacaaaggctttatcagaagactcagtagtagttgttggaaaaggcgtatttggaagtttaagttcagcaccagcaacctgcagccaatcagtgatatcttctgtggaaaatggggatacattttcaattaaacaaagtattgaaccaccatcagggatttatggaagatcagtccagcaaaatatttcatcatatcttgatgttgagaatgaaaaagatgctaaagtttctatttctaaatctacttataacaagatgagacaaaagagaaaagaagagaaagaactgtttcacaataaagattgtgaaaagaaggaaaaaaattcctgggaacgaatgagacatacaggaactgagaaaatggcatctgaaagtgaaacacctactggagctatttcacagtataaagaaaggatgccttctgtcactcatagtccagaaataatggatctgtcagaactacgaccattctctaaaccagaaatagcactgacagaagccctgaggcttttggctgatgaggattgggagaagaaaattgagggactgaattttattagatgcttagctgcttttcattctgagatactgaacacaaagttgcatgaaacaaattttgcagttgttcaagaggtgaaaaatttacgttctggagtttctcgtgctgctgtggtctgtttaagtgatcttttcacttatttgaaaaagagcatggatcaagagctagataccacagtaaaagttttgttgcacaaggctggtgaatcaaatacatttataagagaagatgttgacaaagcattgagagctatggttaataatgtaactcctgcacgtgcagttgtttctcttatcaatggtggacaaaggtattatggtcgaaagatgctgttcttcatgatgtgtcatcctaactttgaaaaaatgcttgaaaagtatgtcccatctaaagatttgccatatattaaggactctgttagaaacttacagcaaaagggtttgggggagataccattagatactccttcagcaaaaggaagacgatctcatactggcagtgttggaaatacaagatcatcatctgtttctagagatgctttcaattcagctgaaagagctgtaactgaagttcgtgaagtcaccagaaaatcagtccctcgtaattccttagaaagtgctgagtaccttaaactcataactggcttattaaatgcaaaagactttcgtgatcgtattaatgggattaagcagcttttatcagatacagaaaataatcaagaccttgttgttggaaacattgtgaagatttttgatgcttttaaatctcgacttcatgattctaatagtaaagtaaatctggtggctctggaaacaatgcacaaaatgattcctctacttagagaccacttatctcctataatcaacatgctaattccagcaatagtggataacaatctgaattccaagaatccaggcatctatgcggctgctacaaatgttgttcaggcactgagtcagcatgtagacaattacttacttctacagccattttgcacaaaagctcagtttttaaatggaaaagcaaaacaggacatgacggaaaagcttgctgatattgttacggaactttatcaaaggaagccgcatgccacagagcagaaagtgttggttgttttatggcatctcttaggaaatatgacaaatagtggctctctgcctggagctggaggaaatatacgaacagccacagctaaattatcaaaagcactctttgcacagatgggtcagaatctgttaaatcaggctgcatctcaaccaccacatatcaaaaagagtttggaggaattactcgatatgacaattttaaatgaattatgaatcttcgataaaatactgtatgatgaacaaaagtgtttacatgatgacaaatggaactttctaaaagttatgttatcagtgcctgcacttcacatccagcaaattaagtcaatggctatttttatttgcagcctatgagtacacatctgtcctatatcaaccttaccacttatattcatcacataaaaacctaaaatattcatgaataattcatgaaatctgagtcacatgggatgaattcaattttaatatttttgagaaaagtcctgctcatttgcactattctatagaaactacaatttgttgccctatatgtaaaattagaattgtaattaaaaatacacattttattatgtaatcatgttctggtatgtctcatttctcagccttattttataacgtggaagtcattgaactatgttatcagaaactaagtttgtatattatttgtgaaaaacatgtatttctgaatcagtccgctaatatgattgtgcagtattagcttgcttttgctgctgtgttaatgtcatatatttgcttaccttttgggttcaattatctacataattgtgaaatttaacaagttataataaagcatgacaaccaaagttttagaaaacattaaacattttaaatgcacgtttaaaaaacgtgttgaatgtaacccccctatttttgtgtgcaaacactaaattttattgctttatgttttgacctttataaaggtgttattctgctgcccagttttgtaattctcaaaaatagtgccaggtcttctatagcttttttcagaattcatgggcttacaagtactgtatgcatctttaaaaagaaaaggaatgttataaaataaaaggatttatttctttaaaaaaaaaa

SEQ ID NO: 90137 - DNA, 3985 bp, Homo sapiens
cccccaacgccagcttcctgcaggcccagagccggcatgaactctcccaacgagtcggagtaaaggacagtaggctttgtaaggggcagagcttctggttcccctcaagtcctctcagcgtaggagcttttcagtttggcaagtcctcactgagtatcaccaacaggctcagcctgtggaagacagaagaaaatatgagatgggccatccctggtcctcacagtgaacatgttagcaagagagactgttttggtgaggggcagcaggtggagactgtgagtgatttccttctggggcccactgcccaggaaggagtgcccaggccggatgaggcacttccctacagtgtgggtcccgtcggcagtggcctgagggaacctgtgctctgcgggctgcccgaccaccttcccttcggtctgctccccgcctctggcggccccctccctggcatgctgctggtgcccaaggctcaggggctcgtggagatgctgcagaccatctatgagacagaatcctgtttctcagcagatgggatgtcaggtcgggaaccatccttggaaatcctgccgcggacttctctgcacagcatccctgtgacagtggaggtgaagccggtgctgccaagagccatgcccagttccatggggggtgggggtggaggcagccccagccctgtggagctacggggggctctggtgggctctgtggaccccacactgcgggagcagcaactgcagcaggagctcctggcgctcaagcagcagcagcagctgcagaagcagctcctgttcgctgagttccagaaacagcatgaccacctgacaaggcagcatgaggtccagctgcagaagcacctcaagcagcagcaggagatgctggcagccaagcagcagcaggagatgctggcagccaagcggcagcaggagctggagcagcagcggcagcgggagcagcagcggcaggaagagctggagaagcagcggctggagcagcagctgctcatcctgcggaacaaggagaagagcaaagagagtgccattgccagcactgaggtaaagctgaggctccaggaattcctcttgtcgaagtcaaaggagcccacaccaggcggcctcaaccattccctcccacagcaccccaaatgctggggagcccaccatgcttctttggaccagagttcccctccccagagcggcccccctgggacgcctccctcctacaaactgcctttgcctgggccctacgacagtcgagacgacttccccctccgcaaaacagcctctgaacccaacttgaaagtgcgttcaaggctaaaacagaaggtggctgagcggagaagcagtcccctcctgcgtcgcaaggatgggactgttattagcacctttaagaagagagctgttgagatcacaggtgccgggcctggggcgtcgtccgtgtgtaacagcgcacccggctccggccccagctctcccaacagctcccacagcaccatcggtgagaatggctttactggctcagtccccaacatccccactgagatgctccctcagcaccgagccctccctctggacagctcccccaaccagttcagcctctacacgtctccttctctgcccaacatctccctagggctgcaggccacggtcactgtcaccaactcacacctcactgcctccccgaagctgtcgacacagcaggaggccgagaggcaggccctccagtccctgcggcagggtggcacgctgaccggcaagttcatgagcacatcctctattcctggctgcctgctgggcgtggcactggagggcgacgggagcccccacgggcatgcctccctgctgcagcatgtgctgttgctggagcaggcccggcagcagagcaccctcattgctgtgccactccacgggcagtccccactagtgacgggtgaacgtgtggccaccagcatgcggacggtaggcaagctcccgcggcatcggcccctgagccgcactcagtcctcaccgctgccgcagagtccccaggccctgcagcagctggtcatgcaacaacagcaccagcagttcctggagaagcagaagcagcagcagctacagctgggcaagatcctcaccaagacaggggagctgcccaggcagcccaccacccaccctgaggagacagaggaggagctgacggagcagcaggaggtcttgctgggggagggagccctgaccatgccccgggagggctccacagagagtgagagcacacaggaagacctggaggaggaggacgaggaagacgatggggaggaggaggaggattgcatccaggttaaggacgaggagggcgagagtggtgctgaggaggggcccgacttggaggagcctggtgctggatacaaaaaactgttctcagatgcccagccgctgcagcctttgcaggtgtaccaggcgcccctcagcctggccactgtgccccaccaggccctgggccgtacccagtcctcccctgctgcccctgggggcatgaagagccccccagaccagcccgtcaagcacctcttcaccacaggtgtggtctacgacacgttcatgctaaagcaccagtgcatgtgcgggaacacacacgtgcaccctgagcatgctggccggatccagagcatctggtcccggctgcaggagacaggcctgcttagcaagtgcgagcggatccgaggtcgcaaagccacgctagatgagatccagacagtgcactctgaataccacaccctgctctatgggaccagtcccctcaaccggcagaagctagacagcaagaagttgctcggccccatcagccagaagatgtatgctgtgctgccttgtgggggcatcggggtggacagtgacaccgtgtggaatgagatgcactcctccagtgctgtgcgcatggcagtgggctgcctgctggagctggccttcaaggtggctgcaggagagctcaagaatggatttgccatcatccggcccccaggacaccacgccgaggaatccacagccatgggattctgcttcttcaactctgtagccatcaccgcaaaactcccacagcagaagttgaacgtgggcaaggtcctcatcgtggactgggacattcaccatggcaatggcacccagcaggcgttctacaatgacccctctgtgctctacatctctctgcatcgctatgacaacgggaacttctttccaggctctggggctcctgaagaggttggtggaggaccaggcgtggggtacaatgtgaacgtggcatggacaggaggtgtggacccccccattggagacgtggagtaccttacagccttcagcttgagccatccctttgcaggacagtggtgatgcccattgcccacgagttctcacctgatgtggtcctagtctccgccgggtttgatgctgttgaaggacatctgtctcctctgggtggctactctgtcaccgccagatgttttggccacttgaccaggcagctgatgaccctggcagggggccgggtggtgctggccctggagggaggccatgacttgaccgccatctgtgatgcctctgaggcttgtgtctcggctctgctcagtgtagagctgcagcccttggatgaggcagtcttgcagcaaaagcccaacatcaacgcagtggccacgctagagaaagtcatcgagatccagagcaaacactggagctgtgtgcagaagttcgccgctggtctgggccggtccctgcgagaggcccaagcaggtgagaccgaggaggccgagactgtgagcgccatggccttgctgtcggtgggggccgagcaggcccaggctgcggcagcccgggaacacagccccaggccggcagaggagcccatggagcaggagcctgccctgtgacgccccggcccccatccctctgggcttcaccattgtgattttgtttattttttctattaaaaacaaaaagtcacacattcaaaaaaaaaa

SEQ ID NO: 90138 - DNA, 1125 bp, Homo sapiens; identical to SEQ ID NO: 61318

SEQ ID NO: 90139 - DNA, 1897 bp, Homo sapiens
ccacgcgtaaacttgggcccctccagggatcctttaaaacggccgccccttttttttttttttagaagtttggaccagaatatattttatttttctcataaaagttataccaaaaatatattttcttaacttaaaaatacagcttcaaaaagcaaaatttgagttgttagaattcattacacattttataaacagcagtgaaaggaagaagtcagcagaatggattcaatttttaaatacacaaatgttcatttcacaagcttgactttgtcctttaataacttaaaggtagggttcttgctgattttcttgttaaagatgaccaggagttcctcttcggatctgtgatgctcatctgtcactgtgtagtactgagctaaaacctttttccttagctttttgatggttatttcattgtctggggcctgtttcagaattgctttaatagttcccttccagttgaatttaccttttgcaggagcctcatcgtcttctggttctccgccctcaggatgctctgggagcttcatctttttcttcttagaatctgtttcaactttcgagtgcctccgcttcctcttccctgcgcccacgcgtgcctcttcctcactggcgctgtccttgcgctgcttcttcttcttgctcctcttccctgcagagccattggcctcagggacttcctccccaccagcctcaaggtcagcctcctgtccctttttgcgcttcttaggcttctgattccttgagttttcctggtggttttctaactttagttctttcttttctcttttccttttcttctgccgttcttcctttctttctcttttattcttcttcacctccccttgctgttccacggcgtctttcactttggaggctggaaccttggtggagatttctgcatgtggatttgccactgggtggagtggccgttgatcctgttccttattgactggttcgctgttggaagcttcagaaaagatattccacacctggtccagaatggattcattatgaacttttaaactgttcttcatccaattctgaaattttgcctttttcctggggaacgttgtcaaaagcactaatttgctctaaaagttctctcactttggggctgacattgggtctcttttattaattcactaattttctgaatccacgcctgctgttttgatggtcgcctttgtgggtttttaccttccatagcctttgccaccatacttctgatcttcacttatgcatttcacgtggtttttatagtcatcgccccagaaatctttaccgcagtcaatgcaagaaaggcattcacagtttctgcaaacagacacatgcttttccacttgtattttcttcactgattcaccacatgcattgcatgtaaaaaataccatttttaggtaaatggctaaatattctctatccaagacaggttttaagtcttgtcaaaaagccgtcatgtagaaattcagtcactccaatggaagacagcaaacattgcctctcagccagcgcccgccaacggtttcaaccggccgcggggagcacgtggactcgccgccgccagcccagcgccgcagctacctgcctctcaggcttcgcggtgcagaattcgcttctgaaccacccagcgcgcctgcgccgcggccacgccccccccagtggaagtgacgccaacggaagcaggaaggcggttccggcaagccaagggggcgttgtcgtgatgattccgcggccagcatcgctgcgagtggccttgaaggcagctgctgcagccagggagtggaggaagctgaagaaggctacagccggaagcgggagtgaggagcctgacaactcaagaggtggcacagggggagagaactgggacacaaaagagtctgagaagcagggaaca

SEQ ID NO: 90140 - DNA, 3579 bp, Homo sapiens; identical to SEQ ID NO: 60871

SEQ ID NO: 90141 - DNA, 729 bp, Homo sapiens
ccctcctttgactaggaaggcgttctttgatgcaccattaatagttttagcaattactgtcaaccatagtgaatgtgtaactcctgttttcatttaaatttgatcaatgactcagttgttattaaaatgcaagaaatagtagaagtttttgtatatatatacctgtgatgagtgcgggtgagaatggtcctggggatttatttctcttttttgttcgactttatttgttagatcagtttcatgttcacacgaaattgagtggaaggtacggaggtttcccatataagtcttgcgccgccccccaccccatgcatagtttccctcattatcaacatcccccagcagaatacgtctgtcacaattgataaacttgcattgacacatcattgtcacccaaagtcctttgtttacattagggttccctcttggtgttgtaccttctgtgagtttggacaaatttataatgacacgtatctccaattagagtagcataattttatctctttataaatgctcaagtcagggcttcttattttaatttaagggggattaaatgatcgtaagtgcatttgttacatcattgtgcttattaataatctgtttaaagtatctgtaatgctttgtggtataactttaaacaacagaaaatgatgttatttgtaacggtacatccttgctctgctgctaatgtccttgaggaggcgaagtaagtctaggaaaaaaaaagtc

SEQ ID NO: 90142 - DNA, 2213 bp, Homo sapiens; identical to SEQ ID NO: 75724
  misc_feature (1)...(2213): n = a,t,c or g

SEQ ID NO: 90143 - DNA, 6608 bp, Homo sapiens
gttcacccaggagaacctccgttcgacttggagctgttctacgttaagtatagaaatttttcctacttacattgtaaatgggccacaatggaagagctcgaaaaggatcctcgcatcgcacagaagatcaagcgatttaggaataaacaagcccagatgaagcacatttttacggagcctgatgaagacttgttcaatccagactatgtagaagttgatcgcatcttggaggtggcccacaccaaggatgcagaaacaggggaggaggtaacacattacctggtgaagtggtgctcactaccatatgaagaaagcacgtgggagctagaggaagatgtagatcctgcaaaagttaaagaatttgaatctcttcaagttctccctgaaattaagcatgtggagcggcctgcttcagactcctggcagaaacttgagaagtctcgcgagtataagaacagtaaccagctccgggagtaccagctggaagggatgaactggcttctttttaactggtataacagaaaaaactgtattttggctgatgagatgggcctagggaaaaccatccagtccatcacattcctttcagaaatatttctgagaggaatccacggcccttttctcattatcgcccctctctccaccatcactaactgggagcgggagttccggacatggacagagatgaatgccattgtgtaccacggcagccagatcagcaggcagatgatccagcagtatgaaatggtgtacagagacgcccagggaaaccccctttcaggagtcttcaagttccacgtcgtcatcacaacatttgaaatgatcctagcagactgcccagagttgaagaagattcactggagctgtgtgataattgatgaagcccacagactgaagaataggaactgcaaacttctggagggtctaaagcttatggccctggaacataaagtgcttctcactggaacacccttgcagaactctgtggaggagctcttcagtttgttaaattttctggagccatcacagtttccttcagagaccgctttcttggaggaatttggagatctgaaaacagaggagcaggtaaagaaactgcagtctatcctaaaaccaatgatgcttcggcggctgaaagatgatgtggaaaagaaccttgctcccaaacaagagacgatcattgaggtggaactgaccaatatccagaaaaagtactaccgtgccatcctcgagaagaacttttccttcctgaccaagggggcaaatcagcacaacatgcccaatctcatcaacaccatgatggagctgaggaagtgctgtaaccatccctacctgatcaatggagcagaggagaaaattctagaagatttccgaaaaacccacagccctgatgcccctgactttcagctgcaggccatgattcaggcagcaggaaagcttgtgttgattgataaactactccctaagctgattgcaggtggccacaaagtactcatcttctcccagatggtgcgctgcctcgacatcctagaagattacctcatccagagaagatacacctatgagcgaattgatgggcgagtacggggaaacctgcgccaggcagccatcgaccggttctgtaagccagattcagaccgctttgtctttcttctgtgcaccagagcgggaggcctggggatcaatctcacagctgctgatacctgcatcatatttgattctgactggaacccacaaaatgacttgcaggctcaggcccgatgtcaccgcataggccagagcaaagctgtgaaggtgtatcgcctcatcactcgaaattcctacgagcgcgagatgtttgacaaggccagcctaaagctggggctggacaaggctgttcttcaggacatcaaccgaaagggcggcaccaatggggtacagcagctctcaaaaatggaggtggaggacctactccggaaaggtgcttatggagccttaatggatgaagaagatgaaggctccaagttctgtgaagaagacatagaccagattctgcagaggcgaacgcacaccatcaccatccagtctgaggggaaagggtccacttttgccaaggctagctttgtggcttcaggaaacagaacagatatttccttagatgatcctaacttttggcagaaatgggctaaaatagctgaactagacactgaagcaaagaatgaaaaggaaagcttagtgatcgaccgacctcgcgtgagaaagcagaccaaacactacaactcgtttgaggaagacgagctcatggagttttcagagttagacagcgactcagacgaaaggcccacgagatccaggcgcctcaatgacaaagccaggcgctacctccgagcggagtgctttccgggtagagaagaacctgctcatctttggctggggccggtggaaggacatcctgactcatggccgattcaagtggcatctgaacgagaaggacatggagatgatttgccgtgccctcctggtgtactgtgtcaagcattataagggggacgagaagatcaagagtttcatttgggaactgatcacacctaccaaagatgggcaagcccagaccctccagaaccactcaggcttatctgccccagtccccagagggaggaaggggaagaagacgaagaaccagttgctaatcccagagctaaaggatgcagattggctagccacctgcaaccccgaggtggtcttgcatgatgatggctataagaaacacctcaaacagcactgcaacaaagtacttttgcgagtccggatgctgtactacctaaaagctgaaatactgggagaagcagctgagaaagcatttgaaggatctcctgccagggagctggatgtacctctgcctgacatcgactacatggagatcccagtggactggtgggatgctgaagccgataagtcacttctcattggcgtgttcaagcatggttatgaaaggtacaatgccatgcgagcagacccagcactttgcttcctggagaaagttgggatgcccgatgagaagtccctttctgcagaacagggtgttacagatgggacctcagacattcctgaaagaggcaacacagataaagaagacaatgctgaggacaaagtagatggcctccagaaacaaacggagagttccagtgatggaggtgatggcgtttttagcgaaaagaaggatgacagccgggcagcccaggatggctccgacccagacaaatcgccctggccagtttcctccgccctcacagctcgtctcagacgtctggtcactgtttaccagcgctgcaaccgcaaggaactgtgccggcctgaaattctgggaccaggtaaccaaggatattgggttcaggaagagatgttcaggagaacctcagaaatggacctcatcaacaaggaagcccaaaagaggtggactaggagagaacaagcagacttctatagaacagtgtcttcctttggtgttgtttacgatcaagaaaagaaaacctttgactggacacagttccgcatcatttcccgtttggacaagaagtcggatgagagcctggaacagtatttttatagttttgtggccatgtgccggaatgtctgtcgtctacccacatggaaagatggcggtcccccagataccaccatctacgttgaacccatcactgaggaacgtgctgcaagaactctgtaccgcattgaactgttacggaaagtccgagagcaagtgctcaagtgccctcagctgcatgaacgcctccagctgtgcaggcccagcctctacctcccagtctggtgggagtgtgggaagcatgatctagacctgctcatcggcactgccaaacatgggctgaaccgcactgactgttacatcatgaacgacccccagctgtccttcctggatgcctatagaaacctatgcccagcataaaagatctggcacccaggcaccaggaaatctctgttgcctttaccagaccaactccaagttatatgaatctcttacatattctcaaatgagtaggacttcagagtcccttgaaaatgaacctgaaaatctagtgagagtagaaagcagagatgatcatctcagcctgcctgatgtgacatgtgaaaactttatttctaaagttcaggatgtcatttccatcaaccatgatgaaagtctgctgcctgagtccttagagagcatgatgtatggtaagaaggtgctcagccaagaaccaagctcttttcaggagagcccaagtaccaatactgaatctagaaaagatgttattaccatctcaataagcaaagatgggaactgccagtctggtggccctgaggcagaaatagcttctggccctacttttatgggtagcttagaagcaggaggagtagctcaagcaaacatcaaaaatggaaaacatttgttgatgtctatttcaaaggaaggggagctctgctgcagtgaggcaggacagagacctgaaaacattggccagctggaagccaagtgtttagcttccccttccttgaatccaggaaatgaaagtgggtttgtagatatgtgcagtcttagtgtctgtgactccaaaagaaacctgtcatcagatcagcaattaattgatttattggaaaacaaaagcttagaaagtaaattgattttgagtcagaaccacagtgatgaggaggaagaagaggaggaaaacgaggaggaaaacttagccatggcagtaggcatgggggaaaggccagaggtattgcatctcacggagcccactactaacatctcaagggaaaagaaccaaggcttccaagatgaaaccaagaaaggaagcttagaggtggcaaaccagactcctgggctacagagggctttccccgctccagcagcctgtcagtgccactgcaaacacatggagaggtggatgcatggcctcgagaatgatgaatttgaaatcgagaaacccaaggcttatatcccagatctgttcaaaagtaaaaccaatactatcgccatggagggtgaacccactgctattccatcacagccgtttaaagtgaagcatgagcttttaaaagaaccttggaaagaaagtgcagaggggcaaaacgttttccccacatatcctcttgaaggaagtgagctcaaatcagaagacatggattttgagaataaagatgattatgatagagacggaaactgccatagtcaagattatccagggaagtactctgaagaggagagcaagagctcaacatcgggcatcacaggagacattggggatgagctacaggaggctcgagctcccactattgctcagctgctacaggagaaaactctctattccttctctgagtggccaaaggaccgcgtgataattaaccgcctagataatatctgccacgtggtgttaaaggggaagtggccctctagccagcagtatgagccctcaggcacactgcccaccccggtattaaccagcagtgctggttctcgaaccagcctctcagagccggaagcagcagaacacagcttcagcaacggcgcaacattggtcggcccagatccacaaggagagcttcttagctccagtattcacaaaggatgaacaaaagcacaggcgtccctatgagtttgaggtggagagggatgcaaaggctcggggcctggagcagttctctgccacccacgggcacacccctatcatcctcaatggctggcatggggagtcagctatggacctctcctgctcatcagaggggtccccaggagccacatcccctttcccagtgagcgccagcacccctaagattggggctatcagttcacttcagggagcccttggcatggacttgtctgggattctgcaagctggcctgatccatcctgtgactggacagattgtcaatggaagcctcagaagagatgatgcagccacgaggaggcggagagggaggcggaaacatgttgaaggagggatggacctcatctttttgaaggagcagacacttcaggcgggaatcttggaagtccatgaagacccagggcaggccaccttgagcaccacacaccctgaggggccagggcctgccacctcggctcctgagccagctacggcagccagcagccaagccgagaaatccattcccagcaagagtctgcttgactggctaaggcagcaggctgactactccttagaagttcctggctttggggcaaatttttcagacaaaccaaagcagaggaggccacgctgtaaagaacctggaaaattagatgtcagctccctgagcggggaagagagagttcctgccatccccaaggagccaggactgagggggtttcttccagaaaacaagttcaatcacactctggctgagcctattcttcgagatacgggcccccgcaggagggggaggcggcctcggagcgaactcctgaaggctccttccattgtggcagactctccctctggaatggggccactgttcatgaatggactgattgctgggatggacctggtaggacttcagaacatgagaaatatgccaggcatccccctcaccgggctggtggggtttccagctggctttgccacgatgccaac

SEQ ID NO: 90144 - DNA, 3172 bp, Homo sapiens
  misc_feature (1)...(3172): n = a,t,c or g
cgccccctttccttacgcggattggtagctgcaggcttccctatctgattggccgaacgaacgcagcgcgtaatttaaaatattgtatctgtaacaaagctgcacctcgtgggcggagttgtgctctgcggctgcgaaagtccagcttcggcgactaggtgtgagtgagccagtatcccaggaggagcaagtggcacgtcttcggacctaggctgcccctgccgtcatgtcgcaagggatcctttctccgccagcgggcttgctgtccgatgacgatgtcgtagtttctcccatgtttgagtccacagctgcagatttggggtctgtggtacgcaagaacctgctatcagactgctctgtcgtctctacctccctagaggacaagcagcaggttccatctgaggacagtatggagaaggtgaaagtatacttgagggttaggcccttgttaccttcagagttggaacgacaggaagatcagggttgtgtccgtattgagaatgtggagacccttgttctacaagcacccaaggactcttttgccctgaagagcaatgaacggggaattggccaagccacacacaggttcaccttttcccagatctttgggccagaagtgggacaggcatccttcttcaacctaactgtgaaggagatggtaaaggatgtactcaaagggcagaactgggctcatctatacatatggagtcactaactcagggaaaaacccacacgattcaaggtaccatcaaggatggagggattctcccccggtccctggcgctgatcttcaatagcctccaaggccaacttcatccaacacctgatctgaagcccttgctctccaatgaggtaatctggctagacagcaagcagatccgacaggaggaaatgaagaagctgtccctgctaaatggaggcctccaagaggaggagctgtccacttccttgaagaggagtgtctacatcgaaagtcggataggtaccagcaccagcttcgacagtggcattgctgggctctcttctatcagtcagtgtaccagcagtagccagctggatgaaacaagtcatcgatgggcacagccagacactgccccactacctgtcccggcaaacattcgcttctccatctggatctcattctttgagatctacaacgaactgctttatgacctattagaaccgcctagccaacagcgcaagaggcagactttgcggctatgcgaggatcaaaatggcaatccctatgtgaaagatctcaactggattcatgtgcaagatgctgaggaggcctggaagctcctaaaagtgggtcgtaagaaccagagctttgccagcacccacctcaaccagaactccagccgcagtcacagcatcttctcaatcaggatcctacaccttcagggggaaggagatatagtccccaagatcagcgagctgtcactctgtgatctggctggctcagagcgctgcaaagatcagaagagtggtgaacggttgaaggaagcaggaaacattaacacctctctacacaccctgggccgctgtattgctgcccttcgtcaaaaccagcagaaccggtcaaagcagaacctggttcccttccgtgacagcaagttgactcgagtgttccaaggtttcttcacaggccgaggccgttcctgcatgattgtcaatgtgaatccctgtgcatctacctatgatgaaactcttcatgtggccaagttctcagccattgctagccagcttgtgcatgccccacctatgcaactgggattcccatccctgcactcgttcatcaaggaacatagtcttcaggtatcccccagcttagagaaaggggctaaggcagacacaggccttgatgatgatattgaaaatgaagctgacatctccatgtatggcaaagaggagctcctacaagttgtggaagccatgaagacactgcttttgaaggaacgacaggaaaagctacagctggagatgcatctccgagatgaaatttgcaatgagatggtagaacagatgcaacagcgggaacagtggtgcagtgaacatttggacacccaaaaggaactattggaggaaatgtatgaagaaaaactaaatatcctcaaggagtcactgacaagtttttaccaagaagagattcaggagcgggatgaaaagattgaagagctagaagctctcttgcaggaagccagacaacagtcagtggcccatcagcaatcagggtctgaattggccctacggcggtcacaaaggttggcagcttctgcctccacccagcagcttcaggaggttaaagctaaattacagcagtgcaaagcagagctaaactctaccactgaagagttgcataagtatcagaaaatgttagaaccaccaccctcagccaagcccttcaccattgatgtggacaagaagttagaagagggccagaagaatataaggctgttgcggacagagcttcagaaacttggtgagtctctccaatcagcagagagagcttgttgccacagcactggggcaggaaactttcgtccaagccttgaccacttgtgatgacatcttaatcaaacaggaccagactctggctgaactgcagaaacaacatggtgctagtgaaactggaactcgcgaagaaggcagcatgtattgctgagcagtatcatactggtgttgaaactccccaaggcaggtttctgccaaaaagcgcccttggtaccaaccaggaaaatcagcaaccaaaccaacaacccancagggaagaaacccattccttcgaaatttacttccccgaacaccaacctgccaaagctcaacagactgcagcccttatgcccggatccttacgctcacggcgttcccctttactcaaaatctgggccttttggcaaaaagtactaaggctgtggggaaagagaagagcagtcatggccctgaggtgggtcagctactctcctgaagaaataggtctcttttatgctttaccatatatcagggaattatatccaggatgcaatactcagacactagctttttttctcacttttgtattataaccacctatgtaatctcatgttgttgtttttttttatttacttatatgatttctatgcacacaaaaacaggaaatatcacaggatattattgttcacattttttattg

SEQ ID NO: 90145 - DNA, 674 bp, Homo sapiens
tcgcaccggactcgaatgcccggaacgaccatttcgacgcatgctccctgcgggtgcaggctgggcttagctccgctggacccgcgctggggaactctggcctcgctgcactcatggcttctcctagcaaggcagtgattgttcccgggaacggaggcggggatgtgaccacccacggctggtatggctgggtgaaaaaggagctggagaagatacctggtttccagtgtttggctaaaaacatgcccgacccaattacagcacgagagagcatctggctgcccttcatggagacagagctgcactgtgatgagaagactatcatcattggccacagttctggggccatcgcggccatgaggtatgcagaaacacatcgagtatatgctattgtattagtgtctgcgtacacatcagacttgggggatgaaaatgagcgtgcaagtggatacttcacccgcccctggcagtgggagaagatcaaggccaactgcccttacattgtgcagtttggctctactgacgacccgttccttccctggaaggaacaacaagaagtggccgataggttggaaaccaaattgcacaaattcactgactgtggccactttcagaacacagagtttcatgaactgattactgttgtaaagtctttgctgaaagtaccagcatag

SEQ ID NO: 90146 - DNA, 2571 bp, Homo sapiens
  misc_feature (1)...(2571): n = a,t,c or g
gattttcacaatgcttttccatacaatgtctggaatccatagataacataaccggtttggtcaggggtcgatctttaaccaggcccagggttggcaccctggctgtctgcctgtggatttcatttctgccttttagtttttacttgtttctttggaggcagaaattgggcataaaacaatatgagaggtggtctcctcccttaacagcacaaacgcttaattaacatttctttttcttttgagacaggttctgtcgcccaggctggagtgcagtggtgcagtcatagctcagtgcagcctggaccacctgggctcaagcagtcctgacacctcagcctctcaaaatttgggattacaggcgcgcgccaccgtgcgggtcaggaggcttccctgagggccccggaggtggagctgggcttttccttccgaagcgcccctgggaatctctctctttacggccttggaacctgggaaactacattacccagaaagctttgcgtcaaatgacagcacggcagagccagtgagagttcacattgaaggcgtttccgtgtgcgcaagtaaggtagaggcgggactcccggcgccctttagtagcgaccatttccattggcgttagggagtccttggagcgctgtgttgggaccgtggtggtgactggatccaggaggtcgggagtcgttcttctctttgcacagacgtgactctgcagctctttaacggcgcccgctgctctcaacccagcttaccccacgtggtcccatggcggcggccgcgctaaggttccccgttcagggcacagtgacttttgaagacgtggctgtgaaatttacccagggaggaatggaatctccttagttgaggctcagagatgcctgttaccgtgatgttgacgctgggagaacctgggcactttatgtcctccctggggttnttggtgtggagtggaagatgaggcggcaccttctaagcagagtatttatatacaaagagagactcaggtcaggactcctatggcaggtgtgtctcccaagaaggcccacccctgtgagatgtgtggcccgatcttgggagacattttgcatgtggcagatcatcagggaacacatcacaagcagaaactgcacaggtgtgaggcctgggggaataaattgtatgacagtggaaactttcatcagcaccagaatgagcacattggagagaaaccctacagagggagtgttgaggaggcgttgtttgtgaagaggtgtaagttgcatgtgtcagggagtcatctgtcttcagtgagagtggaaggacttttgcccaggtcaggattactccagcaggaggccagtcacactggggagaagtcaaacagcaaaactgagtgtgtgtctccctttcagtgtgggggagctcactatagccatggagattccatgaaacattttagcaccaaacatatactcagtcagcaccagagacttctccctcgagaagaatgttatgtgtgctgtgaatgtgggaaatcctttagcaaatatgttagcttcagtaatcatcagagagttcacagtggaaaaagaccttatgaatgtggagaatgtgagaaatcttttagtcaaaagagcagcctcattcaacatcagcaatttcacactggaggaaaaccttatgggtgtgaagaatgtgggaaatattttagcttagaaggatatcttaggcgccatcaaaaagttcacgctggaaaagggccttatgagtgtggagaatgtgggaaatcttttagttcaaacgtgaaccttaagagtcatcagcgcattcacactggagagagaccttacaagtgtggagaatgtgagaaatcttttagtcggaagcccagccttagttaccatcagcgcattcacactgaagtaagaccttacaagtgtggagaatgtgggaaatcttatatttcaaaggggcaccttaggatccatcagcgcatgcacactggagaaagaccttacaagtgtggagactgtgggaaatcttttaatgaaaaaggacaccttaggaatcatcagcgagttcacactacagaaagaccttttaagtgtggggaatgtgggaaatgttttagtcacaagggtaacctcattctacaccagcatggccatactggagaaagaccttatgtatgcagggaatgtggaaaattatttaagaagaagtctcacctccttgtacaccagagaattcacaatggagaaaagccatatgcttgtgaagcttgtcagaaattttttagaaacaagtaccaactcattgcacatcagagagttcacactggagaaaggccttatgaatgcaatgattgtggaaaatcatttacccacagctctacattctgtgttcataagcgaattcacactggagaaaagccttatgagtgcagtgaatgtggaaaatctttcgctgaaagctccagtttcacaaaacacaaaagagttcacactggagaaaagccttatgagtgcagtgaatgtggaaaatcttttgctgaaagctccagtctcactaaacacaagagagttcacactggag

SEQ ID NO: 90147 - DNA, 2424 bp, Homo sapiens
ccgacactttcgggttgacgatcctcgccttgggtgggtctagacagccgcggcggctgcggcgcctatagtgacagtgagtgcgtgagacccggagagagatggcgatggcgatgtcggacagtggggcgagccgcctgcgtcggcagctggagtcagggggttttgaggcgcggctgtacgtgaagcagctctcgcagcagtcggatggggaccgggacctccaggagcaccggcagcgcatccaggcgctggcggaggagacggcgcagaacctgaagcgcaacgtctaccagaactaccggcagttcatagagacggcccgcgagatctcctacctggagagcgagatgtaccagctcagccatttgctgaccgagcagaaaagcagcctggagagcatcccgcttacgttgctgcctgccgctgctgccgccggagccgccgccgcctctggaggggaggagggagtcggtggggcggggggccgagaccacctccgaggccaggccggctttttctccacccccgggggtgcctcccgcgacggctccggtccaggcgaggaaggaaagcagcgcactctcaccaccctgcttgagaaggtggaaggctgcaggcatctgctggagacgccgggacagtacttggtgtacaatggggacctagtggaatacgatgcggaccacatggcccaactgcagcgggtgcacggctttctcatgaacgattgcttgttggtggctacctggctgcctcagcggcgtgggatgtatcgctacaacgctctctattccctagatggtttggccgtagtcaatgtcaaggacaacccgcccatgaaggacatgttcaagctgcttatgttccccgagaaccgtattttccaggccgaaaatgctaaaatcaaacgagagtggctggaagtgctggaggacaccaagagggccctcagtgagaaaaggcgaagggagcaggaggaggcagcggcccctcgagggccaccccaagtgacttccaaggccactaacccatttgaggatgacgaagaagaagaaccagctgttcctgaggtagaggaagagaaggtggacctctccatggaatggatccaggagttacctgaagacctggatgtctgcattgcgcagagagactttgaaggggcggttgacctgctggataaattgaaccattacctggaagataaacctagcccacctcctgtaaaagaactaagggccaaagtggaggagcgagttcgacagctcactgaggtgctagttttcgaactctccccagatcgttccctgagaggtggtccgaaggctactcgcagagcagtttcgcaactgatccggctgggccagtgcacgaaggcctgtgagctatttttgagaaacagggcagccgctgttcatactgcaattcgtcagcttcgcatcgaaggtgccactttactctatattcataagctgtgccatgtcttctttaccagccttctcgagactgcaagagaatttgagatcgattttgcaggcactgacagcggctgctactctgcctttgtggtctgggcaagatcagccatgggcatgttcgtggatgcttttagcaagcaggtgtttgatagtaaggagagcctctctacagcagctgagtgtgtaaaagtggctaaggagcattgccagcaactgggtgatatcggactggatctcaccttcatcatccatgcccttctggtgaaagacatccaaggggccttgcacagttacaaagaaatcatcattgaagccactaaacatcgcaactctgaagagatgtggaggaggatgaacttgatgacgccagaagccctgggtaagctcaaagaagagatgaaaagttgtggggtaagtaactttgagcagtacacaggggatgactgctgggtgaacctaagttacacagtggttgctttcaccaaacagaccatgggcttcttggaagaggccctgaagctgtatttcccagagctgcacatggtacttttggagagcctggtggaaatcattttggttgctgttcagcatgtggattatagtcttcgatgtgagcaggatccagagaagaaagcttttatcagacagaatgcatcctttttatatgaaacagtcctccgctgtggtggagaaaaggtttgaagaaggtgtggggaaacctgccaagcaactccaagatctgaggaatgcatctagacttattcgtgtgaatcctgaaagtacaacatcagtggtctaatgcttgggtctgtttatatgtgtatatatgcagagagagagagctttatattatttatatttatattaagttgtattagcatactctatagtttcaaacacaacttgaaaattaaaagtgccctcttaaaaatacaaaaaaaaa

SEQ ID NO: 90148 - DNA, 1705 bp, Homo sapiens; identical to SEQ ID NO: 75480

SEQ ID NO: 90149 - DNA, 4200 bp, Homo sapiens
cccacgcgtccgtctctctgtccctaggctgccccaggccctgtgcagacacaccaggccctcagccgcagcccatggacctgcgggtgggccagcggcccccagtggagcccccaccagagcccacattgctggccctgcagcgtccccagcgcctgcaccaccacctcttcctagcaggcctgcagcagcagcgctcggtggagcccatgagggtaaagatggagctccctgcatgtggggccaccttgagcttggtccccagcctccccgccttcagcatccctagacaccagtctcagtcctcaactccttgtccctttctgggctgccggccctgcccacagctctccatggacacgccgatgcccgagttgcaggaggctccccaggaacaagagctgcggcagcttctccacaaggacaagagcaagcgaagtgctgtagccagcagcgtggtcaagcagaagctagcggaggtgattctgaaaaaacagcaggcggccctagaaagaacagtccatcccaacagccccggcattccctacagaaccctggagcccctggagacggaaggagccacccgctccatgctcagcagctttttgcctcctgttcccagcctgcccagtgaccccccagagcacttccctctgcgcaagacagtctctgagcccaacctgaagctgcgctataagcccaagaagtccctggagcggaggaagaatccactgctccgaaaggagagtgcgccccccagcctccggcggcggcccgcagagaccctcggagactcctccccaagtagtagcagcacgcccgcatcaggatgcagctcccccaatgacagcgagcacggccccaatcccatcctgggctcggaggcgctcttgggccagcggctgcggctgcaggagacttctgtggccccgttcgccttgccgacagtgtccttgctgcccgcaatcactctggggctgcccgcccctgccagggctgacagtgaccgcaggacccatccgactctgggccctcgggggccaatcctggggagcccccacactcccctcttcctgccccatggcttggagcccgaggctgggggcaccttgccctctcgcctgcagcccattctcctcctggacccctcaggctctcatgccccgctgctgactgtgcccgggcttgggcccttgcccttccactttgcccagtccttaatgaccaccgagcggctctctgggtcaggcctccactggccactgagccggactcgctcagagcccctgccccccagtgccaccgctcccccaccgccgggccccatgcagccccgcctggagcagctcaaaactcacgtccaggtgatcaagaggtcagccaagccgagtgagaagccccggctgcggcagataccctcggctgaagacctggagacagatggcgggggaccgggccaggtggtggacgatggcctggagcacagggagctgggccatgggcagcctgaggccagaggccccgctcctctccagcagcaccctcaggtgttgctctgggaacagcagcgactggctgggcggctcccccggggcagcaccggggacactgtgctgcttcctctggcccagggtgggcaccggcctctgtcccgggctcagtcttccccagccgcacctgcctcactgtcagccccagagcctgccagccaggcccgagtcctctccagctcagagacccctgccaggaccctgcccttcaccacagggctgatctatgactcggtcatgctgaagcaccagtgctcctgcggtgacaacagcaggcacccggagcacgccggccgcatccagagcatctggtcccggctgcaggagcgggggctccggagccagtgtgagtgtctccgaggccggaaggcctccctggaagagctgcagtcagtccactctgagcggcacgtgctcctctacggcaccaacccgctcagccgcctcaaactggacaacgggaagctggcagggctcctggcacagcggatgtttgtgatgctgccctgtggtggggttggggtggacactgacaccatctggaatgagcttcattcctccaatgcagcccgctgggccgctggcagtgtcactgacctcgccttcaaagtggcttctcgtgagctaaagaatggtttcgctgtggtgcggcccccaggacaccatgcagatcattcaacagccatgggcttctgcttcttcaactcagtggccatcgcctgccggcagctgcaacagcagagcaaggccagcaagatcctcattgtagactgggacgtgcaccatggcaacggcacccagcaaaccttctaccaagaccccagtgtgctctacatctccctgcatcgccatgacgacggcaacttcttcccggggagtggggctgtggatgaggtaggggctggcagcggtgagggcttcaatgtcaatgtggcctgggctggaggtctggacccccccatgggggatcctgagtacctggctgctttcaggatagtcgtgatgcccatcgcccgagagttctctccagacctagtcctggtgtctgctggatttgatgctgctgagggtcacccggccccactgggtggctaccatgtttctgccaaatgttttggatacatgacgcagcaactgatgaacctggcaggaggcgcagtggtgctggccttggagggtggccatgacctcacagccatctgtgacgcctctgaggcctgtgtggctgctcttctgggtaacagggtggatcccctttcagaagaaggctggaaacagaaacccaacctcaatgccatccgctctctggaggcccgtgatccgggtgcacagtaaatactggggctgcatgcagcgcctggcctcctgtccagactcctgggtgcctagagtgccaggggctgacaaagaagaagtggaggcagtaaccgcactggcgtccctctctgtgggcatcctggctgaagataggccctcggagcagctggtggaggaggaagaacctatgaatctctaaggctctggaaccatctgcccgcccaccatgcccttgggaccgtggttctcttctaaacccctggcaatagcccccattcctgggtctttagagatcctgtgggcaagtagttggaaccagagaacagcctgcctgctttgacagttatcccagggagcgtgagaaaatccctgggtctagaatgggaactggagaggaccctgagaggagacgggctgggcggcgacccccacagggctctcgagaacagattctcccctccagtatgggccctggctgtggcccccattcctcaggactgcacagaggaggactggctccggctccgtcgggctcacccttaaccactattcctggctctgcaaaccccagactttgcacacagcctcaggctccacacagaaatgtgaacttggcctcagacaggctggcccttcctaggctctaggggctaggggggagtggggagccaagaggtcccatattcctgagtgcaggggtagtccctctcacctgcttcctcagacgactctggaagcttccctctaccactgggcactgagacgaagctccctgacagccgagactggcagccctccatctggtccgtaccctcgccagaggcccccctacatcaacctcctggcgatgccctggtggagcagatgggtgctctgggagtcctgtgcttcctgatccaatggtgccaaacccttcatctcccccagaagcgcagcatacccctggggacccctcggccacttgcccacttcggggaagcttctctgtttcctggggcctccccccaccatagctctgattccccacccccacataggaatagcctgactgagggggaaggggtgggagagaagatacagacatggaggaggggaggctgctctggcaaagtcttcaaggcttttgggggtccaggcctggggtcaagaaggaaaatgtgtgtgagcatgtgtgtgagtgaggcgtgtgtgtgagcgtgtgtgtgagtgaggcgtgtgtgtgtgtctttcctaggacccaccataccctgtgtatgtatgcatgtttttgtaaaaaggaagaaaatgaaaaaaaatctgaacaataaatgttttatttgctttaaaaaaaaaa

SEQ ID NO: 90150 - DNA, 1333 bp, Homo sapiens
  misc_feature (1)...(1333): n = a,t,c or g
tttcgtagaagatggcggcgctaggggaacccgtgcggctggagagagatatttgtagagcaattgaattattggaaaaactacaaaggagtggagaagtaccaccacagaaacttcaggctttgcaaagagtccttcaaagtgaattctgcaatgctgtgagagaggtatatgaacatgtctatgagactgtggacatcagtagcagtcctgaagtgagagcgaacgctactgcaaaggctactgttgctgcatttgctgccagtgaaggacattctcatcctcgagttgttgagctaccaaaaacagaggagggccttggattcaatattatgggaggcaaagaacaaaactctccaatctatatatcccgaataattccagtggaattgctgatagacatgggggcctcaaacgtggagatcaactcctctctgttaatggagtgagtgttgaaggagaacatcatgaaaaagctgtagaactgctgaaagccgcacaaggaaaggttaaattagtggtacgatacacacccaaagtcttagaagaaatggagtcgcgctttgaaaaaatgagatcagcaaaacgcaggcaacagacctaatacatttcaaaacttgatatttcattttgcgttttagctagagaagttttccttgtgacttactaatggctgcaatgccaatgattgtaagaaaacaaacaaatttatcatgaaattctccttgtcattttataaatgcctattttaacatcatttatggttccagagatgcatacacttttttctgacaagaaaaagtaaaaggtgatgagggcaattctgtcctactgtttttacaggcctttttcaaatgcaaattttgtcataaagttgttatagattttttaaaatgcttttttaatattaaaatgtacttttacattcttaatctttttttagaaaggaaaagttttcttcatttagctgctgatttaaaagtaaagttctccaattctttttttttgcttactctattttttttaacctgtgaaatttctttacagttttccaagaaattaagcataacagtctcatctacggcagttcattacactgtcaatgttaacatcattgctgcattttgtactttgaacacacacataatatatataaccagtggtaaatcatgactcagtacagtgcaagttttttcacttttacttaaacataatatataatggatattcatttatactgatttatgaaagtaagtttttaaacactgaaacaatcattgctaaaatacatattcttaatatttgagcattgaggnnagaggatgnaattgat

SEQ ID NO: 90151 - DNA, 501 bp, Homo sapiens
tttcgtgggggctgttcgtggaagctcttgaatgtcaagaggagactgatctgaatccacttaagcaaagaaagaaattcacaagcaacagcaggaaactccaccttccattccctcctcaggcctggcctcctggttctctgttggcccatgtactcctctgccaggcaaaatctgccagaccctcccgggggagcggagctccgagtaccagggccgactccgctcctgaggccgctgagccctcctgcacctgtccggcccgggaagtgccatgggacagctgatcgccaagttaatgagcatcttcgggaaccagggtaaggggcgcacagggcatccaagcgagcgctttgatctcgccctcttctgggactcctctgatctgtggtcggacgcacggggggacctcgggctccgagggtcgtatatgggcgctcctcgactgccccgcggcctcccctgcccccgtccctgcatgatcctcttgggccccggcgc

SEQ ID NO: 90152 - DNA, 2955 bp, Homo sapiens
gacgctgagaggcaggaggcactagggatcgtccgcaggattgggactgatacagaggccgccacggagcccgccggagccaccgttcctgctgctgccgccgctgcccgaatcggaaccgtcgggccgcagccgccggcaatgccgcgaaggaagaggaatgcaggcagtagttcagatggaaccgaagattccgatttttctacagatctcgagcacacagacagttcagaaagtgatggcacatcccgacgatctgctcgagtcacccgctcctcagccaggctaagccagagttctcaagattccagtcctgttcgaaatctgcagtcttttggcactgaggagccctgcttactctaccagaagagtgacccgtagtcagcagcagcctaccccagtgacaccgaaaaaataccctcttcggcagactcgttcatctggttcagaaactgagcaagtggttgatttttcagatagagaaactaaaaatacagctgatcatgatgagtcaccgcctcgaactccaactggaaatgcgccttcttctgagtctgacatagacatctccagccccaatgtatctcacgatgagagcattgccaaggacatgtccctgaaggactcaggcagtgatctctctcatccgccccaagcgccgtcgcttccatgaaagctacaacttcaatatgaagtgtcctacaccaggctgtaactctctaggacaccttacaggaaaacatgagagacatttctccatctcaggatgcccactgtatcataacctctcaagctgacgaatgcaaggtgagagcacagaacccgggataagcagatagaagaaaggatgctgtcttcacaggcaagatgacaacaacaggcattgcaaccaggcaccaggcaccaacggagaggcagcttcgatataaggaaaaagtggctgaactcaagaagaaaagaaattctggactgagcaaagaacagaaagagaaatatatggaacacagacagacctatgggaacacacgggaacctcttttagaaaacctgacaagcgagtatgacttggatcttttccgaagagcacaagcccgggcttcagaggatttggagaagttaaggctgcaaggccaaatcacagagggaagcaacatgattaaaacaattgcttttggccgctatgagcttgatacctggtatcattctccatatcctgaagaatatgcacggctgggacgtctctatatgtgtgaattctgtttaaaatatatgaagagccaaacgatactccgccggcacatggccaaatgtgtgtggaaacacccacctggtgatgagatatatcgcaaaggttcaatctctgtgtttgaagtggatggcaagaaaaacaagatctactgccaaaacctgtgcctgttggccaaactttttctggaccacaagacattatattatgatgtggagcccttcctgttctatgttatgacagaggcggacaacactggctgtcacctgattggatatttttctaaggaaaagaattcattcctcaactacaacgtctcctgtatccttactatgcctcagtacatgagacagggctatggcaagatgcttattgatttcagttatttgctttccaaagtcgaagaaaaagttggctccccagaacgtccactctcagatctggggcttataagctatcgcagttactggaaagaagtacttctccgctacctgcataattttcaaggcaaagagatttctatcaaagaaatcagtcaggagacggctgtgaatcctgtggacattgtcagcactctgcaagcccttcagatgctcaaatactggaagggaaaacacctagttttaaagagacaggacctgattgatgagtggatagccaaagaggccaaaaggtccaactccaataaaaccatggatcccagctgcttaaaatggacccctcccaagggcacttaaagtgacctgtcattccgagccagcgaaccccagcagtaggaatccgtaccctagggatctgtctgtcatttctctgttgctcttgtgattggcaagtacagtatcctttgggaaggccatccccctcaggactgtcctggctccgacctttgtgtacactgcagacgctggttctgaggaactgttgtttcggcctcagtgaggttgcctggatgggatctgtattagacttgagtgcaggtctctcagcactgacccaaggagttctgttatggtactgtacctgtccagtcactggttctctcctcatgtcctctcgccccatgaggttgtgttgtgtcttctaagcgtggtactagtgcttgccacctggtcaccagacctccaaatatggctgccaccaccaggacctttccagttactccttatatgtgtgttctatggaggggcagggaaaaggtggcacttgtgagtgtgtgtggattggcagggggtccattcactttgggttccatcttgctttaaatttcttcattttgattaagagacctctttttgatctgtattgggctaaccagagccaaatacttttgaagagtttcccagggactagtcatggtaatagcatataattgatctgaatgagatggagagaagaatgaaggggtggtggttctgggtttgatttgagttcacctgtgggcagtgggcagtgggcagtgtcttggtgaaagggaacggatactactttttgcctcaccgtaaagtactcactagtaaatatttccttctctctttactcccactttttacgtttgcaggtgccaaagtaatgtccacttttccctttcatgctgcatattaactggttaattatactgcagaaaccttttcacctccactagtctgatacagtacatctgtacttccatataccttgcactgattttgtctgagtgccctgggagaagt

SEQ ID NO: 90153 - DNA, 5349 bp, Homo sapiens
  misc_feature (1)...(5349): n = a,t,c or g
agacgattccagccccttccgtccgccgcgctccgccgctgtcctccgccggcccgcgtgggaggacgatgggtcagcgcggaaaaagtgaatgagggcggcagcggtggcggcggtagccagcgcctgactcggcgggcccggagcaccgcccgcgtcccggcccccggcaccatggacgcgccgcgcgcctcggcggccaagcccccgaccgggaggaagatgaaggctcgtgctcccccacctcctggaaaggctgccactctgcatgtgcacagtgaccagaagcccccccacgatggggccctcgggtcgcagcagaacttggttcgcatgaaggaggcgctgagggccagcaccatggacgtcaccgtggtcctgcctagtgggctggagaagaggagcgtgctcaatgggagccatgcgatgatggacctactggttgaactttgccttcagaaccacctgaatccatcccaccatgcccttgaaattcggtcttcagaaacccaacaacctttgagttttaagccaaatactttgattgggaccctgaatgtgcatactgtgtttctgaaagaaaaagttcctgaagagaaggttaagcctggtccccctaaggtgcctgagaaatctgtgcgtttggtcgtgaattacctgcggacacaaaaagctgttgtgcatgtgagccctgaggttcctctccagaatattctcccagtcatttgtgcaaagtgtgaggtcagcccagagcacgtggttctcctcagggacaacattgccggagaggagctggagctgtccaagtccctgaacgagctcgggataaaggagctctacgcgtgggacaacagaagagaaacctttaggaaatcatcacttggcaatgatgagacagataaagagaagaaaaaatttctgggatttttcaaagttaataaaagaagcaatagtaagggctgtttaacgacccccaactccccatccatgcactcacgttctcttacgctgggtccatccctctcgctgggcagcatctcaggggtgtccgtgaagtcggagatgaagaagcgccgagcccctcctcctccaggttcagggccacctgtgcaagacaaggcatcggaaaaggtatctcttgggtcacagattgatttacagaagaagaagcggcgagcgccagctccccctccaccacagccaccaccaccgagtcccctgatccccaaccgcactgaggataaggaggagaacaggaagagcacgatggtaagcctgcccctggggtctggcagccactgcagcccggatggagccccgcaggtgctgtcagaggcggaggagaccgtgtcagttggcagctgttttgcgtcggaggacacgaccgaggactcaggagtgatgagttccccctcagacatcgtctctctggactcgcagcaggacagcatgaaatacaaagacaagtgggccacagaccaggaagactgcagtgaccaggacctcgctggaaccccagacctgggtccccagaagagccccttgtgggagaagaatggctctgagaactcacatctgagaactgaaaaagctgtcacagcctcaaatgatgaagaagacctattaattgctggagagttccgtaaaacccttgcagaacttgatgaagacctggaagaaatggaagacagctatgaaacagacaccagctccctcaccagctccatccatggtgcatccaaccactgcccacaggatgccatgatccctcacggcgacacagatgcaatcccagtaacattcataggggaagtttcagatgatcctgtggattcggggttgttttccaatagaaacaacaatgctgggtctttcgactcggagggtgttgccagcaggagagcctccctggcgccacttcaagctgagcacagccagccccatgaaaaggcaagggaggaagtacctgccctgcaccccgcttcccatgacatcggaaaaggaatccgtgtggccttatctaacatctctaaagatgggaatctaatggaaacggcgcccaggagaaacataattttgcgttgaatcttcacacagacaacctaaatgcaaaagtgaaagacaaagtgtatggctgtgctgacggggagaggactcaagccacagagagagtgaattcccaaccggtgaatgaaaaggacagcaacgataaaaacgctgccttggcaccaacatcatggcaccaacgaggccaaaacccagggaaaagctacagacttaagcacggcctcacaacgtataaaatcattcctccaaagtcagagatgcgatgttacgacagagatgtgtccctctccaccggagccattaagattgacgagctggggaacttggtgagtcctcacgccaccggcatcaggatcatttccctgtcttcgtctgtgcctgaagcagaatctcagcccattgggaaagtcagagagttctggaggtgcaactctgtggaaaaacacctgggccgaccctcagagagctctgccaggggacccccctccacccctgtgcccacgcagacgcagaatccagagagcagactccaagcagaccccaagccaatatcgccccagcagaagtctgcccaccatgagggccggaaccccctaggggaggggagaaaccagccccccaccatgggcatgggtcacgtgagggtgccagcagctcacaccacagaagtcacatttctcaagcctcagagaagaacgtccagccagtatgtggcctctgccattgccaagcgcataggagccccaaaagtccatgctgatgtggtgaggccacacggttatgccgagaagggttatgcaggcaaggcgccagtgctggctgcaccacctgtcactgtgaaagatgacaggacatccagcccacactcagagacacaaggatggaaggatggtgcccagtggccctgtgtcactcctcccaacaaccacggggaagatttggcagggggagcccctcctaggggggaggtcattggcccacacaggaagttgtctactcaggacagacctgctgctatccacagaagctcctgtttctcactggttcagtcttcccagagggatcgtgtttctgtgggacagagctgtggtttcagtggaaagcaaagcacaagtagccaggaggccagctcagcatctgagcccagacgcgcacctgatggtacagacccaccccctccacacacatctgacactcaggcctgcagcagggagctggtcaatggctctgtgcgcgccccaggccacggcgagccttcccaccctccaggagggtctggcacagaaagccacattctcctagaaagagaggaaaagcccagtgtgttctctacagatggaaatgaaacagacagtatttggccacccagcatttttgggccgaagaaaaaattcaaacctgttgtccagagaccagtcccaaaagacacatccctgcactctgccctgatggaagccatccactctgcgggagggaaggacagactacgcaagacggcagaacacaccggggagggcaggccagcgaaactgtcctacacggaggcagagggcgaacgatctgcactgctggcagctatccgcgggcacagcggcacctgcagcctgaggaaggtggcatcctctgcttctgaggagctccagagcttccgagatgccgcactctctgcacagggctcggaaagtcctctgctagaagaccttggtcttctgtccccaccagccattcccccaccaccccctccaccctcccaggctctctctgcaccaaggacggcctccaggttcagcacgggcaccctcagcaacaccgcagacgcaaggcaagccttgatggacgccatccgctccggcacaggggctgcgagactgagaaaggtgcccttgctcgtgtgaatgaacagaggccagagaattgcagaaacccacctgtaatatgcccacaggcgtcactcaaggagtctgcatagccaggaacatcaagttttggtgttactttcttgtctacaggccaaaatgcgcacagttgtttttcggtgtgttcctgtataacggcttgaaaggaaaggagaagatgctgtgtcgctgccgcagcctcgtgtgccccaaggaaatgtgttttgccctctgaatatccttaagttgcctaataaacgattccttgttggcaggttaatggggactattaaatgctgggagcccagcacttcacacttaattatatttatgggggcaaagtaaaaaggaatcatgccttaggactgattttngggacctttgagacttttaccacatacagatggatgaaactacttactgatttaagatcttttgaattttagaaaaaacatatgaatcagatggaacaatctgaatgtgatatgctccatgatgctgtgtgttttggtagtaagaaaaaaaattgggaggcttttcaaaggtggctttgttaggtagtaaaactgctggattcttcttcctcaaatatttggggctaacacttcacagagggtcacagtccatgatctgaccaactaagcttttaaaaatcaactattaccacccagaaaacagtcctacgtgatcatgtggccagggcatgcccgagtcctgcaagggtggcgggtggctgaggtcacaccaccactggagtggatgggcagtgccccacatggacagccattccccaggctatgaagtgaccataggccctnccccccacggtgccctgtgtacggagccctgatgaccttcactgggagcccttcctggaatcctgcagagggtcaaggagcagggatgttggatgcccacctgtcaagagttcagatccaaagttgcgctgagagcgtcacaattttggttcagcccttgacgcgtttgtcccaacagctcattggctccctttggtnaggatatcgtggtcgttcgtcaacgatggtgcccagtcaccaatattttataatgaggtcctaacctacagcagttagttttttcatatatatcgtctaaaacattttgttatattggaaaaaaagtaataggaaatcaaggatgtgttgatgaaataaaatgtgtatctgagtgggaaaacaagtatggtgagggtcactttaatgtttcacagcgatctcagatctaggcctcaggtagaatggaagctgttctgcattcactgattaacgttgctaaactcttggtgaggcacgagctaccagccaattgctcttcatcacagctatctgtcttttagtgccgacaaataaaagaaaatcaaatctta

SEQ ID NO: 90154 - DNA, 2246 bp, Homo sapiens
gcttcggaccggacttcccgggtcgacgatttcgtgggggacccgaggaagagactggttcgccgcggggaccgggcagggctccccgtcggagtgcactgcgccggacacttcaagccctggagggacaggaaagccagaaatggacttcgtgagactcgctcgactgttcgccagggcccgccccatgggactgttcatcctgcaacacctggacccctgtagagccaggtgggcaggaggcagggaggggctgatgcggccaatgtgggcgcccttcagcagctcctcctctcagctgcccctcggccaggagcgtcaggaaaacacgggcagcctgggctctgacccgagccactccaactccacggccacgcaggaagaagacgaggaggaggaggagagttttgggaccctctctgacaaattactccttcccggagactattccgcaaaattccgcagcccagttccataacctgcggtttggggaacggagagatgagcaaatggaaccggagcccaaattatggcgaggccggagaaacaccccgtactggtacttcttgcagtgcaaacacctgatcaaggaagggaagctggttgaagccctggacctgtttgagaggcagatgctgaaggaggagcgattgcagcccatggagagcaactacacggtgctgattgggggctgcgggcgggttggctacctgaagaaggccttcaacctctacaaccagatgaaaaagcgggacctggagccctcggacgccacctacacggccctgttcaacgtctgtgccgagtccccctggaaggactcagctctacagagcgccctgaagctccggcagcagctgcaggccaaaaacttcgagctcaacttgaaaacataccacgcgctgctgaagatggctgccaagtgcgcagaccttaggatgtgcctcgatgtgttcaaggaaatcatccacaaagggcacgtggtcacagaggagaccttcagtttcctgctcatgggctgcatccaagacaagaagacaggcttccggtacgccctccaggtgtggcggctgatgctgagtctagggctacagccgagccgggacagctacaacctgctgttggtggcagctcgggactgtggcctaggggacccccaggtggcctcagagctgcttctgaagcccagggaggaggcgactgtgcttcagcccccagtgagcaggcagcggccaaggaggacagcccaggccaaggcaggcaacctcatgtcagccatgctgcatgtggaggccctggagaggcagctgtttctggaaccttctcaggcacttgggcctccagagcctccggaagccagagtgcccggcaaggcccaaccagaggtggatactaaggcagagcccagccacacagcagccctcaccgcagtggccctgaagccacctcccgtggagctggaagtcaacctcctgacccccggggccgttccccctacagtggtctcctttggaacggtgaccaccccagctgaccggctggccttgatagggggcctggagggcttcctgagcaagatggcagagcacaggcagcagcccgacatcaggaccctcacgctactggccgaggtggtggagtccgggagtcctgcagagtccttgctgctggccctcctggatgagcaccaggtagaggccgacctgacattctttaacacgctggtgagaaagaagagcaagctgggagacctggagggggccaaggcgctgttgccggtcctggcaaagaggggcctcgtccccaacctgcagacattctgcaacctggccatcgggtgccacaggccgaaggacggtctacagcttctcacagacatgaagaagtcccaggtgacccccaacactcacatctacagtgccctcatcaacgcggccatcaggaagctgaactacacctatctcatcagcatcttgaaggacatgaagcagaacagggtcccggtgaacgaagtggtcatccgccagctggagtttgcagcccagtaccctcccacctttgaccggtaccaagggaagaacacctacctggagaagattgacggcttccgagcctattacaagcagtggctgacagtgatgcccgcagaggaaaccccgcacccctggcagaagttccggaccaagccccagggggaccaggacaccggcaaggaggctgatgacggatgtgcccttgggggcagg

SEQ ID NO: 90155 - DNA, 3270 bp, Homo sapiens; identical to SEQ ID NO: 61112

SEQ ID NO: 90156 - DNA, 1418 bp, Homo sapiens
ttttttttttttcttttccattggtttatttgtatattggtccacaacacattgaagcctcacagttccaagaatttttttttttttcatatttgtggcaaactgaggtagagacaatgcttggcacagaataggtactagataaatattagtggaatgaacagccgaagcgactgacttctaaatggagcagattgctcatttcacttctgttcctccacctcaacaaacctttacatcctcactgggtttgtgagggccagaggacaggtgtgggccttgggtgtgatagggaaatgctaattttatacaacctgagggcatctgggtctcaccttttgacccccaaatgccctcaaaatgggattcaatgagccagggagggctttgaggaaggagggagccatttgcccttcctcctggccagaagagaatttgaatttgctttgagtagcttatgggcagggctggaaggtgcagttcatgactggtcagcagctttgaggctgatggaggcatggggaaggattaggggcctgggagaaagcattttatttccctgtaccccaccaccccaacatgggggagaaaaacacaacagcaaactgaacagagcagaggccgaggcagcaagaacccaaagacggaagctgcttctagcatcaggctccaggatgcaactgcggctctcagctctgccggctgagcttccagatcctgcgaagcaagtcaggttccttccttccctgccaggctggagtaaggaggctgttctaggcaggcagtctgcagctgctcaccaaggtctggaacaagctgccttccttctttgccgagcagatgtggatggcggtgggcctggctaatcaggggtgttctgctccggacaggctcatctagatttccatcctgccaaaagtttgtccttctctcaaacgattccgggaggagcgcaaactcggctcttggggagggcaggcgggccgggtacccttgaaggcgcaggcgcctgatacagagcaggccccggggaagcaggactcgggggcacggtcgccaaagtggggacccgagcagcgatccggagggagagcattcaggcgcccgggctgggggctacactgctggcgcgggatggcccaggacagagtgggcgctatagcgtgagtggccatcagggccgggcgggcccggggaactggagggagaggtccctgggtccctggcgacgtctctcgctttctccagtttctgccgtgctggcgtgccccagcccacaacattccctcgacctcttctggggcggcgctcaggccccccacatggcgaaaagggagggtgaagggatgaggcgcccctcccgccttagcccctcctcagcccccacgccacagcccccactttctccccagacgaaa

SEQ ID NO: 90157 - DNA, 3469 bp, Homo sapiens; identical to SEQ ID NO: 75259

SEQ ID NO: 90158 - DNA, 631 bp, Homo sapiens
ttttttttttttaacagtgttttgtagatttcagatgactatgcagaggcctgggggacccctggctctgggccgggcctggggctccgaaattccaaggcccagacttgcggggggtgggggggtatccagaattggttgtaaatactttgcatattgtctgattaaacacaaacagacctcagaatctgatcaacagtttattgaacatctactgtgtgctggaaagcgagatggggcggaatgcgagaacaaactaccccttgaggggtctttgggcagcactagtagctggagggcttcaggccaaggcaggggtgacatcagattggagacagctacggcagaatgtggctgtttgtgaacatctgcacctgtgttagggggtgagcacctgggagaaggacaaggcacatcacaggacttccctgagcatgacaagttcaggactcaaatgtccgtggtggatggtagcagtgacattggggagtgggtggggctgtcaagcctgcctagaggagatcacaaatacacgacgagaataccgttgtgtgtgctcttcgtgtgtttcctaggagtgcagggcaggggtgctgggtcgatccacaaaagccctgaaacgcttgagagg

SEQ ID NO: 90159 - DNA, 1631 bp, Homo sapiens; identical to SEQ ID NO: 61080

SEQ ID NO: 90160 - DNA, 3486 bp, Homo sapiens
cgcccagcagcccgtgggcaggcgcggcggagcgagcggggccggcggcgggcgccgagggacgccgaggcctcgggcgggggctggcccggggttccaggtctccagtgggggctgcagactaagcaaaatgaggcggttcctgaggccagggcatgaccctgtgcgggagaggctcaagcgggacctgttccagtttaacaagacggtggagcatggcttcccgcaccagcccagcgccctcggctacagcccgtccctgcgcatcctggccatcggcacccgttctggagccatcaagctctacggagccccaggcgtggagttcatggggctgcaccaggagaacaacgctgtgacgcagatccacctcctgcccggccagtgccagctggtcaccctgctggatgacaacagcctgcacctttggagcctgaaggtcaagggcggggcatcggagctgcaggaggatgagagcttcacactgcgtggacccccaggggctgcccccagtgccacacagatcaccgtggtcctgccacattcctcctgcgagctgctctacctgggcaccgagagtggcaacgtgtttgtggtgcagctgccagcttttcgtgcgctggaggaccggaccatcagctcggacgcggtgctgcagcggttgccagaggaggcccgccaccggcgtgtgttcgagatggtggaggcactgcaggagcaccctcgagaccccaaccagatcctgatcggctacagccgaggcctcgttgtcatctgggacctacagggcagccgcgtgctctaccacttcctcagcagccagcaactggagaacatctggtggcagcgggacggccgcctgctcgtcagctgtcactctgacggcagctactgccagtggcccgtgtccagcgaagcccagcaaccagagcccctccgcagcctcgtgccttacggtccctttccttgcaaagcgattaccagaatcctctggctgaccactaggcagggggttgcccttcaccatcttccagggtggcatgccacgggccagctacggggaccgccactgcatctcagtgatccacgatggccagcagacggccttcgacttcacctcccgtgtcatcggcttcactgtcctcacagaggcagaccctgcagccacctttgacgacccctatgccctggtggtgctggctgaggaggagctggtggtgattgacctgcagacagcaggctggccaccggtccagctgccctacctggcttctctgcactgttccgccatcacctgctctcaccacgtctccaacatcccgctgaagctgtgggagcggatcattgccgccggcagccggcagaacgcacacttctccaccatggagtggccaattgatggtggcaccagcctgaccccagccccaccccagagggacctgctgctcacagggcacgaggacggcacggtgcggttctgggatgcctcgggtgtctgcctgcggctgctctacaaactcagcactgtgcgcgtgttcctcaccgacacggaccccaacgagaacctcagtgcccagggcgaggacgagtggcccccactccgcaaggtgggctcctttgacccctacagtgatgacccccggctgggcatccagaagatcttcctctgcaagtacagcggctacctggctgtggcaggcacggcagggcaggtgctggtactggaactgaatgacgaggcagcggagcaggctgtggagcaggtggaggccgacctgctgcaggaccaagagggctaccgctggaaggggcacgagcgcctggcagcccgctcagggcccgtgcgctttgagcctggctttcagcccttcgtgttggtgcagtgtcagcccccggctgtggtcacctccttggccctgcactctgagtggcggctcgtggccttcggcaccagccatggctttggcctctttgaccaccagcagcggcggcaggtctttgttaagtgcacactgcaccccagtgaccagctggccttggagggcccactctcccgcgtcaagtccctcaagaagtccttgcgtcagtcattccgccggatgcgtcggagccgggtgtccagccggaagcggcacccggctggccccccaggagaggcacaggaggggagtgccaaggctgagcggccaggcctccagaacatggagctggcgcctgtgcagcgcaagatcgaggctcgctcggcagaggactccttcacaggcttcgtccggaccctgtactttgctgacacctacctgaaggacagctcccggcactgcccctcgctgtgggctggcaccaatgggggcaccatctatgccttctccctgcgtgtgcctcccgccgagcggagaatggatgagcctgtgcgggcagagcaggccaaggagatccagctgatgcaccgggcgccggtggtgggcatcctggtgctcgacggacacagcgtaccccttcccgagcccctcgaagtggcccatgatctgtcgaagagccctgacatgcagggaagccaccagctgctcgtcgtatcagaggagcagttcaaggtgttcacgctgcccaaggtgagtgccaagctgaagttgaagctgacggccctggagggctcaagagtgcggcgggtcagcgtggcccacttcggcagtcgtcgagccgaggactacggggagcaccacctggcagtccttaccaacctgggcgacatccaggtggtctcgctgcccctgctcaagccccaggtgcgctacagctgcatccgccgggaggacgtcagtggcatcgcctcctgcgtcttcaccaaatatggccaaggcttctacctgatctcaccctcggagtttgagcgcttctctctctccaccaagggggctggtggagccccggtgtctggtggattcagcagaaaccaagaaccaccgccctggtaacggtgcgggccccaagaaggccccgagccgagccaggaactcagggactcagagtgatggcgaggagaagcagcccggcctggtgatggagcgcgctctgctcagtgatgagagagcggcaactgggcgttcacatcgagccgccgtggggtgcagcctcagcaatggcggagcagagtgagtggctgagcgtccaggctgcgcgatgagcacacactactactgatggcctttcgggggtccctgccccaaccggagaggccggtgcacagggccccgccaggggctgggggcatcccggcttccacaatgcagctgctctgggcctcgggagaggagagaccccagtcccctgggctgcccttcccgggcctcgtctgtctgggtcctttggtcaatgttgcacagtttttattgctcccatccctttttgtagtgggctgggttttaagttataaatgttaactgcctctgggtgaaaaagtttttaataaacacctattacctcttgaaa

SEQ ID NO: 90161 - DNA, 3060 bp, Homo sapiens; identical to SEQ ID NO: 60710

SEQ ID NO: 90162 - DNA, 2491 bp, Homo sapiens; identical to SEQ ID NO: 61075

SEQ ID NO: 90163 - DNA, 1626 bp, Homo sapiens; identical to SEQ ID NO: 89742

SEQ ID NO: 90164 - DNA, 424 bp, Homo sapiens
gatcagtgcagtacctgccgggaagacccacgcgtacgcacgcctccacggacgcacctctcatgctgaagtttacacccttgccctccaagacgaaagcttctgcaccggtgcagtgcctgctgctcatggcagccactttcagccctcagggacttgctaagccacattcaggtaccattccaatcacactgctgctttaacgcgatcaacacgaaaattcctatccagaggctggagagctacacaagaatcaccaacatccaatgtcccaaggaagctgtgatgtgagtggacagtgcctggcacccccattcaaaagttctgatggacaacatagagaagtcaagattcatgtccatatgagtcggatgcatataacttttatcccaagggcccctctttcccatagagaaactcagtc

SEQ ID NO: 90165 - DNA, 435 bp, Homo sapiens
  misc_feature (1)...(435): n = a,t,c or g
gacaccgctctgcaggaattcggcacgagcttctctcctgtcaacacccggccatgctcccaactacaagatgctcgaggaggagcatgaactggctatgctgggggcgccccacaagcctgctcccccgatgtccaccgagatccacatacgcagcgagacctccgtgcctgaccatgtggcctgggccctgttcaacaacctcttcatgagcacctgctgcctgggcttcatagcattcgcgtactccgtgaagactagggacaggaatgatggtgggcgacgtgaccggggcccaagcctatgcctccaccgccaagtgcctgaacatctgggccctgattttgggcatcttcatgaccattctgctcatcatcatcccagngatggtcgtccaggcccagcgatagatcacgaggcatcattgagggccgg

SEQ ID NO: 90166 - DNA, 1752 bp, Homo sapiens
tccctggctcgcctcgcgcctgccggcggatccgtggtcatgccaacccagcagccggctgcgccgagtactcgtgcccccaaaccctcccggagtctctctggctcactttgtgccctgttttctgatgcagactcgggatccgggatgaaggcggagcttccccctgggcctggggcagtggggagggaaatgaccaaagaagaaaagctgcagcttcggaaggaaaagaaacagcagaagaagaaacggaaggaagaaaagggggcagaaccagagactggctctgctgtatctgcagcccaatgtcaaggcccaaccagagaactgccagaatcgggcattcagttgggcactcctcgggagaaagttccagctggtcggagtaaggccgaacttcgggctgagcgtcgagccaagcaggaggccgagcgggccctgaaacaggcaagaaaaggggaacaaggaggaccacctcctaaggccagccccagcacagctggagaaaccccctcaggagtgaagcgtctccctgagtaccctcaggttgatgacctacttctgagaaggcttgttaaaaaaccagagcgtcaacaggttcctacacgaaaggattatggatccaaagtcagtctcttctctcacctaccccagtacagcagacaaaactctctgacccagtttatgagcatcccatcctctgtgatccacccagccatggtgcgactcggcctgcagtactcccagggcctggtcagaggctccaatgcccggtgtattgccctgcttcgtgccttgcagcaggtgattcaggattacacaacaccgcctaatgaagaactctccagggatctagtgaataaactaaaaccctacatgagcttcctgactcagtgccgtcccctgtcagcgagcatgcacaacgccatcaagttccttaacaaggaaatcaccagtgtgggcagttccaagcgggaagaggaggccaagtcagaacttcgagcagccattgatcggtatgtgcaagagaagattgtgctagcagctcaggcaatttcacgctttgcttaccagaagatcagtaatggagatgtgatcctggtatatggatgctcatctctggtatcacgaattcttcaggaggcttggacagagggccggcggtttcgggtggtagtggtggacagccggccatggctggaaggaaggcacacactacgttctctagtccatgctggtgtcccagcctcctacctgctgattcctgcagcctcctatgtgctcccagaggtttccaaggtgctattgggagctcatgcactcttggcccaatgggtctgttgatgtcacgggtatgggacatgcacatgttatgccctggtggctcgatgcccaataaatgttaccaagtgctggtttgcctgtgaaacatacaaagttctgtgagcgtgtgcatgactgattgccttttgtctctaaatgaagctagatgaccctgatgatctgcaaagtaagcggggagaacaaggttgcgctggctaactggcagaaccacgcattccctacggttgttgaatctaagtctatgatgtgactcccccaagagctttgttggatctggtgatcacggagctggggatgatccctttgcagttctgtacctgttgttctacgagtcaagagcagtgaccagtgacgggggaaacacagggttaataaatgccatactccctaccctcagcaaaaaaaaaa

SEQ ID NO: 90167 - DNA, 2208 bp, Homo sapiens
cgctgtgtctgcccggtctctcctggggtctccggttctgccgcctcctgtccctccttccggctgccccggccagaggggctcgaaggcgcgttggggcccggggccacgctgggagacacgccttcggccgcgcctaattcgagccaggcgcgggacgcgtcccccggccgggcggagcgggaggggacgcccgccgcgctcggcctccccgggccccgacccctcctttgtaatttgaataaaacgcctcccccgcccgcgcgccgccttaacccgccgcctccgctctccccggctgcaggcggcgtgcaggaccagcggcggccgtgcaggcggaggacttcggcgcggctcctcctgggtgtgaccccgggcgcgcccgccgcgcgacgatgagggcgcggccgcaggtctgcgaggcgctgctcttcgccctggcgctccagaaccgcgtgtgctatggcatcaagtggctggcgctgtccaagacaccatcggccctggcactgaaccagacgcaacactgcaagcagctggagggtctggtgtctgcacaggtgcagctgtgccgcagcaacctggagctcatgcacacggtggtgcacgccgcccgcgaggtcatgaaggcctgtcgccgggcctttgccgacatgcgctggaactgctcctccattgagctcgcccccaactatttgcttgacctggagagagggacccgggagtcggccttcgtgtatgcccttgtcggccgccgccatcagccacgccatcgcccgggcctgcacctccggcgacctgcccggctgctcctgcggccacgtcccaggtgagccacccgggcccgggaaccgctgggggagatgtgcggacaacctcagctacgggctcctcatgggggccaagttttccgatgctcctatgaaggtgaaaaaaacaggatcccaagccaataaactgatgcgtctacacaacagtgaagtggggagacaggctctgcgcgcctctctggaaatgaagtgtaagtgccatggggtgtctggctcctgctccatccgcacctgctggaaggggctgcaggagctgcaggatgtggctgctgacctcaagacccgatacctatcggccaccaaggtagtgcaccgacccatgggcacccgcaagcacctggtgcccaaggacctggatatccggcctgtgaaggactcggaactcgtctatctgcagagctcacctgacttctgcatgaagaatgagaaggtgggctcccacgggacacaagacaggcagtgcaacaagacttccaacggaagcgacagctgcgaccttatgtgctgcgggcgtggctacaacccctacacagaccgcgtggtcgagcggtgccactgtaagtaccactggtgttgctacgtcacctgccgcaggtgtgagcgtaccgtggagcgctatgtctgcaagtgaggccctgccctccgccccacgcaggagcgaggactctgctcaaggaccctcagcaactggggccaggggcctggagacactccatggagctctgcttgtgaattccagatgccaggcatgggaggcggcttgtgctttgccttcacttggaagccaccaggaacagaaggtctggccaccctggaaggagggcaggacatcaaaggaaaccgacaagattaaaaataacttggcagcctgaggctctggagtgcccacaggctggtgtaaggagcggggcttgggatcggtgagactgatacagacttgacctttcagggccacagagaccagcctccgggaaggggtctgcccgccttcttcagaatgttctgcgggaccccctggcccaccctggggtctgagcctgctgggcccaccacatggaatcactagcttcgggttgtaaatgttttcttttgttttttgctttttcttcctttgggatgtggaagctacagaaatatttataaaacatagctttttctttggggtggcacttctcaattcctctttatatattttatatatataaatatatatgtatatatataatgatctctattttaaaactagctttttaagcagctgtatgaaataaatgctgagtgagccccagcccgcccctgcagttcccggcctcgtcaagtgaactcggcagaccctggggctggcagagggagctctccagtttccaggcaaaaaaaa

SEQ ID NO: 90168 - DNA, 2142 bp, Homo sapiens
  misc_feature (1)...(2142): n = a,t,c or g
ctgctgctcacctccccgggtgaaactctgacgcagtcaccgcgggtctcggcagcgtcatagcggcgggcatcccatctgcacgtcacacctctttctcacctggacacgcatcccttcctaccctgccagccacgacgtttcctctttcccctctccaatgccccagccccagatctggcggaagaagatggagaacgggggtgggacagagttgtggacaacctctcatgagagggtcgcaaggtgggaccctgaacagtggtagaaacaaaatgagattgtccctgaagtttgcccttcagctgagacacaaggagtagaggaagaggaaggactaacgcagaggcactcaaggtctcactatgactgtagttgagagtcctctcccttcttccctaaccctttccccatttctctcaccacttctttgccagtctagatccgtcctggtgccttactgtgcatacagttctactcgtctcagattcctttcttgtctgttagaaacgtatgtcaaacgaggatacagtgtctggaactattggttctaagatataagtggaatgagcctggatcaggagaagtatgctgagctagagttgaaggaagcttctctttctaacaagagaaagcagagttaaattatggcagagacaagtctgttagaggctggggcctctgcagcctctacagctgcggctttggagaacttacaggtggaggcgagctgctctgtgtgcctggagtatctgaaggaacctgtcatcattgagtgtgggcacaacttctgcaaagcttgcatcacccgctggtgggaggacctagagagggacttcccttgtcctgtctgtcgaaagacatcccgctaccgcagtctccgacctaatcggcaactaggcagtatggtggaaattgccaagcagctccaggccgtcaagcggaagatccgggatgagagcctctgccccccaacaccatgaggccctcagccttttctgttatgaggaccaggaggctgtatgcttgatatgtgcaatttcccacacccaccgggctcacaccgttgtgccactggacgatgctacacaggagtacaaggaaaaactgcagaagtgtttggaagcccctgaaccagaagctgcaggagatcactcgctgcaagtcctctgaggagaagaagcctggtgagctcaagagactagtggaaagtcgccgacagcagatcttgagggagtttgaagagcttcataggcggctggatgaagagcagcaggtgttgctttcacgactggaagaagaggaacaggacattctgcagcgactccgagaaaatgctgctcaccttggggacaagcgccgggacctggcccacttggctgccgaggtggagggcaagtgcttacagtcaggcttcgagatgcttaaggttcgacctttgcccctgcatagcccctcaggctgagtgcagcgtagctttgcgtagcctgggatttgtcagcctgggatactcattcttctgctctccttctctaaatccagttctttctgccaggtgtactcaaagggtctttgctacggaaaagtgatttctcccatccccttctaaccatttttgtgttcttatctctggtcagcaattatgtgcttaatctgttccaaagaaaagattcattcttttgaaaggagggaagtctagcctgagttagtgaaaaactatgcattaaaaattttgtaaatgcagttaccattacttttaagtcctgaaatttgatttatgtactgctgaaaaaggacagaaacatagtttaaaggatannnnnnnnnnnnnnnnnnnnnnnnnnnnnnnnnnnnnnnnnnnnnnnnnnnnnnnnnnnnttgatccgaaaaccttgaacaacgagatggtgacttcctaaatcatannnnnnnnnnnnnnnnnnnnnntgttagtatnnnnnnnnnnnnnnnnnnnnnnnnnnnnnnnnnnnnnnnnnnnnnnnnnnnnnnnnnnnnnnnnnnnnnnnnnnnnnnnnnnnnnnnnnnnnnnnnnnnnnnnnnnnnnnnnnnnnnnnnnnnnnnnnnnnnnnnnnnnnnnnnnnnnnnnnnnnnnnnnnnnnnncttgaaaacccacatgtatt

SEQ ID NO: 90169 - DNA, 1330 bp, Homo sapiens
agcccatggtgcgccatgaggcaggggaggccctgggggccatcggggacccggaagttctggagatcctaaagcagtattcctcggaccccgtcatcgaggtggccgagacctgccagctggccgtgcgcaggctggagtggctgcagcagcacggcggggagccggcggcgggaccctacctctccgtggaccctgccccgccggctgaggagcgtgagcgtggggcgcctgcgggaggcgctgctggatgagtcccggccgctcttcgagcgataccgcgccatgttcgccctgcgcaacgcgggaggcgaggaggccgccctggcgctggccgagggtctgcactgtgggagcgccctcttccgccacgaggtcggctacgtcctgggacagctgcagcacgaggcggcggtgccccagctggcggccgccctggcccgatgcaccgagaaccccatggtgcggcacgagtgcgcggaggccctgggcgccattgcccggcccgcctgcctggccgcgctgcaggctcacgcggacgacccagagcgcgtggtgcgggaaaagctgcaaggtggctctggacatgtatgagcacgagaccgggcgggccttccagtacgcggacggcctggagcagctgcgcggggccccctccttagggcccaaccctcacccggagctcccggaggactcttgagggccgctcctcccccgcagagctttggcgtctaaaccggggtgtgtgtaaatcggtgtcatcgcttgtgtcttgctgggcgcatggttgctgtccccctcctccgtctgggaccggagaagctgccggtgggctgtgactccttgagtcccctgactgctcctcggggcctggcgcagggctgtagcgtggaagtttccaggcttggggtgggactctgcgggaggctctgggatgcccggctcaggacaggggaggattgcgagggaagccaggggaggatcgcgagggaagccaggggaggatcgcgagggaagccaggggaggatcgcgagggaagccaggggaggatcgcgagggaagccaagggaggatcgcgaggggagccaggggaggatcgcgagggaagccaggggcagagctggggctctgggaagaggctgacgttatggtggcttcagcttcactaggaatgggacacagggtctgggggcctctgactcccccaccccgaggcctgggtagggacagggtggtggtccctgagtgggtcaggtagggcacaggggccagggagggacaagcagacctcagagcgctgcccagatggaatattaaattatttttgcc

SEQ ID NO: 90170 - DNA, 2078 bp, Homo sapiens; identical to SEQ ID NO: 60684

SEQ ID NO: 90171 - DNA, 7834 bp, Homo sapiens
  misc_feature (1)...(7834): n = a,t,c or g
gaatgctggattcattctgcaatatcctggtctcgagaaagcatgggattatggcaaccacagaatctcagtagtacaagttccattcagttttttctgaaagaaagccctctgttaaagtgaagcaaagaaactgttgtggattataacgtttagaagttccaatttttcagtgctttacaaataaagcatcatttaaccttttaaatgaaaaagattaagatctcatgccactgttgtattttctggaagccattctccaaaagggaagtgcacatttaaaacacagatatgatggtccttgctgcagggatttaagtctacttgcttttacatcatgaccagcttgaaacggtcacagacagaaaggcctcttgccactgacagggcctctgttgttggcacagacggcacccccaaagtccacactgatgatttctacatgcggcgcttccggtcccaaaatggcagcttaggatcatcagttatggctcctgtaggacccccccgaagtgaaggttctcaccatataacctcaacccccggagtcccaaaaatgggggtaagggcaaggattgcagattggcccccaagaaaggaaaacataaaagaatctagccgttcaagccaggaaatagaaacctcaagttgccttgatagcctgtcctccaaaagcagtcctgtgagtcagggaagttctgttagcctcaattccaatgactcagccatgctgaaaagcatacagaacacgctgaaaaacaagacaagaccgtcggagaacatggactccagatttctcatgcctgaagcctaccccagctcccccagaaaagctcttcgcagaatacgccagcgaagcaacagtgatatcaccataagtgaacttgatgtggatagctttgatgaatgtatctcacctacatacaagactggaccatcactgcacagggaatatggtagcacatcttcaattgataaacagggaacatctggagaaagcttttttgatttgttaaagggctacaaagatgacaaatctgatcgaggtccaactccaaccaagctcagtgactttctcattactggtggtggcaagggttctggtttctctttggatgtaatagacgggcctatctcacagagagagaacctcaggctttttaaggaaagggaaaaaccactcaagcgacgttcaaaatctgaaactggagactcatctatttttcgtaaattgcgcaatgccaaaggtgaagaacttgggaagtcatcagatcttgaagataaccgatcagaagactctgtcaggccctggacatgtccaaagtgctttgcccactatgatgtccagagtatattatttgatttgaatgaggcaattatgaacaggcacaatgttattaagaggagaaacaccaccactggagcttccgcagctgccgtggcatccttggtctctggacctctgtctcattcagccagttttagctccccaatgggcagcacagaggacctgaattccaaaggaagcctcagcatggaccagggagatgataaaagcaatgagcttgtaatgagctgtccatattttcggaatgagataggtggagaaggggagaggaaaatcagcctttcaaaatcaaattctggctcctttagtggatgtgaaagtgcctcctttgagtctacccttagttcccattgcacaaatgcaggagtggcagtacttgaagtgcccaaggagaacttggtgttgcacctagatagagtgaaaagatacatcgtggaacacgtagatctgggtgcatactattatagaaaatttttctaccagaaggaacactggaactattttggggctgatgagaatcttggtccagtggctgtgagcattcgaagggaaaaaccagatgaaatgaaagaaaatggatctccgtacaactaccgaataatttttagaactagtgagctcatgacactgagaggttcggtcctggaggacgccattccgtcgacagccaagcactcgacagccagaggcctgcctctcaaagaagtgctggagcacgtggttcctgagctcaatgtccagtgcctgcggttggccttcaacacacccaaggtcacagagcagctcatgaaactggatgaacaagggctgaactaccagcagaaagtaggcatcatgtactgcaaagctggacagagcactgaagaagagatgtacaacaatgagtcagctggcccagcctttgaagaatttcttcaactattgggagagcgagttcggctcaaaggatttgagaagtatcgagcacagcttgataccaaaactgactccactggaacccattctctgtacacaacatacaaagattatgaaattatgttccatgtttctaccatgctgccatacacacccaacaacaaacaacagctcctgaggaagcggcacattggaaatgatatcgtaacaattgttttccaagagcctggagcacagccattcagcccaaaaaacatccgatcccacttccagcacgttttcgtcatcgtcagggtgcacaatccgtgctctgacagtgtctgttatagtgtggctgttaccaggtccagagatgtgccttcctttgggcctcccattcctaaaggggtcactttccctaagtcaaatgtgttcagggacttccttttggcgaaagtgattaatgcagaaaatgctgctcataaatcggagaagtttcgggccatggcaactcggacccgccaggaatacctgaaagatctggcagaaaagaatgtcaccaacacccctatcgacccttctggcaagtttccgttcatctctctggcttccaagaagaaggaaaagtctaagccatatccaggagccgagctcagcagcatgggggccattgtatgggcagtccgggctgaagactacaacaaggccatggaactagactgccttttagggatctccaatgagttcattgtgctcattgaacaggaaacaaagagcgtggtcttcaattgttcctgtagagatgtgatagggtggacttcaactgacaccagcctcaaaatcttctatgaacgaggagaatgtgtttcagtgggtagttttattaacattgaggagatcaaagagattgtcaaaaggttgcagtttgtttcaaaaggctgtgaatcggtggagatgactctgcgaagaaatgggctaggacagcttggcttccatgtcaactatgagggcattgtggcggatgtggagccctacggttatgcctggcaggcagggctgaggcagggcagtcgcctggtggagatctgcaaggtggcggtagccactctgagccatgagcagatgatcgacctcctgagaacatctgtcacggtgaaggttgtcatcattcccccgcatgatgactgcaccccgcggaggagttgctctgaaacctaccgcatgccagtgatggagtacaaaatgaatgaaggtgtttcatacgaattcaagtttcccttccgaaataataacaagtggcagaggaacgccagcaaggggcctcattcacctcaagtcccgtcccaggtgcagagtcccatgacctcgcggctgaatgctggaaaaggagatgggaagatgcctcctccagaaagagccgccaacatccctcgaagcatctccagtgacgggcgcccactagagaggcggctgtctcctggttcggacatctatgtgacggtctcatccatggctttagcaagatcccagtgtcggaactctcctagcaacttgtcttcatccagtgatactggttctgtggggggcacttacaggcagaagtccatgcccgaagggtttggagtgagccgtagatccccagcctccattgacaggcagaacacccagtcagatattggtggcagcggaaaatccacgcctagctggcaaagaagtgaggatagcattgctgaccagatggcttacagttatagaggacctcaggatttcaattcttttgtcctcgagcagcatgaatatacagagccaacatgccatctcccagcagtatcaaaggtactgccagctttccgagagagccccagtgggagattaatgcggcaggatccagtggttcatttgtctccaaacaaacaagggcattctgatagccactactcgagccactccagtagcaatactctctccagcaatgcgtcaagtgcccatagtgatgagaagtggtacgatggggaccgcacagaatccgaactcaacagctataactatctgcaaggcacctctgctgacagtggcattgacaccacctcttatggccccagccacggcagcacagcctcgctgggggctgccacatcgtcacctcgctcagggccaggcaaggagaaagtggcacccctatggcacagctccagtgaagtaatctccatggcagatcggactttggagacagagagccacggcctggaccggaaaacagagtcttccctgagcttagacatacacagcaagagccaagccggctcgacccctctgacaagggagaacagcaccttcagtataaacgatgctgcttcccacacaagtaccatgagctcccgacactctgccagcccagtggttttcaccagtgcccggagttcacctaaagaagagcttcatccagctgccccctcacagctcgcaccatccttctcctcctcttcctcctcctcctctggtcctaggagtttttaccctcgccagggcgctactagcaagtacctgattggatggaaaaaacccgaaggaaccataaactccgtgggatttatggacacgagaaagcgtcatcagagcgatggcaatgaaatagcccacaccaggctgcgtgcctcaaccagagacctccgggcatctcctaagccaacctccaagtccaccattgaagaagatctaaagaaactaattgatcttgaaagcccaactcctgaatcacagaagagttttaagttccacgcactctcctctcctcagtctcctttccccagcacccccacctcacggcgggccttgcacagaacactgtcggacgagagcatttacaatagccagagggagcactttttcacctccagggcgtcacttctggaccaagccctgcccaacgacgtcctcttcagtagcacgtacccttctctccccaagtcgctcccgttgaggaggccttcttacaccttaggaatgaaatcgctgcatggagagttctcagcctcggacagctccctcactgacatccaggagacccgcaggcagcctatgcccgaccctggcctgatgcccctgcctgacactgctgcagacttggattggtccaacctggtagatgctgccaaagcctatgaggtccagagagcctcattttttgctgctagtgatgaaaaccatcgccccttgagtgctgcatccaacagtgatcagctggaggaccaggctctggcccagatgaagccttacagcagcagtaaagactcctctcccactctggcttctaaagtggaccagctggaaggtatgctgaagatgcttcgggaagatttgaagaaggaaaaagaagacaaaggctcaccttccaggcggaggtgcagcaccctggncgaaggacaaccctgaggctaacaggaggagtccccagaacgccctcggacaagctggaagaagttcacagaatgggtccttcaacaccataagacatgagcctaggcaacgccgaggagcgacaggagaagggcccagacactccctccagcgagtgtcctgcaagcccttattccctccatagaaagcatcctcagagcaccttccctggcttcctactctgccccctttcggggagtgcacaacacaatagttgcagatcaacaatcatcacctgccttttgtagaaaaaaaaaacaaaaaaagtaaataaaaattttaaacagtaaaaaaaaagtttaactgctaaaatgtgaatgtctttatttttttgcacaatatctttatctgttatgtatttaagaagaaactgggccttggaccagggcgccccctggcccatccgcctctattcccatcagctttcttatcaacttcaggtaacccaagctttcccttgttattctaacaaatatcattattcctagaaaaagaatgtttttataacttgtttggggagtagagagggatatttccttaccttcttccctaaaatgcctggagagggagttgctttgagaaaatgcctacctcccttgaatgactcgtgcatgagctagtgctgtctgtacctgtcctccagagatcagcaggaccggagttaaatatttaacagcaagtctgtaaaccagagcagctctgacagtgcctgcaggccacaccccttctcagtcctgcattgtgaggtcatttcctgcttctccctttccccaggaagatggtcccacttgtgctgcaagactcttttttgtttggcttaattgagccccactaaattggaatcaatctctcttacagcttcctggctccaaacattaattgatttcagaattcccccaaactaaaaccttatctgtctgcattttgaatgcattttggtcaaaagtatacgttttaaagatttttaaagataaaaatgtggcacaactggtttttttagcttgctgaaaatgaccatatctctaaattaatctttctctccagagcaagacttcaccagtatttgtaactaggagaagctaacagtgaatgtttaattgtgaattttaatcattgcttgttaggaataatgactgtgatactagaatgggcttttgaaacctgcatgtcccagtgtgaaatttcagcacggcattttctgcatcctttcatggccatccaaaggattccgctgcagaaattattgatgtgctatttttgctgtcttgtgatgcaggctgctttgggcccctgggtcactcttccaaggctgctgtagagcacagagacatggggctggccagtgttgactgacctgaggagacccctttgtttgttgccttcataactgtcactaaaccgacccctctgccctttcagtggcaactctggtctaagggaacattcagcactctagcggcatctgattggaagttcccttcacccaagtaatctcaattccttcctctctccatccctgaaagaaacaggatggattttcctctcttctccctgctacattcactacccagaatttttatgcctacagtttccaatccttgattgtgaattcctcccatggaattttttttttctggtgacatttctatcatggaaataggaagatttccggagtgcctttgtgaagatttcaattgtcctgtctctttcctctctttgacttgtatgaaggagattgtacattgccctgatatcctctttgtaaatgagaaatattgcctaacatcccaagcattctgaagtcttgcttatccttctgagtttagttctcattttgttttacattttgtttggggacttgggggcaagctatttattagagttttgcaacagagttcttgtttgaagcctctaaagactaccttgtaaaattcaaagaataaaattcattttaaacgctcttttaaaacactttggtattattgcttgaggtttgcttatttgaaagaccacccaataactcattgaccctccttgcatccgaattttttcatcaagctttgttaacactaatgatgattcttgaaaatttctgtccttctcagaatgttaataaacttttttactctgtccaca

SEQ ID NO: 90172 - DNA, 508 bp, Homo sapiens
  misc_feature (1)...(508): n = a,t,c or g
atcacctattccagagaggcgaattcctcatcanagctcccaacacccctgagctgctgaaagcaaaacctcctctcctgactcaccagggagctcctttcttgcctgccttccagggcgctatgcggctgcccctcctacccagctcctgcctcccggagctctccacctcattcccccaaggtgggggtctcctcagccatcccctccaggatggacaactcggtctctcaccaagcctcaagcaccaccccaacaccatatgtaccatgtgcctctcccaagcaatgcgctcaccccgggtggggcctctgcactatcacatcgacgacagatccccagcctttcagcctggcctggacaccctggagtctgcctgcctcttctctcgaacacaccacacactcaaccccctcactactgcacagccatctttactctctaccctagtctccttttccagctccgagcccagcagccagagtgatcctctcacagccccggcacn

SEQ ID NO: 90173 - DNA, 5632 bp, Homo sapiens
gttaaatcaccacagagaccttcagattggtccaaaaagaagaatgagcccctagggaaattgacttctttatttaaacttattgtgaaagtgatctattctttccacacactgagcttcaaggaagcacattctgataccctcttcactattggcaactcaatcaccagcattatttccagtgtacttgggcatatttctttgccttctatgatccgaaaaatatttgcaactttaacaagacctctggcattattttatgaaaactcaaagcttgatgaagttcctaaacgtatatacgttgtctgaacaacaagttagaaaagctactgggagaaattattgcttgtctgcaattcagctacaccggaacttatgatagtgaacttcttgaacaactctccccactattatgcataatatttctgcacaagaataaacagattcgaaaacagagtgctcagttctggaatgccacttttgccaaagtgatgatgttggtttatcctgaagagttaaaaccagtactaacacaagccaaacaaaaatttctgctcctgttgcctggtttggaaactgttgaaatgatggaggaatccagtggaccatattctgatggactgaaacttgaatcttcgtctttaaaagtaaagggtgaaattcttttggaagaggaaaagtctactgactttgtgtttatacctccagaaggaaaagatgcaaaggaaagaatattaactgatcatcaaaaagaagttctcaaaacaaagcggtttgaggagcaaatggacagtgacattgtcattcctcaagatgtcacggaagactgtggtatggctgaacatcttgaaaagtcctccctttcgaataatgagtgtggttctcttgacaaaaccagtccagaaatgtcaaacagtaataatgatgaaagaaaaaaagctttaatttcatcaaggaaaacatcaactgaatgtgcatctagtacagaaaattctttcgttgtcagcagtagttcagtttctaataccactgttgctggaactcccccataccctacaagtcggaggcaaacctttattactttggagaagtttgatggttcagaaaatagaccttttagtccatcccccttgaataatatttcatcaactgttacagtgaaaaataaccaggaaaccatgattaaaacagattttctaccaaaagcaaagcaaagagaagggactttttcaaaatctgattctgaaaaaatagtgaatggaactaagagatcaagccggagagctggtaaagctgaacaaacagggaataaaaggtctaagcccttaatgagatctgagccggagaaaaatactgaggaatctgttgaaggcattgtagtcttagaaaataacccacctggtttgcttaatcaaacagaatgtgtgtcagataatcaggttcatctttctgaatctacaatggagcatgacaatacaaagcttaaagcagcaacagtggaaaatgctgtattattggaaactaatactgtagaggagaaaaatgtagaaattaatttggaatccaaagagaatacacccccagtagtaatatcagcagatcaaatggtaaatgaggatagtcaggttcagataactccaaatcagaaaacccttagacggtcttcaaggcgacgttcagaagtagtagagtctaccactgaaagccaagataaggaaaatagtcatcaaaaaaaggaacgacgtaaggaagaagaaaaacctcttcagaagagtccattgcatataaaagatgatgtgttacctaaacaaaaactgattgctgaacaaactctacaggagaatttaattgagaaaggaagtaatttacatgagaagactcttggggaaactagtgctaatgcagaaactgaacaaaataaaaaaaaggcagaccctgagaacattaagtctgagggggatggtacccaggacattgtagataagtcctctgagaaactagtcagaggccgaacacggtatcaaactagaagagcatctcagggtttgctttccagcattgaaaactcagaatctgatagttcggaggcaaaagaagaaggttctaggaagaagagatctggaaaatggaaaaacaaaagcaatgaaagtgttgacattcaagatcaagaagagaaagtggtgaaacaggaatgtataaaagctgaaaatcagtcacatgattataaagcaacttctgaagaagatgtaagcataaaatctccgatttgcgaaaaacaagatgaaagtaatactgtaatatgtcaggattctacagtaacttcagatttgttgcaagttcctgatgatttaccaaatgtgtgtgaggaaaaaaatgaaactagcaaatatgcagaatattcctttacaagtctacctgtgccagaatcaaatctaaggactagaaatgccattaagagattacataagcgagactcttttgataattgtagtttgggagaatcctcaaaaatagggatatcagatatttcttcgctttcagaaaaaacttttcaaacacttgaatgccaacacaagagaagtaggagggtgaggagatctaaaggttgtgattgctgtggggaaaaatcacaacctcaggaaaagtcactcattgggttaaagaatacagaaaataatgacgtagagattagtgaaacaaaaaaggcagatgtgcaagcacctgtaagcccatcagaaacttctcaagctaatccatattctgaaggacaatttttagatgaacatcatagtgtgaattttcatttgggtctcaaagaggataatgatactattaatgattcattaattgtttctgaaaccaaatcaaaagaaaacactatgcaagaatctcttccttctggaatagtaaactttagagaggaaatttgtgatatggattctagtgaagcaatgtctcttgaaagccaggagtcacctaatgaaaattttaaaactgttggcccgtgtttaggagactcgaaaaatgtttcacaggaatctttggagacaaaagaagaaaaaccagaagaaaccccaaaaatggaactgagtctagagaatgttactgttgaaggaaatgcatgtaaagtaacagaatccaatctagagaaagcaaaaactatggaattgaatgtaggaaatgaagctagctttgcatggacaagagagaaccaaaactggtatttctgaagaagcagcaatagaagaaaataaaagaaatgatgactctgaagcagacacagctaaactgaatgccaaagaagtagcaactgaggaatttaattcagatattagtctttctgataatactacacctgtaaaattgaatgctcaaactgagatttctgaacaaacagcagctggggaactagatggaggaaatgatgtatctgatctacactcatctgaagaaacgaataccaaaatgaaaaattatgaagaaatgatgatcggcgaggcaatggctgaaactggccatgatggtgaaacagagaatgagggcataactaccaaaacctcaaagcctgatgaagctgaaacaaacatgttgactgcagaaatggacaactttgtttgtgacacagttgaaatgagcactgaagaaggaatcattgacgctaataaaactgaaacaaatactgagtatagtaaatctgaagaaaaattagataacaatcaaatggtaatggaaagtgatattttacaggaagatcaccatacttcacagaaagtggaggaaccatcacagtgtctggcatctggaacagctatctctgagctaataatagaagacaataatgcatctcctcaaaaactaagggaacttgatccttcacttgtgtcagcaaatgacagtcctagtggcatgcagacacgctgtgtctggtctcctttggcttctccgtctacgagcattttaaagagaggactaaaaagatcccaagaagatgaaatctcatcacctgttaataaggttcgccgtgtctcctttgcagatccaatataccaagcaggattggcagatgacattgatagacggtgctctattgttaggtcccattcttccaatagttctcccatagggaaaaagtgttaaaacttctcctactacacaatctaagtcagttgacctctgtgtaacagcttctgaaatttattctaagatttcagaaatggccaaagaatccataccatgcccaacagaaagtgtttacccaccattggtgaactgtgtggcaccagttgacatcattttacctcagattacatcaaacatgtgggcaagaggcctgggacaactcattagagctaagaatataaaaactattggtgatttgagtactcttacagcatctgaaataaaaactcttcctatccgttctccaaaagtgtccaatgtaaaaaaggctctcagaatatatcatgagcagcaggtgaagactcgtggactagaagagattccagtttttgatatttctgaaaaaacagtaaatggaatagaaaataaatctttgtcacctgatgaagaaagacttgtctcagatataattgatcctgttgctttagaaattccattatccaaaaaccttctggcacagattagtgctcttgctcttcagctggattcagaagatcttcataattattcaggaagccaactatttgaaatgcacgagaaactaagttgtatggcaaactctgtaataaaaaatctacagtcacgttggagatcaccatcccatgaaaattctatttagtattttcagagaaaattgaaggtttttttaaacatcactggatttcttgattgaggaaacaagttctgaaataatagcacaatttcaaagaagagactctttgcaaagttgataacatttcaaaccctgaaggacagtgacttattatgtaagttcaatgttgtaagttcattatgtaagatccttttttttttcataatatgtattcttggctgctatgcgtggtttttcaggaaatttaattatcttactgagatgtgaaagcaaaactagtaacagaacttacattttatttcatgctttcttaaacccgtgcatattctggtgaaacatgtaaaatactttaagtaaaattgaacatttttatttgaatttttgctgaactgataaaggtgtttatatttttgtttgttggtttgtttaattcatgtttgttgggactgaggtttaggaagtttgttactggttaaaaacctcaaatgaaatgcgaaagaatttgaatttttcctgcatatgtcaactttggacagctttcaagaaaaatgagaaaagtttcaacttctggcggttaaaatattaatgcagaatttactaagattttattcatatgcattagcaaatattcatgcagcagcagttgactgaaaatttattcttatgagacgtatagtattcatttttaaatgcatgattgtacattatgtatagacgacaatgtttttaatttataaatttcattctttgttaattgcatgggtttttctgcagcttattgtgaataccttggttctgttcaatagaaacattttgtatatattgaatactgaaatatca

SEQ ID NO: 90174 - DNA, 3860 bp, Homo sapiens
ggctgggtgcgatcgcccggctgtttggcatgttcccaccgggagtgccgggcaggagcatggggtgcttggttgtttccttcctaataaaataaacgcgggtcgccaaaaaaaaaaaatctgttttcgtgaaagagctgaccctgtgctgcctcccactctcccaatgcccctgccactcctgtgagcctgctgctggtgaggtcggtgctgacctctgtgttgctggataatgagtcatctatctctggaggagaaatggacagtttattactcacagtgaacacagcagccagaacagtatctttagtcactttcccatgcccctattcccaagaagagggcatgtggatcgtaccagctgggcaggcagtgggtctgcatcccaggagagggacccgaaactgggagacttggagattttatcagggctgtggaggacctgcctttcttctcctccagagatagatgactcattatccagcaacacagaggtcagcaccgacctcaccagcagcaggctcacaggagtggcaggggcattgggagagtgggaggcagcacagggtcagctctttcacgaaaacagagaaacggggcagctctagagtgggagtaggggcacagagaacaggaaggaaaggcggccggcgaaggtatgatatcacaccagctcccactgtgggcacccaaacccaagcctcctgggaaagtctgggaactgttaaaaatccacacctcagcatcaccctgccaaggggtggggtggggtatgtacacatccccatcattccttgattgaaggctgcaggagagtggagttcatgccaaggcacttgagatcgaccatggatgcagccaggcagaggcagaggaaggccagccctatcccagagaagggcaggacaggggtggacatggggcccagggcactgtggcagtgcatacagggacctgggcaggcacagtgtcagtcagaggtccagagacctgaaagtgagaggggcgggacccttgaggttcagggaaagagcatcttatactttttccattttgcagtgacttggagatttgtccacaccagtgcacagagacgtgtcctccttttatttcttttaacagccgcttaatgttttatcctagcaggaaccctaccatgggccatttaaagtgtttcaaatcttagggggctgagcctggtggctcacacctgtaatctcagcactttgggaggctgaggcaggaggattgcttgaggttgggagttcaagaccagtctgggcaacatggcaaaaactcatttcttaaaaaaaaaaaaaattaaacctgtagtcccagctacttggcaggctgtgtgaacagcaaggggtcagtctggttgggagtctgtctggcgggggtctggctggggtctgcctagataggtcctgatttgctgggggtccatctgtctgaatagctggagatgtgtactcatttgggggacttgtctgtcaatctggaggatcatgtctgactagctggggtccatccatcaagacatcaagatgagagtctggccggctggctgggatgtcaggattccatgtggctgatgtctgcctgtctggcagtccatctggttggttaggagtctgtctggccagaaggtctgtcagccagccagcccacctgagggtgggggtggggtctgagaactctgtgtatctgttcagcaggggatctgtttatatctgtctagtaatctaactaacttagggggtccacctggctgtccagctagcagagatgtctgtcttttgggggctctgtttggtggtctctctggctgcactggtctatcaagctgttggctggtctctctctctctggctggggatccctttgtccacctgtggactgtatctctgaagctttggctgtctgtccaggttggtggtccatctgtctgtctgcctatctggaggtctttttatcggtctgcctggggttaatctgcttggctgtggttatgcctggcttagttctgcctggatggcgaagtgtccatccacttctctgtgtggtcccctgagtgtccaagtgagggaggctcaggtgctgaggatggactagtgctgtgtggtgaggagagcagtctccggaagctcatctgtcccttctccccttcataactcaggggtcatgccccttcctgatcttctttcttgaatctgctctgtgcagcctcaccagccactataccctagctacctcctccagcctcaagccttgaatgctacagtcattgggcaaagcccccacatttcccaccctgagaaactttaactttgatccaggcccactgtttccattctcggcacggcgctcagcagcaccggggcatcagcagtccgagctcacaagaggcaacaggcaggaactggcgttagacttacaccctgggtccactcagcaggcgggtcccggggacccttcggcctcccaatgcgcaggttgaaacctagcccaccggtctgagctccacccgccacgtcctcgtaggcgccagatccggcaggactttggtcagcaggaacgcggccaggcagcgtccccctcgcgtcctccgcgtgcgccccgggtcgctgggcgcgcggcgtcaccttgctgtagagcggcgcctcctccgcgctgcgcgccccgtccccgtccccgtccccgtcttcgtcccactcccggcgcccgctggagccccgcgcttctgcaccaccgcgtaggtgtcagccatggcgtggcccggggacccgggcacagagatgctcctgaggacccctcctggtgggcggggtatggcgagaagtgcctggggagtccggaggaagagggcatcgtcgtagagtggggcacaattctctttgatgttctggtagtgggggctggcattctggagtgtggagcagaacatctgagccaccgtgtggtacaggaacctgtactgctcctctgtctgcacggccgcaggccgctgcttcctcatcttaaggaccacatcaaagagactgaagtcaggtgggatcatctgggtcaggagcagctgcctcacataatccacggtgcacaggacgcctgttcgcccacaacccgcactgcagtggacacagaggggttcagggccagatccctggaggcgacgggcttcctccaccatggcgagcatgtggtcaggactgctggggaccccacggtctggccaggacatatactgtagctggtacacagaacgggactccttctggaatgtgaccttgagggtcctgagcatgatgtcctcattcagccacttctcctttatcagagtgatgcagaaaagcccagtctgcagtggctcctgctcctgggcccagtaccgctcacaccttttccgcccattctctatctctcgacaggccatcaggatcaccttgaccccaaactcccagaccagtctccagaagtctagcagggtgtgaggcaagggtccttgcgtggcaatgtaggccaggcttccatccacgccccggatgaagttgccattaatgtagtcgctgtgtccctcttcctggagcagggaaaggattactcgcgtctgatcataaggcagcacgtctttgtagcggttcttcctcacgttctctggccgactgccggccacggtggagcacacgccgtcagccttccaggcggccgagcaggcctggatgtcgctgaactcgccggcgaggactgccccctcccggccgccccgcgcttccagccgctccaggaagctccgcgccgagtccaggctgcggctcatggcgccgcgggccagcaaggtccagcccgctcgtgccgaattc

SEQ ID NO: 90175 - DNA, 1601 bp, Homo sapiens
  misc_feature (1)...(1601): n = a,t,c or g
ttttttttttttaaggagcaaaaggctttattgataaatatgcagatatgtctgtccacagggacctgctgtggaggccatgaccaggctgcagacctcccactgcctgggttacagccaggacatggccctgtgcagaccctgccacgacagcccagccgtccaccacccgcctcatctctgccaattgtgctgggggcagggagaggcagaggcccgcctcaggcttcccaagccctggggctcacgggtggttccctcccttccaagggagtggcactgtgcccaggggagagccaggggatgggggcagaggagggagacagcagctgcttcagaccctgagcagaaaaccagagtgagcacagctggcagcaccagatgacagatctgggctccaggggcctcctggttggcccttgtggctcgaacctgcttcgggagacaggcagggtgagggccctgttcgccttttctctgacaaggttgcaaggcccgtgtgtggctgcctgctccctgggtaccgggaactggtggcgcgtagtgccctgaaaggcagggtcccttcacggctcacccaccagccacaccgaggggagggcccctgaagaaaatgacagcactggaaggcagcagcagggtgggggcctagtgctccaggcggggcctcttcccaggggtccgtgggcccatcagtcctggggtggtgggggctggttgatgatgacctggatgacaaaatctttctggatcttggtctcctggagccgtgtgcggtctgtgagcagcttcccggagaagaaccaccgctgccacgatggcttcggagtncctcctgggcgtgcagctgcctcttgagctgccccactgtgtcgggcaggctggcgctgagcctcacgtccttgcccgtggacaggcgcaccttcagcgggaactcacggcgcacgctgggtggaggctcggggggctccaggctctcctcctccgtgtgctccagcagcaggttcaccggcggtgacaggcagtagatgggcagctggtagcgattgcccagctcatcgtagcattcacagagggtgccatgaggcagggtgatgctggctccatccaggatggcctgggccagctcgtggtcgttggcttcagcagcataggcggcagccttgagggcatcccagatctccttgcggccctcgaaggcaggcgctgtgtcccagaactcatcccgtttgctccgcagctgcccgtcagtcatggggtagtcgctcttccacttaagccgctctttcttcaggggctcattgcgtcctgggcaggacagaaggagaggctcagcatctctaaagccacttgagctgcaacctgccctccccctcccctcccctccccaggccagaccctgaaaccctgctgcactggctactaagtattcaggtctttgaagcccttcctaaatagcagggaagagtcagaaagcttcacatagccaacctaggcacataaaataattgtgtcagcaaagcatacaataccaaagnnnnnnnnnnnnnnnnnnnnnnnnnnnnnnnnnnnnnnnnnnnnngaattccaccacgctggtc

SEQ ID NO: 90176 - DNA, 6282 bp, Homo sapiens
ccggtcgacgatttcgtggagcatctcaggaaaggggtccccggactctggggctctcagcacctgcggtcgcaaaccaacctcatgccctgactttaccaggcgtcgggactctgacttaaccggggaatgagggacttggtctggcggcagatcacaatgaggacctagggcatctgtctgctgacgccccctggcctgcagtgaccatggccccccgcaagaggagccaccatggcctgggcttcctgtgctgcttcgggggcagtgacatccccgaaatcaacctccgggacaaccaccctctgcagttcatggagttctccagccccatcccgaacgcagaggagctcaacatccgctttgcagagctggtggatgaattggatctcactgacaaaaaccgagaggctatgtttgcactgccccctgagaagaaatggcagatctactgcagcaagaagaaggagcaggaggaccccaacaagctggcaaccagctggcctgactattacatcgaccgcatcaattccatggctgcgatgcagagtctgtacgcgtttgatgaggaggagacggagatgaggaaccaagtcgtggaagacctgaagacagccctccggacacagcctatgaggtttgtgacccgcttcattgagctggagggcttgacctgtctgctaaatttcctccggagcatggaccacgccacctgtgagagccgcatccacacctcactcattggctgcatcatagcattgatgaacaactcccaggggcgggcacatgtgctggcacagcctgaggccattagtaccatagcccagagcctacgcacagagaacagtaagaccaaggtggctgtgctggagatcctgggtgctgtgtgcctcgtgcctgggggccacaagaaggtgctgcaggccatgctgcactaccaggtgtatgcagcagagcgaacccgcttccagaccctgctgaacgagctagaccgaagtctgggccggtaccgggatgaagtgaatctgaaaacagccatcatgtccttcatcaatgctgtcctcaatgctggagctggagaggataatctggagttccgcctacatctacggtatgaattcctgatgctgggtatacagcctgtgattgacaagctccggcaacatgaaaatgccatcctggacaaacatttagacttcttcgagatggtgcggaatgaggatgacctggagctagccaggaggtttgacatggtccacatcgacaccaagagtgcttcccagatgtttgagttgatccacaagaagctgaagtacacggaggcctacccctgcctgctctctgtgctgcaccactgcctgcagatgccctacaaacggaacggtggctacttccagcagtggcagctcctggaccgcatcctccagcagattgtcctccaggatgagcggggtgtggaccctgacctggctcccttggagaacttcaatgtcaagaacatcgtcaacatgctcatcaacgagaatgaagtgaaacagtggcgagaccaggcagagaagttccggaaagaacacatggagcttgtgagccgtctggagaggaaggagcgggaatgcgagacaaagacattggagaaggaagagatgatgcggacgcctgaacaaaatgaaggacaagctggcccgggagtcccaggagctgcgccaggctcggggacaagtggcagagctggtagcccagctcagtgaactctcaacaggccctgtatcttccccaccaccccctgggggcccactcaccttgtcttcctcaatgacaaccaatgacctgcctccaccccctcctcctctgccctttgcctgttgtccccctcccccaccaccaccccttcctcccgggggacccccgactcccccaggtgccccaccttgcctcggcatgggcctgcccctccctcaggacccctaccccagcagtgacgtcccactcaggaaaaagcgtgtcccccagccttctcacccactgaagtccttcaactgggtgaagctgaatgaggagcgtgtccctggcaccgtatggaatgagattgatgacatgcaggtatttcggatcctggacctagaggattttgaaaaaatgttttcagcctaccagaggcaccaggagctgataactaatccttctcagcagaaagagctgggctccactgaagacatatacctggcttcccgcaaggtcaaagagctgtcggtcattgatggccggagggcccaaaactgcatcatccttctttccaagttgaagctttctaacgaggagatccggcaggccatcttgaagatggatgagcaggaggaccttgctaaggacatgctggagcagctcctcaagttcatcccagagaagagtgacattgacctcctggaggagcacaagcatgaaattgagcggatggcccgtgctgaccgcttcctctatgaaatgagcaggattgaccactaccagcagcgactgcaagccctcttcttcaagaagaaattccaggagcggctggctgaggcaaagcccaaagtggaagccatcctgttggcctcccgggagctggtccgcagcaagcgtcttagacagatgctagaggtcatcctagccataggcaacttcatgaacaaagggcagcgtgggggcgcctacgggttccgggtggccagcctcaacaagatcgctgacaccaagtccagcatcgacagaaacatctctctgctccattacctgatcatgatcctggagaagcattttcctgatattctaaacatgccttcagagctgcaacatcttccagaagccgccaaagtcaacctagcagaactggagaaggaggtgggcaacctcaggaggggcctgagagcggtggaggtggagctggagtatcagaggcgccaggtacgggagcccagtgacaagtttgtccctgtcatgagcgacttcatcacggtgtccagcttcagcttctccgagctggaggaccagctaaatgaggccagggacaagttcgccaaggccttgatgcacttcggggagcatgacagcaagatgcagccagacgaattctttggcatctttgataccttcttgcaggccttctcagaggcccggcaggatctagaggccatgaggaggaggaaggaggaggaggagcggcgggcgcgcatggaagccatgctgaaggagcagagggaacgtgagcggtggcagcggcagcggaaggtcctggctgcaggcagctcgctggaggagggaggagagttcgatgacctggtgtcggccctgcgctctggggaggtcttcgacaaggacttatgcaagctcaagcgcagccgcaagcgatcagggagccaggccctggaagttacccgggagcgggcaataaaccggctaaattattgacctggggaactagccacacaggaggccgggagacagggactggtgagaatggggctgagtggaggaggtggtgatatttaaaccatttggtgcttggtttagagccttgggctgggtcctgggatggggggctgtgtgtggctggaccaggtgtctccccacgcttaccttaaggggctcctcttatctccccttcacacgattccttctgtgccctggccccaggtattattctgaggctgccttggatggcctcaggccaggtaaccccaggctgaaggggccctgctccccatcccctaccatgggcacccatgtgctggcacagaacagttccagatctagactggagaggtccacagccttgtccagagttcctgtgtagcacggggagcaatgatggagggagcccctgagagggaatctggtgagggaatccaaactcccttctctcaaggggaggctcaacagaacattgacctgggggcaaactttcctcttgaatgggaacagaggaggcattatatattctagttagatcagctctggtaggttccagagaacagtcaatgttggaaggatgatgcagggaccaaagccatcaggacagagtagcagtgtctgtttcccatgtcacaagtcctctggcctctccctgcatgtcttaagtatctttcccttccttctctaccctcacctccatcctgtctactaatccacagtcctagaagactcaccttgggtttccacagctatggctcactaccaggtgcttgatgaatctggcgaggggctcaagacagacctcatgcatcaccacacctcatgccttttgggcatctcccatgtccccatctcctggacacctggccattgttgtgaagccagacagtgacctcaaatgttgccttggagtcccctacagcccctcagcagagggcagcacttgaatgcttagctccatcccatagttctctacttcatataaattgctcaggccctcccaccccttctctaacactagcttcaaggcagaagccacagcagcctctgtccagcctgcaggtggccacttggaaccatgtgtccactggcgttggggagttggttcctgagaggtctgagggccagagctgccctctacattaacatgctgtctctaagggtggcccctcctctcaggcgttcagatggtgcgaacagcagagcaggcaagggaaactggggagatggggatggagagaggaaggctgatatcctctggggagcacataacctgaaggtgccaaggaggaaggctgagaggggggccaccccatttctggtacccaatttggttcttcagcccaacttgcaaggggttccttctggtcctcccatccactgccaccttccattttgtccatctcatgctggccttggtggatgggatggctgtatctagacaaaatttttctaaaactccatcaaggctcttattcaataccacgttccgagttggcctttcatcttctttgagactggccctgcctaacctctaccatcaatgagctcttggcccttctgcccttccctgtgtttctcactttccaacctaatccctggctcagggttattgccagtggagactggtgagctgggcctactctcagctgcctatcttctgcctttcacttgcatccaactcctggggctgggaccgtagtagctgcgggggggaagaaacacagggtcggtgagcccagcatgtgcgttggtttgagggggcgggcggtgtgtgtgtgttctggtgggagggatctgagcaagtgcaagcctggctgacacaggtgtgaagaggccatcctggaacccaggtgagggcaagatgaaggcttccaggcagaacagctgcagagagtttggctatatgcatctgcagccccaagagctcccactgcaagacaagtgttggggaagatgggaggttgtgggtgaggcctctaaaggtcctctcccaaactgaccaggctgatgtcaacctaaccccctcaggggcagggaacaggggagggctccacaagcgtgtctggcattcccacccaccatggaagactggatacgcacctggaaacaaaaggactatggaagctgttcaagatacatttgatcttcagaaaagcagaatttggttcaactgttgacagaggacacaaatacgttgttccagagctcagccttctcactctaaaagaaagatatttttctatttattttctacatctggccagtggctctggtgctagatgccactgtagccagatctccaacagtgccttggaccatggactcatactcaactgagtaagaaggggctggtgcccagtcggggtggctgagctggtccttaataggttgtttcttggtcttgctttcttcatgccctccccactgctcctgccacctttagataagtttctctagctaattttgtggccaatgtaaaattcgtcatcaacctaacaaacacaaccttctcagcagcatttctcccctgtgatggaaataaagtgtttagggcagtgggaggagaaaattctccaggtgaatggggaagggtctgttccagcctctccctactcccatcccatttccaccaactggggaactgtgactatctatctcccccgacttctaccagggatgccttcacgccaaggctgttctcaccagctgcctcagatgacaaatgaggctaatggacataatctacagtgtcctttttcacttgcaccttttttataagaatatattgtaatactaaaaaatattaaattcataccatccctaaaaaaaaaa

SEQ ID NO: 90177 - DNA, 430 bp, Homo sapiens
aggtccttagtccagtgcggtggaattcgttcatggtgtccagtgaagaccagctgtggctgggttgctgggatggttctcctctgatgaccattatgatcaccactgctgttcctaccattattatcagttccattattactattattaatattactattattactaggattattaccactgatatcggtattactactacaaccaccacttaccactattactgttactgccgctatcgttattactaccgttactattattactactgatgttactactacttctactattgctatctgtttagacgaggcagaagagcttggccttccatgcatggacagccacctcccatgcctaatgacagctctgggctctgggagcaagaactcaactaaagccctacacttggtggctgagtcccagcctg

SEQ ID NO: 90178 - DNA, 1315 bp, Homo sapiens
tcataaagccctttctactcccagcactctcttcaaagtattcttcacttctgagttcctaagactacagataaggggattgagcatgggattaaagaggctgtgaaacagcaggagatatttcttctgctccttggggttcccatatctgggtccaacatacatgataatggctgtgccataaaagagtccaatcacacagaggtgggagaagcaggtgcagaaggctttcctctgaacttcccttgattggatctgaaggatagcacagaggatgcacatatatgaaactacaattgtggacaagggtcccaccagcccagaaattgctccggccaagaccatgttctcattgatgtgggtatctgcacaggcaagtttgagaacagccaagatttcacaaaaaaagtgataaattttctggggcctacagaagggtaaaggtagaagtaacacaagatgaatcaaggataaaaggactccagtggtccaggaagtcaccgcgagggtgatgcagactctccaggtcatgatggccaaatatcggagggggtggcagatggcccacgtacagatcataggacatcaccaccaggaggagacattctgtgacagcaaaagtggaaaacagaaaggtctgcatcatgcggcccgcaaaggagatgggcttggctggatgcaggaggttcaccagcatccggggcaccgtgttgcaggcgtaggcgatgtcgacgaccgcccaggtgtgagaggaagaagtacatgggggcgtgcagtctggagtccagtgagatgagccccagtatggtcccgttccccagcagggtgaagacgtagaacagggagaagagcccaaagaggagcatctgaatccttgggccaacgggaaatcccagtaggaggaactctgtgatggatgttatattgtcccccatatccctatgacagaggaaatcaagttaatgctcatggtttaggagaagtgtttaaaaacagattcattttaacttgttcggcactctttggtgaagtagaaaagtgttcagacagctgcagtgagtttttgtgtttttaaatgaatgcttcaagacaatttggtaacgctaaaataaatgtttaaaaaatatatgcaggccgggtgcggtagctcacgcctgtaatcccagcactttgggaggccgaggcgggcggattgcctgagcttcaggaggttgagaccatcctggctaacacagtgaaactcccgtctccactaaagcacaaaaaatttagccggcgtgggcgcatgcgcctgtatcccagctacctgggattc

SEQ ID NO: 90179 - DNA, 5254 bp, Homo sapiens
ggtgactcaggaggacccctggtctgcgaggagccctctggccggttctttctggctggcatcgtgagctggggaatcgggtgtgcggaagcccggcgtccaggggtctatgcccgagtcaccaggctacgtgactggatcctggaggccaccaccaaagccagcatgcctctggcccccaccatggctcctgcccctgccgcccccagcacagcctggcccaccagtcctgagagccctgtggtcagcacccccaccaaatcgatgcaggccctcagtaccgtgcctcttgactgggtcaccgttcctaagctacaagaatgtggggccaggcctgcaatggagaagcccacccgggtcgtgggcgggttcggagctgcctccggggaggtgccctggcaggtcagcctgaaggaagggtcccggcacttctgcggagcaactgtggtgggggaccgctggctgctgtctgccgcccactgcttcaaccacacgaaggtggagcaggttcgggcccacctgggcactgcgtccctcctgggcctgggcgggagcccggtgaagatcgggctgcggcgggtagtgctgcaccccctctacaaccctggcatcctggacttcgacctggctgtcctggagctggccagccccctggccttcaacaaatacatccagcctgtctgcctgcccctggccatccagaagttccctgtgggccggaagtgcatgatctccggatggggaaatacgcaggaaggaaatgccaccaagcccgagctcctgcagaaggcgtccgtgggcatcatagaccagaaaacctgtagtgtgctctacaacttctccctcacagaccgcatgatctgcgcaggcttcctggaaggcaaagtcgactcctgccaggtgagtggcatcaaggcgctgtacgagtcggagctggccgatgcccggagagtcctggatgagacggctcgagagcgtgcccggctgcagatagagattgggaagctgagggcagagttggacgaggtcaacaagagcgccaagaagagggagggcgagcttacggtggcccagggccgtgtgaaggacctggagtccctgttccaccggagcgaggtggagctggcagctgccctcagcgacaagcgcggcctggagagtgacgtggctgagctgcgggcccagctggccaaggccgaggacggtcatgcagtggccaaaaagcagctggagaaggagacgctgatgcgtgtggacctggagaaccgctgccagagcctgcaggaggagctggacttccggaagagtgtgttcgaggaggaggtgcgggagacgcggcggcggcacgagcggcgcctggtggaggtggacagcagccggcagcaggagtacgacttcaagatggcacaggcgctggaggagctgcggagccagcacgacgagcaagtgcggctctacaagctggagctggagcagacctaccaggccaagctggacagcgccaagctgagctctgaccagaacgacaaggcggccagtgcggctcgcgaggagctgaaggaggcccgcatgcgcctggagtccctcagctaccagctctccggcctccagaagcaggccagtgccgctgaagatcgcattcgggagctggaggaggccatggccggggagcgggacaagttccggaagatgctggacgccaaggagcaggagatgacggagatgcgggacgtgatgcagcagcagctggccgagtaccaggagctgctggacgtgaagctggccctggacatggagatcaacgcctaccggaagctcctggagggcgaggaggagaggctgaagctgtcccccagcccatcctcgcgcgtcaccgtctcacgagccacctcgagcagcagcggcagcttgtccgccaccgggcgcctgggccgcagtaagcggaagcggctggaggtggaggagcccttgggcagcggcccaagcgtcctgggcacgggcacgggtggcagcggtggcttccacctggcccagcaggcctcggcctcgggcagcgtcagcatcgaggagatcgacctggagggcaagtttgtgcagctcaagaacaactcggacaaggatcagtctctggggaactggagaatcaagaggcaggtcttggagggggaggagatcgcctacaagttcacgcccaagtacatcctgcgcgccggccagatggtcacggtgtgggcagctggtgcgggggtggcccacagccccccctcgacgctggtgtggaagggccagagcagctggggcacgggcgagagcttccgcaccgtcctggttaacgcggatggcgaggaagtggccatgaggactgtgaagaagtcctcggtgatgcgtgagaatgagaatggggaggaagaggaggaggaagccgagtttggcgaggaggatcttttccaccaacagggggacccgaggaccacctcaagaggctgctacgtgatgtgaacccacactcctcatccacacacctttctttacccagagccactgaaaactatttttatatcattggctttctttagttcttgatacatttctagagaatttctaagcgaactgccagaacgtgtgggtgggtctcccccagccctccctcctggcgggtctcctccagcctcacttcgctgccacttcgccgctgccccggagacttttcaatcccaccccactcctcatctcaccatttggtcaaattggaagcccagggccaggacccggaggtttagaagatgcttgggcttggagggaggagggccggcgaggctagcgaggggacaggagacggccctgctgcggacggagcgcggaaactgcgtaggaattcagtggtggtgggttttttttaaggctttctacaaaaccaaattcagaatccaggcgtcgacctggtggggcccggggccaagcctgcattctggctgcccagcttcggacagcgggaactcctcaggcagccacgcagcgggtgtgggccagcatggggatggcgtggcccccagggcgggttttcactccgctgcctgggcttccagattcccgttctggcagcgcaccggccgggtttctcggaccgttgactttatttgggggagttttcccgcagttcagttcctgactgtgcagggccaacagggcaggggaggggaagacctggggaaggaagaatgaggacagtcccgtcgtaagacctgtcacaacaataagcagggaggggagatgtggaggggacacatctggttgccttggaggcagaagctgtgagtttcagaacagctgtctgcagggaacgccaccatgttgaccctctggaggagagcgctgtggagcccctcccgtgttccagctccgtctgccctgtgcctatatatacacatgcgtctatccatactgtgcttttatctgtgattttctcgctgaaaccatgtttctcagacaggccaaggccacctgactcctatcacgacgcacccaagcccctcagtccagcttcccaatgcctggcaccccccttcggcaatagctcaccgtttacaccctccctcatagatacacagaagttatttttttaatggatatttatttttttacattggtcagtacacaggtcaggagctcacgccagggccttgaggacaggctgaccctcctccccggggtggcgtggggctggggcaccctccgacggcagagcctccttcagaaagtgcagctcaagtcttaaagacaccaaaactgagccatgggcacgcgccgtctccgggccatggcgttcactgcagggcgggggcggcaccgctcccctgtgactgcatcccgcctccctggggacctgcctgtggcaggaaggaatggggggccccagccccaggccgggaaggagccagcggccgacaaagcagaaacacccgctgctccacgtagcccctgctcgctgtccttgctctcagaagtcccggtcccatgtagatagaggggggcgcatcttaccaaagcatttcctcctggaggctacgccgctgtgctcccagtcaggcggctggtagggagctttgcctgccccggggataccctctgccagccgctggaagtgggaatgctggcgacagactgtgtcctctttcccaccttcatagcaggaatcacccggacccgactggctgggcttcgtgctagcgagggttctgggggtgggtcttggtgatcttgtcctatggggagtctgcagtggtctcagccacatcctatgtattttggctctggaggagcaaagctgtatcctggagttggtctgtgatttgccgacagccttgcaggctgggctcagggacaaagtcccccccaaaacccgcaggtcctcatgtccagacgctgcccagtcctgtcctgaaaacagcacgccccaggcccacagaaccccccaccctacatttgccttgggtggagctgggggtggtcctaggactgcgggtgcccttagctgaagggggtggggagaagcgtggactgggcagcctgtgggtaattggaggttcattgagaattgagtctttggaaacactaagaaaatcaaatttttaaaagttatttatggcctgggaaacaatttgcatttgtccccaaatacgcttagctgtgtgccgcttagaacgatgcgaaaccatccctctgtgtaagcccgtgccgtgtgactcgaagcctagcgccctccctgcgaagcatcagacgccacccagccctggggggaggcccacgcctgctggaccaacgcgggttctggggtgcacagcgccaggttaacgctgaagcctgccccgctgagcccaggagccgggaggcctgcgggctgacccagaatccgatcatgcacctgtcctcatgccagcggctttggctggggttggtctgaagcctgcacgcggcagttctttgttaaagatctgagggactcctcagtcctggggcgtcgccgcctgcagcctcttccaagccctgcgtccagcgagcgtcacagcacaacctgcaaaaacggagctgggctgcagctggggctggcatggactttcatttcagagattcggtttttaagaagatgcatgcctaatgtgttcttttttttttccaatgatttgtaatatacattttatgactggaaacttttttgtacaacactccaataaacattttgattttaaaaaaaaaa

SEQ ID NO: 90180 - DNA, 1014 bp, Homo sapiens
atggggaacgattctgtcagctacgagtatggggattacagcgacctctcggaccgccctgtggactgcctggatggcgcctgcctggccatcgacccgctgcgcgtggccccgctcccactgtatgccgccatcttcctggtgggggtgccgggcaatgccatggtggcctgggtggctgggaaggtggcccgccggagggtgggtgccacctggttgctccacctggccgtggcggatttgctgtgctgtttgtctctgcccatcctggcagtgcccattgcccgtggaggccactggccgtatggtgcagtgggctgtcgggcgctgccctccatcatcctgctgaccatgtatgccagcgtcctgctcctggcagctctcagtgccgacctctgcttcctggctctcgggcctgcctggtggtctacggttcagcgggcgtgcggggtgcaggtggcctgtggggcagcctggacactggccttgctgctcaccgtgccctccgccatctaccgccggctgcaccaggagcacttcccagcccggctgcagtgtgtggtggactacggcggctcctccagcaccgagaatgcggtgactgccatccggtttctttttggcttcctggggcccctggtggccgtggccagctgccacagtgccctcctgtgctgggcagcccgacgctgccggccgctgggcacagccattgtggtggggttttttgtctgctgggcaccctaccacctgctggggctggtgctcactgtggcggccccgaactccgcactcctggccagggccctgcgggctgaacccctcatcgtgggccttgccctcgctcacagctgcctcaatcccatgctcttcctgtattttgggagggctcaactccgccggtcactgccagctgcctgtcactgggccctgagggagtcccagggccaggacgaaagtgtggacagcaagaaatccaccagccatgacctggtctcggagatggaggtgtag

SEQ ID NO: 90181 - DNA, 4956 bp, Homo sapiens; identical to SEQ ID NO: 60978

SEQ ID NO: 90182 - DNA, 3561 bp, Homo sapiens
  misc_feature (1)...(3561): n = a,t,c or g
actgcctgccctttcccttctggatttagctcgtgtctccaggctcctagtcctgtaatccagggacccatcagcgagggattcagggaagcagaggcagctctccaggaaggaggaaaatccctgcctcttccagagagactcccccattgctgtctcttgtgtgtgtcatgcacaaggaaggcttggttgtgtgccaggataaggggcacaagggcctcgggtgtggccagagaccccatgcttaagcttttatggtataggtcaggctgcaggggtttgagggcctcagttgtatatcagaatcttcagagcactgcgatgttcaggggtgagtcaggtctgtagatgtgcacggggtcttctgaagggtcagtttctgtaatcactttcaggtgtgtcagggccttgtgcagtaacagtgcacacagaagttagtgtttctgtgggctaagggttgtagctctgtatcaggattctgggagtgggtctggatttctggtgtgtggacttaagaagctgtgtcagacttgggggaggggcgttcatgtataactgggttcacataggccaagactcccaggtgcattttaggcagagcctcaggtgtgttagaggtcccaggggcagagaggctataggtgctgtcagaggccttggggacatttagggcagagcctcgagtgacaggtcctgggacagtgggagccaagggcaagtgctagagttgcagtgaatttagagcaaagcctcagctaagtgacacatcccagggcagtaggggatctatctaggttcgtgctgggcctcaggtaagtgacaggccttaggacaatgggggctgtggcatgcgtcaggttacctgccttgatatgggatcgtgacaggcccctccctatgtgcaggagacaagcagcccaagaaacaggagaaaaacccagtgttggtgtccccagagtttgtggatgaagctctgtgtgcgtgcgaggagtaccttagcaacttggcccacatggacatcgacaaggacctggaggccccgctgtacctcacccccgagggctggtccctcttcctccagcgctactaccaagtggtccacgaaggggcagaactcaggcacctcgacactcaggtccagcgctgtgaggacatcctgcagcagctgcaggccgtggtaccccagatagacatggaaggggatcgcaacatctggatcgtgaagccaggagccaagtcccgcggacgaggcatcatgtgcatggaccacctggaggagatgctgaagctggtgaacggcaaccccgtggtgatgaaggacggcaagtgggtggtgcagaagtatattgagcggcccctcctcatctttggcaccaaggtttgacctcagacagtggttcctggtaactgactggaacccacttaccgtgtggatctaccgcgacagctatatccgcttttccacgcagcccttctccctgaagaacctggacaactcagtgcacctgtgcaacaactccatccagaagcacctgggagaactcatgccatcggcatccaatgcttccgccagacaacatgtggtcttagccagaggttccagggnccacctgcagggagatgggtgccccaaattgcttggtccaccatcatcgtgcctggcatgaaggatgctgtgatccacgcacttcagacctcccaggacaccgtgcaatgtcggaaggccagctttgagctctatggcgctgacttcgtgttcggggaggacttccagccctggctgattgagatcaacgccagccccgcgatggcaccctccacagcagtcactgcccggctctgtgctggcgtgcaagctgacaccctgcgcgtggtcattgaccggaggctggaccgcaactgtgacacaggagacactttgagctcatctataagcagcccgtcaccacttccccagcctccacaccaagggcccagctgccttctccccatgtacttcgacaccagggccaggtcctcagacggacagcacagcaagctggtgggcactaaggccctgtcgaccacaggcaaggccttgaggactctacccacggctaaggtcttcatttccctcccaccgaaccttgatttcaaggtggcacccagcatcctgaagccaagaaaggtgggcctcgacctgtgactcacacccagtggacagtgctgagcacggggtcagggctggagggcacaggcagagggcagctcccaggctggctggcaccccaagggaagagctggtctccctcagaagccccttcctccacagacttctgatcatctccctcttctcccctcctttcacaccgaggctcctgctctcctgtgcctccgaggcccccagctggaagtgccttgttgcctctgccctttgaagtcggaacaattcctagcacctgtcggaaggtcaaggccaaaggcaaattcaaggccagactgtgacaaacccagggctgaggcctgccccatgaagaggctgagccccctgaaacccctgccccttgttggtacattccagaggcgcaggggcctgggggatatgaagctagggaagcccctgcttcgattccccactgcccttgtcctggatccaacaccaaataaaaagaaacaagtgaagtatttggggcttgactccattgctgttggagggtcaagagtggatggggcgaggccgtgtaccccagggtccacagcaagagcctgaggccatcagcagctcctccgtgcagcgaggcccagaattcccacctaaggacagacatggggcttcctatttagggactcccccagcatctccgatccaggggtggggagcgtgagccttcactttacagatgaagaaactgagtctgaaagaagaggcatggcttacccacgaatcaccnttggcaaggagtcgacgcaagggacatattggcagaactgccgagcactgggagccccccaaccccagagaacaagccaagctagcagaatgacacctaccgggcataggaacgttaatgccatgagacaagggaaggaattggccttgcctaaacctcagcccttctgcagagggcatgggtctatcccttcttcagcaaggggccaaggtcacctaaaaatgaaacatccaataagccacacccacctgaagaaaagtgtggcactgcttagttgtagtgggttgaactgtggtcccctgaaaagagatgtctacttggaccctgtgaatgtgaccttatgtgggaaaagagtctttgtagctgggtatggtggctcacacctgttatcccagcactttgagaggccaaggggcaggagatcgcttgagcccacaagttcaagaccagtctgggcaacatggtgaaaccgtttctacagaaaattagctgggtgtggtggcacacacctgtagtcctagctactcgggaggcctaggtgggaggattacctgagcctgggaagatcaaaactgtggtgagctgtgatcacgccactgcgctctgagcctgggagacaaagtgaaaccct

SEQ ID NO: 90183 - DNA, 1687 bp, Homo sapiens
gccgcggtcgctatggaggagccggagatgcagctcaaggggaagaaagtcacggacaagttcactgagagcgtctacgtcctggccaacgagccatccgtggccctgtaccggctgcaggagcatgtgcgtcgctccctccccgagctggcccagcacaaggcagacatgcagcgttgggaggagcagagccagggagccatctacactgtggagtacgcctgcagcgccgtgaagaacctggtggacagcagcgtctacttccgcagcgtggagggtctgctcaaacaggccatcagcatccgggaccatatgaatgccagtgcccagggccacagcccggaggaaccacccccgccctcctcagcctgatcctggaagagactcggggccccccagcctccgccaacccagacaaagatcattccactcagcctgggacgatggggaggaaaaaaatccagatctcccgcatcctggaccaaaggaatcggcaggtgacgttcaccaagcggaagttcgggctgatgaagaaggcctatgagctgagcgtgctctgtgactgtgagatagccctcatcatcttcaacagcgccacccgcctcttccagtatgccagcacggacatggaccgtgtgctgctgaagtacacagagtacagcgagccccacgagagccgcaccaacactgacatcctcgagacgctgaagcggaggggcattggcctcgatgggccagagctggagccggatgaagggcctgaggagccaggagagaagtttcggaggctggcaggcgaagggggtgatccggccttgccccgaccccggctgtatcctgcagctcctgctatgcccagcccagatgtggtatacggggccttaccgccaccaggcgtgtgaccccagtgggcttggggaagcactgcccgcccagagccgcccatctcccttccgaccagcagcccccaaagccgggcccccaggcctggggcaccctctcttctcaccaagccacctcaccagcaagacaccacccccactgtacctgccgacggaagggcggaggtcagacctgcctggtggcctggctgggccccgagggggactaaacacctccagaagcctctacagtggcctgcagaacccctgctccactgcaactcccggacccccactggggagcttccccttcctccccggaggccccccagtgggggccgaagcctgggcgaggagggtcccccaacccgcggcgcctccccgccgacccccccagtcaagcatcaagtctgagcgcctcttcctccggcccccgggggccccggcgactttcctaagaccttcccctatcccttgctcctcgcccggtccctggcagagcctctgcggcctgggcccgcccctgcgccggttgcccttggccgacggctggccccggtaggagatcacccggtggcaccagcccagagcgctcgccaggtacggcgagggcacgtggggacccccacctccctccaggccttttcagagaagacccatacagtgacagcccccctccgcggtgggggcttggaggtgggcggctggactcaatccagcgctggggggctcctttccttcttcctatttgtgtgtatatccacaaataaaaacgcgcgtggcgtccgtggaccagaaaaaaaaaa

SEQ ID NO: 90184 - DNA, 1708 bp, Homo sapiens
cgatccctcaacccctgcactgcgctagtcctaaagaggaaatgtctctacgctgcggggatgcagcccgcaccctggggccccgggtatttgggagatatttttgcagcccagtcagaccgttaagctccttgccagataaaaaaaaggaactcctacagaatggaccagaccttcaagattttgtatctggtgatcttgcagacaggagcacctgggatgaatataaaggaaacctaaaacgccagaaaggagaaaggttaagactacctccatggctaaagacagagattcccatggggaaaaattacaataaactgaaaaatactttgcggaatttaaatctccatacagtatgtgaggaagctcgatgtcccaatattggagagtgttggggaggtggagaatatgccaccgccacagccacgatcatgttgatgggtgacacatgtacaagaggttgcagattttgttctgttaagactgcaagaaatcctcctccactggatgccagtgagccctacaatactgcaaaggcaattgcagaatggggtctggattatgttgtcctgacatctgtggatcgagatgatatgcctgatgggggagctgaacacattgcaaagaccgtatcatatttaaaggaaaggaatccaaaaatccttgtggagtgtcttactcctgattttcgaggtgatctcaaagcaatagaaaaagttgctctgtcaggattagatgtgtatgcacataatgtagaaacagtcccggaattacagagtaaggttcgtgatcctcgggccaattttgatcagtccctacgtgtactgaaacatgccaagaaggttcagcctgatgttatttctaaaacatctataatgttgggtttaggcgagaatgatgagcaagtatatgcaacaatgaaagcacttcgtgaggcagatgtagactgcttgactttaggacaatatatgcagccaacaaggcgtcaccttaaggttgaagaatatattactcctgaaaaattcaaatactgggaaaaagtaggaaatgaacttggatttcattatactgcaagtgggccctttggtgcgttcttcatataaagcaggtgaatttttcctgaaaaatctagtggctaaaagaaaaacaaaagacctctaaaacttcaacaagaccttcaagatcacagaaatttttaaaatttgattccagttaataacagaggtggtgccagaatgcctggactgcagtggatgtaccccacctctttgcttaaaaaaaaaaatgtcaatagccaggcatagtggctcacgcctgtaatcccagcactttagggaggcccaaggcgggtggatcacctgaggtcaggagtttgagacccagccctggccaacatggtgaaatcctgtctccactaaaaacacaaaaattagtcaggcgtggtagtgggtgcctgtaatcccagctactcgggaggctaaggcaggagaatcacttgaacctgggagggggaggttgcagtgagccaagatcgctccattgccctccagcctgggtgacaagagcaaaactccatctcaaataaataaaaaggaaaaaaaagtcaataaactgtacaaatttaattacagtaattcatttggcttttagtgtatcttctttgtcccaattaaacagttgcttgctgtgatgtaatcttaaaaaaaaa

SEQ ID NO: 90185 - DNA, 1966 bp, Homo sapiens
agccggttcctggtgtccccacttcgcctccctcctgctgcccccaagacatgcaggggccctgggtgctgctgctgctgggcctgaggctacagctctccctgggcgtcatcccagctgaggaggagaacccggccttctggaaccgccaggcagctgaggccctggatgctgccaagaagctgcagcccatccagaaggtcgccaagaacctcatcctcttcctgggcgatgggttgggggtgcccacggtgacagccaccaggatcctaaaggggcagaagaatggcaaactggggcctgagacgcccctggccatggaccgcttcccatacctggctctgtccaagacatacaatgtggacagacaggtgccagacagcgcagccacagccacggcctacctgtgcggggtcaaggccaacttccagaccatcggcttgagtgcagccgcccgctttaaccagtgcaacacgacacgcggcaatgaggtcatctccgtgatgaaccgggccaagcaagcaggaaagtcagtaggagtggtgaccaccacacgggtgcagcacgcctcgccagccggcacctacgcacacacagtgaaccgcaactggtactcagatgctgacatgcctgcctcagcccgccaggaggggtgccaggacatcgccactcagctcatctccaacatggacattgacgtgatccttggcggaggccgcaagtacatgtttcccatggggaccccagaccctgagtacccagctgatgccagccagaatggaatcaggctggacgggaagaacctggtgcaggaatggctggcaaagcaccagggtgcctggtatgtgtggaaccgcactgagctcatgcaggcgtccctggaccagtctgtgacccatctcatgggcctctttgagcccggagacacgaaatatgagatccaccgagaccccacactggacccctccctgatggagatgacagaggctgccctgcgcctgctgagcaggaacccccgcggcttctacctctttgtggagggcggccgcatcgaccatggtcatcatgagggtgtggcttaccaggcactcactgaggcggtcatgttcgacgacgccattgagagggcgggccagctcaccagcgaggaggacacgctgaccctcgtcaccgctgaccactcccatgtcttctcctttggtggctacaccttgcgagggagctccatcttcgggttggcccccagcaaggctcaggacagcaaagcctacacgtccatcctgtacggcaatggcccgggctacgtgttcaactcaggcgtgcgaccagacgtgaatgagagcgagagcgggagccccgattaccaccagcaggcggggggtgcccctgtcgtccgagacccacggaggcgaagacgtggcggtgtttgcgcgcggcccgcaggcgcacctggtgcatggtgtgcaggagcagagcttcgtagcgcatgtcatggccttcgctgcctgtctggagccctacacggcctgcgacctggcgcctcccgcctgcaccaccgacgccgcgcacccagttgccgcgtcgctgccactgctggccgggaccctgctgctgctgggggcgtccgctgctccctgagtgccccactccggagttatcctgctccccacctccgggcgtcctgccctgttccccgtcctgagccgccacttccagcgaacacacacaggtgtcctgccgttggaccttcacctcctagagataaaccagcctcagctggcgcagcggggcccttcttccctccgcatccccttcagggagcaggagcccagggcgccctgggagctgagcctgggacttccaggacctcccctcaggttgttctctgattcttcctcccaaccccagagactgcagatttgtgccatgcggctgcctgcaccccagacaataaagggaccaaaac

SEQ ID NO: 90186 - DNA, 1813 bp, Homo sapiens
ttttttttttttcagagtacaacagcatttaatggtcagaaacagttgtacagtattacagtcagccacagaagctgtgttgggggacaagacccaatccttccccacaccaggcaaagcagtattggacatgagttggcatgtggctgggcccacgtccttatcccccaggcctgaggggagaccaccttctgatgataaccaacccctagctaccactctgtattcatcaggggaggggtataaaccccacatgcaagaagaacccttgcccccagtgtcaaatgggatggggatgctagaagttataagtaaaaggggaaacccctatggtaaggctgtttaacagagtttcacggggggtagggggataacccctggtcttcaagctccccaaattgtgctccactttccccagcttctttcatccgttcatcaatggctggcaaaagttccccctcaaactggtggcccaggttttcacgcatgggttgtctgcaacctggggtcaaagagggtggtatttgtccttccaaggaaattagcaatcatctggctgggtggtaattcaagtgtgtcaggaagctgaccaaaactgccatgggcttggctcgtgcaagctgctttgatggtgaacaagtctcctgcacccagctccagggagggggggaggcaattggggctcccagcgctgtaatagtttcaataataagctggtgcaaccttgcctttgttgtaacctgccatcttcctaacagaggctttaatgcttggcaaatctccgttcaacctttcccccaggacactctgtaagccgagcctcccactttgatccaaaactgcaaaggtctagggcgctcacctttgcttgcaacagctctacagtctccatgagacaggctccctgtagacctgcagaaaggggattctgagcatcctgatcacaacgtacagctgtctccagctctgtcaggcgcttttcaagttctgcgactttggcagccttgagagaacttgtcctgctcaggcccgagaatgtagttcataagtgacaaggctgcctatctgggggggtcccagtggtttttccccctgatccccctttgctgttctttgttgcttccagctgcagtagtaggcgccttagcccagggcgcccatcggggtcggttaaggttgattgcaagcatctggtccccagcagcttctcccaggtgggaagcaacccagctgctgcttcagggctgccaggctgtttaagccaggcaacacagggggtcagcttctcctctgtggctgactccttcactgtcgtcttgattttttcaacttcaagttgtcagctcttggacctcatgcaggtaggcgctggtacttttgctggggtgtctccttcactcccagaccctctccaagcatctcatattctccagattcatatcctgtcctcttggtttttccaatacgatctgagaaatcaagtccctttgtccccactctcttgtccttgaacttgtcataggcagcattaggattgacaatgatgtgttccacacttgtgcttgtcagctcctccagctcttgtgcaaacgcatcgaactccgcttgatcatcctcaggtaggtcgctagtttcataaacatctggctcattcctggcaatgccgggaaggtcggcgtatttagggtccgccatggcggcggcgagacgggctgggggacccgggcctcggtggagccggggccggtgttcgggtaggggagaggctgggttcgggtcccgggaaaaggcggcggcaaagggagcggcagat

SEQ ID NO: 90187 - DNA, 1343 bp, Homo sapiens; identical to SEQ ID NO: 60655

SEQ ID NO: 90188 - DNA, 1517 bp, Homo sapiens
gcatgtggtctgtgtgtggggtggagggctgggggtgttggcaagtctcacaggtgaggacccaacgagggaatcagacaaaaagtggccacaaattaggcagctccaggaaggacatgtccttgccatagtaagatgttctgctcacgcgtatccacgagaaagccccgcatttcacggggagcatagaaacaggagtccccaactctgctcaccagctcctccggctgctgccatctgctcctgcagcatggcggcctgggaagcctgcactggtgattttctgccactcaagttttgcagacttcgggaagatggatgcatagcctggggcaatgacagtcacaggcccgccttgtcacaaggtccctggagcgggcaatgccttgagcccaaaggctgggagcacaaagccatcttcagccatcctcgatttccagcaagaccccagggctcacccaacagcccgacactccatactacaaggtgggttaattttttaaaagactctgcagaaatataccaactacagagctcaggaaagcaactgatttataaaacccaatccaagttgtttgcttttatagcattagagacatgtctgaagaacttcaagtttttatctatagaaacataattagtttaataaattactaggtctattttgaatatctaaattgagtacttttattagacctaagtggaactttatctgaatctgaattttccaaggggccagtgtagagtgacacaggtgtccgaggccacctttccatcttcagacacccccccgtctctctgcacagggagttggccttccagtaggtgttgctcttctgtcttgacgtctcctggaaagatttttatctctattttcctgtggtggggttttccacgagctaattctttctatttttaaactcattggctttggaggagctgaattgttagatgacgatctttgtccccaggaagagtggccactctggattcttgtggccagcgtatttgggtattgtctcttcatcagctgacagaggtgaaatttttccaaaagcaggttccaatgccagagtgtgcgattcttgccccgcgtgtggggacgctgcagatttcttcctggctttccaccgctgcagctgcagagctctcagcttttctcggagctccatgttctgctccctcaaagcatctatatgactccggagttttccatgaacatcagcccacagagacttctgtctcccaagctcttggtggagtctgatgatctgctgctgtaatggtggcatctccccagtgttgcagtcctccgtgagaacctcggctgccacagctgtcttctccatgacagccccagctcctgggcacgggtcctctgggtgggtgccctccttggggtccctggcctcgagttgacctgccagcatcctggtccccaacagtcactactgccaggatcagatcatctgggccatgtccccacagttgtccccaagccctcctgcctcatatcc

SEQ ID NO: 90189 - DNA, 508 bp, Homo sapiens
  misc_feature (1)...(508): n = a,t,c or g
attccctttccgnngccgcttgtttcagtttgaatatgtgtgaattgtttccagtatgaatattgatggcacagacccttgttacgagtctttgtgcggacatgagctggcccttctcttgggcagacactcaggagtgtgccctgagtgttgttgctcaggaagcctgaggaggggtgaggaggtgggagaggattcaagagggggtgcaagctgcgactggggctgagtccctcccacatggaaatgaggaggagcgagatgagatggcggccagaacactgacggtgtgggaggttgagcagcttggggagggctgaacacccatgctcttgggaaccacaaagaggagctcaggcttgcggtcaggggacgtggagactttgtaagctccatgcagacagcaagactttaggaagaaaggttttgtagtaggatgggggagggaacagggccatgagagggcaggacaggcggaggttcacgatgggtgagcacagaagctttt

SEQ ID NO: 90190 - DNA, 3515 bp, Homo sapiens
gcggccgcgtcgccgctgaggatgtcccgaaaggggccgcgagcggaggtgtgtgcggactgcagcgccccggaccctggctgggcatccatcagcaggggtgtgctggtgtgtgacgagtgctgcagcgtgcaccggagcctgggacgccacatctccattgtcaagcaccttcgccacagcgcctggcctcccacgctgctgcagatggtgcacacgcttgccagcaacggggccaactccatctgggagcactccctgctggaccccgcacaagtgcagagcgggccggcgttaaagcaaacccccaaggacaaagttccaccccatcaagtcagagttcatcagggccaagtaccagatgctggcatttgtgcacaagcttccctgccgggacgatgatggagtcaccgccaaagacctcagcaagcaactacactcgagcgtgcggacaggcaacctggagacatgtctgcgcctgctctccctgggtgcccaggccaacttcttccacccagagaagggcaccacacctctgcacgtggctgccaaggcaggacagacactgcaggccgagctgcttgtagtgtatggggctgaccctggctcccctgatgttaatggccgcacacccattgactatgccaggcaggcggggcaccatgagctggcggaaaggctggttgagtgccaatatgagctcactgaccggctggccttctacctctgtggacgcaagccggatcacaagaatgggcattacatcatcccacagatggctgacagccttgacttatccgaattggccaaagctgctaagaagaagctgcaggcgctcagcaaccggctttttgaggaactcgccatggacgtgtatgacgaggtggatcgaagagaaaatgatgcagtgtggctggctacccaaaaccacagcactctggtgacagagcgcagtgctgtgcccttcctgcctgttaacccggaatactcagccacgcggaatcaggggcgacaaaagctggcccgctttaatgcccgagagtttgccaccttgatcatcgacattctcagtgaggccaagcggagacagcagggcaagagcctgagcagccccacagacaacctcgagctgtctctgcggagccagagtgacctcgacgaccaacacgactacgacagcgtggcctctgacgaggacacagaccaggagcccctgcgcagcaccggcgccactcggagcaaccgggcccggagcatggactcctcggacttgtctgacggggctgtgacgctgcaggagtacctggagctgaagaaggccctggctacatcggaggcaaaggtgcagcagctcatgaaggtcaacagtagcctgagcgacgagctccggaggctgcagcgagagatccacaagctgcaggcggagaacctgcagctccggcagcctccagggccggtgcccacacctccactccccagtgaacgggcggaacacacacccatggcgccaggcgggagcacacaccgcagggatcgccaggccttttccatgtatgaacctggctctgccctgaagccctttgggggcccccctggggacgagctcactacgcggctgcagcctttccacagcactgagctagaggacgacgccatctattcagtgcacgtccctgctggcctttaccggatccggaaaggggtgtctgcctcagctgtgcccttcactccctcctccccgctgctgtcctgctcccaggagggaagccgccacacgagcaagctttcccgccacggcagtggagccgacagtgactatgagaacacgcaaagtggggacccactgctggggctggaagggaagaggtttctagagctgggcaaagaggaagacttccacccagagctggaaagcctggatggagacctagatcctgggcttcccagcacagaggatgtcatcttgaagacagagcaggtcaccaagaacattcaggaactgttgcgggcagcccaggagttcaagcatgacagcttcgtgccctgctcagagaagatccatttggctgtgaccgagatggcctccctcttcccaaagaggccagccctggagccagtgcggagctcactgcggctgctcaacgccagcgcctaccggctgcagagtgagtgccggaagacagtgcccccagagcccggcgccccagtggacttccagctgctgactcagcaggtgatccagtgcgcctatgacatcgccaaggctgccaagcagctggtcaccatcaccacccgagagaagaagcagtgacctctctccccacaccctcacctgcaccctaggacctcactggccataggagctgggccactccagacattaatccccaccccaacagagccactggcacaagtgcccttagtgctgccacactccctggcagccaggtgccctggtgcccacccctgtcgagcccctaaggatggggaggtgggggggcaggagcttctgtcccccacattccatgcacctcccctctgtatatagcatctcccccctcctagtgagcaggggcctgcaaggcatcactcccagcccctcgccttctagggcaccctcagcaaaggggcaggtggggacactccaagtggggcagctctccgtacatgcgccccacccccatgagccagttcagccctactgggggctgagcgggggcatcccctcctttgtacatagtctccatggatgtccctgccctgtagccaccagccccttgctgctctccctttaatgccatatggcccctgcctagggcacaggccccaacctgtgtgctggggtccccaagaggcgggccccagagaagcggagggagggcacccgcagcgccgacaacactttggagaggagggagaagcacgagaagagacgagacgtctctccggagcggaggcgagagcggtcacccacccgcaggagagacggctcccccagccggcggagacggtctctggagagactcctggagcagaggaggtcccccgagcgcaggagagggggctcgcccgagcgcagggccaagtccaccgaccggaggcgcgcacgctcccccgagcgcaggagagagcggtccctggacaaaaggaacagagaggacagagccagccaccgagaaagggaagaggcgaatctgaaacaggatgccggcagaagttccagacatcccccggagcagagaaggcgaccttacaaagaatgtagcaccgacctcagtatctgagacgctgagtcacattccaacctttaccgtgtcaaaggttctaagaggaaagtcacaaacctgaaattatttagtttcttacctaatgaagcatctgacacctgatgatcctatgaataacaacaaacattttatgcatttgaaatcttataagaaaaaatatatatgaaaagtattgtgcctgatgtatcatattaaagaaagtatttttaaatgcaaaaaaaaaaaaaa

SEQ ID NO: 90191 - DNA, 691 bp, Homo sapiens
  misc_feature (1)...(691): n = a,t,c or g
agacctcttcccagtctgagtttctgtcgttccatgcctctgggagtttggagacagaggagatcctaacccaggggctgccctgctgtcacttcccgtcgtgatgatgcccctgccaggcttcccacagtcccctttctcattcatttagtggccacccttttacctccaggcaccaggagaggacagccacatctgcagtgtccctgcaggacgccaaagctgaggcaggggagggagccacagaaagcagagtgggactcgggctgggggggcgggcagggccgagctggtctcttccctgcagcttccaagggctgcatcaagtgcgaagcgccctgcccggaggactggctgctctacggaaggaagtgctacttcttttccgaggaacccagagactggaacacaggcaggcagtactgccacacccacgaggcggtgctggctgtgattcagagccagaaggagctggaatttatgttcaagttcacgcggagggagccctgggattgggactacgcagagttggggacgaattccactgggtcaacggggacccgtttgatccggacacgttcaccatcgcaggtccaggggagtgtgtcttcgtggagcccaccaggctggtgtcgacggagtgtctgatgacnccggccctgggtgtgcagcaagataggcctatacttga

SEQ ID NO: 90192 - DNA, 7268 bp, Homo sapiens; identical to SEQ ID NO: 61181

SEQ ID NO: 90193 - DNA, 2062 bp, Homo sapiens
ttttttttttttcagagacaaacactttttaatttcagtagcagtagggaaaaataacagcatccatgcattaaaactaagagccttcacaaagacgtttcaagatgtattttgaacaaaagaggacaggctcttgggccccctctgggtcctgcctcagcacatcgagtcctcaaatccgagtgaggaaagtctggggagctgcactgtggagccatcagaaagtacctggagcggctgctgctgggctggaaaagccgcagaagtcctcggcggtagctggggttgctatggcaacaggagtcccaggctgcccgtgctttctggccacaacctttacctcatcattaatgacttcaaagtggctcctcttcctcttcttcaatgtccaaatcattctgcctaagatatgcttgtaatggtccatacagtctctccttgaaagctaagaaatccatcatgttcccttgaaagtgttgcaagaaaaacagttcaatcaaatactccttgaagacctccttcagagcctgcatctcctggtgatgatagtccaggcactgcttcctcatctgtgccatctccggagaggctgggggaatctcctctaacttcttgggaaccttcttcattcccgtgttccccacagacgtgagtgggaggctggaaaggcctgggggcacggcagtcctggaagggctggtgggcgggggtggggacgtcatcccaaaccccgctgcgcccccagccccggggagcagcacgccgggcgtcctctcgaagcccaggggccggggcagcggcggcccctgcagcacctgctgctgctgaaccagctggccctggatgatgctgctgatctgcggtggcaagttagccgtggtgatgtggcttgggctggccaggggctgcaggccggccccacccgcggctgcagggctctggggtcccaggtggtggatggtgccccctgactgtgtgtggggctgggagggtctccgctctcggactgtgatgggcgtacccgggtgctggagctgaacctgggctccctgggcgatctgggtgagccctgacccatcctgaaacacaaagtgtccaccactggaggggctcaagctgatctgcctcaccagcacgctggcatccacgaagtcccctgtagggctgctgctgcagaggcccagcccagggccaggggcacctgcacgcacattctgcaaggcctgccccggccccggactgggctgcgtgggactctgggtctggacctgctgggacaagggggacgtgacctgaatgtatgatggagacccatgctcaaaccgccgaggctgagcgctgaactggaagcctggagaggtggggctggggagcggcagtggggccagcgtgacctgtgggcttccctggagcccagggcccacgccctgcaggtcaacattcatgttctgcccacccgcagggccccctctcaccatcagctgctgtagttggtggctgggggatggcagtgtgaggggcagggacggctgggagcacgctggctgctcctcgcccgcgccggggcaggccccaggccactggacatggcgctggctgctctgggagctgctgacgtgctgcatgactacgtcttcaggaaatgctccccagctcttgggcaagataagtgtctttattataaaaggcgtcaattcgcagcgtctttactgtaaaggtggtggtattattagattcttcctttccactaacacaaaactcccagtgccggaaggcccttgtcaggagcaggacccgcggaggggtccgtggtcagttctgggacagctgccgagcagcgcagcgcgtggaatcaacttcactgctcacgtgcagcgcacactaagcgcactcgtctttcctggagtgcagaccaggccccgacctcagggatcaggacagcggggccaaggggtcaagaggcagaggcggcgtcagcgccgtagacagcggtctcgcgaggctggaaccaggcgggcggcagtgacgggggtgggcaccaggggactgctcgtgccgaatt

SEQ ID NO: 90194 - DNA, 1427 bp, Homo sapiens
gggggcctcccgaagaaaagggagccgcgcagcgcctacgggagtccggcggcagcagccggtaccggcaaccacgggcagctctcagggaatctccgtcgtgaggccagaggctccagtccccgcgagtccagatgcctgtccagcctccaagcaaagacacagaagagatggaagcagagggtgattctgctgctgagatgaatggggaggaggaagagagtgaggaggagcggagcggcagccagacagagtcagaagaggagagctccgagatggatgatgaggactatgagcgacgccgcagcgagtgtgtcagtgagatgctggacctagagaagcagttctcggagctaaaggagaagttgttcagggaacgactgagtcagctgcggttgcggctggaggaagtgggggctgagagagcccctgaatacacggagccccttggggggctgcagcggagcctcaagattcgcattcaggtggcagggatctacaagggcttctgtctggatgtgatcaggaataagtacgaatgtgagctgcagggagccaaacagcacctggagagtgagaagctgctgctctatgacacgctgcagggggagctgcaggagcggatccagaggctggaggaggaccgccagagcctggacctcagctctgaatggtgggacgacaaactgcacgccagaggcagctccaggtcttgggactccctgccgcccagcaagaggaagaaggcacctctggtttctggcccatacatcgtgtacatgcttcaagagatcgacatcctggaggactggacagccatcaaaaaggctagggcagctgtgtcccctcagaagagaaaatcggatggaccttgaccctgctgttcacagccagggggaccctcagagcagctggcactgcacccaggattctcgtcttcctcctgcagacaggcggacccacaggcccctcagggtctgcccagccaggctcctgtggtgctgctgggccctcccactccatctggcactggtctggactcctcctctgccctcctcgaggcctgcacagctgtggccgtggagctgacctgaccaggcaaggctgctgtctccatccctgagccgcctgccacctcccactcctgaagatccatctcttggggctcccctgacagagaagacagccgaagtcaaagccacatcctcttgctgatgttggatgcaggctgtccggcctcagggccagggagccagtttccactgtgcgggaactctgagtcagacgtgattatctgggggtctgtccaccctggctggatctggaggcaagatgccaggccccccaggtgttctcagggcagttcttggtgtctgcttctcagattccaaggactggaattaaaacctttcctgggaaaaaaaaaa

SEQ ID NO: 90195 - DNA, 1778 bp, Homo sapiens
atggagtacctaagcggcacagtccaggcactgtcccagggctttgcacgaattatctcagcctctcgacagtggggaggtctatcacataaagctgctatggacattgcagtacatgtcttggtaaacccacaagcactcatttcctgttgggcatataccctgaggtacaatgaatgggtcaaaggggagagctcccagggaggtggtgtggccattgcttccaaagcctccatcacctgcccatacacgccagctcattgtattggccttactcttccaagaggccatggaagtataaataataaagcaagaaaggcagatgcatttggctggctcagtggacttctgaatgtactgtgagtatgagaccttcccttccaaaagatccggtgcttcttgtctattccacacgaagcttgcttcagatcgagggaggatgtagcactgtccacaggtgggtgtatgaaaggaaaattctagaggatctccaaaatccaggtctactactcaacaggatattcttcaaggaaaatgaaccccacactaggcctggccatttttctggctgttctcctcacggtgaaaggtcttctaaagccgagcttctcaccaaggaattataaagctttgagcgaggtccaaggatggaagcaaaggatggcagccaaggagcttgcaaggcagaacatggacttaggctttaagctgctcaagaagctggccttttacaaccctggcaggaacatcttcctatcccccttgagcatctctacagctttctccatgctgtgcctgggtgcccaggacagcaccctggacgagatcaagcaggggttcaacttcagaaagatgccagaaaaagatcttcatgagggcttccattacatcatccacgagctgacccagaagacccaggacctcaaactgagcattgggaacacgctgttcattgaccagaggctgcagccacagcgtaagtttttggaagatgccaagaacttttacagtgccgaaaccatccttaccaactttcagaatttggaaatggctcagaagcagatcaatgactttatcagtcaaaaacccatgggaaaattaacaacctgatcgagaatatagaccccggcactgtgatgcttcttgcaaattatattttctttcgagccaggtggaaacatgagtttgatccaaatgtaactaaagaggaagatttctttctggagaaaaacagttcagtcaaggtgcccatgatgttccgtagtggcatataccaagttggctatgacgataagctctcttgcaccatcctggaaataccctaccagaaaaatatcacagccatcttcatccttcctgatgagggcaagctgaagcacttggagaagggattgcaggtggacactttctccagatggaaaacattactgtcacgcagggtcgtagacgtgtctgtacccagactccacatgacgggcaccttcgacctgaagaagactctctcctacataggtgtctccaaaatctttgaggaacatggtgatctcaccaagatcgcccctcatcgcagcctgaaagtgggcgaggctgtgaacaaggctgagctgaagatggatgagaggggtacggaaggggccgctggcaccggagcacagactctgcccatggagacaccactcgtcgtcaagatagacaaaccctatctgctgctgatttacagcgagaaaataccttccgtgctcttcctgggaaagattgttaaccctattggaaaataa

SEQ ID NO: 90196 - DNA, 3293 bp, Homo sapiens
atgactcatgcctgtaatcccagcactttgggaggccaaggcaggcggatcacaaggtcacatggtcgccgtcgctcatcacgtggccccgtcgcgcgtcacgtggccgccggcgcgggtcacgagaacaaacacgggggcagccggcgcttcccggccggtgtcgctccgcggcgggccatggccaacgtctctaagaaggtgtcctggtccggccgggaccgggacgacgaggaggcggcgccgctgctgcggaggacggcgcggcccggcggggggacgccgctgctgaacggggctgggcctggggctgcgcgccagtcaccacgttctgcgcttttccgagtcggacatatgagcagcgtggagctggatgatgaacttttggaaccggaatatggaccctccacatcccttccccaaggagatcccacacaacgagaagctcctgtccctcaagtatgagagcttggactatgacaacagtgagaaccagctgttcctggaggaggagcggcggatcaatcacacggccttccggacggtggagatcaagcgctgggtcatctgcgccctcattgggatcctcacgggcctcgtggcctgcttcattgacatcgtggtggaaaacctggctggcctcaagtacagggtcatcaagggcagtatccttcccaatatcgacaagttcacagagaagggcggactgtccttctccctgttgctgtgggccacgctgaacgccgccttcgtgctcgtgggctctgtgattgtggctttcatagagccggtggctgctggcagcggaatcccccagatcaagtgcttcctcaacggggtgaagatcccccacgtggtgcggctcaagacgttggtgatcaaagtgtccggtgtgatcctgtccgtggtcgggggcctggccgtgggaaaggaagggccgatgatccactcaggttcagtgattgccgccgggatctctcagggaaggtcaacgtcactgaaacgagatttcaagatcttcgagtacttccgcagagacacagagaagcgggacttcgtctccgcaggggctgcggccggagtgtcagcggcgtttggagcccccgtgggtggggtcctgttcagcttggaggagggtgcgtccttctggaaccagttcctgacctggaggatcttctttgcttccatgatctccacgttcaccctgaattttgttctgagcatttaccacgggaacatgtgggacctgtccagcccaggcctcatcaacttcggaaggtttgactcggagaaaatggcctacacgatccacgagatcccggtcttcatcgccatgggcgtggtgggcggtgtgcttggagccgtgttcaatgccttgaactactggctgaccatgtttcgaatcaggtacatccaccggccctgcctgcaggtgattgaggccgtgctggtggccgccgtcacggccacagttgccttcgtgctgatctactcgtcgcgggattgccagcccctgcaggggggctccatgtcctacccgctgcagctcttttgtgcagatggcgagtacaactccatggctgcggccttcttcaacaccccggagaagagcgtggtgagcctcttccacgacccgccaggctcctacaaccccctgaccctcggcctgttcacgctggtctacttcttcctggcctgctggacctacgggctcacggtgtctgccggggtcttcatcccgtccctgctcatcggggctgcctggggccggctctttgggatctccctgtcctacctcacgggggcggcgatctgggcggaccccggcaaatacgccctgatgggagctgctgcccagctgggcgggattgtgcggatgacactgagcctgaccgtcatcatgatggaggccaccagcaacgtgacctacggcttccccatcatgctggtgctcatgaccgccaagatcgtgggcgacgtcttcattgagggcctgtacgacatgcacattcagctgcagagtgtgcccttcctgcactgggaggccccggtcacctcacactcactcactgccagggaggtgatgagcacaccagtgacctgcctgaggcggcgtgagaaggtcggcgtcattgtggacgtgctgagcgacacggcgtccaatcacaacggcttccccgtggtggagcatgccgatgacacccagcctgcccggctccagggcctgatcctgcgctcccagctcatcgttctcctaaagcacaaggtgtttgtggagcggtccaacctgggcctggtacagcggcgcctgaggctgaaggacttccgagacgcctacccgcgcttcccacccatccagtccatccacgtgtcccaggacgagcgggagtgcaccatggacctctccgagttcatgaacccctccccctacacggtgccccaggaggcgtcgctcccacgggtgttcaagctgttccgggccctgggcctgcggcacctggtggtggtggacaaccgcaatcaggttgtcgggttggtgaccaggaaggacctcgccaggtaccgcctgggaaagagaggcttggaggagctctcgctggcccagacaggccccaaggcccaagctacagccgagggcagggtggccggtgcagcccagcagccatgtcagctgagagccgtcaccctggaagacctggggctcctcctggcaggaggcctggccagccccgagcccttgagcctggaggagctctcggagaggtatgagtccagccatccgacatccacggcctctgtccccgagcaggacaccgccaagcactggaaccagctggagcagtgggtggtggagctgcaggccgaggtggcctgcctgcgggagcacaagcagcgctgtgagcgcgccacgcggagcctgctgcgggagctgctccaggtgcgggcccgcgtgcagctgcagggctcagagctgaggcagttgcagcaggaggcgcggccggcagcccaggcccccgaaaaggaggcgccggagttctctggtctccagaaccagatgcaggccctggacaaaaggctggtggaggtccgggaagccttgacccggctcaggaggaggcaggtgcaacaggaggcggagagaaggggcgccgagcaagaggccggcctcagactggccaagctgaccgacttgctgcagcaggaggagcagggccgggaggtggcctgcggcgccctgcagaagaaccaagaggacagcagccggagggtggacctggaggtggccagaatgc

SEQ ID NO: 90197 - DNA, 1497 bp, Homo sapiens
  misc_feature (1)...(1497): n = a,t,c or g
caggcagggaaggagaggtgtctgtgcgtcctgcacccacatctttctnctcccctccttgccctgtctggaggctgctagactcctatcttctgaattctatagtgcctgggtctcagcgcagtgccgatggtggcccgtccttgtggttcctctctacctggggaaataaggtaggggagggaggggaagtgggttaagggctccccggatcgcctgggcctcccaaccctctgacattccccatccaggtgcagcggccatggctacagcaagacccccctggatgtgggtgctctgtgctctgatcacagccttgcttctgggggtcacagagcatgttctcgccaacaatgatgtttcctgtgaccacccctctaacaccgtgccctctgggagcaaccaggacctgggagctggggccggggaagacgcccggtcggatgacagcagcagccgcatcatcaatggatccgactgcgatatgcacacccagccgtggcaggccgcgctgttgctaaggcccaaccagctctactgcggggcggtgttggtgcatccacagtggctgctcacggccgcccactgcaggaagaaagttttcagagtccgtctcggccactactccctgtcaccagtttatgaatctgggcagcagatgttccagggggtcaaatccatcccccaccctggctactcccaccctggccactctaacgacctcatgctcatcaaactgaacagaagaattcgtcccactaaagatgtcagacccatcaacgtctcctctcattgtccctctgctgggacaaagtgcttggtgtctggctgggggacaaccaagagcccccaagtgcacttccctaaggtcctccagtgcttgaatatcagcgtgctaagtcagaaaaggtgcgaggatgcttacccgagacagatagatgacaccatgttctgcgccggtgacaaagcaggtagagactcctgccagggtgattctggggggcctgtggtctgcaatggctccctgcagggactcgtgtcctggggagattacccttgtgcccgggcccaaacaagaccggggtgtctacacgaacttctgcaagttcaccaaagtggatccaggaaaccatccaggccaactcctgagtcatccccaggactcagcacaccggcatccccacctgcttgcagggacagccctgacactcctttcaggaccctcattccttcccagagatgttgagaatgttcatctctccagcccctgaccccatgtctcctggactcagggtctgcttcccccacattgggctgaccgtgtctctctagttgaaccctgggaacaatttccaaaactgtccagggcgggggttgcgtctcaatctccctggggcactttcatcctcaagctcagggcccaatcccttctctgcaagctctgacccaaatttagtccccagaaataaactgagaagtggaatcttaaaaaaaaac

SEQ ID NO: 90198 - DNA, 2549 bp, Homo sapiens
cagacttccttttacttcttccttttgccctctcgcctcctcctcctgggaagaagcggaggcgccggccggtcggccgggatagcaacaggccgggccactgaggcggtgcggaaagtttctgtctgggagtgcggaactggggccgggttggtgtactgctcggagcaatggagccagccttcggggaggtgaaccagctgggaggagtgttcgtgaacgggaggccgctgcccaacgccatccggcttcgcatcgtggaactggcccaactgggcatccgaccgtgtgacatcagccgccagctacgggtctcgcacggctgcgtcagcaagatcctggcgcgatacaacgagacgggctcgatcttgccaggagccatcgggggcagcaagccccgggtcactacccccaccgtggtgaaacacatccggacctacaagcagagagaccccggcatcttcgcctgggagatccgggaccgcctgctggcggacggcgtgtgcgacaagtacaactgtgccctccgtgagctccatcagccgcattctgcgcaacaagatcggcaacttggcccagcagggtcattacgactcattacaagcagcaccagccgacgccgcagccagcgctgcccttacaaccacatctactcgtaccccagccctatcacggcggcggccgccaaggtgcccacgccacccggggtgcctgccatccccggttcggtggccatgccgcgcacctggccctcctcgcactccgtcaccgacatcctgggcatccgctccatcaccgaccaagtgagcgacagctccccctaccacagccccaaggtggaggagtggagcagcctgggccgcaacaacttccccgccgccgccccgcacgcggtgaacgggttggagaagggagccctggagcaggaagccaagtacggtcaggcaccaaatggtctcccagctgtggggcaggttttgtgtcagcatccagcatggctccttaccctaccccagcccaagtgtcgccttacatgacctacagtgctgctccttctggttatgttgctggacatgggtggcaacatgctgggggcacctcattgtctccccacaactgtgacattccggcatcgctggcgttcaagggaatgcaggcagccagagaaggtagtcattctgtcacggcttccgcgctctgacgggaaattccgtctccagcagcttcacccgggtctccctgtctcagcacctcctcccccaattcccaggtctcacatcccacccctcctgccctccaacccttctgccttgaaagctggctgtacggactcacatcctttgtgctaatgacacttacatatttcttgccataacttttctcttgcagaaaaactgacatgactttaggatttaaaaacaagagcaacaataagcattgaatgagacatttgtgttgctcacatactgtcttaacataacaaagaaacctacacccctcaaagggtttaaggaactttacaaactagtctttggtaaaaccacatgtgtatatttattctaaatcaacctgaacttttgaaatgtgcaattgttgagattttgcaaaatcaataaaggaaaatacttacagaaaaaattatgctacaccctctaatcaaatatggtaaccaagtaagctttaattcatcattaggaaacaaatcaataagtgacttgtttgagtgatcctttgtttaagacatgacctattttgttgaaaaatatatgtagaacccaagcaatatctgaatctagctctccctggtgttttgacttggttccaaatacaataatgtttatattttctattagtttgtaaatacggactctggatggtgcatttgtgtcttcattccataagatattcccctcccctcagccccaccccctctctatttttttctttcttttttgcaaaggtgactttctggcaacgtctttgtctctgtttggtggtgggctgctcgggctcctggatctggacttgcccccaaattttgtgtatgcagtgaaggcttcaacatctcatgaaggacactttatttctacagcagaggacacgaaaaacagataaaacaagccaggctcccattttgtacctaatcaaacaacacacatgctaagcatataaagacaagagggtggaaaatatctgaacaagaaggctctaaaggaagtcacttagaaacttaagtttaatgtgaaatgttttgcaaagatgcttaaaatgaactttgtgttaagaaaaccactgtgaaactaaattgtcctattattgttggcttacctgtgtgttcagcaatctcagccccaaataatgttgtaatttaaagaaaatggaaaattctgctctaatgaatgtaacaatggcttgctgtgaagtttacattgttgtacagaagcatgtttcgcatgtaggtaaactggtggtggtactagaaatacaatgttatttaattttaacaaattccctttattcatttctgaaattacaggacacagtttaac

SEQ ID NO: 90199 - DNA, 448 bp, Homo sapiens
cccgggtcgacccacgcgtccgaaagcaggtaggtctgttccggcagcttcctctctttccctgccagctggggtgggcccatcctcatgccgagcgtcatgctgtgacctccaggaggcatattgtcttgttttgtgcaaggaggaaacagatgacagatgcattccttggggaactcgtcagggccacacagctgctggatggcagatcccttagcaagctggagacctgttttctggtgctgccaatggcgcgccgggttctcctgggagcttcgtgctgctcatctcagggaccgtgcacgtgggtgagcagcagacatgccttgtggcctatgaagtcagacacctctggtatctgggagactttggctgcagaaggatctctgagtctccatttgcccatctgcagggggatctaatagtggcgaccgtaccggggttgcag

SEQ ID NO: 90200 - DNA, 998 bp, Homo sapiens
gcagcgcgccgtccggaattgacgcatcgacccacgcgttcgcccggtgcaagcacccaatcaatgtgagacgagaccccagcatccctatctatggactccgacagtccatcttattaaataccaggcttcaggactgctatgtggactcgccggctctcaccaacatctggatggccagaacatgtgcaaagcagaacattaatgccccagcaccagctaccacttcctcttgggaagttgtaaggaacccattaattgccagttccttctccctggttaagcttgtactcaggcggcaactgaagaataagtgctgcccaccaccatgcaagtttggagaaggaaaactctcgaagagattaaagcacaaggacgattcagtgatgaaagccacccagcaggccaggaaaagaaacttcatcagttccaagagcaagcagccagcagggcataggaggcctgcaggaggcatcagagagagtaaagaaagttcaaaggagaaaaaactaacagtccgccaagatcttgaggacagatatgctgaacatgtggctgccaccccaagcgctaccccaggacagtgggacagcagcctggaagggcccgagtgttgcttcctgaaacccaaaagagacagcagttgtcggaggacacgctaaccatccatggtctccccacagagggttaccaggctctgtaccacgctgtggtggagccaatgctgtggaatccttcagggacccccaagaggtacagcctggagctgggcaaggccattaaacaaaagctctgggaggctctttgcagtcagggtgccatctctgaaggtgctcagagggaccggttccctggcaggaagcagccaggtgtccacgaggagcctgtactcaagaaatggcccaagttaaagagcaaaaaataggaacaagaactcatgggattagagtattctctgctagagatctgaaaaataaacacaactttgcaccttcaaa

SEQ ID NO: 90201 - DNA, 1716 bp, Homo sapiens
atgggaaatttggaattaagccttcccagaggagaatttctgggaaatctacatttcatagtgaaatggagggtgaagacacaagagatgattcattatactctattttagaagaattgtggcaagatgctgaacagataaagagatgtcaggaaaaacacaacaaacttctgagtcgcactactttcctcaataagaaaatattgaatacagagtgggattatgaatataaagactttggaaaatttgttcatccaagcccaaatctcattctttcacagaaaagaccccataaacgtgattcatttgggaagagttttaagcataatttagacttacatattcataataaaagcaatgcagcaaagaacctggataaaactattgggcatggtcaagtttttacccagaactcttcttatagtcaccacgaaaatacacatacaggagtgaagttctgtgaacgtaatcaatgtggaaaagtcctcagcctcaaacactcactcagtcaaaatgtgaaatttcccattggagagaaagcaaacacatgtactgaatttgggaagatcttcacccagaggtcacatttctttgctcctcaaaaaattcatactgtggaaaaacctcatgagcttagcaaatgtgtaaatgtttttacacagaagccactactcagtatatatctgagagttcatagagatgaaaaactctacatatggtactaaaatgtgggaaagggccttcatcccagaaattcagaattaattatgcatgagaaaactcatactagagagaaaccctataaatgcaatgaatggtgggaaatcatttttccaggtgtcatctctactcaggcatcagacaactcatactggagaaaaactctttgaatgcagtgaatgtggtaaaggcttctccctgaactcagccctcaatatacatcagaaaattcacactggagagagacatcacaaatgcagtgagtgtgggaaagcctttacccaaaaatcaacactcaggatgcatcagagaattcatacaggagagaggtcctatatctgtactcaatgtgggcaggccttcatccagaaggcacacttgattgcacatcaaagaattcatactggagagaagccttatgaatgcagtgactgtgggaaatctttcccttctaagtcacaactccagatgcataagagaattcatacaggagagaaaccctatatatgcactgaatgtgggaaggctttcaccaacaggtcaaatctcaatactcaccagaagtctcatactggagaaaagtcttatatatgtgctgaatgtgggaaggccttcaccgacaggtcaaatttcaataaacaccagaccattcacactggagagaaaccctatgtttgtgctgattgtgggagggccttcatccagaagtcagagttgattacacatcagagaattcatactacagagaagccttataaatgtcctgactgtgagaaatccttctccaagaaaccacatctcaaagtacatcaacgaattcacacaggggagaaaccatatatatgtgcagaatgtgggaaagccttcactgataggtcaaatttcaataaacatcagacaattcatactggagataaaccgtataaatgcagcgactgtggaaaggggttcacccagaaatcagttctcagtatgcatcgcaatattcatacatga

SEQ ID NO: 90202 - DNA, 6273 bp, Homo sapiens
gtatcatcagtttctcatgaaaatcctactgaagtgtttgaagatggagaaaatccaccaagtagtcgatcatcagagagtggattcactgagtttatacaatatcaagcagaccgaactgatgatattgacagagaactgagtgagggccagggggcagctgccatcccaattggtagcacatcctctgagacagaaacagcatccactgtgggatctgaagaaaccatcatccagaccccttccgtagtcactcaggggacagcaacccgaagtaggaagacagcccaaaagactgcaatgcagtgctgcttggagtatgtccaacagtttcttaccagacttatcaacctctacatcattcagaataactctttttctcagtctttggctacagaacatcaaggggatcttggtcgagaacaaggagagacttcaaaatgggacagaaattcacaaggagatgtaaaagagaaaaacataagtaaacaaaaaacttctaaagaatacctgtctgccttccttgctgcctgtcagctcttcctagagtgctcaagtttcccagtttacattgctgaggggaaccatacatcagagttacgttctgaaaaattggagactgactgtgagcatgtgcagcctccacagtggctccagactctgatgaatgcttgcagccaagcaagtgatttcagtgttcagagtgttgctatttcactagttatggacctggtgggactgacacagtctgtggccatggtcactggggaaaacatcaacagtgtagagcctgcacaacccttaagtccaaaccagggaagagtagctgtggttattagacctcccctcactcagggcaatctgaggtacatagctgagaagactgaatttttcaagcatgtagctttaacattgtgggaccagttgggagatgggacacctcagcatcaccagaagagtgtggaactattttatcaattacataacttagttccttcttctagcatctgtgaggatgttataagtcagcagttaacccataaagataagaaaataaggatggaagcacatgccaagtttgcagttctttggcatctaacgagagatctccatataaataaatcttcatcttttgtacgttcttttgacaggtcactgttcatcatgttagatagccttaacagtctcgatggttctactagctctgtgggacaagcctggctgaaccaagtcctacaaagacatgatattgcacgagttttggaaccattgctattgctcctgcttcatccaaaaactcagagggtttcagtacagcgtgtacaagcagaacgttattggaataagtctccctgttatccaggagaggagagtgacaagcatttcatgcaaaattttgcctgcagcaatgtgagccaagtacaactcatcacatcaaaaggaaatggtgaaaagccacttaccatggatgaaatagagaactttagtctcactgtgaatccattaagtgacagactttccctcctaagtaccagcagtgagacaattccaatggttgtgtctgattttgatcttccagaccaacagatagaaatacttcagagttctgactcgggatgttcacagtcctctgctggggacaacttgagttacgaagttgatcctgaaaccgtgaatgcccaagaggattctcaaatgcccaaggaaagctccccagatgatgatgttcaacaggtagtatttgacctgatatgtaaagttgtaagtggcctcgaagtggaatctgcatcagttacatctcaattagaaattgaagctatgcccccaaagtgcagtgatatagatccagatgaagagacgattaaaattgaagatgactccattcaacagagtcagaatgctttgctgagtaatgaaagttctcagtttctgtctgtgtctgcagagggaggccatgagtgtgtggcaaatggaatctccaggaatagctcctcaccttgtatttcaggaaccacacacactcttcatgactcttctgttgcttccatagaaaccaaatctagacaaaggagtcacagtagtattcaattcagcttcaaagaaaaattatcagaaaaagtttcggagaaggaaacaatagttaaggagtcaggtaaacaaccaggagcaaaacctaaagtaaaacttgccagaaaaaaggatgatgacaagaaaaaatcttcaaatgaaaaactcaaacaaaccagtgtattcttcagtgatggtctggatttagagaactggtatagctgtggagagggagacatttctgaaattgagagtgacatgggttctccaggatctcgaaaatctcccaatttcaacattcatcctctctatcaacatgtgctcctgtatctccagttgtatgattcatccaggactttgtatgctttctctgccatcaaagccatcttgaaaactaaccctatagcttttgtaaatgccatttcaactactagtgtaaataatgcatatactcctcagttgtctctccttcagaatctattggccagacaccggatttctgttatgggcaaagatttttatagtcacattccagtggactcaaatcataacttccggagttctatgtacatagaaattcttatttctctctgcttatattacatgcgtagccattacccaactcatgtcaaggttactgcacaagatttaataggcaatcgaaacatgcaaatgatgagcatagaaattctgacactactcttcactgagctggcaaaagtaatagaaagctcagcgaagggtttccctagttttatttctgatatgttatctaagtgcaaagttcagaaagtgattcttcattgtttgctgtcatctatctttagtgctcagaaatggcatagtgaaaaaatggcaggtaagaacctggttgctgtggaagaaggtttctcagaggacagccttattaatttctcagaggatgaatttgacaatggcagcacgttgcagtcacaacttcttaaggtgcttcagaggctgattgttcctagaacacagagtaatgaactattcctgaagagcaatgaaacaggttttgattttgttgtatcctgacttagaacacatcagtccccatcaacccatgacttctcttcagtatttgcatgctcagtcaatcacatgtcaaggcatgttcctctgtgcagtgatacgagcttttgcatcagcactgtgcatgtaagatgcacccacaatggattggtttaatcacatctactctgccttacatgggaaaagttctgcagagagtggttgtttctgtgacactacaactgtgcagaaatttagataatctaattcagcagtacaaatacgaaacaggattatctgatagtaggcctctgtggatggcatcaattattccaccagatatgattcttactcttttggaagggattacagccattatccattactgtttgttggatccaactacacagtatcaccaacttttggtcagtgtagaccagaaacacttgtttgaagcacgcagtggaatcctctcaatccttcatatgatcatgtcctctgtgacactgctttggagcatactgcatcaagctgattcttcagaaaagatgactattgccgcatccgcatctcttaccactattaatcttggagctacaaagaacttgagacaacagattcttgaattgttgggccccatttcaatgaatcatggtgttcactttatggctgccattgcatttgtgtggaatgaaagaagacagaataaaacaaccaccaggaccaaggtcattcctgcagccagtgaagaacagcttttattagtggaattggttcgttcaatcagtgtcatgagagcagaaactgttatccagactgtaaaagaagttttaaagcagccaccagccatagccaaggacaagaaacatctttctttggaagtctgcatgcttcagtttttctatgcttatattcaaagaattccagtgcccaatttagtggatagctgggcgtcactgttgatacttctgaaagactctatacaactgagtcttccagctccagggcagtttcttatacttggggttctgaatgagtttattatgaaaaaccctagtttggaaaataaaaaagaccaaagagaccttcaggatgtaactcacaaaatagtggatgcaattggtgcaattgctggttcttctctggaacagacaacatggctgcgacgaaatcttgaagttaagccttctcccaaaataatggtagatggaaccaatttggaatctgatgttgaagatatgttatcacctgcaatggaaaccgcaaacataactccttctgtatatagtgtccatgcattgacattactctctgaggttttggctcatcttttggatatggttttctatagtgatgaaaaggagcgggttattcctttacttgtaaatattatgcattatgttgtgccctacctcagaaatcacagtgcacataatgcccctagttatcgagcttgtgtccagctgctcagcagtcttagtgggtatcagtacacacggagagcttggaaaaaagaagcttttgacctctttatggatcccagtttctttcagatggatgcctcttgtgttaatcattggagagcaattatggacaatctgatgacacatgataaaacaacatttagagatttgatgactcgtgtagcagtggctcaaagcagttcacttaatctctttgcaaaccgtgatgtggagctagaacagagagctatgcttcttaaaagattagcatttgctatttttagcagtgaaattgaccagtaccagaaatatcttccagatatacaagagagattggttgagagtctccgtttgccacaggtgccaactctccattctcaagtgttcctgtttttcagagtgttacttttaagaatgtctccccaacatcttacctcactctggcctaccatgattacagaacttgtacaagtatttttactgatggagcaggaactcactgctgatgaagatatttcacggacttcagggccctctgtggctggtctggagacaacgtacacaggaggtaatggcttctctacttcatataacagccagcggtggttaaacctctatctctctgcttgcaaatttttggatttggctctcgcattgccctctgaaaaccttcctcagtttcagatgtaccgatgggcctttattccagaagcctcagatgattcaggtttggaagtcagaaggcagggtatacatcaacgagaatttaaaccttacgtggtacgactagcaaaacttcttcggaaaagagcaaagaaaaatccagaggaagacaactcagggagaacattgggttgggagccagggcacttgctgctcaccatctgcaccgtgcgcagtatggagcagctcctgccgttcttcaatgtgctcagtcaagtcttcaacagcaaagtcacaagccgatgtggaggacactcagggagtcctatcctctactcaaatgccttccctaataaggacatgaaactggagaaccacaaaccatgttccagcaaagccaggcaaaaaatagaagagatggtagaaaaagattttctggaagggatgataaaaacttgagcaccattgctggttccatttagcttacatgtaaatgtaattatttaaaacacacacactgctctgcgttgtatagtttttccttttttgtatgtaacagaacacatttcagattgtatttaatttaaatatttgtatataagagcaaatgtctgaatgtggcctgaatcaagtttaaatattgttggctcatactgattatggtgcctaagagagctatatatatacacatgtaaagtccattgtttttattgtcctgagttgtcttaaacctgcaaaatatacactacccattttttttttccattggtttcagacttggttcaattaagattggttggggatttttctcttttccttattaaccatgttctggtatcagaatggtgttccttctccatcagaggctgggaaacgtattataattagtttttctcccacataccttcaccaagagcagtgaagaataactgaaggctggaccatgcatccttaaaagtattgcatgagcatctccacctcagtatggaagagggatggacaaccccctattcatacctctgagttcctgatggcattagtcatatag

SEQ ID NO: 90203 - DNA, 1502 bp, Homo sapiens; identical to SEQ ID NO: 60911

SEQ ID NO: 90204 - DNA, 2082 bp, Homo sapiens
cccgggtcgacccacgcgtccggggagcaacctcagcttctagtatccagactccagcgccgccccgggcgcggaccccaaccccgacccagagcttctccagcggcggcgcagcgagcagggctccccgccttaacttcctccgcggggcccagccaccttcgggagtccgggttgcccacctgcaaactctccgccttctgcacctgccacccctgagccagcgcgggcgcccgagcgagtcatggccaacgcggggctgcagctgttgggcttcattctcgccttcctgggatggatcggcgccatcgtcagcactgccctgccccagtggaggatttactcctatgccggcgacaacatcgtgaccgcccaggccatgtacgaggggctgtggatgtcctgcgtgtcgcagagcaccgggcagatccagtgcaaagtctttgactccttgctgaatctgagcagcacattgcaagcaacccttgccttgatggtggttggcatcctcctgggagtgatagcaatctttgtggccaccgttggcatgaagtgtatgaagtgcttggaagacgatgaggtgcagaagatgaggatggctgtcattgggggcgcgatatttcttcttgcaggtctggctattttagttgccacagcatggtatggcaatagaatcgttcaagaattctatgaccctatgaccccagtcaatgccaggtacgaatttggtcaggctctcttcactggctgggctgctgcttctctctgccttctgggaggtgccctactttgctgttcctgtccccgaaaaacaacctcttacccaacaccaaggccctatccaaaaacctgcaccttcccagcgggaaagactacgtgtgacacagaggcaaaaggagaaaatcatgttgaaacaaaccgaaaatggacattgagatactatcattaacattaggaccttagaatttttgggtattgtaatctgaagtatggtattacaaaacaaacaaacaaacaaaaaacccatgtgttaaaatactcagtgctaaacatggcttaatcttattttatcttctttcctcaatataggaggggaagatttttcccatttgtattactgcttcccattgagtaatcatactcaactgggggaaggggtgctccttaaatatatatagatatgtatatatacatgtttttctattaaaaatagacagtaaaatactattctcattatgttgatactagcatacttaaaatatctctaaaataggtaaatgtatttaattccatattgatgaagatgtttattggtatattttctttttcgtctatatatacatatgtaacagtcaaatatcatttactcttcttcattagctttgggtgcctttgccacaagacctagcctaatttaccaaggatgaattctttcaattcttcatgcgtgcccttttcatatacttattttattttttaccataatcttatagcacttgcatcgttattaagcccttatttgttttgtgtttcattggtctctatctcctgaatctaacacatttcatagcctacattttagtttctaaagccaagaagaatttattacaaatcagaactttggaggcaaatctttctgcatgaccaaagtgataaattcctgttgaccttcccacacaatccctgtactctgacccatagcactcttgtttgctttgaaaatatttgtccaattgagtagctgcatgctgttcccccaggtgttgtaacacaactttattgattgaatttttaagctacttattcatagttttatatccccctaaactacctttttgttccccattccttaattgtattgttttcccaagtgtaattatcatgcgttttatttcttcctaataaggtgtggtctgtttgtctgaacaaagtgctagactttctggagtgataatctggtgacaaatattctctctgtagctgtaagcaagtcacttaatctttctacctctttttttgctatctgccaaattgagataatgatacttaaccagttagaagaggtagtgtgaatatttaatt

SEQ ID NO: 90205 - DNA, 467 bp, Homo sapiens
tcgaccggacttcccggatcgagccacacgtcccgagatctagatcgcgggcaaatggcgtaacctctctaagcctatttcctccactgtaaagggaggaaaataaaaactatgccacagttttaaggataatttaaataaaataacatatgcaacattaaaataatgtatactgggtgctcaaatgtatctaaatgacaaattatcaacacgtcttaaagaaaaaagccctggttggcatgacggtcaagagacccgggctctcctgcttgctgtaaccttggacaattgtcttgccctcttggagcccttcgtctttatagtctgtggagctgaattagagcagggcttcccaatgcttcctacaacgttctcttgctctcttttatttgcatgcccaaaaatatgttgcatgttagtttctgtggcttatactatgaaaagaaagttgctattgctatattgaa

SEQ ID NO: 90206 - DNA, 6685 bp, Homo sapiens; identical to SEQ ID NO: 60575

SEQ ID NO: 90207 - DNA, 598 bp, Homo sapiens
ttttttttttttagaaaaaaacacagagctttattattctcaacaccaatggcagcggtcttcataggacagaggagtgagttctgtcaacagacaggcggcccctacttgccggcgatgagcgggttccgcaggaccacgatgactgagtccccgcgcaggaacatcttggagatgtagcggtctttgttgactggcttggacttcttcttgcccttgccactcttgggtacctcagtccacatctccttcacgttctccagcaccatgttgcagtgcctggtggggaacagggaggggaggctctatcgaaggccttcacgcggcccaggagtttcttattgttgcggcagttgatgagcacttgggtattgttcttgactgactgtgtgagcacagagagtggaccggtgttaaattcctcctcctctcgcttctgcagctcctctggggtcatctcactcttgggcttgttgaggaggctcatgatggtcactacgctctccgttcactcccgtttcctccgcgttgcccacgcgtccaaggacgcgtgggcggacgcgtgggcggacgcgtgggcggacgcgtgggtcgcccc

SEQ ID NO: 90208 - DNA, 2123 bp, Homo sapiens; identical to SEQ ID NO: 61036
  misc_feature (1)...(2123): n = a,t,c or g

SEQ ID NO: 90209 - DNA, 8837 bp, Homo sapiens
tttcgtaaagggagggtggttggtggatgtcacagcttgggctttatctcccccagcagtggggactccacagcccctgggctacataacagcaagacagtccggagctgtagcagacctgattgagcctttgcagcagctgagagcatggcctagggtgggcggcaccattgtccagcagctgagtttcccagggaccttggagatagccgcagccctcatttgcaggggaagatgattcctgccagatttgccggggtgctgcttgctctggccctcattttgccagggaccctttgtgcagaaggaactcgcggcaggtcatccacggcccgatgcagccttttcggaagtgacttcgtcaacacctttgatgggagcatgtacagctttgcgggatactgcagttacctcctggcagggggctgccagaaacgctccttctcgattattggggacttccagaatggcaagagagtgagcctctccgtgtatcttggggaattttttgacatccatttgtttgtcaatggtaccgtgacacagggggaccaaagagtctccatgccctatgcctccaaagggctgtatctagaaacttgaggctgggtactacaagctgtccggtgaggcctatggctttgtggccaggatcgatggcagcggcaactttcaagtcctgctgtcagacagatacttcaacaagacctgcgggctgtgtggcaactttaacatctttgctgaagatgactttatgacccaagaaggtaccttgacctcggacccttatgactttgccaactcatgggctctgagcagtggagaacagtggtgtgaacgggcatctcctcccagcagctcatgcaacatctcctctggggaaatgcagaagggcctgtgggagcagtgccagcttctgaagagcacctcggtgtttgcccgctgccaccctctggtggaccccgagccttttgtggccctgtgtgagaagactttgtgtgagtgtgctggggggctggagtgcgcctgccctgccctcctggagtacgcccggacctgtgcccaggagggaatggtgctgtacggctggaccgaccacagcgcgtgcagcccagtgtgccctgctggtatggagtataggcagtgtgtgtccccttgcgccaggacctgccagagcctgcacatcaatgaaatgtgtcaggagcgatgcgtggatggctgcagctgccctggagggacagctcctgggatgaaggccttctgcgttgagagcaccgagtgttcctgcgtgcatttccggaaagcgctaccctcccggcacctccctctctcgagactgcaacacctggtattgccgaaacagccagtggatctgcagcaatgaagaatgtccaggggagtgccttgtcactggtcaatcccacttcaagagctttgacaacagatacttcaccttcagtgggatctgccagtacctgctggcccgggattgccaggaccactccttctccattgtcattgagactgtccagtgtgctgatgaccgcgacgctgtgtgcacccgctccgtcaccgtccggctgcctggcctgcacaacagccttgtgaaactgaagcatggggcaggagttgccatggatggccaggacatccagctccccctcctgaaaggtgacctccgcatccagcatacagtgacggcctccgtgcgcctcagctacggggaggacctgcagatggactgggatggccgcgggaggctgctggtgaagctgtcccccgtctacgccgggaagacctgcggcctgtgtgggaattacaatggcaaccagggcgacgacttccttaccccctctgggctggcagagccccgggtggaggacttcgggaacgcctggaagctgcacggggactgccaggacctgcagaagcagcacagcgatccctgcgccctcaacccgcgcatgaccaggttctccgaggaggcgtgcgcggtcctgacgtcccccacattcgaggcctgccatcgtgccgtcagcccgctgccctacctgcggaactgccgctacgacgtgtgctcctgctcggacggccgcgagtgcctgtgcggcgccctggccagctatgccgcggcctgcgcggggagaggcgtgcgcgtcgcgtggcgcgagccaggccgctgtgagctgaactgcccgaaaggccaggtgtacctgcagtgcgggaccccctgcaacctgacctgccgctctctctcttacccggatgaggaatgcaatgaggcctgcctggagggctgcttctgccccccagggctctacatggatgagaggggggactgcgtgcccaaggcccagtgcccctgttactatgacggtgagatcttccaagccagaagacatcttctcagaccatcacaccatgtgctactgtgaggatggcttcatgcactgtaccatgagtggagtccccggaagcttgctgcctgacgctgtcctcagcagtcccctgtctcatcgcagcaaaaggagcctatcctgtcggccccccatggtcaagctggtgtgtcccgctgacaacctgcgggctgaagggctcgagtgtaccaaaacgtgccagaactatgacctggagtgcatgagcatgggctgtgtctctggctgcctctgccccccgggcatgcgtccggcatgagaacagatgtgtggccctggaaaggtgtccctgcttccatcagggcaaggagtatgcccctggagaaacagtgaagattggctgcaacacttggtgctgtcaggaccggaagtggaactgcacagaccatgtgtgtgatgccacgtgctccacgatcggcatggcccactacctcaccttcgacgggctcaaataccctgttccccggggagtgccagtacgttcttggtgcaggattacttgcggcagtaaccctgggacctttcggatcctagtggggaataagggatgcagccacccctcagtgaaatgcaagaaacgggtcaccatcctggtggagagtggagagattgagctgtttgacggggaggtgaatgtgaagaggcccatgaaggatgagactcactttgaggtggtggagtctggccggtatatcattctgctgctgggcaaagccctctccgtggtctgggaccgccacctgagcatctccgtggtcctgaagcagacataccaggagaaagtgtgtggcctgtgtgggaattttgatggcatccagaacaatgacctcaccagcagcaacctccaagtggaggaagaccctgtggactttgggaactcctggaaagtgagctcgcagtgtgctgacaccagaaaagtgcctctggactcatcccctgccacctgccataacaacatcatgaagcagacgatggtggattcctcctgtagaatccttaccagtgacgtcttccaggactgcaacaagctggtggaccccgagccatatctggatgtctgcatttacgacacctgctcctgtgagtccattggggactgcgcctgcttctgcgacaccattgctgcctatgcccacgtgtgtgcccagcatggcaaggtggtgacctggaggacggccacattgtgcccccagagctgcgaggagaggaatctccgggagaacgggtatgagtgtgagtggcgctataacagctgtgcacctgcctgtcaagtcacgtgtcagcaccctgagccactggcctgccctgtgcagtgtgtggagggctgccatgcccactgccctccagggaaaatcctggatgagcttctgcagacctgcgttgaccctgaagactgtccagtgtgtgaggtggctggccggcgttttgcctcaggaaagaaagtcaccttgaatcccagtgaccctgagcactgccagatttgccactgtgatgttgtcaccctcacctgtgaagcctgccaggagccgggaggcctggtggtgcctcccacagatgccccggtgagccccaccactctgtatgtggaggacatctcggaaccgccgttgcacgatttctactgcagcaggctactggacctggtcttcctgctggatggctcctccaggctgtccgaggctgagtttgaagtgctgaaggcctttgtggtggacatgatggagcggctgcgcatctcccagaagtgggtccgcgtggccgtggtggagtaccacgacggctcccacgcctacatcgggctcaaggaccggaagcgaccgtcagagctgcggcgcattgccagccaggtgaagtatgcgggcagccaggtggcctccaccagcgaggtcttgaaatacacactgttccaaatcttcagcaagatcgaccgccctgaagcctcccgcatcgccctgctcctgatggccagccaggagccccaacggatgtcccggaactttgtccgctacgtccagggcctgaagaagaagaaggtcattgtgatcccggtgggcattgggccccatgccaacctcaagcagatccgcctcatcgagaagcaggcccctgagaacaaggccttcgtgctgagcagtgtggatgagctggagcagcaaagggacgagatcgttagctacctctgtgaccttgcccctgaagcccctcctcctactctgccccccgacatggcacaagtcactgtgggcccggggctcttgggggtttcgaccctggggcccaagaggaactccatggttctggatgtggcgttcgtcctggaaggatcggacaaaattggtgaagccgacttcaacaggagcatggagttcatggaggaggtgattcagcggatggatgtgggccaggacagcatccacgtcacggtgctgcagtactcctacatggtgactgtggagtaccccttcagcgaggcacagtccaaaggggacatcctgcagcgggtgcgagagatccgctaccagggcggcaacaggaccaacactgggctggccctgcggtacctctctgaccacagcttcttggtcagccagggtgaccgggagcaggcgcccaacctggtctacatggtcaccggaaatcctgcctctgatgagatcaagaggctgcctggagacatccaggtggtgcccattggagtgggccctaatgccaacgtgcaggagctggagaggattggctggcccaatgcccctatcctcatccaggactttgagacgctcccccgagaggctcctgacctggtgctgcagaggtgctgctccggagaggggctgcagatccccaccctctcccctgcacctgactgcagccagcccctggacgtgatccttctcctggatggctcctccagtttcccagcttcttattttgatgaaatgaagagtttcgccaaggctttcatttcaaaagccaatatagggcctcgtctcactcaggtgtcagtgctgcagtatggaagcatcaccaccattgacgtgccatggaacgtggtcccggagaaagcccatttgctgagccttgtggacgtcatgcagcgggaaggaggccccagccaaatcggggatgccttgggctttgctgtgcgatacttgacttcagaaatgcatggtgccaggccgggagcctcaaaggcggtggtcatcctggtcacggacgtctctgtggattcagtggatgcagcagctgatgccgccaggtccaacagagtgacagtgttccctattggaattggagatcgctacgatgcagcccagctacggatcttggcaggcccagcaggcgactccaacgtggtgaagctccagcgaatcgaagacctccctaccatggtcaccttgggcaattccttcctccacaaactgtgctctggatttgttaggatttgcatggatgaggatgggaatgagaagaggcccggggacgtctggaccttgccagaccagtgccacaccgtgacttgccagccagatggccagaccttgctgaagagttatcgggtcaactgtgaccgggggctgaggccttcgtgccctaacagccagtcccctgttaaagtggaagagacctgtggctgccgctggacctgcccctgcgtgtgcacaggcagctccactcggcacatcgtgacctttgatgggcagaatttcaagctgactggcagctgttcttatgtcctatttcaaaacaaggagcaggacctggaggtgattctccataatggtgcctgcagccctggagcaaggcagggctgcatgaaatccatcgaggtgaagcacagtgccctctccgtcgagctgcacagtgacatggaggtgacggtgaatgggagactggtctctgttccttacgtgggtgggaacatggaagtcaacgtttatggtgccatcatgcatgaggtcagattcaatcaccttggtcacatcttcacattcactccacaaaacaatgagttccaactgcagctcagccccaagacttttgcttcaaagacgtatggtctgtgtgggatctgtgatgagaacggagccaatgacttcatgctgagggatggcacagtcaccacagactggaaaacacttgttcaggaatggactgtgcagcggccagggcagacgtgccagcccatcctggaggagcagtgtcttgtccccgacagctcccactgccaggtcctcctcttaccactgtttgctgaatgccacaaggtcctggctccagccacattctatgccatctgccagcaggacagttgccaccaggagcaagtgtgtgaggtgatctcctcttatgcccacctctgtcggaccaacggggtctgcgttgactggaggacacctgatttctgtgctatgtcatgcccaccatctctggtctacaaccactgtgagcatggctgtccccggcactgtgatggcaacgtgagctcctgtggggaccatccctccgaaggctgtttctgccctccagataaagtcatgttggaaggcagctgtgtccctgaagaggcctgcactcagtgcattggtgaggatggagtccagcaccagttcctggaagcctgggtcccggaccaccagccctgtcagatctgcacatgcctcagcgggcggaaggtcaactgcacaacgcagccctgccccacggccaaagctcccacgtgtggcctgtgtgaagtagcccgcctccgccagaatgcagaccagtgctgccccgagtatgagtgtgtgtgtgacccagtgagctgtgacctgcccccagtgcctcactgtgaacgtggcctccagcccacactgaccaaccctggcgagtgcagacccaacttcacctgcgcctgcaggaaggaggagtgcaaaagagtgtccccaccctcctgccccccgcaccgtttgcccacccttcggaagacccagtgctgtgatgagtatgagtgtgcctgcaactgtgtcaactccacagtgagctgtccccttgggtacttggcctcaaccgccaccaatgactgtggctgtaccacaaccacctgccttcccgacaaggtgtgtgtccaccgaagcaccatctaccctgtgggccagttctgggaggagggctgcgatgtgtgcacctgcaccgacatggaggatgccgtgatgggcctccgcgtggcccagtgctcccagaagccctgtgaggacagctgtcggtcgggcttcacttacgttctgcatgaaggcgagtgctgtggaaggtgcctgccatctgcctgtgaggtggtgactggctcaccgcggggggactcccagtcttcctggaagagtgtcggctcccagtgggcctccccggagaacccctgcctcatcaatgagtgtgtccgagtgaaggaggaggtctttatacaacaaaggaacgtctcctgcccccagctggaggtccctgtctgcccctcgggctttcagctgagctgtaagacctcagcgtgctgcccaagctgtcgctgtgagcgcatggaggcctgcatgctcaatggcactgtcattgggcccgggaagactgtgatgatcgatgtgtgcacgacctgccgctgcatggtgcaggtgggggtcatctctggattcaagctggagtgcaggaagaccacctgcaacccctgccccctgggttacaaggaagaaaataacacaggtgaatgttgtgggagatgtttgcctacggcttgcaccattcagctaagaggaggacagatcatgacactgaagcgtgatgagacgctccaggatggctgtgatactcacttctgcaaggtcaatgagagaggagagtacttctgggagaagagggtcacaggctgcccaccctttgatgaacacaagtgtctggctgagggaggtaaaattatgaaaattccaggcacctgctgtgacacatgtgaggagcctgagtgcaacgacatcactgccaggctgcagtatgtcaaggtgggaagctgtaagtctgaagtagaggtggatatccactactgccagggcaaatgtgccagcaaagccatgtactccattgacatcaacgatgtgcaggaccagtgctcctgctgctctccgacacggacggagcccatgcaggtggccctgcactgcaccaatggctctgttgtgtaccatgaggttctcaatgccatggagtgcaaatgctcccccaggaagtgcagcaagtgaggctgctgcagctgcatgggtgcctgctgctgcctgccttggcctgatggccaggccagagtgctgccagtcctctgcatgttctgctcttgtgcccttctgagcccacaataaaggctgagctcttatcttgcaaaaggcaaaaaaaaaa

SEQ ID NO: 90210 - DNA, 369 bp, Homo sapiens
ctggaagaatgatcttctttttaaagaaaatttctaaattttggaattattttattttacttatttttaattttaaaaattttaccctcctctcaagtttccaatggaataattttaaattgattgaaaagatgaaaagttaaagaagaaaattgatgtgcccataacccagtctcccctgatcgtccataatcatagaacagtggtcagaactaagatattaacatcaacactttactgttaactgaaacacagacttggttggatgtcaccaggccttccactagaatctcttttctgtgctaggacctaagccagtgttccacattgcatttggaactaacgttttttaaatacctgtatgatgcc

SEQ ID NO: 90211 - DNA, 3084 bp, Homo sapiens
ataaaatattagggacttttcttggtagagatggaaatccaaataaacggaatgtgcacaatgaaacatctatgcatttgttgtgtatgggacctcaaattatgatatctgaaggagcccttcatcctcgcttggcacgccccacagaagatgatttcagaagagcagattgtctgcagatgatcttaaaatggaaaggagcaaaacttgaccagggtgaatatgagagagcagctattgatgctgttgataacaaaaaaaacacacccttgcactatgctgctgcctcagggatgaaagcctgtgtagagcttttagtaaaacatggaggagacttgtttgctgagaatgaaaataaagatactccttgtgattgtgctgaaaagcaacaccacaaagatttggccctcaatctggaatctcaaatggtattctcacgggatcccgaggctgaagaaatagaagctgaatatgctgcattagacaaacgagagccatatgaaggattaaggcctcaggatcttcgtagactaaaagatatgcttattgtggaaactgcagacatgcttcaggctcctctctttactgctgaagctttacttcgagctcatgactgggacagggagaaattacttgaagcttggatgtccaacccggagaactgctgccaacgatcaggtgttcaaatgccaactccaccaccaagtgggtataatgcctgggacacgctcccatctccaagaactccaaggactacacgctcttctgtcacctccccagatgaaatcagcttatctcctggggatttagacaccagtttgtgtgacatttgtatgtgcagtatctctgtatttgaagaccctgtggatatgccctgtggacatgacttttgtagaggatgttgggagtcgtttttgaatctgaaaattcaagaaggggaagctcacaacattttttgccctgcatatgattgcttccaacttgtacctggggatatcataaaaagtgtagtttcaaaggagatggacaaacgatacctacagtttgatattaaggcctttgttgaaaataatcctgccattaaatggtgtcctactccaggctgtgacagagcagtaagactaacgaaacaagggtcaaatacatctggatctgatacactcagcttcccattgctgagagctcctgctgttgattgtggaaaaggacacctcttctgctgggagtgccttggtgaagcacatgagccttgtgactgccaaacatggaagaattggctgcaaaaaataaccgaaatgaaaccagaagaacttgtgggagttagtgaagcctacgaggatgccgccaattgtctctggttattaactaactccaagccttgtgccaactgtaagtctccaatacagaagaatgaaggctgcaatcacatgcagtgtgctaagtgcaagtatgacttttgctggatttgccttgaagagtggaaaaaacatagttcgtccactgggaggttatttacagatgtactcggtatgaagtcatttcaacacgtggaggagcaatccaaggaaatgactgtggaggctgagaaaaaacacaaacgatttcaggaacttgacagatttatgcactattatacaagatttaaaaaccatgagcatagttatcagctagaacaacgccttcttaaaacagccaaagaaaagatggagcaattgagcagagctctcaaagaaactgaaggaggctgtccagataccactttcattgaagatgcagttcatgtgctcttaaaaactcggcgcattctcaagtgttcttatccatatggatttttcttggaacctaaaagcacaaagaaagaaatttttgaactaatgcaaacagacctagaaatggtcactgaagaccttgcccagaaagtcaataggccttaccttcgcacaccccgccacaagatcatcaaagcagcatgccttgtacagcagaagaggcaagaattcctggcatctgtggctcggggagtagctcctgcagactcaccagaagctccaaggcgcagctttgctggtggaacatgggattgggaatatttaggatttgcatcaccagaggaatatgctgaatttcagtatcggaggaggcacagacaacgtcgtcgaggagatgttcacagtctactcagtaatcctccagaccctgatgagccaagtgaaagcactttagatattccagaaggcggcagcagcagccgcaggcctggcacatccgtggtaagttctgcatctatgagtgtgctgcacagctcttccctgcgtgactacacccctgccagtcgctctgaaaaccaggactctcttcaggctctgagttccttggatgaagacgatcccaatatacttcttgcaatacagttatcactgcaagagtctgggctggccctcgatgaagaaactagagacttcctcagtaatgaagcatccttaggtgcgataggcacttctttaccttccaggctggactctgtccccagaaatacagattagccctcgggctgcattgagcagctctgagcttttggaacttggtgacagcctcatgagactaggagcagagaatgacccattttcaactgacaccctgagctcacaccctctcagtgaggcaagaagtgatttctgtccctcatctagtgatcctgactcagctggccaggaccccaacatcaatgacaatcttctcggcaacatcatggcttggtttcatgacatgaaccctcagagtattgccctgattcctccagcaactacagaaatcagtgcagattcccagctcccctgtatcaaagatgggtcagaaggtgtgaaggatgtggaactggtgctgccagaagattcaatgtttgaagatgccagtgtcagtgaaggtagaggaacccagatagaagaaaatcctttggaagaaaatattctggcgggggaagcagcatctcaagctggtgacagtggtaacgaggcagccaacagaggagatggttcagatgtttcaagtcaaacacctcaaacctcaagtgactggcttgaacaa

SEQ ID NO: 90212 - DNA, 760 bp, Homo sapiens
aatgaaaaaagtacaatttataatagtatctcaaaaaggaaatatttagggataatgtaacaatatgtacaagatcaatatattgaatactacaaaacacttgagagaaacttaaaaagactcaaataaatggagaaatatagtgtgtttatggatcaaaggactcaatattgttaagatgtcaactcttcctaaatcaatccatacagtcagtgtaattccattcaatgcccaaccagcaccccccacctgccccgcattttttttggtaagaattaataagctagtcctgaaattcaaatagaaatgcaaagggtgacactcctatttggcagccatttctcttaaagctcagtggttctggacctgcagtatctgctgagttaggagggacaggagagtagcagctaggtcggtggcaaatagcccgcaacattccctttagttacaatgagtttacccctcaatctcaaatatttcctcagtggattaacaggagagccagtgatggtgaagcttaagtgggaatggagtataagggctacctggtatctgtagatggctatatgaacatgcagcttgcagatacagaattcataaatgagcattgcctggacatctaggtgaagtttcaataaggtgtaataatgtcctttatatcagagatgtggaagaagaggaaatggggaaatgagtgaatagcatcttttgaagaggattttttaaatatgtatttctagacaataaagatttgtttttc

SEQ ID NO: 90213 - DNA, 8959 bp, Homo sapiens
ctcgcattcctcagccaaggcaataaacctgggtgggtgatctggccaaaacttcgcccctagcgtctgctagccctgaatcaagcaggcttcagagaccgagggtgggtgttataaaagccagtctgtaaagggtaaattccaaatcttgtgccttgttataccaatccttcctgattcccgtttaaaccaactactctatttctgtgctgcctacattttcaatcctcccacgcattagcaaattcctgaaatttcctcatttggtaggccttccataggagtcagctatggacttccataggagttggcagctaaaaccagactgtgagcttctgtctccgttctgatttttgctgcacctcccaggggacagtccccacatgattacaaaagccaggtgccctcatcacccgttacccctgacctgtccacttgttttgaataaaccttcattctccaagcagatccccaaacttccttgtccttgttacacgtctacctcacaacctcacaattcaacaacaggtaaatacctggattcactgatttctttactgtccttctctgagggttgggaaggtgggggctagaaaaggctcataatttttaaactcttgggaattaaacttgggaatttctattcctacagtgttttctctgggatttttagctcactgatcgccctagaatagtgtgaactctccagataggtcctgctgtgataggccaggggagtaggctgtgcagtgacggcttagggtaataagtaatggttggaggacaccagcataggagcagagtttagaacttaagaggacaagaaagctgctcagtggctggcgtatagctgtgaaggtaaccaaacaccaaagagggagtctgtcatttttataaggctggaagcgaatgttccttttctaccttaacatacagtttagggggttgcaccaagacaaagtttccaggctggagggtaatacatatccagcgcgagtgaagtccccactccaacatataccctttttgggtgggtaaacacctctttgcatgtggacagaaaatgtttatacttaaacagacatattttgcatatttttatctggagacttcttctagttttatactcttcccacatctatgccaatgccaccattctaaaacttacactccttttctacccctggtcttttccttgtccttccctacaacttggtagaggtccattttgtcttacttcacactttttttttttttaaataaaacacaaaagtctacgtcttggtgtcttatccgtgagtgggaagtggtaagctggtgatggtcccatatttgctatgacaggaacacagaggtggcagcttaggaagctggggccacatctcacaaggcaggacctggatgcactgaatcccccctttgctccagcaactcagccagacatttaggcaggagcactaatgaccctttccatcccacacagagggtatggaacaggagcccctgttgttcccttgcctgtggtctcttaagccagtcatacctatcccaacgccgtctccccctcaggtgtgtagaagggaagatgaataccacagagtcttttgaatctctatcaaatgtggtttttttattcaacaactgacaagcacttttctacagctgcacttgtggaacatcacatggcaaaaacaggagttttttcgctagactttttttttctttttaaccttattaaaaatgagattggtcctaaaaatatagaaagaaataaatttaaattcacaaaaaactgtacattatcaaaaagtcactaaaacaccacatttggttatataaaaagtcccttttgctgtaaaaggaacacagaaacttgttggtgttgatggtgtggtttcttcctgtcaaccagactgatgggagggaagcaaaagggcagggggtgggttgtctttttattttaaacctgctttccctaccaaatactcttgtcatgaagagaaaatccacctagctcaagggggcagtgaagatgaggaaagaaaagcaagaaatggcccctttgatcatgccctatccctaccacccccaaccccgctccagcccccacttcttcaaactgaggctaggaccccaccccgccatatgagtgcctggtccctagggaaagagatggagctgggagaggaacacaaagcaggaaccatggagatttcactcccccatccacctcacaatttcactcccccatccacctcacaatgaaattaatctagcacatcttataccaggggaaaattgccagggggaaaaagcagagcccccaactttaacagtttcaactgtctaacacaaagtttgttacagcgcagttatttagataaaatataaatatttatgcataatataaagtcaattcaaatattcttcaatccaccttttaaaagcaaaaaaaaatctcaaataaaattaaaagttttgaggtttatctgacagaaaaggcgactttagaaataggctatgagggagaaggggcataaaggaataaaggggctgccccaggacctacactgcccctacccccttcagtggctcttcagtgctgccagaatacaaggaatgctccacctcacctggcacccccaccccccaatggaacatttcttggatgcctcagctctctgcttgggccagccagcagccacctccccagtgcaagtacccgtaatctctgaagggaggggctctgctgagcaggaaaagcagggggccaagtgcccatggctatagctgggagtcagcagctttcctctcgtgttgggggcttaacttggacatagtcacatgtagggcagtgatggacccagaacccctcctccctactctcctgtgctccagggtctctgctgctggggaaggggtcctggggtatgaagtaaatgaagaaaagcccaactaaatgggattaggaaatgatccagttctaccactctcccgtagaagcttaagattcaaagctaccgagaagagagggagttcctgctgaaagattgcacagtctgaagaggctggaacaaaaatgaccaggagagagacacagccttgtctccagagaaattgttcctgtggtttcccaaagacaaaaaagtgatggttttaaacaatgggaaaaatgggaatgaaaacaggtacttggggaaactgaatggatcctatcaaacaatacagggtcacaagcacgcacacacacacacacacacacacacacacacagcgcgcgctctgaggctgacacacacacacacacacacagcgcgctctgaggccgacacacacacacacacacacacacacacacacacacacagcgctctctctgaggccggccccattgctacctggcctccatcttagggtgcacccaaactcagcaatagttgtccctgaggagttcccaagagggtttgggaaggaggtggggaatgttgctgtataggcccatgaagccttcctgccctctcccgagctacgtgagtttcagaaaaggctggaaactcagcatgtgaggagcatccaacatcatacaggggatagctatcggcaggaagatggggacagaagacagggacctctgaacatttttttttcctttgaagggaaaagatttgggagaagagaaaaggagggaggaacccgtacacgatagttttacattattggatgagagaaaatctgaaaactggggggtgggaggtgggaaaagaaagacagcgagaagcagggaagggactgaacatggaagcagcatgtccagggcccggtgtccggcgcgacacacttgggagttaagtccactttactggccgtcactgcgggtccgcacacagtacagagtgtttcttggtttcacacattcactagaactattgctattgttaaataaccccagaatgctggggcacgtacaggggaggagaggaagcagggaggaggaagtagggacgactttccccctccccatttttaattagcaaataaaacagaaaagaaaaattatttttttctttctttttttggcttttagtccagaaggacctcatctctgcacctcttacttgaggagcaagaggagggaagggagaaagggatgtaggaataagaggatgtggggcactgccaagggcaaggtcaaaaatcagggttgtatctgacttgagtctggacccagggcagcatcagcaggtgaaaatggcaggtttttgtttggaaggtgggggaaggatgccacaaggtgactccccacctcccttgcctcacagattggccctgttttccctgataaaactcctcccagcggctcttcgaagaagcggcgcatgatgtgcccagccttgcctacttcagagtcatcctcgttgaaagtctggcagttgtcaaataccaggagggcatcagccgcaaactcctctgagctggtgtaccctcccctgagcagccgctcccgcatggtggaaaaatccataggatttttgatgatgcgccggtacccactcaccaaacgtgggttcacaggctctaggaaaggccaggctgcatcatgggactccatctccatcaggataatctcgcaaaatgtgagatcactgtggtggttccgcatagagagtcgccgccgcttggagggggagagcccttcttccgagtaccgaggccctgctgctgggctttctcggcccctcaacagtacccggcgtcggcggccatcaccctctgagaagttcagcgaataaccacttttccgcttctggccacgctttgggaaaccaggcttctgagtgaattctccctccacctgctgagccaaacagacagtacagaaccaatctccttctgggacagcctccatcttgggacgatggcagtaaatgtggcagccacggtcacacccatcacaaagcagaagaaactcatcattgtcacccttccggcagactagacatgtcactttgttgacagacttctcccaggcaatggacctctccagctggcccaggcacaagcacacctgggctgcgctccggcaccgctcgagggtctggcgccagacacgaatgcgaggggtgatctcatatgatatctctgtagtggtgccctcaggggcaccattaggtgtgctaagcagggccttctccagcacaacctcatgagttggccagaggggctcccgcaggtaccgccgttctacattctgttccagggcagccagccgcatcacagccaggtccaaagggttggtagttttacgctgaggtgccagtccctccctgccccgacctcgccaggtgatatcctcctgggagtcggagaggtgctcacagtaggccaagtcttcacgggtagagtctgggctaggacatgtccagccccgaatctgcagatcagacatgataacccgctgctccagctcctctacccattgaagcactgctaggtctgtctcgtatgtcttctctttgggggaccagctcataatcccttcttgaaaggcaggtagttgcctgggctcaaagatggggtcagctgagggccgcaggcagacttcctgcaagaagtccctgtgcttgttaaggtgtttgtgaagtgccttctcccggatacctcgggggtgtagggccttgagcatggcatccaacatctcaggatctcgtatccaccaccagcctgagcacatctcaggtgggacaggctgggctgtcagctgggttaggtaacgctgttccatctgtttgaagaacttactgggaggtctccctctccgtttgggctgtcccagccctgtgggactctgtggcatttctccagggtctcctgctcgcctcttaggggccaacccagccaagggcgtggaagagaactgcactggagaacaagggttggcagcactaggtctattcattggcttggaggaggcaagctgctgaggggagggagtgggttggtcctcagaaactgcagggggcggtgtgggggcagcattgcagggcatctgggctgagatgttaaaccagagtgcttgaggatcagggctggattctgcctcatcaggctctggctcctccgggggttgtgatggagctgggtctagttttcccggactgctatcaggtgtgaggactgagctgctcaacagggagctatggctctgagtctggctcagccaagacaggaaggctgactggctgaggtcatgctggctctgacccagtgacaaaggggagccttcttgctccaggaaccccttatgggactgaagctgaagctgaagctgaggctggggctgggcaggagcatgaagctgagcctcaggctgaagctgggcctggggctgttctgaatcctgacccctgacaggggacttaagatgcctaggttgcatagacccgggcttagtttttcgaggtcggcctcgggcccgggcaggagaactggcagtggtgttggagccagctaactccatcttcatagagaagagggcagggttgagtgacgcatgggctgccacttttaaggagtcagtttccttctttatcacctcctcaggaactaagttcccctctgttccttctacaaagataccagccaaatacggcaatacccagtagcgacgtctgtagcggtcctgacccagggagaccgcccgaagcatctgggatgagtgaagcagctttttgcgaaagaaaagctgacgcttgctgagtttttctatctggcgctctagctctgggatgctagatgctgtggcatcaacctctccatctcttcgacccctgcggccagggacagctgctatagactcctcttcttcctcttcttccatgccactggtcacctccatgatccgagaactgcgcctccgtcccaggcattcctctggcccttccatctctacttcagaccgcccagttcgcttggccagaacagttttcagcctccggagccggccttcaacaatccacttgtttttcctgtagctggacatactctccagagtcttgtcaatctcattgatgatgagggtggagccattgagctcatgcacaaggaaggccaggacagcagccttctgctggggtggctgggcctgaaaaggctgggtgcgcaggcggtcacagagggctggctctactccatatgccataaggaagcagcgcaggatctctgacacattgtctcttgtcagtgggatctcagacaccttctcccccaagatctttagggactgacagtaggagggaaagccaggatcatggagtgcagccttcagcagcctgaccagcaggtcttgcacctcacccaagctgtcaccttgacacaggagtccctcctgcaggacccccaggctaggcacatctttggcaggatcaaagcccagcaccttgccaaagctatgcaggaactccacaatggtcaagcagtctgagaaggctccactgggcaatgtcagaccagggactcgtgagaagtcaggcaggggctggtggtcagtcagacacatatcctctgtcggcttcttcatttcctccaagatcatctgctgcctctgccgttcctccaagcgcctctgtgtggccagggtcttatctgctttacaggctggcttggctttggtcacctcctccttttccttcatttttaccttctccttcttttccctcttgactttttccttcagtttttcctgctttgtctttcctttttctttctcagccttggatttcttcttagcttccttctgctttaagctcttggtctcttgtttccgcttatttctggcctgcccttggatagtagtctgacactctccccgttgaaccttctgcctcatcttcttcttgcttttagcaatctttgctttatcctcctcattcaatgtttcttgggcctccagtttctttagggggcggttgtctgtcttgttcaatagctcagtgattttgaccttaggtggccgacctcgaccccgtttcaccttggggacttccttagtcctagccttctcagtgtttcgaggtcgaccccgtttgccagtaattgcctgaatcctcgacgggatctcctctgctgagagctgcacccactgcaagccctctggcgtgtctctttcttcaaagaaatctccaacaggcatacggggactgaagctgaagtgctctcggcggacactgtgtaccacgttgcggctcaggtacttgatcacttctggaaattgcttcatcctcttcccacaggggccataataccaggtctccccctgccatcggtggctgcccttcttgatgcgcacctctctccgccacccatgttggaggggaagacgaacttcttctggggtagcaatacgtctcctcatgacatcaccactaccagaagcagtgagtccttctccagtgatctcttccacgtcagcagtggtttctagaaagctgctgacatccttatttgctggggaggctgttggaaaggcagctgctggggaagttacgggagaggcttttggggatgtcactgaagccgtcaacgggacttctaaggagactgctgggaggactgctgaggaagctggagagaccactgagaagactgctggagagacaactgtagaagctgcgggacaaacttctggagagatttctggggaggctgctggagaaaccactagggagactgctggggaggttgttggcgagactgctggtgaggttgctggatgtagctgaatagtggatgactgatcaggagctggctgggtcagggatggtgggaagtctgaagattgagtttccatttcttcctgttcagcgtcactaccattattcaggtcaaagctgttatcttgcaggacagactcccctaggacaggtggagaggtgggactggcaaagatagaggttgatgtttg

SEQ ID NO: 90214 - DNA, 3082 bp, Homo sapiens
ttttttttttttaaatggaatctcactctgtcacccaggcgggagtggtgcaatggcttgatcttccgctcactgcaacctctgcttcccgggttcaaactattctcccgcctcaacctcccaagtagttgggattgcaggcacgcgccaccacgcccggctaatgtttgtatttttagtagagacggggttttgccatgtttcccaggctggtcttaagctcaagcgatccgcccgcctcggcctcccaaagtgctgggattacaggcgtgagccgatcggctcctggcctcctgcttctttcttccccgcgcccaatcatttgttcccactcagacgtgcttgattggcggtagcagctcttttcgtcatgaattggagtgtctgagacacaggcagattattcctcgatgctgtttctgttggtgctagctactggggctcgttccccacctggccttgctggcaggttctgcctcctctctgattctcacttgtgccacgacaggtgggctttaagctcagccgtgagcctggtagccgtgaccttgactcatttctccttcgccagctctttcctctcaggatcctgctctttccctgaaagagaatctcgaggatatatcgggttggggtcttcccgaagccaggtccaaggaatcggtgagtttcaaggatgtggctgtggacttcacccaggaggagtggggtcaactagactcccctcagagggccttgtaccgggatgtgatgttggagaactaccagaaccttcttgccctaggacctccactgcacaagccagatgtgatctctcatctggaacgaggcgaggagccatggagcatgcagagggaagtccccagagggccctgtccagaatgggagctgaaggcggtgccctctcaacagcagggcatttgcaaagaagaaccggcccaggagcccatcatggagcggcccctcggcggggcgcaggcgtgggggcgccaggcaggtgctctgcagaggagtcaggctgcgccctgggcgcccgcacctgccatggtctgggacgtccctgtagaggaattccccctcaggtgtcccctcttcgcccagcaacgcgttcccgaggggggacccttgctggacacacgcaagaacgtccaggccactgagggcagaaccaaggcccccgcgagactgtgtgcaggggaaaacgcctccacgccaagtgagccagaaaagttcccccaggtgcgccggcagcgcggggcgggcgccggggagggcgagttcgtgtgcggcgagtgcgggaaggcgttccgccagagctcctccctcacgctgcaccggcgctggcacagccgggagaaggcttacaagtgcgatgaatgcggcaaggccttcacctggagcaccaaccttctggagcaccggcgcatccacaccggcgagaagcccttcttctgcggcgagtgcgggaaggccttcagctgccactcgtccctcaacgtgcaccagcgcatccacacgggcgagcggccctacaagtgcagcgcctgcgagaaggccttcagctgcagctcgctgctcagcatgcacctgcgggtgcacaccggcgagaagccctaccggtgcggcgagtgcggcaaggccttcaaccagcgtacacacctcacacgccaccaccgcatccacacgggcgagaagccctaccagtgcggctcctgcggcaaggccttcacctgccactcatccctcaccgtgcatgagaagatccacagcggggacaagccgttcaagtgcagcgactgcgagaaggccttcaacagccgctcgcgcctcaccctccaccagaggacgcacacgggcgagaagcccttcaagtgcgccgactgcgggaagggcttcagctgccacgcgtacctgctcgtgcaccggcgcatccacagcggcgagaagcccttcaagtgcaacgagtgcggcaaagccttcagctcccacgcctacctcatcgtgcaccggcgcatccacacaggcgagaagcccttcgactgcagccagtgttggaaggccttcagctgccactcgtccctcatcgtgcaccagcgcatccacaccggtgagaagccctacaagtgcagcgagtgcggcagagccttcagccagaaccactgtctcattaaacatcagaaaatccactccggggagaagtcgtttaagtgtgagaaatgtggggagatgttcaactggagctcgcacctcactgagcaccagaggctgcacagcgaggggaagcccttggccatccagttcaacaaacacctgctcagcacatactacgtgcctggcagcctgctgggtgcaggggatgctggactgagggacgtggatcccatcgacgcgctggatgtggcaaagctcttgtgcgtggttccccccagagctggcaggaatttctccctggggagcaaacctcgaaactaacatgatgtgctttggtgtcagtagctgctttctgagctactcaacaaggaaagcaccctggtcctccctggctcctagatccagaccaccttcctccaggtgtgggagccttgccttatcaccccaatcaggtctgcatgccagggtgcctcctctagttaaagtcagtcacctccccagaagggccacactccaggaggagtgttgagagtcatttgaggtagtcttgccacctgttttccttgatgggcctggaagttgttgacaaggggaaagatctttcttgccaataaaaagaagggatatcgttgggtgccatggctcacacctgtaatcttaacactgtgcggaggccaaggcaaggggatcacttgagcccaggagtctaggaccagcctggacaacatggtgagacctcgtctctacaaaaaatgcaaaaattagccagatgtggcggcatgtccctgtggtcccagctactcaggaggctgaggtgggaggatcatttgagcctaggaggtcaaggctgcagtgagccatgattcacagcactgcactgcagcctgggtgacaaagcaagaccctgtgtgaaattaaaaggaggtcgacg

SEQ ID NO: 90215 - DNA, 1569 bp, Homo sapiens
  misc_feature (1)...(1569): n = a,t,c or g
cacgaggccgcgggggcaaggcctggagctgtggttcgaatttgtgcaggcagcgggtgctggcttttagggtccgccgcctctctgcctaatgagctgcaccagaatgatccaggttttagatccacgtcctttgacaagttcggtcatgcccgcggatgtggccatgaggctttgcttggcacattcaccacctgtgaagagtttcctggtcccgtacgatgaatttcaacgacgacattttgtgaataaattaaagcccctgaaatcatgtctcaatataaaacacaaagccaaatcacagaatgactggaagtgctcacacaaccaagccaagaagcgcgttgtgtttgctgactccaagggcctctctctcactgcgatccatgtcttctccgacctcccagaagaaccagcgtgggatctgcagtttgatctcttggaccttaatgatatctcctctgccttaaaacaccacgaggagaaaaacttgattttagatttccctcagccttcaaccgattacttaagtttccggagccactttcagaagaactttgtctgtctggagaactgctcgttgcaagagcgaacagtgacagggactgttaaagtcaaaaatgtgagttttgagaagaaagttcagatccgtatcactttcgattcttggaaaaactacactgacgtagactgtgtctatatgaaaaatgtgtatggtggcacagatagtgataccttctcatttggcattgacttaccccctgtcattccaactgagcagaaaattgagttctgcatttcttaccatgctaatgggcaagtcttttgggacaacaatgatggtcaagaattattggattgttcatgttcaatggaagcctgatggggtgcagacacagatggcaccccagggactgtgcattccaccagacgtctcctaagacagagttagagtcaacaatctttggcagtccgaggctggctagtgggctcttcccagagtggcagagctgggggagaatggagaacttggcctcttatcgatgaattaagcaacaatgtaactggtcttgacttgtcatattcccccatgcaatcctaggtctgtattgctcaattttaggaagcctttgctactccatcagtaggtttagatttgagcttttgagacctggctatggaaaagaaagacacttgagaatttagtgttggggtctgtacagatgatgctacccaatttggctttgaaggatcaagtaacaggttgaaaactatttttataaaggtaatactttttcagttcccttcttccttccctctcaatccactagcttttcatgttggggcaaggaaaagttggagggaagggatgggctgatgggtgatgggaaagctgtgttaaatggtatgagggaatgtgtgaaaagtatacacaaaggggctctgaagctcaagtcagagggagttgggaggtctgatccattgttggtgggaaaaccgtaagggttatttttgtggttttttaaggttgggttttaccattcctttccccggggggaatttnttttc

SEQ ID NO: 90216 - DNA, 4192 bp, Homo sapiens; identical to SEQ ID NO: 61013

SEQ ID NO: 90217 - DNA, 4220 bp, Homo sapiens
ttttttttttttcagagaaaacatgagtttattaccagatggtggagatggtgggcctcaagtttggaagctgggggatttaagggctggattagtgcccctacaaatgttgggtccctcaagatcatggttaggctcacggccaagaaagaaaaataagttcacagaggtggggtctctagacaggagtaaggcacacggtgtgggtgaggctgacatccccctcttggtttcatcctggagcagggagcaggaggctccctctgcagccactgcctggtccagtcctcccaggcagggctgccattgtgcctcagcacacgctgaacactgaaggggcctggccttggtacttctcatggactgtcttcagaatgggtatgaggttctcgaaggttgggcgaaaggacgcctctgtctcccagcagttcttcatgagatgatagacctcacagggacatttgtcgggccgtggcagcctctcccctcgttccagcaactcagtgagtctcagaactgtcatctgaccctgagcaatgcctatgagctcaaggaatttcgtgggggggctctggctggagtcacagtgcgtcagcagctcatacagggtcaccccgaaggaccagacatctgacgcatagtagaacttatactccttcaggcactctggggcataccagaacacggggctgtccccatcctcgcgcacgcggtagtactcgtggccttcgggcacggccttggctaggccaaagtccccgatcttgaccagcctgtcgttgtccagcagcacgttgcgcgcggctaggtctcggtggatgtagtgctgcgcgtgcagataggccatgccctcgcagatctgctgggcgaagagcagcagctgggccagcccgatgctgtgccggggcaggtagtctcggaggctgcccaggggcacgtactccatgaccagctgcagcgacttctcgccttggtcctcgcagcagcccttgtacttgatgatgtgctcgtggtagagcgtgcgcagaatgtcaatctcctgcttccagcccgagcggtgctgggggccgcagtctgccttgagggctttcaccgccaccatctcgccagtgccgtcgttggtcggatcgtagcagtacaagctgaccttgccgaagtgaccctcgcccagatctcggatctttttcaaatagcgcttgtggaaaaccgtagggtccgacgccggtgagtccgggttcacagtcaagacgtcagcaagattgtggggctgcagccgggtgaggtcacgcaggatggtgcggaatgatggcctctgggttggctcataggtcagacactggctggtgagtgtggccagctgtgggcaggagggctcgggcagccggtgctgcctctggtagaaatgctccttctcggagggactgcggctctgcagaggggcctctccgtcaaagcagatctccaggagggtggcgccaaacccccacttgtccatggcggtgcttaggctgttggccccacctggtaggcattcgggggccagccaggggatcctctccacccgctcctccctggagagggcgcccaggcccacgccaggatcactcagcttgatgaaggggctggtgccctctgccaaccccagccgggccagcaggatgttccggccacacacattaccatgaaccaggttcttgttctccaggtagctgagggcgctggccagctgctgggccaccaccatcttccaagccatgggcacatggccccgctccctccgcagccacacatccaggggtccgtgctccacgtactctgtcaccatgatattttcagggccgcgcacacagacgccatgcacgaaggccaggtgcgtgtgggagacctggctcatgaggctggctgtctcgtagaaggccagggcgatgtcatggtgactagggtccagcactttgagcaccactcgtagctcctgcccacggtccctgccaggcacgagggggtcctcgtcatccatcttgccctcctcagggtccccgctgccctccactcgcaggcggccctcatacacgttggtccttgtgccctggcccaagtgggacagctgggtgatctccttctggtcaacccggtggaagctgagctggctgaggttgagtgtcctggggctggcccgagccccccgcatgatgatgagattggaggtttctcctggttggggcaggcaacagcgacgcagagagaagcagtcatccccggccctcagcaagcagccctgcaaggcagccccaagttcccgaacgctggggaaggaccggccccagccctccagcacgaaggccccgtcctgctgctcaatggggaactttcggagccgcaagctctgcatgccgtctggtgcctggctacgctgggccactgtgaggatcaggcggtaggggtggctggtgctccagtgaatgaggtacaggccgtcctcgggccgcagcttggcctgcacaaatggctccagcaggggtccgtggatcccatcccggatgctcatcaccagccgtgggggagccacctcgtggcacaggtagtggctggagtcggccgtcaggcggaaatagccgtccaccagcgacacgaaggacagcgccgcagcccgggaaggcaagctcagctccaggcacttgttgtcctgccggtggatgctgacacagtgctctttcagccccacgtgggtgatgtcccggaagtcacagaagtaggcccccagtggctcccgcggcctgtctgccggctggccgaatgccttgtgagccttggccttcttcccaaacaggctggcttgggggttcctgccactgctgccactagaaccctcctccttgttcacctcctcctctactggccaccactggatgccaccagtgcctgtcaccagcacctcgtgggttgggggcccagcagcagactcagggccagggtctgtaggggccaccccactgtcccggatgtagcagggctccccctcggcctgggccagcagcctcaggtggcacacgggcacacgctctgtgccgaagcggggtgccagccgctcgagtgtggctaggtatttgaccatgaccatctgctgggagagtcggcccggctggaagtcccgcaggaacctgcggaagacgttccgaaggcgcagccgggtcagggcgctgtgctgccggatatgccggcggaaggagcgcgggatgcagtccttgaagctggtcttcttggccacctcctccagggggatgccatggcggagagcgaggtgacagaggtgcagaaaggccatgcccaggctctcattcttaaagtggtggatctcctcctcggtcgacagctcccacagtgatgccacgtcattcacaaactcatgcttgccctgctcaaagaggtactcaaatgaggctgggtccaggagttgcatcccctgtgctgtctgatctgaggatgcctcggttcctgggggcccacaacggtacacagccggttcccgaggattcatgccatgccagttcccgggaataaaacctatggcggaaaatatagcatcaggcttgcatctctggggatctctaggatgtggtttgggggcaaccagacttgggcctgagcatcgaagagggcaaagagattgaagcaaggaggagtgataccaactttatgtgcaatgtggatgcagacttcctcagctgtcagcgatgactcactgaaagtgacccagggctccccgccgcctggaccagcccagtgcagaagcaccttcaggcctcccatggcagccatgggctgggctccatccccaacgggcttactgcccctggccatcccccagtggcgcagaggcatgctcccggcaggtggctcagctgagggtgagtcctggagctccctgtgtcaactcaagcaagccacttagcaattctgggcctcagtttccccatctggaaaagggaggtcctcagggtgttgccatcaaaagatggttgtaatgtttcaatatagttccgcatattacacattcagcacagacccgggcatcggagcagtcccgaggcaccaggtgctcccatccaagtgcagcctgtcaagcgcagccagtccccgcggcttcttcctgaggacctccggccgcgctccttccgcgcccgcgtccagactcacccttccgggggaacacaagctcgaac

SEQ ID NO: 90218 - DNA, 6495 bp, Homo sapiens
acttcccgggtcgacgatttcgtcaggcaccagccgccgccgcacccggccccagcgcccaccgtctgcatgtgcccgccgtagccgtctgcccagcccgcagcccgcgctccacggagcgctggagaccaccgtggggggccccttctgccctcgagagaagcggtcttggaggtattgatttaggtggttggattttttccgtggatctatcaattcacaattcgaatttggaagaaagaaggaaaacatgacgtctccagccaaattcaaaaaggataaggagatcatagcagagtacgatactcaggtcaaagagatccgtgctcagctcacagagcagatgaaatgcctggaccagcagtgtgagcttcgggtgcaactgttgcaggacctccaggacttcttccgaaagaaggcagagattgagatggactactcccgcaacctggagaagctggcagaacgcttcctggccaagacacgcagcaccaaggaccagcaattcaagaaggatcagaatgttctctctccagtcaactgctggaatctcctcttaaaccaggtgaagcgggaaagcagggaccataccaccctgagtgacatctacctgaataatatcattcctcgatttgtacaagtcagcgaggactcaggaagactctttaaaaagagtaaagaagtcggccagcagctccaagatgatttgatgaaggtcctgaacgagctctactcggtgatgaagacatatcacatgtacaatgccgacagcatcagtgctcagagcaaactaaaggaggcggagaagcaggaggagaagcaaattggtaaatcggtaaagcaggaggaccggcagaccccacgctcccctgactccacggccaatgttcgcattgaggagaaacatgtccggaggagctcagtgaagaagattgagaagatgaaggagaagcgccaagccaagtacacggagaataagctgaaggccatcaaagcccggaatgagtacttgctggctttggaggcaaccaatgcatctgtcttcaagtactacatccatgacctatctgaccttattgatcagtgttgtgacttaggctaccatgcaagtctgaaccgggctctacgcaccttcctctctgctgagttaaacctggaacagtcgaagcatgagggtctggatgccatcgagaatgcagtagaaaacctggatgccaccagtgacaagcagcgcctcatggagatgtacaacaacgtcttctgcccccctatgaagtttgagtttcagccccacatgggggatatggcttcccagctctgtgcccagcagcctgtccagagtgagctgctacagagatgcctacaactgcagtctcgcttatccactctaaagattgaaaacgaagaggtaaagaagacaatggaggccaccctgcaaaccatccaggacattgtgactgtcgaggactttgatgtgtctgactgcttccagtacagcaactccatggagtccgtcaagtccacggtctctgaaaccttcatgagcaagcccagcattgctaagaggagagccaaccagcaagagacagagcagttttatttcacaaaaatgaaagagtacctggagggcaggaacctcatcaccaagttacaagccaagcatgaccttctgcagaaaaccctgggagaaagtcagcggacagattgcagtctagccaggcgcagctcaactgtgaggaaacaggactccagccaggcaattcctctggtggtggaaagctgtatccggtttatcagcagacacggactacagcatgaaggaattttccgggtgtcaggatcccaggtggaagtgaatgacatcaaaaatgcctttgagagaggagaggaccccctggctggggaccagaacgaccatgacatggattccatagctggtgtcctgaagctttacttccgggggctggaacaccctctcttccccaaggacatctttcatgacctgatggcctgcgtcacaatggacaacctgcaggagagagctctgcacatccggaaagtcctcctagtcctgcccaaaaccactctgattatcatgagatacctctttgccttcctcaatcatttatcacagttcagtgaagagaacatgatggacccctacaacctcgccatctgcttcgggccctcgctaatgtcagtgccagagggccacgaccaggtgtcctgccaagcccacgtgaatgagctgatcaaaaccatcatcatccagcatgagaacatcttcccaagccccagggagctggagggccctgtctacagcagaggaggaagcatggaggattactgtgatagccctcatggagagactacctcggttgaagactcaacccaggatgtgaccgcagagcaccacacgagcgatgacgaatgtgagcccatcgaggccattgccaagtttgactacgtgggccggacagcccgagagctgtcctttaagaagggagcatccctgctgctttaccagcgggcttccgacgactggtgggaaggccggcacaatggcatcgacggactcatcccccatcagtacatcgtggtccaagacaccgaggacggtgtcgtggagaggtccagccccaagtctgagattgaggtcatttctgagccacctgaagaaaaggtgacagccagagcgggggccagctgtcccagtgggggtcatgtagccgatatttatcttgcaaacatcaacaagcaaaggaagcgtccagaatctgggagcatccggaaaacttttcggagtgacagccatgggctgagcagttccctgactgactcctcctccccaggggtgggggctagctgccgcccatcctcccagcccatcatgagccagagcctccccaaagaagggccagataagtgttccatcagtgggcacgggagcctcaactccatcagccgccactcatccctgaagaatcggctggatagtccacagatccggaagactgccacagcgggaaggtcaaaaagcttcgataaccatcggcccatggaccctgaggtcattgctcaggatattgaggcaacaatgaactcggccctgaatgagctacgggaactagaacggcagagcagtgtcaaacacacccctgacgtggttctggacaccttggagcccctcaaaacctccccagtggtggcccccacgtcagagccctccagccctctgcacacccagctcctcaaggaccccgagcccgccttccagcgcagcgccagtactgctggggacatcgcctgcgccttccggcctgtcaagtctgtcaagatggctgccccggtcaaaccaccagccactacggcccaagcccacatgtcttccccaaaacaaatgccactagccctggtgtcaactcatcaacttccccacagtctactgacaagtcttgtactgtctgagggataataatttaattgttctagacaaggggactatagggactgactgttattaaaatcttcctatttaactagcttggggacttcagttgaaaattaggttctaagttgttcttgcaggaattagcctccccgtctcccaaaaccttgagaatgaagcccttggtatcgcctctcccttcccactgccctctgcttcccccagtcgtcgtaattcagccagctgcagtccgtaccgttcttaggttagccagagacaggttttcattatcaggtcactgtgaaatctggtaaggcagtcctgaggacatgggctcaagtctcagtcccctcagaccacggtgatgccttgaccagatggttggctactgccatccagctttcagtggcatcttgttttgggaactgattatagagaatcatatatagtccagtcttcattttacatacacacacatattttacacacacacacattttacacacacacacacacacacacacacacacatatgtttttctagtctctggcatgtgtagcctctcctggtcatagaccagtctctttgtaagttattgtggcagttcacacagtagccaccaggggtctctgtttccattacaaactttgttctgtctgggccagagaacctagcctttgaaatctctccatcatgtgaaacataacgggatgggacaatcccgtaacctgtttggggttgggggctttctctctgtgttctttccattgatgtgaattggtcattggtgtttgctcttgcctctcctccatcccctagaagtacacccccgtcttattaaggagcttttaaagtttttctgaatgtatagacatttctcgggttcctacctttgtctctgatggaccattttccatttaagacattttcctgtataagacagttttatagctggttccttttagggtaaagagtcttaagagagttttattgtgtctatggcaggtttgggaaaggtaagaaatgggtcctttttcctcctaatgtttttggcacttaaaacataaaattcattatcctattaaaaaattaaattcagctttgctaatccagaaattgttcccaaatgaaaacttgttttaagtccaccccttagtttccttattttacaaggtctctcttcagggaccaacaggggcttagagagccttagttagattaaagggagaccctacctcttaaaaccagttttcatttatgcaaacaaggacaattaagggaaccctgaccccacaggctctcaagtcttcccaaggccagaatcgaaagaaaattaaaatttgaatgctgaatattctggctctactctggcctttttttctggttcccttccaaaatgcacaaatcatacccttgtctgctccaattcagtctccaaacctggtgcctgtgctcctggcccccctagcatcatgctatcccaggagtatcaggaccagacacatccacagccaggctcatgggtctcagacagcaacttgagttaaagctgaaactcatccttcttctctgtgttttctggtttaaaagctgcacttatattttagccttattattttctgtagttccggagagatggtgggttgccattctggcaggaaaatctgagttttcttatctttgacctagaagagattctttttggaccaacctgcgaaattggtagttaggtctatggaaagtggtaggatttttttttttttaatcctgtgcaaaggaaaagaggtgctttgtgggaaatcactaatgagaaggctaacctgcagcaccagagaaacctttccaagtgctaggcaggagaactgaagaactctttcagtgaagtgagtcagcctagaagaggcaacccacagtcttgatttttgttgctgtttcctgacctgttcttgcctgtcacctgggcctacacaggtcccgagccaacggggctttcatacccaaggatctgtttccttgctgaaaatgaaaccctatctttcactttacattcctttcaatccaactgatcaaaactggtacccacacttgccctttctccctctctccagcacactcccctctaagaaagtaaaagcaaagccttcttaatggcaacactttgggcctgttctgttgctcctgccttatttctctttcaaccctgtacatgactcgtgttcaccatccccttgatcagtgtccatccgcgctaatttgcatcatgaactgaacagtgtgtgagtggtcacctactaaacccagctctgggggcagagctgtcttccccatctctggtgctcctaacacctgtgagatggtcctgtcgagaggactaggaaccgataggaggagagttcttctcggcagagctcactgcaaacaactggaattgaggttgcacactgtgatttttacaccgaaaagccaaaaggagctggccatccagggcctagggagaccagccttcctcagctatgcttgccgaaaccagcatgatgcttcaaagagccctgctccacccctcatggcatggatccttttcctggtgtggactctgaagggtcagtcttcggggaagagaggtggggtggggctactagcatcccaatttagaaaacagaggagtttgtagccagcagcctgtaaactggaaacactggtctcagccaacctcctcagggcgccctggcttctccccaaggagatgaggagcggtgatgccagcaccgggatgcgcagagcactggaagggctggtgcagatctacttcccatgcagaagagaagtcacatcttccagggaatcgcaatgttgtggcgtctgacttgtatgtcacatttgtgtaaaatggtatattctttaaaatagtgttgataactggaatattgtatgtatgcttggagatgctttgtgtgaacctaagactgtcactcaacagatgttggattggggaaaatccaaagcacaacttcaaaataaaatacatttttaggtttcaaaaaaaaaa

SEQ ID NO: 90219 - DNA, 3468 bp, Homo sapiens
tttcgtcgctttgtctgtccggcaagccgacggcccgctgctggcctccgtgacgcggcctcctccgcgcctcgcggcatggcgtcggaggggccgcgggagcccgaaagcgagggcatcaagttatcagcagatgtcaaaccatttgtccccagatttgccgggctcaatgtggcatggttagagtcctcagaagcatgtgtcttccccagctctgcagccacatactatccgtttgttcaggaaccaccagtgacagagcagaaaatatatactgaagacatggcctttggagcttcaacttttccacctcagtatttatcttctgagataactcttcatccatatgcctattctccttatacccttgactccacacagaatgtttactcagtgcctggctcccagtatctttataaccaacccagttgttaccgaggttttcaaacagtgaagcatcgaaatgagaacacatgccctctcccacaagaaatgaaagctctgtttaagaagaaaacctatgatgagaaaaaaacgtatgatcagcaaaagtttgacagtgaaagggctgatggaactatatcatctgagataaaatcagctagaggttcacatcatttgtccatttacgctgagaatagtttgaaatcagatggttaccataagcgaacagacaggaaatccagaatcattgcaaaaaatgtatctacctccaaacctgagtttgaatttaccacactggactttcctgaactgcaaggtgcagagaacaatatgtcagagatacagaagcaacccaagtggggacctgtccactctgtctctaccgacatttctcttctaagagaagtagtaaaaccagctgcagtgttatcaaagggtgaaatagtggtgaaaaataacccaaatgaatctgtaactgctaatgccgctaccaattctccttcatgtacaagagagttatcttggacaccaatgggttatgttgttcgacagacattatctacagaactgtcagcagcccctaaaaatgttacttctatgataaacttaaagaccattgcttcatcagcagatcctaaaaatgttagtataccatcttctgaagctttatcttcggatccttcctacaacaaagaaaaacacattattcatcctacccaaaagtctaaagcatcacaaggtagtgaccttgaacaaaatgaagcctcaagaaagaataagaaaaagaaagaaaaatctacatcaaaatatgaagtcctgacagttcaagagcctccaaggattgaagatgccgaggaatttcccaacctggcagttgcatctgaaagaagagacagaatagagacaccgaaatttcaatctaagcagcagccacaggataattttaaaaataatgtaaagaagagccagcttccagtgcagttggacttggggggcatgctgacagccctggagaagaagcagcactctcagcatgcaaagcagtcctccaaaccagtggtagtctcagttggagcagtgccagtcctttccaaagaatgtgcatcaggggagagaggccgccgcatgagtcaaatgaagaccccgcacaatcccttggactccagcgccccactgatgaagaaagggaagcagagggagatccccaaggccaagaagccaacctcactgaagaagattattttgaaagaacggcaagagagaaagcagcgtctccaagaaaatgctgtgagtccagcttttaccagtgatgacacacaagatggagagagtggtggtgatgaccagtttcccgagcaggcagagctgtcagggccagaggggatggacgaactgatctccactccttcggttgaggacaagtctgaagagccaccaggcacagagctccagagggacacagaggcctcccaccttgctcccaatcacaccaccttccctaagatccacagccgcagattcagggattactgcagccagatgcttagtaaagaagtggatgcttgtgttaccgacctactcaaagaactggtccgtttccaagaccgtatgtaccagaaagatccagtcaaggccaagactaaacgtcgacttgtgttggggttgagggaggttctcaaacacctgaagctcaaaaaactgaaatgtgtcattatttctcccaactgtgagaagatacagtcaaaaggtgggctggatgacactttgcacacaattattgattatgcctgtgagcagaacattccctttgtgtttgctctcaaccgcaaagctctggggcgcagtttgaataaggcagttcctgtcagtgtggtggggatcttcagctatgatggggcccaggatcagttccacaagatggttgagctgacagtggcggcccgacaggcgtacaagaccatgctggagaatgtgcagcaggagctggtgggagagcccaggcctcaggcacctcccagcctacccacacagggccccagctgccctgcagaagatggccccccagccctgaaagaaaaagaagagccacactacattgaaatctggaaaaaacatctggaagcatacagtggatgtaccctggagctagaagaatccttggaggcttcaacctctcaaatgatgaatttgaatttatgagagttcttgcctgtgtgtctgtattttgggtaaggaggggaggtctgaaaaagactttggggctttttcttctgtttttcatgacaatgtaatttgtgtaactgttgaatctggaaattgatcagcattaaagggcacatgaagcagtgtctgcaggcgttcagtgctgcggagcctgttaaaggtcactcagatgtgcaggtgttaatcttctctaaaagcctggtgatacagctctggctttctgagcacactacggatctggaaaatactggaaaatgtgatacttagaatactttggctgctaaggaaacttcctctccattgcagaatagctgagccaagtgagtgagtttgcagaaagcaggtggtgagctcctgcctgctggaggttgccatggagggccattcctgcccggcaacagcaccgtcctgcagggagccacttggcagaagggtgcagggctgctggtgtcagagcaagagggctacagggaaagggccctttctcaggggatgtagcttttttaaaagatttgggaacacttggaggatttgctaaaatgagcctcagaaggaaaattggttttctaacctgtgactttttgaaatgaattattcctttcagtctttatttttcaaagaaacaatgtgtattgaagtacctagatttgtttgataatcaacaaatctttcctttttcaatgaacatattctgaatgtggtttctgtcttagaccaggaggacagagtttgctttcatattttccctgtaagtaagagggcttatttattttaaataaagagtaattattaaaaaaaaaa

SEQ ID NO: 90220 - DNA, 1747 bp, Homo sapiens
ttttttttttttgaagaaaaaatgctttttttaatcacaacatgaaattaacatgacatcgtattagaattaaaccaggataaatactgctgttataaaatttacatttctcacatccattccagaggaaaatcttacatattagggctcatcttaatgttatggactgatttcagtaaaactttttaaatagtaaatagcaattaacgtattctcaaactgtgctaagtagttagaaaggcaactataaaatctataatgataacacgtggcaggattagaactgttctgttaaacattaagaaccacatctctgttttagatgttacctcagtgcacctttttcactggtaaggcaactgcttgctgtgggtgccacaatgattaccaagtttcttcttaagtaaaagacacttgtttgatcaagactcaagtgagttttctttcccaattttgttcttttgaagcagaaggaaataccttggtctttgatatatataaggaggcaaatatgaaatacagctgttataatcttctaaatcacaagggcaatgaattattcattttctttgaaaatattcagtctttgaaatatttcatttttaaaataacaaggcttctgaataatttctcaaaactagctttccattttagtacacgatttgataaacatagcacattagataggtatttagcaatttcttctaccaactacactttgccctcactaagggttagagtatgatttgaaacaatttctacatataaagcatctttaaataagttttgtgttcactgaactgagacttctttcacttatgtacctatggaagttaatctgagcatacacatatatacatacttgcatacatatgtgtacatatgttttttaagtaagttacttttaccattagaataaacctagacactacagggacaactctggggaacagggcggtctgccttaacaacccttctctaggttgaggaaggcaggtatagttcactgaaggatgtgatgaggctgtagtaagtcttctcatcatctgttaatcctgcgttgcctggtctcaccaccacagctacgtgcacatctgcttcctcagcagcactggcctctcgagtaacatctgtcagaaacaaaatgttgttggttgagcacccaatgctgtctgcaatctttcggtaactttcactctctactttgtgtccaatcttggtatcaaagtgaccatcaacaagctcaagaatatctccctccgtagaatgcccgaataacagtttctgtgcctccacactccctgaggaatagatgtacaccttcattccggcctctctccacttcctgactgctggaactacatctgcaaagaacctgtttcctcaaaagactgacatcctgctggcactcctcttcttcccaatgtgtctgcagatactctttaacattttcttcgatgtaaggaaataaaatgtccttcacgaaagcaatcggggttgtggtaccttcgatatctaacaggatcacggtgacttcggcggggaccgaaagcacgaccatttccctaccggatgctacgggactcggcctgctgttggggagggcggagggcggcgccggctgcggctgcggcccccggtaccgtcttgggcttccggcggccccgcgcgatctcggagccagcgaccaagtgcagcccgccgcgcgtggggagaggacacttctgcacacctggaactggaaaag

SEQ ID NO: 90221 - DNA, 3500 bp, Homo sapiens; identical to SEQ ID NO: 61348

SEQ ID NO: 90222 - DNA, 2401 bp, Homo sapiens
ccgcgcccctatgtgagggagacggggaggcccgcggcgcgcaggggagggcgaggcatgtgcacgggccggagggtgctgcagccgcccgaggaagaggaggacggcggcgaggaggagagcggggggctcgcggcggcgggccccggccgaggggatgcagtggactgtgtgtgtctggctgtagcagacgcgaggcggcgacgaggcgccggggacccgcgcgaggggcggccgggaggcggcggcggcggccgccagaagtagcagcaggaccggcggcggcgacggcagccctgaaatgcattttcctctccagcggccatgttaaccaggaaaccttcggccgccgctcccgccgcctacccgaccggccgaggtggggacagcgccgttcgtcagcttcaggcttccccggggctcggtgcagggcccacccggagcggagtggggactggcccgccctcccccatcgccctgccgcctctccgggccagcaacgctgccgccgcagcccacacgattggcggcagtaagcacacaatgaatgatcacctgcatgtcggcagccacgctcacggacagatccaggttcaacagttgtttgaggataacagtaacaagcggacagtgctcacgacacaaccaaatgggcttacaacagtggggcaaaacgggcttggccagtggtgccagagcggcagctggacagcattcatagacggcaggggagctccacctctctaaagtccatggaaggcatggggaaggtgaaagccacccccatgacacctgaacaagcaatgaagcaatacatgcaaaaactcacagccttcgaacaccatgagattttcagctaccctgaaatatatttcttgggtctaaatgctaagaagcgccagggcatgacaggtgggcccaacaatggtggctatgatgatgaccagggatcatatgtgcaggtgccccacgatcacgtggcttacaggtatgaggtcctcaaggtcattgggaaggggagctttgggcaggtggtcaaggcctacgatcacaaagtccaccagcacgtggccctaaagatggtgcggaatgagaagcgcttccaccggcaagcagcggaggagatccgaatcctggaacacctgcggaagcaggacaaggataacacaatgaatgtcatccatatgctggagaatttcaccttccgcaaccacatctgcatgacgtttgagctgctgagcatgaacctctatgagctcatcaagaagaataaattccagggcttcagtctgcctttggttcgcaagtttgcccactcgattctgcagtgcttggatgctttgcacaaaaacagaataattcactgtgaccttaagcccgagaacattttgttaaagcagcagggtataagcggtattaaagtaattgattttggctccagttgttacgagcatcagcgtgtctacacgtacatccagtcgcgtttttaccgggctccagaagtgatccttggggccaggtatggcatgcccattgatatgtggagcctgggctgcattttagcagagctcctgacgggttaccccctcttgcctggggaagatgaaggggaccagctggcctgtatgattgaactgttgggcatgccctcacagaaactgctggatgcatccaaacgagccaaaaattttgtgagctccaagggttatccccgttactgcactgtcacgactctctcagatggctctgtggtcctaaacggaggccgttcccggagggggaaactgaggggcccaccggagagcagagagtgggggaacgcgctgaaggggtgtgatgatccccttttccttgacttcttaaaacagtgtttagagtgggatcctgcagtgcgcatgaccccaggccaggctttgcggcacccctggctgaggaggcggttgccaaagcctcccaccggggagaaaacgtcagtgaaaaggataactgagagcaccggtgctatcacatctatatccaagttacctccaccttctagctcagcttccaaactgaggactaatttggcgcagatgacagatgccaatgggaatattcagcagaggacagtgttgccaaaacttgttagctgagctcacgtcccctgatgctggtaacctgaaagatacgacattgctgagccttactgggttgaaaaggagtagctcagacctgtttttatttgctcaataactctactcatttgtatcttttcagcacttaattttaatgtaagaaagttgttcattttgtttttataaaatacatgaggacaatgctttaagtttttaaaaaaaaaaaaaaggggcggccgttttaaaggatcaaagttaacgtacgcgggcatgcgaggtaatagttt

SEQ ID NO: 90223 - DNA, 1352 bp, Homo sapiens; identical to SEQ ID NO: 61161

SEQ ID NO: 90224 - DNA, 4624 bp, Homo sapiens
tttcgtgcttaaggaagtaaaatggcggacctggcgaacgaagaaaagcctgccattgctccgcccgtctttgtgtttcagaaggataaaggacaaaagtcccctgcagagcaaaaaaacttgtcggattcgggagaggagcctcggggggaggctgaggccccccaccatggcacgggtcaccccgagtcagctggcgagcatgccctagaacctcctgcccctgctggcgcctcagccagcactcctccgcctcccgctcctgaagcccagcttcctccttttccgcgagaactggcagggaggtcagctggcggctccagtcctgaaggcggagaagattctgacagagaagatggaaattactgccctcctgtcaagcgagaaagaacatcctctttaacccagttcccaccctcacagtcagaggaaaggagcagtggcttccggttgaagccaccaacgctgatccacggccaagcccccagcgcaggtctgccaagccagaagcccaaggagcagcagcggagcgtgcttcgcccggcagtgttacaagctccgcagccaaaggcgctgtcccagactgtccccagcagtggcaccaacggggtcagcctcccagcagactgcacgggggcagtgcccgcagcatcccctgacactgctgcatggagaagtccttccgaagctgccgatgaggtgtgtgcacttgaggagaaagagccccagaaaaatgagtccagcaatgcctctgaagaggaagcctgtgagaaaaaagaccccgccacacagcaagcctttgtatttgggcagaacttgagggacagagttaagctgataaatgagagcgtggacgaagccgacatggagaatgctggacaccccagcgcagacacgccaaccgcaacgaactatttcctccagtatatcagttccagtttagagaactcaaccaatagtgccgacgcctccagcaacaaatttgtatttggccagaacatgagcgagcgagttttgagccccccaaaattaaacgaggtcagttcagatgccaacagggaaaatgcagctgccgagtcagggtctgagtcctcgtcccaggaggccacccctgagaaagagtccctggctgagtcggcagccgcctacaccaaggcaacagcgcggaagtgtttgttggaaaaagtggaagtcatcaccggggaggaggcggagagcaatgtgttacagatgcagtgcaagctgtttgtctttgacaagacctcacagtcctgggtggagagaggccgggggctgctcagactcaatgacatggcgtccaccgatgacggcacactacagtcccgacttagtgatgccggacccagggggagcctgcgacatgatcctcaacaccaagctgtgggcccagatgcagatcgacaaggccagcgagaaggagcattcgcatcacagccatggacaacgaggaccagggcgtgaaggtcttcctgatctcggccagctccaaggacacaggtcaggtgtatgcagccctgcaccaccgcatcctggccctgcgcagccgcgtggagcaggagcaggaggccaagatgcccgcgcctgagcctggggcagccccatccaacgaggaggacgacagcgacgatgacgatgtcctggctccttcaggggccaccgcagctggtgctggtgacgaaggggacgggcagacgaccgggagcacatagcggccgggagcccggctgcacaccaggctgctgctttgtccgtctatccaccgcgcccacccgcccccaccccaccggcagcgtccaggtgcggggccgggaaccacacaccccactgggccggccacagtctggacccgcacgtcctgttcaaaagcagactcgggaactgcctgaatgtggtttgggacacgagacctcatcatattgatgagcgaacaaacaagaacatttcctccctcccctcctttgaattgaaatggcacattaagacttgtcacggcttctcactgggactggagacctcgttccttcaccccgcgtgtcgccagcctctgggtccagccagagcccctggcttctccgccacccacacccttcccaccctgctgtggggccctgcctttgtggggagcagccagccctctgcccctgcccagggctccccaactataggcctgggacccccgcccagcttggggggctgctcgtacgagtgtagacactgggcccattggacgtgctgttaactactatcttcatttcccacttcccctctctgattgggggtgtatattttacatctttttttctttttattttcgaaggctttgttttggtttcttaggttaagatgctctcgagcgttgagcaggcacagctctgtcgaggtccctgtcccccacctgtggttctggcctctgaggttgggggactacttgtttcccaccccaggttcctccaggccaagtcatggggtgatgaggagttggggccctgtctgtcctaggcctggagagtgcctgtctgggaaaaggtcactggacctggaagggtccccagggtcccctgactcccgtctccatctgtcacgtggttcaccatcatcaggcaccaggcgcaaactgcttcccgctgttggccatcccttccccagccacaggtgtccctgcccccaggacagtccagggccaggggcttctgtgagaggcagagggggaccctcaccaaatcttggtggaagagcccaggggctggtcccagaacaggcagtctcacaagcacgcagcacactggagtggacgcctgtgcccacccgagcctggagcatggccaagagccagcttgcaccacccacctgggaggccgaggaggaggtcccctgggcacagggcctctttgggacttcagaggaaatctcccagtcccactctcggagggttaagagaaggcctcctgcagctgtgccgtccacacctctaggtcgccagagccctggcccccagcccccagcaagcctgagcccgggaagaaccagaggccctcccgagagacccagtcacacgtctctgctttaagccttagccagctagtgacgagtacaacgagataacgcccatgtgttttggaacatttatgtaagattgtcatatgaaatgtatttgggaactacattaaacttttaactaaaaccctggcctctgcatgccccaggggcctcaggaagcccctgaccaggaacggcctccacctccccgggcgaggacctccagcagcctggggcctcatgctcccacccagcgtgtcaccagtgctggggtccagccacagccctgttctctccaccaccaccccgactttaacccccaaccctgctggaaggccccgccggtctgcccccgcccagagctgccagcctcgggccgctcaccagaatgtagatactgggcccgctggacgtgttacctgctatttttattccccatttgccatcttctgattgggggttgatgttttacagatttttttttcaaaggctttatttcagtttctgaggttaggatgcccctgtgcccctcgctccacacctgggcaggtctaaacttccttccaggatggcctccacacacagcctcccacctggggtcacctggcttcctgggggacccgcaagggaggggcagggagcagcagtccgggtgcggggatcgggggacctcggcgggggcatccacaggggctgcaagacctctggtcagcatggcgtgggtggggagagcgtttctccctggggtcctgagccagtgactcctgttaggacctttgtcccacctccgcctggtggaccggcagggacctggtctagccagtcctgcagcctccattcccccacctgcccctccccgctctgtggtgtggctgcccaggagagaaggggcccagggaagggaggtctccggcaggggtggggagtgacaggccagggcagcagggctgagccggagctgctcacagctgccaggcactggtcatcatggccacgaactcctcatccgtgttcatggaggcactcacgccgctgtagtagtcctggaattccgccagtgtgaccttggggtgggcacggccactgtacaccccgcggaggtcgtccaccgtcacgacgccgtccccactgcggtccagcttggcaaatgcagctgcgatgacagcctcccgggccctgggacatggggggccgcagcgcccgaaggaactcctccagatccagcgtcccgctgccattgcggtcccacttcctgcacacaccctctgcctccgcctggtccagcaccagcccgagtttggccagaccctgccggaactcatcagcgtccagggatctgctcccgtcccggtctagttggcggaaaaacctggccaggccctggatgcccgaggccccgcgggacaggcactgtgcccggagtttctccatggtggcatccacggcgtccatgcttggtctgggctctgggcagctggcctgcgtctgtcccagagtcctgcctgcggggccttgtgttagctgtgttgtgcctggggagactgttgctagtggacggacgcgtggg

SEQ ID NO: 90225 - DNA, 1734 bp, Homo sapiens; identical to SEQ ID NO: 60607

SEQ ID NO: 90226 - DNA, 2842 bp, Homo sapiens
tatgttagaggaagtacagaagatgcaggggtgtggtatccctgggtccagtccctcacctggtaccttttgagatgtttccattccttcctagagcaggtatcatcctcagggaaccagcaggctattggagcaatccgaaccctgcgcagcaaaagaacgcccttgccccggaagaggcagctgatgcactccttgtttggagactatagggctcagatggaagccgaatggcgtgaggccctgcgggctctcagagctgctgcttattcagcccaggtgcaacctgtagatggagccaccagaaagaagagccgggtactccctgcgcgtcccgcggagcccggcttcccggcccagtttccagcgcccggaatccttccactgtctgtctctgcccagagcaacctacgtgcagtaacgctgactccagagcgcacccgttgggcgatgaaggcggcacagcgtcgaaaaaacaaaagaataagaagaaaacgcggaacagggcctctgtggcaaatggaggcgagaaggcctcagagaaactcgccccagaagaagttcccctaagcgctgaggcccaggcacaacagttggcccaggaattggcttggtgtgtggagcaactggagctgggcctcaagaggcagaaacccaccccgaaacagaaagagcaggctattggagcaatccgaaccctgcgcagcaaaagaacgcccttgccccggaagaggcagctgatgcactccttgtttggagactatagggctcagatggaagccgaatggcgtgaggccctgcgggctctcagagctgctgcttattcagcccaggtgcaacctgtagatggagccaccagaaagaagagccaaagggtctgcaggcctcgctctatatggagagccaaagccactctggacatgcctgatgaagagtttaggttcaatttcttttagcgtctccccgaacctgaaacaatccccctcccttggggtggtgtaggggtttgttttgagtgccagagccctttccaggacttctgttgtcagagaaccctggagttggtctgtccctggctggtccaaggatttgtagctgttgtgaaggtgtgagaccatcagataggcaaaagaccccgttcgttttctgatgaaatgttctctctttcagaagagagagagaggtgcatttagaaaatatgcaataaattgaagtgagtgttcaaagtattgtagaaggaatattgtactcagtctttaggattagattaagtggctgttggtaacaaagattagtggagaagctgtataatcgtacactggttttcacttttgaaaggaatccctgtcaaatggtttagtgcttaatgctgttatgtcatattgccctaatctctatttttgataaaattggataaggagtgaaagagtatgctgaccacctatgttagaggaagtacagaagatgcaggggtgtggtatccctgggtccagtccctcacctggtacctttgtgcatgttgccttcattcctgagcaggtatcatcctcagggaaccagcatggcacctaccaggccaggctctgttcttaggagcaaggagcttcttgcgctaacagttctggcctgagacctggattgagccttggcagacttcttgtctaaatgttggccattcagtctcaggccctctgttccatggaattgggaatctccaggtgacctaatcctcattggtggcttgatgtttgctggtatcttccaaactcagttcccagactagattgatacctggagcccagctgcctactcagcatttccacttgggtgcttcataggcatttcaaacctgatgtgtttaaaacacttgattaggctccggttttcctttggcttctgcttttcagtgaatggcatgactgcctatgtgggtggcaagccacccaggtgccgaggaaagagactgagggcacgagctgttccagtataataaaatatataaaataagaagagttatactagatctagatcatagacatgattatatgtgagtatcattaatcattagtttatagcaattactctttattccaatattataataatcctcactctacaatcataacctaggaaaaaccaggccatacagagataggagccgaggggacatagtgcgaagtggccagaagacaagagtgtgagccttctcttatgcctggacagggccaccagagggcttggtctagcagtaacaccagtgtctgggaagatgcctgttgcaaagtggaccatggtctagcagtagcatcagtgtcaaggaaaaacacccactacttagcagactgggaaaaggagcctccctttccccgggggagtttagagaagactactcctccacctcttgtggagggcctgacatcagtcaggcccgcccgcagttatccagaggcctgtctccctgtgatgctgtgcttcagtggtcacgctcctagtccgctttcatgttccatcctgtatacctggctctgccttttagatagcaggagcaaattagtgaaagtactaaatgtctgatatgcagaaataatggcataagctgtctctctctcttctctctctctctgcctctgctgccaggcagggaagggccccctgtccagtggacacatgacccatgtgaccttacctattattggagatggttcacattccttaccctgcccctttgtcttatatccaataaatatcagtgcagcctggcatttggggccactactggtctccgcgtcttggtggtagtggtcccccaggcccaggtgtcttttcttttaaaaaaaaaaaa

SEQ ID NO: 90227 - DNA, 1796 bp, Homo sapiens
gtccagtgcggtggaattcgagcaggcttccctgattatgggggcaggaaatggcctcccgggaggatcactgatcctagtacagaaatacccccagagcagagaagctgtccgtgccttatccaacacaggtaactaagagttcttatgaacggtgacttcctgcagtgtttagataaaaccaggctagaagtagaggaccaccaaattcctcaagagctgtttctcttcatatgatatttcgcatagctcaaaataggaggaggaacgaagtaacagaagttagggataaagctcttttattgtatgcattgaaaccttacaggggcagccttcgtgtcctgtggaatctgctgtccctcgggttttcttctagggtattggaatattaaactgggatattaggggcccctggggtccagaatcttgccaatgaagagaagggcccctgtgtctgtgtccctcagtacgaagatgaaaggctggttaaggtgatagtccagcgggaaggtgaggtgggcaggctgcagccctgggctgggggtggttcccgccccatcctcgttccactcaaagccagcccggtgttccacctgagtcagcttgatgggtttgcctgtgatcttgctaaagtctggtgaatcaaacaaggattgcagcttcatctcctgcagggacttggtgacttcgccttcgtaactcagcttcagcttggggacagtgaggaccgcctgcacggtcttcagttctcggtctatgtcatgaatgaactcggaggtgaggctctcctctatcaaggtcaaattctgggtcactttcaggggcaggaagaagatgatactcatgcttccggtcaagggcagctgggcaatcttgcagctgagatctgaatccaagccatagcgtaaaacagccttagggtccgacatcatggggaccctcacggtcctctcttcatccaagtagaaatcctcgagggaagtctttctggagtcaaactttgtttcccaactgccccttgaagtgcgccacacccgagaaggagaatgctgatctcatcgggaatttcctttgtggacctggcgagcttccctttcatctgcgcctgcacccagttgttgatctcttgcaggtccaagcgagggttgcccgtcaggactctgggcctggtcccatatgacttttccagaggtgccacaaagctggattttatgcgcagcttcttctcaaagacgatccgggaggcactcttgaggttcttctggggggcagtgaccgtgtcaaggagctccttataggtaccatggatgtctgggctgctgatcaagtcatagtagagagcccggtgaatgatggattctgttcgctgctccgctcccagcgagagggccgagagggccgtggccacactgagaggagacaggagcacgttggtcgtggggctcatgctggatcgcacccggtacaggtcatagccgaagttggagacagccgctgccagcttgttcacggggactttgaagaaaggatcctcctcctccaccagcgcccctgtgctgtcggggtctggggagccctcctccggggggctggcagggttctggcagctgctgtgcccgaggagggctccaatgcagaggagtagcaccagggcctgcatcctggggcctgtggatacgctgcagctccacacccagcctagtccctctaagcctgcacactgagggggctccagccagcacagagctttttttgctgccttctaatccagcgtccagcaggcttcagattacagc

SEQ ID NO: 90228 - DNA, 4043 bp, Homo sapiens
ttttttttttttagttttttcaggttttcatgccaatgaatttattgaaacggaggtctgtacacaggcaaacctgtactgtggaaactaagacatcaggagctctctccactcccctggccctccagggtggggtgaggagggagtagaccttgggggcagaggacaggaggggagttacagctgtaggaggggcggggccaggttggacggtgcgaatcgacgttttctttaagaaaaaaattataacaatctatttacacccgggggccagggaagggaagaggagacgggctgggctggttctatttacaagggacacacagaggggagggggtctggaggaggtgaaaatctgggggaggtggaaagggccaagggggtaaggaagtcctcatccccccaacacccctgtccttctcttcccctcccccacaaccagtttaaaatcctccttaaaaagccccaccacaggggtgaggctggtgagggagggactggaggtggggacagggactcatttacctctgccctctagtctaggggcccagccagggcaggagcttgatgggctatggccccccttcccagcccctcttggggctcccagatggaagtggaagggtgcttggtggggccctcaggaggagttagtgagggtaggtgtggcatcggtcgactgccagtctgagctggtcggagtctcagttaaagcttgtgaggacggggtgaagggtggtagtgcccgctggggaacctccaagtgaaggagggatgagaatggcgttgagagacggttggattggagagttcaccagcactgaagttgaagagagggggaagtgggcggttgttaggcagctgggttcccagacatcgcagttcatcaaagaagctgtgcgcacaggcctctagtggggagagccttgaggatggggtgtactcccagcaggctagagcagagcgcgatggcctctggcggcgttcgagatttgaacacttttgtcccaggggtgagctttaatctgagggaacttgaactccgtgtagttggggttcatctctcggatttgttcccgggttggtgttcccagcaccttgatgatctccaccagctggtccaccccactgtccccagggaagatgggctggcccaagaggagctctgccagtacacagccagctgaccaaacatcgatggatgaggtgtaatcagtggctccaaagatgagctctggggcccggtagtagcgagaacagatgtaggagacattgggctcccctcggaccaactgctttgcactgccaaaatcgcagagcttgaggacagcagtgtcagggtccaccagcaggttctggggcttgatgtcgcggtgacacacgccctgggagtggatgtaggccaagctgcggaagagctggtacatgtacaccttgacatagaggatagggatggtcaacttggccttggtgaagtggcgggccacccggtacactgtctcgggcacatattccagcaccagatttaggtaaagctcgtctttcttctcgccactggagtagaaaaagtatctcagcctcacaatattgcagtggtccagcttacgcatgatctgcagctctcggttcttgaacctcttgtcctggagaaccttcttgatggcgactagttccctggtctctgccagccgtgcctggtacacgaccccaaatgagccattgccaatcactttgatgtccgtgtaagccacttcttgggagcgctctgggccttggcctagagtggctacgactgtggtcaccttcccgctgtcacggcccagcttcaccccgggcggcgggaagctagtgcctgcgccggggcctccgctgcctcctccgccgctgccgccgggtccacccccggagctcgaggccccgacgcccccacccatggccccgacagatgcctttccgccgccggtgccgcctgggccggaggccgagcctccggggccgccgccgcctcctccgcctccgccgccgggctccgcgaacgagctagtccgcgccctgcccgagcccccagggccgcctcccgaaggcccgccgccgctcatggcgccgagcacaggcccaggctgcggggctcgggctgcccgggctgccccagccgccgccgctgccgccgcctcccccgggccctggcctcttccaggccgcgccgctctggcttgggctccggctccggcccagcgcccgccgcggggcacgccgggagatgcagtccggctgtcgtccgcgccgccgtcaccgccctcggcccgcacagagagccgcgtggcacgccgggaaatgaagtccacaaaagcctcagagtagaccgcgggaatgatgggcgggaatgacgggtcacgctgtacgtcgggaaatggagtccagggtaatctgtcagccgacttcttgtcctcaccctcatcctcaaagcccccagcggggcccccacccccttcgaggcgacagtcttcactccagcgccgcttaaagcgtagcttgaggggcatgcactgggatgccccgggtgcctcgccgggctcaggcttagggggtgcaggtggggcacggggcgtcttgaacacctccccgtcttcctcatcctcatcactgatgtcagtcacctctacctcctccgactcgccttccgagatgggctccaccttgatctgtggtggcgggggcggtggggctagcgcccctgccccctcagccagcccgcctgcactgccaccgctcttgtcagcaccggctacggccttctccccagctgcccgctgccggcgtccgagtgggggcggctggagcttaaacttgaatggggaggaagaagaagaagaggatgacgaggccgaggaggggaccggtggggtctcgggtgccatgggcggcagcgggcacttgtcagggcgctggggctggggcaccaccagcccagggtagtgcaggaaggcgcgggggctgaggtggtagttgtagacgctttgggtgtgggcctgcaggtaccgtttcatgtcctcagggctgaaggagaagtgggagcctccccctgagccgctgggccccccgccaccactggggtacatcgggctcagcgtgggcgagggagtgtaggccaggtgggtgggcgtcatgggcagagccggggagagctgagggggcagcagggatccaggaccggccagaggcgacacagggaaggggctgaggggttcagggccaccccgaggccggggatagactcggaagacaccagggtcatggggcaggcgggccagcgggggccctcggaaggcacccagatccggagggccgggtggtcgggcgcggggatcctctcccagcggttcctccagctctgacgtgccatcactacagtcactgactgagcctcggcccaggcggcgggccaccacagccgagaagagggaagatgaagatgaagagcaggctggtcggtgagcgggggtcctcggtgggggacagcacctcggagggcgttgagggagggaagcggaagtggctaccacccgacggcactggcggggcactttggggcactgcacccccagccaaccccacatcaatgaatgggtaattgaccagcaccagtttgttgaaattgaacttgtaggtgaaccgtttccccttggtcttgtgcagaatgcgcttgttatagtaatagcgcagggcccggctcagcttgtcgtaattcatctggggcttgcacttgcgaacgccccacagccgggccacctcatcagggtctttgatgacgaattccccgtagtccccctgccaggcaatgacgccctggtactcctccttccgcagcagctccaggataaagtgccacagctggatctgccttgagccaggggacgactctggcttgtaggcccaatccgggaaggcaaaccctgtgtccgccggggtcttcatgctggggggcccggggcgaagcgccccgattccgggccgcggctcccacgaaatcgtcgacccgggaa

SEQ ID NO: 90229 - DNA, 1312 bp, Homo sapiens; identical to SEQ ID NO: 61200

SEQ ID NO: 90230 - DNA, 390 bp, Homo sapiens
cttttttcccttttgatttgaaaacctcttggggttgtggtattggagaggtatatagggctaagtgttgagaacagggaattaggttagtaatattagtctggctgggtagatgtgagtcctgagacaaagtatgtttctctgctctatctcagctttgtgtgagcccagccagtttgtgccccagtgcctttgtctgtaactcgtatgacaatacttctttggaaagtactccatataattattttgaattctgcttttttgacctaaaaatgacatcagtggatgcgcttgtttcactcgcatccttatatgacaccatctatgttctttttcttacatattaatatttgcttgcacagcttttaaattcttgtccagtggataccg

SEQ ID NO: 90231 - DNA, 2185 bp, Homo sapiens; identical to SEQ ID NO: 61213

SEQ ID NO: 90232 - DNA, 729 bp, Homo sapiens
tatcgtttgtgctggttgtgaccagagagccgtttagtgtaaacatttgtttccaagcttatgtgatggggatactttctcctccttcatgtgggtcacaggtgggattggtgagtccttatcggagtcaggagatatctgaggcagtgctggtgttcatagtcacagactcctggagctgggtctggggtttatggctgacatctagatatctcttacttaactggctttgcttctgtgttttatttttttgtcattaggtgttatgctcccatggcacacaatataacatgtctagtaacattgcttgtgagtctttttcttgtataaaagcaaatagatgttgctctggtgtggaatatatattgactcaattttcttcagacatactccccagccgcagagtcttacatcatgcggcctgggcttgagctttggggaaggccacagcctgaaccggataaggtcaatggggaaatcctcaaaagaagctgctgccttgtatgactccgggtgatgggaacccttataaagggggccacttaataagggtgggcaaagggaccccccggagcttgtgcgagcccccctctcagaaaggaaaaccccccccccccagggggggtggggcgattctcccccccactccgcccacgaaaaaaataattgaacagagacgtttttttttaacccgggcccgcaacgtatactttccctattagagggggc

SEQ ID NO: 90233 - DNA, 1875 bp, Homo sapiens; identical to SEQ ID NO: 61282

SEQ ID NO: 90234 - DNA, 3050 bp, Homo sapiens
cggcacgagcgcccgcaaccggggcgaatcatggcggccgccaaggtggctttaaccaagagagcagatccagctgagcttagaacaatatttttgaagtatgcaagcattgagaaaaacggtgaatttttcatgtcccccaatgactttgtcactcgatacttgaacatttttggagaaagccagcctaatccaaagactgtggaacttttaagtggagtggtggatcagaccaaagatggattaatatcttttcaagaatttgttgcctttgaatctgtcctgtgtgcccctgatgctttgtttatggtagcctttcagctgtttgacaaagctggcaaaggagaagtaacttttgaggatgttaagcaagtttttgggacagaccacaattcatcaacatattccatttaaactgggattcagaatttggtgcaactacattttggaaaagaaagaaaaagacacctgacatatgcggaatttactcagtttttattggaaatacaactggagcacgcaaagcaagcctttgtgcaacgggacaatgctaggactgggagagtcacagccatcgacttccgagacatcatggtcaccatccgcccccatgtcttgactccttttgtagaagaatgtctagtagctgctgctggaggtaccacatcccatcaagttagtttctcctattttaatggatttaattcgctccttaacaacatggaactcattagaaagatctatagcactctggctggcaccaggaaagatgttgaagtgactaaggaggagtttgttctggcagctcagaaatttggtcaggttacacccatggaagttgacatcttgtttcagttagcagatttatatgagccaaggggacgtatgaccttagcagacattgaacggattgctcctctggaagagggaactctgccctttaacttggctgaggcccagaggcagaaggcctcaggtgattcagctcgaccagttcttctacaagttgcagagtcggcctacaggtttggtctgggttctgttgctggagctgttggagccactgctgtgtatcctatcgatcttgtaaaaactcgaatgcagaaccaacgatcaactggctcttttgtgggagaactcatgtataaaaacagctttgactgttttaagaaagtgctacgctatgaaggcttctttggactgtatagaggtctgttgccacagttattgggagttgccccagagaaggccataaaacttacagtgaacgattttgtgagggataaatttatgcacaaagatggttcggtcccacttgcagcagaaattcttgctggaggctgcgctggaggctcccaggtgattttcacaaatcctttagaaatcgtcaagatccgtttgcaagtggcaggagaaatcaccactggtcctcgagtcagtgctctgtctgtcgtgcgggacctggggttttttgggatctacaagggtgccaaagcatgctttctgcgggacattcctttctcggccatctactttccgtgctatgctcatgtgaaggcttcctttgcaaatgaagatgggcaggttagcccaggaagcctgctcttagctggtgccatagctggtatgcctgcagcatctttagtgacccctgctgatgttatcaagacgagattacaggtggctgcccgggctggccaaaccacttacagcggagtgatagactgctttagaaagatactgcgtgaagaaggaccaaaagctctgtggaagggagctggtgctcgtgtatttcgatcctcaccccagtttggtgtaactttgctgacttacgaattgctacagcgatggttctacattgattttggaggagtaaaacccatgggatcagagccagttcctaaatccaggatcaacctgcctgccccgaatcctgatcacgttgggggctacaaactggcagttgctacatttgcagggattgaaaacaaatttggactttacctacctctcttcaagccatcagtatctacctcaaaggctattggtggaggcccataggaagatcagccctgggatagtgctgtctttttgtgggtactgcagtaaagaacatccctcctgggaatgaagcaatgcttcatcccttttacgtccatctcttgtttaaattcaagtccaggcttttttatcatgtgaaatcattcattttctgggtgttttcttaaccagatcattgtgaaattattcataattattatttggccctctgcccagaaacctttgtttgcatctgaaaattgatgggatttggtcaacactaacatgatttggggaaaggagcaagtcagaatagaaattagtactcccctccttgaactaggattgtagtcccaaagaggctactgtaaggcaatcatggtgctcagagcagtgtttcgtgtgtgttttaaactggtaggaaactaggtgcatatttataaaaataaaaaacactgggagaaatgaaaaaatatatatcaaatatattcagcctggcttcaaattgtaagcatgcacaaattctgtctctggattatattatgaagcttttatgtgaaacatgtttctttgtaatgaaaaccacattggagatgtttagtaatcatattgttactggtacccaagactacctagggaaatgccctttgtacctttagggaagtacttttggcattttactgtacagacagaaaaaactgagatgtagcccctctccctggaagtgcctaattttgaaaaactgcctcatatgatgtacatgtactgattactgcctattttaataaacactcttgaaaaatgcatgttgccctgttgctgcctgccctattctcctcaatctccccatcattggtacccaacttgcttttaaaatccactttatcttgaataatgtaagacaaatatgttctgacataagtatttaattcatgttgccctgcataatggtcagaggcgcatgaatttgtgaaggtggaaataaactatttgtaaagtgaaaaaaaaaa

SEQ ID NO: 90235 - DNA, 3090 bp, Homo sapiens
gaaagaagtgatatcctccccagaccatctgctttggggagcttggcaaaactgtccagcaaaatgaaaagactcacgtgctttttcatctgcttctttctttctgaagtatcaggcttcgaaatccccataaatggactttctgaatttgtagactatgaagatcttgtggaactggccccaggcaaatttcaattggtggcagagaaccggagatatcagagaagccttccaggagaatcggaagaaatgatggaagaggttgatcaagtaactctttatagctataaagtccagtctactattacttctcggatggccaccaccatgatccagagcaaagtggtgaacaattccccgcagcctcagaatgtcgtgtttgatgttcagatccccaaaggagcattcatttccaacttctccatgactgtggacggcaagacatttaggagctctattaaggagaaaactgtgggccgagctctttatgcacaggccagagcaaaaggcaagacggctggcttggtgaggagcagcgctcttgatatggaaaacttcagaacggaagtaaatgtcctcccaggagcaaaggtgcagttcgaacttcactaccaggaggtgaagtggaggaagctgggctcctatgagcacaggatctatctgcaacctggacggctggccaaacacttagaggtagatgtgtgggttatcgaaccacagggactgagatttcttcatgttcccgacacatttgaaggccatttcgatggtgttccggtcatttctgaagggacaacagaaggcgcacgtctccttcaagcccacggtagcacagcagagaatatgccctagctgccgggagactgcggtagatggggaactggtggtgctgtatgacgtgaaaagagaagagaaggctggtgaactggaggtgtttaatggatattttgtccacttctttgctcctgacaacctggacccaattcccaaaaacatcctctttgtcatcgatgtgagtggctccatgtggggagttaaaatgaaacaaactgtggaagcaatgaagaccatattggatgacctcagagcagaagaccatttctctgtgattgatttcaaccagaacattcgaacttggagaaatgatttatttcagctacaaaaacacaggttgcagatagccaagaggtatattgagaaaatccagcccagtggaggcacaaacatcaacgaagcactcctacgggcaatcttcattttgaatgaagccaataacttgggactgttagaccccaactccgtctcgctgatcattttggtttctgatggagatccaacagtgggcgaactaaaactgtcaaaaattcagaaaaacgttaaggagaacatccaagacaatatctccttgttcagtttgggcatgggatttgatgtggactatgattttttgaagagactgtccaatgaaaaccatggaattgcacaaaggatttatggaaaccaggacacgtcttcccagcttaagaaattctacaaccaggtctccactccattgctccggaatgttcagttcaactatccccatacatcagtcacggacgtcactcaaaacaatttccataactactttggaggctcagagattgtggtggcaggaaaatttgaccctgctaaattggatcaaatagagagcgttatcacggcgacttcggctaacacgcagttagtcttggagaccctggcccagatggacgacttgcaggattttctatcgaaagacaagcatgcagatcccgatttcaccaggaaactgtgggcctatctaaccatcaaccaactgctagctgaacgaagcctggctcctacagctgccgccaagagaagaattacaagatcgatcctgcagatgtctctagaccaccacattgtgactccgctgacctcgctggtgatcgagaacgaggctggggatgagcgcatgctggcggatgccccaccgcaggatccctcctgctgctcaggggccctgtattacggcagcaaagtggttccagattccaccccgtcttgggccaatccttcaccaacgcccgtgatctccatgctggcacaaggatctcaggtgctagagtccacgccacccccacatgtgatgagagttgaaaatgacccacatttcatcatttatctaccaaaaagccaaaagaacatttgtttcaatattgactcagaacctggaaaaatcctcaacctggtttctgacccagaatcaggaattgtagtcaacggtcagcttgttggtgccaagaagcccaacaatggaaaactaagcacctattttggaaaactgggattttatttccaaagtgaagacataaaaatagaaatcagcactgagaccatcaccctgagccatggttctagcacattctccttgtcctggtccgacacggctcaagtcacgaatcagagggtgcagatctcagtgaagaaagaaaaagtggtaactatcaccctggataaagagatgtccttttctgttttacttcatcgtgtttggaagaagcatcccgtcaatgttgactttctgggaatctacataccccctacaaacaagttctcacctaaagcccacggactaataggccagttcatgcaggaaccaaagatacacatcttcaatgagagaccaggaaaggaccctgagaagccagaggccagcatggaagtgaaggggcagaagctgatcatcaccaggggcttacagaaagactacagaacggatctagtgtttggaacggacgttacctgctggtttgtgcacaacagtggaaaaggattcattgacgggcattacaaggattacttcgtgcctcagctctacagctttctcaaacggccttaaaggtttatagtttgggaaattatatatattaatatacatctttcccctgtcacttttgcagatattcttcggtttgaataattaaaatgaaccagatatcagggtggttaattaaaatgaaccagatatcagggtggtttataaagcctgtaaacacacctaagaaaataaacattttacaaatg

SEQ ID NO: 90236 - DNA, 2057 bp, Homo sapiens
  misc_feature (1)...(2057): n = a,t,c or g
cggccgcgtcgacccgcaccatggggtcccgccacttcgaggggatttatgaccacgtggggcacttcggcagattccagagagtcctctatttcatatgtgccttccagaacatctcttgtggtattcactacttggcttctgtgttcatgggagtcacccctcatcatgtctgcaggcccccaggcaatgtgagtcaggttgttttccataatcactctaattggagtttggaggacaccggggccctgttgtcttcaggccagaaagattatgttacggtgcagttgcagaatggtgagatctgggagctctcaaggtgtagcaggaataagagggagaacacatcgagtttgggctatgaatacactggcagtaagaaagagtttccttgtgtggatggctacatatatgaccagaacacatggaaaagcactgcggtgacccagtggaacctggtctgtgaccgaaaatggcttgcaatgctgatccagcccctatttatgtttggaggccctactggaatcgggggacttttggctactttttctgacaggctaggacgccgggtggtcttgtgggccacaagcagtagcatgtttttgtttggaatagcagcggcgtttgcagttgattattacaccttcatggctgctcgcttttttcttgccatggttgcaagtggctatcttgtggtggggtttgtctatgtgatggaattcattggcatgaagtctcggacatgggcgtctgtccatttgcattccttttttgcagttggaaccctgctggtggctttgacaggatacttggtcaggacctggtggctttaccagatgatcctctccacagtgactgtcccctttatcctgtgctgttgggtgctcccagagacacctttttggcttctctcagagggacgatatgaagaagcacaaaaaaatagttgacatcatggccaagtggaacagggcaagctcctgtaaactgtcagaacttttatcactggacctacaaggtcctgttagtaatagccccactgaagttcagaagcacaacctatcatatctgttttataactggagcattacgaaaaggacacttaccgtttggctaatctggttcactggaagtttgggattctactcgttttccttgaattctgttaacttaggaggcaatgaatacttaaacctcttcctcctgggtgtagtggaaattcccgcctacaccttcgtgtgcatcgccatggacaaggtcgggaggagaacagtcctggcctactctcttttctgccagtgcactggcctgtggtgtcgttatggtgatcccccagaaacattatattttgggtgtggtgacagctatgggttgggaaaattttgnccatcggggcagcatttgggcctcatttatctttatacagctgagctgtatccaaccattgtaagatcgctggctgtgggaagcggcagcatggtgtgtcgcctggccagcatcctggcgccgttctctgtggacctcagcagcatttggatcttcataccacagttgtttgttgggactatggccctcctgagtggagtgttaacactaaagcttccagaaacccttgggaaacggctagcaactacttgggaggaggctgcaaaactggagtcagagaatgaaagcaagtcaagcaaattacttctcacaactaataatagtgggctggaaaaaacggaagcgattacccccagggattctggtcttggtgaataaatgtgccatgcctgctgtctagcacctgaaatattatttaccctaatgcctttgtattagaggaatcttattctcatctcccatatgttgtttgtatgactttttaataaattttgtaagaaaattttaaagcaaatatgttataaaagaaataaaaactaagatgaaaattctcagttttaaaaactgctttcttattgctgcaaaatatttttcaacatttgtttttctatgtagttgattctcaacctttccccaccacccccctaccaagctcgtgccgaattctgcgc

SEQ ID NO: 90237 - DNA, 3111 bp, Homo sapiens
cgcagcgtcccgccagccagctccttgcacccttcgcggccgaggcgctccctggtgctccccgcgcagccatggctcagcacttctccctggccgcctgcgacgtggtcggattcgacctggaccacactctgtgtcgctacaacctgcccgagagcgccccgctcatttataatagctttgcccagttcctagttaaggagaaagggtacgataaggaattgctcaatgtgaccccagaggattgggatttctgttgcaaaggtttggcattggatctagaagatgggaacttccttaaacttgcaaataatggcactgttctcagggcaagccatggcaccaagatgatgactccagaggtgctggcagaggcatatggcaagaaagagtggaagcacttcttgtcggacactggaatggcttgccgctcaggaaagtattacttttacgacaactactttgacctgccaggagctcttctgtgtgccagggtggtggactatttaacaaaactgaacaatggtcaaaaaacatttgatttttggaaggatatagttgctgctatacaacacaattataaaatgtcagcttttaaggaaaactgtggaatatattttccagaaataaaaagagatccaggcagatatttacatagtcgtcctgaatctgtgaaaaaatggcttcgacagctaaagaatgctgggaaaattcttctgttaattaccagttctcacagtgattactgtagacttctctgcgccatatattcttgggaatgattttacagacctttttgacattgtgattacaaatgcattgaagcctggtttcttctcccacttaccaagtcagagacctttccggacactcgagaatgatgaggagcaggaggcactgccatctctggataaacctggctggtactcccaagggaacgctgtccacctctatgaacttctgaagaaaatgactggcaaacctgaacccaaggttgtttattttggtgacagcatgcattcagatattttcccagctcgtcactatagtaattgggagacagtcctcatcctggaagaactcagaggggatgaaggcacgaggagtcagaggcctgaggagtcagagcctctagagaagaaaggaaaatatgagggaccaaaagcaaaacctttaaatacttcatctaaaaaatggggctcttttttttattgattcagttttgggactggaaaatacagaagactccttggtttatacatggtcttgtaagagaatcagtacttacagcactattgcaattccaagtattgaagcaatcgcagaattacctctggactacaaatttacaagattctcttcaagcaattcaaaaacagctggctactatccaaatcctccactggtcttatcaagtgatgagacactgatatccaaataagttgtctttactgaaaaatgaagtgaagacccatatatgcagttaaaaaaaagttaattttcaaaaaatactgtaaaagactttaaggaacaagttttattgaccaataagttgatatttgtccataggtctcctttctataaatcatcttgatgtttaacaactcttattatattaaaatctcagtatcctaaaacttagaaccttattgatattttctatacagtagttttgtgattagaattcacctggggacacacactcacacgcacagtcactcttacacatatgcctagtccagtggttctcaaagtgtgatccatagactaatagcatagcattacctgagaacttgataatgcatatttgcaggccccacgcaaaacctgctgaatcagaagctctgagagtaaggcctacccaatctggtttaacaagcccgtcaggtgattctgatttacagtacagtttgagacccactggctagaacatatcctccagagacttggcttaattggtctgggtaaatatggctgagcgttgttatcttttgttatcttttatatgccctaggaaagtacaaccagaattgaaaaccaactgaggtataccagttctttcaattaatagtcaagaacattgagtccagtgagattaagtgatttttgcaggctatgaggttttatgctattcctgtgttctccaaaacaagaaaataaaaagacatgacttattctctgttcatacagcaagtatggaaaaaagatgatctagaagtcaactatctcaacctccattgttacccactaggtttttttctaataatgttaaaggctatttaatttatttaatcaactttaagcattacattctcaattggggacaaaaattggttcttggggtgaaaaaatattagatatggcttgtggacttccaatatcatcctatccaacaaaatcttattccttagtattaatttatctcattgggaagaaatttgtagttaaaactaatataatttgaatttaatttctgtaattgggaaggagggtaataatgaacaaaaagtttgagaaaaaaatgctttaatgggttttacaggcatgctacaatccaggactgtggtgttctatgtgccgtgtatggtcatattagtagctatttgttgcaagatacttgaagccaaatgtttgcagtataggttcctggctactgtttatgctgtgatttcactctgtctatcatgggcagtattagaaaacacactggttttcactatctggtttacaaaccctatcattattttacctggattgaagtgcagaatttggcatatcgatgcatgcaatggaaagaaaaaaaatttgttaaaatttgtaaatgttcagctaaatctcagatatactgtgggatgagtatctcagggtaggtaacaaaaaaacaaacaaaaaaaaatcactgaaatttttccctcacagtcagtagctttgtttgatatttaacaataagtatatggtgatatacttgaaatttatgtccagaatgtcactggaatattacaatgagcataaataatcaagcttaggactaaatgaaagatactatctcatgtatgctttaaatagagaatttatttcttttaaaaataaagctatttttccttaaaaaaa

SEQ ID NO: 90238 - DNA, 3774 bp, Homo sapiens
  misc_feature (1)...(3774): n = a,t,c or g
cgaccctcgctcactcctcagtgcacgagtgatctgaagcatgacaagctcagcctgcagctgccgtgggctttgtgtggactggacgcagagcttgggagacgggggagggctattactccaattcactgtcaatggaattacagctatagcggcagtgtatataggattgctttttctcgtcttcctgggttctgaagtaacggaagctaccttgtataaagacctcaacactgctgaccatgatcagcgcagcctggagcatcttcctcatcgggactaaaattgggctgttccttcaagtagcacctctatcagttatggctaaatcctgtccatctgtgtgtcgctgcgatgcgggtttcatttactgtaatgatcgctttctgacatccattccaacaggaataccagaggatgctacaactctctaccttcagaacaaccaaataaataatgctgggattccttcagatttgaaaaacttgctgaaagtagaaagaatatacctataccacaacagtttagatgaatttcctaccaacctcccaaagtatgtaaaagagttacatttgcaagaaaataacataaggactatcacttatgattcactttcaaaaattccctatctggaagaattacatttagatgacaactctgtctctgcagttagcatagaagagggagcattccgagacagcaactatctccgactgcttttcctgtcccgtaatcaccttagcacaattccctggggtttgcccaggactatagaagaactacgcttggatgataatcgcatatccactatttcatcaccatctcttcaaggtctcactagtctaaaacgcctggttctagatggaaacctgttgaacaatcatggtttaggtgacaaagttttcttcaacctagttaatttgacagagctgtccctggtgcggaattccctgactgctgcaccagtaaaccttccaggcacaaacctgaggaagctttatcttcaagataaccacatcaatcgggtgcccccaaatgctttttcttatctaaggcagctctatcgactggatatgtccaataataacctaagtaatttacctcagggtatctttgatgatttggacaatataacacaactgattcttcgcaacaatccctggtattgcgggtgcaagatgaaatgggtacgtgactggttacaatcactacctgtgaaggtcaacgtgcgtgggctcatgtgccaagccccagaaaaggttcgtgggatggctattaaggatctcaatgcagaactgtttgattgtaaggacagtgggattgtaagcaccattcagataaccactgcaatacccaacacagtgtatcctgcccaaggacagtggccagctccagtgaccaaacagccagatattaagaaccccaagctcactaaggatcaccaaaccacagggagtccctcaagaaaaacaattacaattactgtgaagtctgtcacctctgataccattcatatctcttggaaacttgctctacctatgactgctttgagactcagctggcttaaactgggccatagcccggcatttggatctataacagaaacaattgtaacaggggaacgcagtgagtacttggtcacagccctggagcctgattcaccctataaagtatgcatggttcccatggaaaccagcaacctctacctatttgatgaaactcctgtttgtattgagactgaaactgcaccccttcgaatgtacaaccctacaaccaccctcaatcgagagcaagagaaagaaccttacaaaaaccccaatttacctttggctgccatcattggtggggctgtggccctggttaccattgcccttcttgctttagtgtgttggtatgttcataggaatggatcgctcttctcaaggaactgtgcatatagcaaagggaggagaagaaaggatgactatgcagaagctggcactaagaaggacaactctatcctggaaatcagggaaacttcttttcagatgttaccaataagcaatgaacccatctcgaaggaggagtttgtaatacacaccatatttcctcctaatggaatgaatctgtacaaaaacaatcacagtgaaagcagtagtaaccgaagctacacgagacagtggtattccagactcagatcactcacactcatggatgctgaaggacctcaccagcagacttgtgttttggggtttttttaaaccctaagggaggtggatgggtaggaaccctggttcttactgccaaaacactggaaaaagagactgaaaaaaagcaatgtactgtacatttgccattataatttatatttaagaactttttattaaaagtctcaaatttcaggttactgctgcgattgatgtagtggagatgcctgaacacaattctatattttagtattttttagtaatttgtactgtattttccttgcaaatattggagttataaaccatttactttgtgttctactgagtaagatgacttgttgactgtgaaagtgaattttcttgctgtgtcgaacaatcaggactgcattcatatgagatccttgtagtataagcacaggccatttttcactttggtattaataaaatgtnnnnnnnnnnnnctggctgaatggctgaatgagataaaatttaattttaaaaaatggttatgaaataatgttccaattattaaatttgtattatcccagtggtattcaataaatcaaaatgtgtgaagtaatgggcaatatcaaacttcctgcatatctccatttttgctctaggcaaattaattatccttaaaaaagttaagcatatcttctgaactgaatacatcagctggcataaaaggagcatgaagtctgttaaagccattgtcagcaaagctttgaaaataaaggacttcacaaaaacggtaatgtaaatgtgcttccaagttggggggaaaatgtgtacttaggaaaacatggaaacttagacttgtatagtgtaatgaacacaaataccaaaactgcattttggttttgcctataccatcctgatttttgaaaagtgaattataaacacaaaattgttagtgtttatgatgtttttatcataaaggatgtcagagaaactttatgcatattaaaaatgtaatgtaattataagcgattcccctcaacaatccagagaaagtagttctttaaataagagataatttaaagaaaaataaatactagacatcaaatttagatctggtttatgtcaaaggttttaacactgtacataaatgttcaatttacttttacaaagatcaagaatactgcccattactgtcacaattttccagatattatataatgaactcgtaatgtaacatttccttctagcttcctactgaattgtgagctgttacttgttgaaaaaccatatcacttttctgttgccatgatttttttttttcaacaaaaaaccaaagtgcattgtaccgccctttggccaagtcttgtatgtgccttggatccaacgctacatgtattcagctttttaaaactcccacaaaatttttcatactccttaaatatgaaaaattatggtcttattgctgaataaaacttttaaaaagtacagaataattgtgcttgctttttcaggattgtgttactatcactaagtagcaaattgcccagcacattagtcctaaacgtcccatgtatttttctaggcataaaaataaaagttggctaaaaattttaaaaaatcaaaa

SEQ ID NO: 90239 - DNA, 6996 bp, Homo sapiens
cgccgatggctgcggggtctcgcgccgtcgcaccgtccccacgcggcaagcgaccttcgggctcagggcggcggcggctgcaacgaggattaggagggcggcgcggaagccaagaatagtgtcgtcagcagcagccatttggtcccaggaggaaaagaggctgtggcagcgacgccgacgtcctgcgcgtaccccctctccgcggcacccaccgggccccctcctcctcctcttcggcggcggcagcgtccaccatcttcctcttgctgccagtggtagcgctcgtctggcggagctggttgttggtcttgacgatattatggatgaaggagttgttaaagaaagtggcaatgataccattgatgaagaagaactgattttacctaacaggaacttaagggacaaggtagaagaaaattcagtgagatctccaagaaaatcacctcgtttaatggcacaagaacaagtaagaagtttgcgacagagcactattgccaagcgttcaaatgcagcaccattaagtaacacaaaaaaagcatctgggaagactgtatctactgctaaagcaggagtgaaacaaccagaaaggagtcaggttaaagaagaagtatgtatgtcactgaaacctgagtaccataaggagaatagaaggtgcagccgaaatagcggacaaattgaagtggtacctgaagtatcagtgtcttcaagtcattcttcagtgtcatcttgtcttgaaatgaaggatgaagaatgattagactctaaggattatgtgtaataatccgggagacatagatgtgccatctcatgaattaaattgttcacttctttcagagacttgtgttactattggagaaaagaaaaatgaagctttgatggaatgtaaagccaagcctgttggtagtccaattgtttaagttttcagataaagaagaacatgaacaaaatgattccatttcaggtaaaacgggtgagactggtgttgaagaaatgatagcaacaagaaaagttgaacaagattcaaaggagacagtaaaattatcccatgaagatgaccatattcttgaggacgctggatcttctgatatttctagtgatgctgcttgtacaaatccaaataagacagaaaacagccttgtaggtttgcctagttgtgtagatgaagtgactgaatgtaatttggaattgaaggataccatgggtattgctgataaaactgagaacacccttgaaagaaataaaattgaaccgttgggttattgtgaagatgcggagtctaataggcagttggagagcactgagtttaataaatcaaacttagaggtggttgatactagtacttttggaccggaaagtaatatcttggaaaatgctatttgtgatgtgcctgaccaaaattcaaaacagttgaatgctatagaaagtactaaaatagagtcccatgaaacagcaaaccttcaggatgacagaaacagccagtcaagtagcgtttcttacttagagtcaaaaagtgtaaaatccaaacatacaaaacctgtaattcattctaagcaaaacatgaccacagatgctccgaagaaaattgttgcagcaaagtatgaagtaatacatagcaaaactaaagttaatgtcaaaagtgtgaaacgaaatactgatgtaccagaatctcagcaaaattttcataggccagtcaaagtcagaaaaaaacaaattgataaggagccaaagattcagagttgcaattctggggttaaatctgtgaaaaaccaagctcattctgtactgaaaaaaacattacaggatcaaactttagtacaaattttcaagcccttaactcattctttgagtgataagtcacacgctcatcctggttgcttgaaagaacctcatcatcctgcacaaactggacatgtatcacattctagccagaaacagtgtcataagcctcagcaacaggccccagcaatgaaaaccaatagtcacgtgaaggaagagcttgaacacccaggcgttgagcattttaaggaagaggataaactgaaactgaaaaaacctgagaagaacctacaaccccgccaaagaagaagcagcaaaagtttttctttagatgagccaccattgttcattccagataacatagctaccataagaagagaaggctctgatcatagctcctcatttgaaagcaaatatatgtggactcccagcaagcagtgtgggttttgcaaaaaaccacatggcaacaggtttatggttggctgtgggagatgtgatgactggtttcatggtgattgtgttgggttaagtctttctcaagcacagcagatgggcgaggaagacaaagaatatgtctgtgtaaaatgttgtgctgaagaagacaaaaagactgaaatactagatccagatactttggaaaaccaagctacagttgaattccatagtggagataaaacaatggagtgtgaaaagcttggattatcaaaacacacaacaaatgatagaaccaaatatatagatgatacagtgaagcacaaggtcaaaattttaaaacgggagtctggtgaaggcagaaattcatcagactgtagagataatgaaattaaaaaatggcagctagctcctcttcgtaagatgggacaaccagttttacctcggagatcctcagaagaaaaaagtgaaaaaataccgaaagagtctacaactgttacttgcacaggagaaaaagcttcaaaaccaggtactcatgagaagcaagagatgaaaaagaagaaagttgcaaaaaggagtgcttaatgtacatcctgctgcttctgcttccaagccttctgcagatcagatcaggcaaagtgtcagacattctctcaaagacattcttatgaagagacttacagactcaaatttgaaggtaccagaggaaaaggcagcaaaagttgccacaaaaattgagaaagagcttttctctttttttcgggacacagatgctaaatataagaacaaatatagaagtttgatgtttaatttgaaagatcctaaaaacaatatattatttaaaaaagtactgaaaggagaagtaactcctgatcatcttatcagaatgagtccagaagaactagcttctaaagagttagctgcttggagacgaagagaaaacagacataccatagaaatgattgagaaagagcagagagaagtggaacgacggccaatcaccaaaataactcataaaggtgaaatagaaattgagagtgatgccccaatgaaagaacaggaagcagccatggagattcaggaaccagccgccaataagtcattggagaagccagaaggatctgaaaaatcgaaaagaggaggttgactctatgtctaaagataccactagtcaacacagacagcatctttttgatctcaactgcaaaatctgcataggtcgaatggcaccacctgtagatgatctttctccaaaaaaagtaaaagttgttgtaggagtagctcgcaaacattcagacaatgaagcagaaagtatagcagatgcattatcttcaacctcaaatattttggcttctgaattctttgaggaggagaaacaggagtctccaaagtcaacgttctctcctgctccacgtccagagatgcctggaactgttgaagttgagtctacctttctggctcgattgaacttcatctggaaaggttttatcaacatgccttctgtggcaaaatttgttaccaaagcctatccagtatctggctccccagaatacctgacagaggacctaccagatagtattcaagtaggtggcaggatatcacctcagacagtttgggattatgtggaaaaaataaaagcatcaggaaccaaggaaatttgtgtggttcgcttcacaccagtaactgaagaagatcaaatttcttatactttgctctttgcatacttcagtagcagaaagcgctatggagtagctgctaacaacatgaagcaggttaaagatatgtaccttattcctttgggtgccacagataaaattccacaccctcttgtgccttttgatggacctgggcttgaactgcatagacctaatctattgttgggcttaattattcgtcagaaactgaagcgacagcacagtgcctgtgctagtactagtcatatagctgagactcctgaaagtgcaccaccaatagcattgccacctgataaaaaaagtaaaatagaagtttctacagaagaagcaccagaggaagaaaatgacttttttaattcttttacaactgtattacacaagcagagaaataaacctcagcagaatcttcaggaagaccttccaacagcagttgaacctttaatggaagtcaccaaacaggagccaccaaaacctttaagatttcttcctggcgtgttgattggctgggagaatcaacctactactctggaattagcaaataaacctcttcctgtggatgatatacttcaaagccttttgggcaccactggtcaagtatatgaccagggcccagtcagtgatggaacaaaacactgttaaagaaattccatttttaaatgagcagaccaactcaaaaatagagaaaacagataatgtggaagtaactgatggtgaaaacaaggagataaaagttaaagtagataatatttcagaatctacagataagtcagcagaaatagaaacatcagtagtagggtcctcttccatttctgcagggtctttgacgagtcttagtctcagaggtaagccaccagatgtttctacagaagcatttttaacaaatttatcaattcagtcaaaacaagaggaaactgtggagagtaaagagaaaacattaaaaagacagcttcaggaagatcaagagaataatttgcaagataaccagacttcaaatagttctccatgcagatctaatgtaggaaaaggaaacatagatggtaatgtgagctgtagtgaaaaccttgttgctaatacagcgaggtctccacagtttatcaacctgaaaagggatcctaggcaagcagcaggacgaagtcagcctgtaactacttcagaaagcaaagatggagatagttgccggaatggagaaaaacacatgctgcctggcctgtcacacaacaaggagcacttaacagaacaaatcaatgtagaggaaaagttgtgttctgcagagaaaaactcgtgtgttcagcagagtgacaatttaaaagttgcacaaaactcaccatcagtagaaaacatacagacttctcaagcagaacaagcaaaacccttacaggaggatattttaatgcaaaatattgaaactgtgcacccatttcgaagaggatcagcagtagcgacatctcattttgaagttggaaacacatgtccatcagaatttccttctaaaagcatcacctttacttccagaagcaccagccccagaacaagtacaaacttttcacccatgaggccacagcagcccaaccttcagcatctcaagtctagcccacctggatttccatttccagggcctcctaattttcccccacaaagcatgtttggatttccaccacatttgccacctccattacttccccctccaggctttgggctttgcttcaaaatcccatggttccctggccacctgttgtttcatctcccaaggtcagccacagcgtatgatgggtcctctctcacaagcatcaaggtatataggcccgcagaatttttaccaggttaaagacattcggaggccagaaaggcgccatagtgacccttggggtaggcaagaccaacagcaactggataggccatttaataggggtaaaggggaccgccagagattttatagtgattcacaccatttgaaaagagagcgacatgaaaaggaatgggagcaagaatctgaaaggcatagacgcagagacagaagccaagacaaggacagagacagaaaaagcagggaggaagggcacaaagataaagagagggcacggttatcacatggtgatcgaggaacagatggaaaagcaagcagagatagtaggaatgtagacaagaagccagataaacctaaaagtgaagactatgagaaggacaaagaacgagagaaaagtaaacacagagaaggagaaaaggacagggataggtaccacaaagatagggaccacactgacagaactaaaagcaaaaggtaaaatttgcaggctgcttcaggattacatttaaataactgttaaaatgttgtatcttgtaaacaaaagaaagattgcctgctaggattgtgccatctttaaaatttttactattggtcatttgcagaacagtaaattctgtgtgttggtacagagtgctctgtaccagtgctcatcatcccttcttcataccaacggtccctagttataggaatttaatatttttaaaagttttacattgctgtatattcaaagatttgttttattaatatgcaataaaggcttagaaattttagttttattccttaattggtaaatatggttaactatggaatatatttacttcctctagtgaatgtcctttatataatgactaatttgggagtaatgtgtgctctgtaagtttgttttaaattgcactgtttttaaagaaactgtagaggagcaacaaaaatccaagcaacttcataatcagattatgctaatcatttagttgagcagtttttgaccaagaatcagaagcccaaggggtacatttattgctttaatctgcactcattgaagtcatttattaccatatactacagctttgtggtaggccattattttcattttcatttttggctcttcagaaacttgaatacttaagcttgtacatgatcttgtgttttgctatcctttttactgtaaaatgtaaatattttaagggatattttgattctaaatatgataaaataatttctcacctattttgtgtgtgtgacttgaaattcagtagtaaaagaatttcttctttaaagctttaaaaaaaaaaa

SEQ ID NO: 90240 - DNA, 1650 bp, Homo sapiens
gcggcgcgccgccgcagacagctggtgtcccgccggagaacggccgagatatccccgccggcggaggagcagccccagcgccaggcctcccgacgtccccgggcagcagcccaaggccgcgaagtccccgtctccagttcagggcaagaagagtccgcgactcctatgcatagaaaaagtaacaactgataaagatcccaaggaagaaaaagaggaagaagacgattctgccctccctcaggaagtttccattgctgcatctagacctagccggggctggcgtagtagtaggacatctgtttctcgccatcgtgatacagagaacacccgaagctctcggtccaagaccggttcattgcagctcatttgcaagtcagaaccaaatacagaccaacttgattatgatgttggagaagagcatcagtctccaggtggcattagtagtgaagaggaagaggaggaggaagaagagatgttaatcagtgaagaggagataccattcaaagatgatccaagagatgagacctacaaaccccacttagaaagggaaaccccaaagccacggagaaaatcagggaaggtaaaagaagagaaggagaagaaggaaattaaagtggaagtagaggtggaggtgaaagaagaggagaatgaaattagagaggatgaggaacctccaaggaagagaggaagaagacgaaaagatgacaaaagtccacgtttacccaaaaggagaaaaaagcctccaatccagtatgtccgttgtgagatggaagaatgtggaactgtccttgcccatcctcgctatttgcagcaccacattaaataccagcatttgctgaagaagaaatatgtatgtccccatccctcctgtggacgactcttcaggcttcagaagcaacttctgcgacatgccaaacatcatacagatcaaagggattatatctgtgaatattgtgctcgggccttcaagagttcccacaatctggcagtgcaccggatgattcacactggcgagaagccattacaatgtgagatctgtggatttacttgtcgacaaaaggcatctcttaattggcacatgaagaaacatgatgcagactccttctaccagttttcttgcaatatctgtggcaaaaaatttgagaagaaggacagcgtagtggcacacaaggcaaaaagccaccctgaggtgctgattgcagaagctctgggctgcccacaatgcaggcgccctcatcaccagccacgaggatatcttgggcactaacccagagtccctgacgcagccttcagatggtcagggtcttcctcttcttcctgagcccttgggaaactcaacctctggagagtgcctactgttagaagctgaagggatgtcaaagtcatactgcagtgggacggaacgggtgagcctgatggctgatgggaagatctttgtgggaagcggcagcagtggaggcactgaagggctggttatgaactcagatatactcggtgctaccacagaggttctgattgaagattcagactctgccggaccttagtggacaggaagacttggggcatgggacagctcagactttgtatttaaaagttaaaaaggacaaaaaaaaaatctaaagcatttaaaatctagtgaaataactgaaa

SEQ ID NO: 90241 - DNA, 2563 bp, Homo sapiens
ctgatactttagaaactttattgaggacaaaagtgggcggctcccagtcccatgggcagaccgacaataaataagggctaaaaggaagaagtacggcagggcaggagtggttgtctcatcatggagagccctggggggcagcagaaccaactggaatgaaacacagggcatcctgccattcgagtaatgtagccacagggttggtgcagacccgggtggggcctgaagggaggggctcggctggtgtaaaaaggcacactcaatcgtccaagacgaagcctcgtggaagcagtggatggcggttaaaacacgatttgaaggccgctcccttcagggctaggggttccaagggggccagatttgctgaaggcctgcctggccttgctgggggtctcaaaagactggaatgaacagataggggggctggcacaaagcgggtgtttgggaagagaagatcaggctggtggttgctggagcccactgactgcagcaagggtggtagacttggctctagacttctatgttccagggtgcagggctctgatgcccccagctctacccctagggcagggccctgggggtccagactgcccctgggtgctgggctgaaggggcccgggttctgctggagggcagggctcaggtacctcaagctgttcctggcgagaggactccggtatctcaggctcaatcctacagtaggactctaggggcctgggttctgctggagggcagggctcaggtacctcaagctgttcctggcgagaggactccggtatctcaggctcactcctacagcaggactctaggggcctgggttctgctggagggtagggctctggtacttcaagctgttcctggagggagggctctggtatctcaggctcactcctacagaaggcctctgggggcccaggctctgccggagggcagggctgtggttccccgcactcctctggaagacagggctttggcagccctgagtgttttaacagtccaggaaggtgggaagtcccagagttatgctctgtggcattcagagttctagaaatctcagtcagcaggggctgaagttcaaccatatccagagaagagcctccattaagagggacacactggccccctaccagcccctctacttcctgtctcaacagctgttgcaggataccgatgcgttgaatcttcacctcctggaggctgggggttctgttagagtggggtccagaaggagtggccaccggtggtttcccagaaccctccagtgaccttatacaactctcctggtcaaacaaccggacggcaacctgctcccagggcagggcaggatcttcagagcaggactgaggggagacaccacgcagccactgggcctgctgaactctgggggttgatggcatgggtgtgaaccgggttttaggttgaacggtgagacgccgcaacactgaatatgaggtcagagttggagggcctggggagggtacacgctgagcccgtccaaagggtgatggacatggcaccacatggccaggcaagggctgggccacaggggcaggggagggcatcaggtgggagtcatggctgtccctggtatgtgacatttctcggttttctcttaatggtactcgctgggccagaccaagagaggccacacctccttcatctgagtgagtgacaacctcgcgttctcctttaggaagagagaaagcaggctggactggggtctccaggagcaatcctgaggcctggctcactgaagtccggctgctgccagctgtctcccttcttagctcctggaaactggggcgagtggaagggtgaaaggaaggtcctgaaggtgaaatcagagcctgtagcctctgggggcacaatgtccggcctcgaggtcctggtccctccagcctagagaagcaggaagccctggcagggtccagtcggtgggtgggggttctgggggccaaatatgcagaggcccgaacaccctggaccctctgggtggtgcctccctgacttcctcgaaccagtactcttttagccagactaggctggcgccccaggtgacagctcttcacaccctcacctgacaggatggtggccagggctgcagggtcagccacaaactctatggtccctggagcctctgtctgggcagggggcccaggccccacattttgacccctagggctaggcctgagctcttccaaggggttccgaggctgactgatccccaccaatctttgtgatgtctctgcctggtgcctggctttcggcctggggcctgctgaatcaacgagggggcgttgaatattgagcggtggtttctgcacccatctccttggatcttggttctcctggtccacggcgcacgatgtaacagtggggaaaggcgtgcgtttctgagagcgtaccggaatcttgctaggggtaggagatacaccccggaggaggggatccttcgtggcttgccgggtggtcatgatggcttaccgagagcccctcagggcctacccagcttcctccgcttttctcctgaccctctcgggtgctgctggagctactttcccag

SEQ ID NO: 90242 - DNA, 2325 bp, Homo sapiens
ggttcgaggggagaggctgttggggtttgcaaaacgggccaaatgggggaatgctcccatcgactccagtctgagctcaggcaagggctcaggcatctgagcgcagaggccagggtgaccccactggggcgacctgggtctgttatatggggatagggttcctggactgtggaattgtctttgaagccctcggcctcccccagcctcaaatgggtctgccttccaggagcagctgctgtgaataaacacagaagtggagctgggggactgattagaagcctcattcagtgcacctgggccccagcaggcccagccaggcgtggaggaagaggcattgaggactttccttacctgtttttccagctcacccactgccagcagaggatctgctccgtcacccaggctggagtgcagtggtgtgatcacagctcactgcagcctcaaactcctgggctcaaccagtcctctcacctcagcctcctgagtagccgggattacagaatgctgtccagtttcaacgagtggttttggcaggacaggttctggttaccacccaatgtcacgtggacagagctagaagaccgggatggccgtgtctacccccacccccaggacttgttggcagccctgcccctggcgctggtcctcctggccatgcgccttgcctttgagagattcattggcctgcccctgagccggtggctgggtgtgagggatcagaccaggaggcaagtgaagcccaacgccacgctggagaaacacttcctcacggaagggcacaggcccaaggagccccagctgtctctcctggccgcccagtgtggcctcacgctgcagcagacccagcgatggttccggagacgccggaaccaggatcgaccccagctgaccaagaagttctgtgaggccagctggaggtttctcttctacctgtcctccttcgtgggcggcctctcggtcctgtaccacgagtcatggctgtgggcaccagtaatgtgctgggacaggtacccaaaccagctaaccttgtcctgtcctgctgcagactctgaagccatccctgtactggtggtacctcttggagctgggtttctacctctcactgctaatcaggctgccctttgatgtcaagcgcaagggtgggggaccttccagcatcaagcctcgtccccactatgacccaccgtctactgcaggatttcaaggagcaggtgatacaccacttcgtggcggtcatcctgatgaccttctcctacagtgccaacctgctgcgcattggctctctggtgctgctgttacatgattcctctgactacctgctggaggcctgtaagatggtcaactacatgcagtatcagcaagtgtgcgacgctctcttcctcatcttctcctttgtcttcttctacacccgactggtcctctttcccacccagatcctctacaccacatactacgagtccatcagcaacaggggccccttcttcggctactacttcttcaacgggcttctgatgttgctgcagctgctgcacgtgttctggtcttgcctcattctgcgcatgctctatagcttcatgaagaagggccagatggagaaggacattcgtagtgatgtagaagaatcagactccagtgaggaggcggcggcggcccaggaacctctgcagctaaagaacgggacagctggagggcccaggccagcccccactgatggccctcggagccgggtggccgggcgtctgaccaacaggcacacaacagccacatagccgggcggggctggctgtaaggggttgcccccccgccagtgccttggatatttctggggtgactggactggcgcccctgggccacctttctggagacagggagggccccacccggggtgggtgggaaggctgatgatctgtctccagccccttccttctgcccacccacccttcttccctctgggcaactggacagatctgggagccagcagctggatgctgtggctggccagagacacctccaggctgtggcctgggggctggggggagccccaggctgaaaagggtccaattaaaacaaatggagccaaattttctgcctgagaacttgggtccctatcaaagttccttcttcatccccagagacccccgagggagccaggcctctgcttacataccccacctacgggatacccactgcacttcagcctgggcaacaagagcaagactccatctaaaggaaaaagaaaaagaaaaaaaaaattcccaaaaagaaatggccaataagcacatgaaaagatattcaacattgttagtcataaaaataatgcaaatc

SEQ ID NO: 90243 - DNA, 3994 bp, Homo sapiens; identical to SEQ ID NO: 60843

SEQ ID NO: 90244 - DNA, 4465 bp, Homo sapiens; identical to SEQ ID NO: 61341

SEQ ID NO: 90245 - DNA, 5229 bp, Homo sapiens
gcggctgcctagttgacgcacccattgagtcgctggcttctttgcagcgcttcagcgttttcccctggagggcgcctccatccttggaggcctagtgccgtcggagaagagagcgggagccgcggacagagacgcgtgcgcaattcggagccgactctgggtgcggactgtgggagctgactctgggtagccggctgcgcgtggctggggaggcgaggccggacgcacctctgtttgggggtcctcagagattaatgattcatcaagggatagttgtacttgtctcgtgggaatcacttcatcatgcgaaatctgaaattatttcggaccctggagttcagggatattcaaggtccagggaatcctcagtgcttctctctccgaactgaacaggggacggtgctcattggttcagaacatggcctgatagaagtagaccctgtctcaagagaagtgaaaaatgaagtttctttggtggcagaaggctttcttccagaggatggaagtggccgcattgttggtgttcaggacttgctggatcaggagtctgtgtgtgtggccacagcctctggagacgtcatactctgcagtctcagcacacaacagctggagtgtgttgggagtgtagccagtggtatctctgttatgagttggagtcctgaccaagagctggtgcttcttgccacaggtcaacagaccctgattatgatgacaaaagattttgagccaatcctggagcagcagatccatcaggatgattttggtgaaagcaagtttatcactgttggatggggtaggaaggagacacagttccatggatcagaaggcagacaagcagcttttcagatgcaaatgcatgagtctgctttgccctgggatgaccatagaccacaagttacctggcggggggatggacagttttttgctgtgagtgttgtttgcccagaaacaggggctcggaaggtcagagtgtggaaccgagagtttgctttgcagtcaaccagtgagcctgtggcaggactgggaccagccctggcttggaaaccctcaggcagtttgattgcatctacacaagataaacccaaccagcaggatattgtgttttttgagaaaaatggactccttcatggacactttacacttcccttccttaaagatgaggttaaggtaaatgacttgctctggaatgcagattcctctgtgcttgcagtctggctggaagaccttcagagagaagaaagctccattccgaaaacctgtgttcagctctggactgttggaaactatcactggtatctcaagcaaagtttatccttcagcacctgtgggaagagcaagattgtgtctctgatgtgggaccctgtgaccccataccggctgcatgttctctgtcagggctggcattacctcgcctatgattggcactggacgactgaccggagcgtgggagataattcaagtgacttgtccaatgtggctgtcattgatggaaacagggtgttggtgacagtcttccggcagactgtggttccgcctcccatgtgcacctaccaactgctgttcccacaccctgtgaatcaagtcacattcttagcacaccctcaaaagagtaatgaccttgctgttctagatgccagtaaccagatttctgtttataaatgtggtgattgtccaagtgctgaccctacagtgaaactgggagctgtgggtggaagtggatttaaagtttgccttagaactcctcatttggaaaagagatacaaaatccagtttgagaataatgaagatcaagatgtaaacccgctgaaactaggccttctcacttggattgaagaagacgtcttcctggctgtaagccacagtgagttcagcccccggtctgtcattcaccatttgactgcagcttcttctgagatggatgaagagcatggacagctcaatgtcagttcatctgcagcggtggatggggtcataatcagtctatgttgcaattccaagaccaagtcagtagtattacagctggctgatggccagatatttaagtacctttgggagtcaccttctctggctattaaaccatggaagaactctggtggatttcctgttcggtttccttatccatgcacccagaccgaattggccatgattggagaagaggaatgtgtccttggtctgactgacaggtgtcgctttttcatcaatgacattgaggttgcgtcaaatatcacgtcatttgcagtatatgatgagtttttattgttgacaacccattcccatacctgccagtgtttttgcctgagggatgcttcatttaaaacattacaggccggcctgagcagcaatcatgtgtcccatggggaagttctgcggaaagtggagaggggttcacggattgtcactgttgtgccccaggacacaaagcttgtattacagatgccaaggggaaacttagaagttgttcatcatcgagccctggttttagctcagattcggaagtggttggacaaacttatgtttaaagaggcatttgaatgcatgagaaagctgagaatcaatctcaatctgatttatgatcataaccctaaggtgtttcttggaaatgtggaaaccttcattaaacagatagattctgtgaatcatattaacttgttttttacagaattgaaagaagaagatgtcacgaagaccatgtaccctgcaccagttaccagcagtgtctacctgtccagggatcctgacgggaataaaatagaccttgtctgcgatgctatgagagcagtcatggagagcataaatcctcataaatactgcctatccatacttacatctcatgtaaagaagacaaccccagaactggaaattgtactgcaaaaagtacacgagcttcaaggaaatgctccctctgatcctgatgctgtgagtgctgaagaggccttgaaatatttgctgcatctggtagatgttaatgaattatatgatccattctcttggcacctatgactttgatttggtcctcatggtagctgagaagtcacagaaggatcccaaagaatatcttccatttcttaatacacttaagaaaatggaaactaattatcagcggtttactatagacaaatacttgaaacgatatgaaaaagccattggccacctcagcaaatgtggacctgagtacttcccagaatgcttaaacttgataaaagataaaaacttgtataacgaagctctgaagttatattcaccaagctcacaacagtaccaggatatcagcattgcttatggggagcacctgatgcaggagcacatgtatgagccagcggggctcatgtttgcccgttgcggtgcccacgagaaagctctctcagcctttctgacatgtggcaactggaagcaagccctctgtgtggcagcccagcttaactttaccaaagaccagctggtgggcctcggcagaactctggcaggaaagctggttgagcagaggaagcacattgatgcggccatggttttggaagagtgtgcccaggattatgaagaagctgtgctcttgctgttagaaggagctgcctgggaagaagctttgaggctggtatacaaatataacagactggatattatagaaaccaacgtaaagccttccattttagaagcccagaaaaattatatggcatttctggactctcagacagccacattcagtcgccacaagaaacgtttattggtagttcgagagctcaaggagcaagcccagcaggcaggtctggatgatgaggtaccccacgggcaagagtcagacctcttctctgaaactagcagtgtcgtgagtggcagtgagatgagtggcaaatactcccatagtaactccaggatatcagcgagatcatccaagaatcgccgaaaagcggagcggaagaagcacagcctcaaagaaggcagtccgctggaggacctggccctcctggaggcactgagtgaagtggtgcagaacactgaaaacctgaaagatgaagtataccatattttaaaggtactctttctctttgagtttgatgaacaaggaagggaattacagaaggcctttgaagatacgctgcagttgatggaaaggtcacttccagaaatttggactcttacttaccagcagaattcagctaccccggttctaggtcccaattctactgcaaatagtatcatggcatcttatcagcaacagaagacttcggttcctgttcttgatgctgagctttttataccaccaaagatcaacagaagaacccagtggaagctgagcctgctagactgagtgactgcagttaggagggatccgacagagaagaccatttccactcattcctgttgtcctaccaccccttgctctttgagggctggctattgagaactggaaagagtaaaatgataacttaccttagcattgccaagaacttcagcagacaacaagcaattctatttattttatgttgtgtatacatcttgatcattagcaagacattaagctttaaccattatggcaccattttgtgagaatgattgttctttcacttgggctgtttgagagcataattatggtaatcatgagattaatgtttcatgatttctacctccaaagtgtgaagacaagtaaaacaatgtttctaaattgtcttattttgttggcggagaagattacaatggctattagtgctacatttggtcaaatgtaatcacttaaatagcttcttgtcaccttaaactaaagcagaataaaaagtatcctttgaaattataagccctcctttgctgacagctattattttgtaacatcttaccaggtcatgtgctttcagttataactgggctgagcctcctataattacaatgtctatagggactgttttactgcctgtgtattttctgctagagagttagcaatgttagagctagaacagattagaatttctaaacagtatcatgcacagttggtgtgagtgatcagtgtgcattgtatggcatgcatggttgtgaattattctctgttctccaaatactgtttctttaactcagatatttttgttagtgtctaggccacttcatttatttttcgtcatggtactttactgacttctctttattcaattctccacgccctcaccaaaaaaaactgtctcaaaatgagaatattttattttcatggcgagtctagaaaacgcccacttcattctgattaaaaat

SEQ ID NO: 90246 - DNA, 3520 bp, Homo sapiens
  misc_feature (1)...(3520): n = a,t,c or g
tttcgtcgagccgatatttttgacgtgaggtttgttgaccccacagatacggaggactgactatgatttcttctcaatgtattgagacttatgacacatcttatgaaatcctgctcccaagtcacagataggctgacgggtcagagggcaagacgtgacccagggccgagccggggccatggcacctgcaaggtgtttctcagcaagattgaggaccgtgtttcagggcgtggggcattgggctttgtccacatgggctggcctgaagcccagccggctactgccacagcgggcttctcccaggctgctctcggtcggccgtgcggacctcgccaagcatcaggaactcccggggaagaagctgctctctgagaaaaagctgaaaaggtactttgtggactatcggagagtgcttgtctgtggaggaaacggaggcgctggggcaagctgcttccacagtgagccccgcaaggagtttggaggccctgatggaggggacggaggcaacggtggacacgtcattctgagagttgaccagcaagtcaagtccctgtcgtcggtcctgtcgcggtaccagggtttcagtggagaagatggagggagtaaaaactgcttcgggcgcagtggcgccgtcctctacatccgggtccccgtgggcacgctggtgaaggagggaggcagagttgtggccgacctgtcttgcgtgggagatgagtacattgccgcgctgggcggggcaggagggaaaggcaaccgcttcttcctggccaacaacaaccgtgcccctgtgacctgtacccctggacagccaggacagcagcgagttctccacctggagctcaagacggtggcccacgccggaatggtgggattccccaacgccgggaagtcctcactgctccgggccatttcaaacgccagacccgccgtggcttcctacccgttcaccaccctgaagccccacgtcgggatcgtccactacgaaggccacctacaaatagcagtggccgacatccccggcatcatacgaggcgcccaccagaacaggggtctggggtccgccttcctcaggcacatcgagcgctgccgctttctcttgttcgtggtggatctttctcagcctgagccgtggactcaagttgacgatttaaaatatgaactggagatgtatgaaaagggcctgtctgcgaggccccacgcaatcgtcgcaaacaagattgacctccctgaagcccaagccaatctgtcccagctccgggatcacttgggacaggaggtcatcgtgctgtcggcgttgaccggcgagaacctggagcagctgctgttgcacctgaaggtgctgtatgacgcctacgcggaggccgagctgggccagggccgccagccgctcaggtggtagccacgccagagcggggtcgcctctgggcctctgtctgagcaaacctgggtgtgaattcggtggttttgaatgcataaagtgccttgtggacacgggggagttgtggtgcttctgggtctctgggccccgcctgcttggcctgaaatgccctcatgttgggaagcattccgtgccccctaccccgcctgccctcccgtatttacttgcacctgtcagccctgcaccggacttgantgagccagtttgctcatttgtgctgattaacacccctaataaggggtttgggggttgcccataaacggggttggccctgccgctgactcgggtctccgccatgcacgcgtggactctcggatgagctcagcagaaccgcacagccagagccccaggtcagaagtgcagaccagggttctcagcacagtgcccgtcgtgcttccatggcttgctacggagagagacctctggatccacactggggctgcgtctggcccgttgtccagcagccctgcggtaccgcaagcccaggcaccagtgtctcggggggcctcactgctgcgcaaggggtggggccgaggatgcaagtccaggcagagcggcgcaggcagctgtgagcttttctccatcagccgtctgagaagagcagtgaggccagctgcttcctgtccttcagaacacttctctgtgctcagtgggagccaggaagcctcaggcttcacgactgaatgcacccaatatccgacctggctgcgtgtttctggctgggctgccgtgtgcacagcaagttaactagaggggctgtgggccatggaactgtcagcgttattctcagaaggcggccgtggcatgggcagggtatagtgaggagtggaaggagacgtgtgcctggtaatatggggcggaatttccactcagctccatttgctggggatttaaagagaacccttgtgctgcgccaggcagttaccgagccgaagggagatgatgggccttcgcccctcagtgggatggcagctgagggggccctgcatttgaccctcgagactgcagcagcgcctttcctgtctgtggtttaagtctttgcagtcaagtactgatgcatccaagccaggcctatgcctggtgtctccctgactgcagaggagccccagggcaaggacagctcagctgctggcagcctgcctggcccatagacatcccccaagtagtctcaggcctctgacatgtccctgaggggcccctaagaaagaaagtggaggggacactccagaggctgtcgtgggaggatcatgtgagcctgggaggtcaaggctgcagtgagccgtgattgcaccactgcactccagcctgagtgacagagcgagaccctgtctcaaaaaacaaacaaacaaacaaacaaaaacagaacattctgggcacggtggctcatgcctgtagtcccagcactttgggaggccgaggctggtggatcacaaggtcaggagattgagaccatcctggctaacacagtgaaaccccgtctctactaaaaatacaaaaaaattagccaggcgtggtggcggtcacctgtagtcccagctactcgggaggctgaagcaggagaatggcgtgaacctgggaggcggagcttgcagtgagccgagatcacaccactgcactccagcctgagcgacagagcaagactccatctcaaaaaaaaaaaataataataataatagctaaatactggaaacaaccaatattccatcaacaggagaatgaataaacaaattgtggtatagctatacaatccaatactatgcagcaataaaaattgaatcaatcactgatacacataacatgcaaggatgaagctcaaaaacattacactgaacaaaagaggccagacacaacagtatgtctgagtccatttacatgaaattctaggaaaggtagaatatcctacagtgtagagaacacaataataagaaaacaaacaacctgatttaaaaataggcaaaccaagagtagtagtgtgtgcctgtagtcccaactacttgggaggctgaggcgggaggatcccctaagcccaggagctcaagacctgcctgggcaacatagcaagactctgtctcaaaaaaaaaa

SEQ ID NO: 90247 - DNA, 2066 bp, Homo sapiens; identical to SEQ ID NO: 61249

SEQ ID NO: 90248 - DNA, 794 bp, Homo sapiens
tttcgagctggaagaatcaattaaagacattacccaatcatatgatttctgtaagaaatttactttaaatgtaacaatataggcatgttgaaagtaaaaggaaggagaaagatgtatcatgcaaacattaatccaaagaaagcaggtatggttatatttaatattagataaagtagacctcataacaaagcagttaccagagacagtgactaggcattatatgataaaagggttaatcaatccactaagaagacatagcagttttaaatgtgttagcagtagaactgcaaaatatatgaaaaaagactgatggaactaaaaagagaaatacacaagtccaaaattataattggagacgtcaacacctatttctcaataaatggtggagtaaccaagcaagaaaatcagcaaggatatagaaagatactcaacatatgtaatcaaccagtgctatgtaatttatagaatgcttcatcttttcaagtgaccagagaacatataccaaggaaagttatgtcctgggccataaaagtaaacctcatttgggcatggtggctcatgcctataatcctaaatgcttggggtggctaaggtgggaggattgcatgaagccacgagtttgagacgagcctgggcaatgtaacaagaattcatctccattgaaaaaaaaaaaaatatttacctgagcatgggcggcatatcccctgtatttgcccgggattaggaggggaaaggatgcctttggaccccccggaaattgggggcttgcagggaaacccttgtcatgccccttc

SEQ ID NO: 90249 - DNA, 8598 bp, Homo sapiens
gacacgcaggtttccgagacactaaagcgttttgcagggaaggtgacaacagccagtgtaaaggaacggagagaaatcctcagtgaacttgggaagtgtgttgctggaaaagatcttccagagggagcagtgaaggggctctgcaaattgttctgcttgactctgcatcgatatagagatgcagcctcccgcagggccttgcaggcagccatccagcagttggctgaggcccagccagaagccactgctaagaaccttctacactctctgcagtcttctggtataggctccaaagcaggtgttcccagtaagagcagtggctctgccgccttgctggccttgacctggacctgcctcctggtgcgcattgtctttccatcgagagccaagcgacaaggagacatctggaacaaactggtggaagtgcagtgcctgctcttgctggaggtgctgggtggctcccacaagcacgccgtggatggtgctgtgaagaaactcacgaagctgtggaaagagaaccccgggctggtggaacagtacttgtcagccattctcagcctagagcccaaccagaactatgctggcatgctggggctgctggtgcagttctgcacgagtcacaaggagatggacgtggtcagtcagcacaagagcgccctactggacttttacatgaagaacatcctgatgagcaaagtcaagcctccgaagtacctgttggatagctgtgcccctctgctccgatacctgtcccactcagaatttaaggatctgatactgcccaccatacagaagtccttactgaggagtccagagaatgttattgaaactatttctagtctgctggcatcagtgacgcttgacctcagccagtatgccatggacatcgtgaaaggactggctggtcacctgaaatccaacagtccccgcctgatggatgaagctgtgctggcactgcggaacctggcacgccagtgcagtgactcttcggccatggaatccctgaccaagcacctatttgctatcctcggaggctcggaaggaaaactaactgttgtagcccagaagatgagcgtcctctcagggattgggagcgtcagtcatcacgtggtgtctggaccttccagtcaggtcctgaatgggatcgtggctgagctgttcatcccgttccttcagcaggaagttcatgaagggaccttggtacacgctgtctcagtcctggctctctggtgtaaccgattcactatggaagtgcccaagaagctcactgaatggttcaaaaaagctttcagccttaaaacctccacatctgcggtgaggcatgcctacctgcagtgcatgttggcctcttaccggggtgacacgctgttgcaggccctggacttactgcccttgctcatccagacagtggagaaggcagcctcccaaagcactcaggttcccaccatcaccgaaggggttgccgcagccttgttgctcttaaagttgtcagtggctgactcacaggctgaggccaaactgagcagtttctggcagttgattgtggatgagaaaaagcaggttttcacttctgagaaattcctggtcatggcttcagaggatgccctgtgtactgtgttgcatcataacagagagacttttccttgaccacccgcatagactcactggcaacaaagttcagcagtaccaccgggctctggtggcggtgctcctgagccgcacctggcacgtccgcaggcaggctcagcagacagttcggaagctgctgtcctctcttgggggctttaagctggcgcacggactcttggaggagctgaagactgtcctcagttctcacaaggtgctgcccttagaggctttggtgactgatgctggagaggtgactgaggcaggcaaggcctacgtgcctccacgggtcctgcaggaggctctgtgtgtcatctccggtgtgccagggctcaagggtgatgtcaccgacactgaacaactggcccaggaaatgctgatcatctcccaccacccatccttagttgccgtgcagtctggactttggccagcacttcttgccaggatgaagatcgatcctgaagcctttatcaccaggcacctggatcagatcattcccaggatgaccacacagagtcccctaaaccagtcctccatgaatgccatgggctccctttccgtcctgtcgccggaccgggtcctcccacagctcatcagcaccatcactgcctccgtgcagaaccctgcactgcgcctggtgacgcgggaggagtttgccattatgcagacccctgctggggagctgtatgacaaatccatcattcagagtgcccagcaggacagcataaaaaaggccaacatgaagcgagagaacaaagcttattccttcaaagagcagatcatcgagctggagctgaaggaggagataaagaagaagaaaggcatcaaagaggaggtgcagctgaccagcaagcagaaggagatgctgcaggcccagctagacagggaggcgcaggtccggaggcggctgcaggagctggatggggagctggaggcggcgcttggactgctggacatcatcctggccaagaacccgtccggcctgacccagtacatccctgttttggtcgactcttttctgcccttgctgaagtctcccctggctgctcccaggatcaagaaccccttcttgtccttggctgcctgtgtcatgccctctaggctcaaggctttgggcactttggtgagccacgtgaccctgcgcctgctgaagccagagtgtgtcctggataagtcctggtgccaggaagagctgtcggtggctgtgaagagggcggtgatgctgctgcacacccacaccatcaccagcagggtgggcaagggggagccaggtgctgcgcccttgtccgcgccagccttctccttagtcttcccgtttctgaagatggtgctgacggagatgccccaccacagtgaggaggaggaggagtggatggcccagattcttcagatcctcactgtccaagcccagctgagggcctcccccaacaccccacccgggcgggtggacgagaatggcccggagttgctgcctcgcgtggccatgctgcgtcttctgacttgggtgatcgggacgggctcgcctcgcttacaggttctggcttcagacaccctgaccaccctgtgtgccagcagcagtggtgatgatggctgtgcctttgcagagcaggaggaggtggacgtgctgctctgtgccttgcagtccccgtgtgccagcgtgcgggaaaccgtgctccgggggctgatggaactccacatggtattgccagcacctgatactgatgagaagaatggcctgaaccttctgcggagactctgggtggtcaagtttgacaaggaggaggagatccggaagctggctgagaggctctggtcaatgatgggcctagacctgcagccagacctctgctccttgctgattgacgacgtgatctatcatgaggcggctgtaaggcaggcaggggccgaagccctctcccaagcagtggcacgttaccagcggcaggcggcggaggttatgggcaggctcatggagatttaccaggaaaagctctaccggccgcccccagtgctggatgctttgggacgagttatttcagaatctcctccagatcagtgggaagccaggtgtggcttggcgttggccctcaacaagctctcccagtatttggacagctctcaggtgaagccactctttcagttttttgtccctgatgccctcaatgaccgacacccagatgtccggaagtgcatgttggatgcagccctcgcaacgctcaacactcatgggaaggagaacgtcaactcgctgttgccagtattcgaggagttcctgaagaacgcgcccaatgatgccagctacgatgctgtgcgacagagtgtggtggtcctgatgggctctctggccaagcacctggacaagagtgaccccaaagtgaagcccattgttgccaagctcatcgctgccctctccaccccctcccagcaggtccaggagtccgtagccagctgcttgccacccctcgtgccagccatcaaggaggatgctggagggatgatccagaggcttatgcagcagctgctggagtcagacaagtacgcagagcgcaaaggggccgcgtatggcctggcgggcctggtgaagggcctgggcatcctctcgctgaagcaacaggagatgatggcggcactgactgatgccatccaagataagaagaacttccgccggcgagagggagccctctttgccttcgagatgctctgcaccatgctggggaaactttttgagccgtatgtggttcacgtgctgccccatctgctcctgtgctttggggatggaaaccagtatgtgcgtgaggctgcagatgactgtgccaaggctgtgatgagcaacttgagtgctcacggggtgaagctggtgctcccctccttactggctgccctggaggaggaatcgtggcggaccaaagctgggtcagtggagcttcttggggcaatggcgtactgtgctcctaagcagctgtcatcctgtctacccaacattgtgcccaagcttacggaggtgctgaccgactcccatgtcaaagtccagaaggctggacagcaggcgctcaggcagatcggctccgttatcaggaacccggagatcctggccattgctccagtcctcctggatgccctgacggatccctccaggaagacccagaagtgcttgcagaccctgctggacaccaagtttgtccacttcattgatgccccatccctggccctcatcatgcccattgtccagagagccttccaggaccgttccacggacacgcggaagatggcagcccagattattggcaacatgtactccctgacagaccagaaggacttggctccgtacctgcccagcgtgacgcctggcctgaaagcatcgcttttggaccctgtgcctgaggtgcggaccgtatctgcaaaggcccttggggccatggtgaagggcatgggggagtcgtgctttgaggacttgctgccgtggctgatggagacactgacctatgagcagagctctgtggatcgctcaggcgctgcacaggggttggctgaggtcatggccggtttgggggtggagaagttggagaagttgatgccagaaatcgtggctacagccagcaaagtggacattgcaccccatgtccgagatggctacattatgatgtttaactacctgcccatcacctttggagacaagtttactccttatgtggggcccatcatcccctgtatcctcaaagctcttgctgatgagaatgagtttgtgcgtgacaccgccctgcgcgcgggccagcgggttatctccatgtacgctgagacagccatcgccctgctgctgccccagctagagcaaggcctctttgatgacctttggagaatcaggttcagctctgttcagctccttggggatctcctgtttcacatctcaggagtcactgggaagatgaccacagaaactgcctctgaggatgataactttggaactgcccagtccaacaaggcgatcatcactgccctgggggtagagcggcggaaccgggtgttggcagggctgtacatgggccgctcagacacccagctggtggtgcggcaggcgtccctgcatgtctggaagattgttgtctccaataccccccgcaccttgcgtgagatcctacccactctctttgggctcctgctgggtttcctggccagcacgtgtgcagataagagaacgattgcagcgagaacattgggagatcttgtgcggaagttaggggagaaaatcctccccgagatcatccccatccttgaggaaggcctgaggtctcagaagagcgatgagaggcagggtgtgtgcattggcctaagtgagatcatgaagtccaccagccgggatgccgtgctgtatttctctgaatccctcgtgcccacggcaaggaaggctttgtgtgacccactggaggaggtcagagaggcggcagccaagactttcgagcagctgcattccaccatcggccaccaggctctggaggacattctcccatttttactaaagcagctggatgacgaggaggtgtcagagtttgccttggatggtctgaagcaagtcatggctattaagagtcgtgtggtgctgccctaccttgtgcccaagctgacaacgccacctgtcaacacccgggtgctggctttcctttcgtcagtggctggtgatgccctcacccgtcatcttggcgtgatcctcccagcggtcatgctggccctgaaggaaaagcttgggaccccagatgagcagctggagatggccaattgtcaggctgtgatcctctccgtagaggatgacacagggcaccggatcatcatcgaggatctgctggaggccacccgcagccctgaggtgggcatgaggcaagctgctgccatcatcctcaacatctactgttcccgctcaaaggctgactacaccagccacctgcggagcctggtctcgggcctgatccgcctcttcaatgactccagccctgtggttctggaggagagctgggatgccctaaatgccatcactaagaagctggatgctggcaaccagttggcactcattgaagagctgcacaaggaaatccggctcatagggaacgagagcaaaggcgagcatgtgccaggattctgcctcccgaagaagggagtgacctccatccttccagtgttgcgggaaggagtcctgactggcagccctgagcagaaggaggaggcagccaaagccttaggcttggtaatccgcctgacctcggctgacgccctgaggccctccgtggtcagcatcactggccctctgatccgcatcctgggggacaggttcagctggaatgtgaaggcggctctgctcgagacactcagcctcttgttggctaaggttgggattgccctgaagcccttcctgccccagctgcagaccactttcaccaaagccctgcaggactccaaccggggggtgcgcctgaaggccgcagatgctctggggaagctcatttccatccacattaaggtggaccccctcttcacagagctgctcaatggcatccgcgccatggaggacccaggtgtcagggacaccatgctgcaggccctgaggtttgtgattcagggagcaggggccaaagtggatgccgtcatccggaaaaacatcgtctcactcctgctgagcatgctgggacacgatgaggacaacactcgcatctcctcagccgggtgcctaggggaactgtgtgcctttttgactgaagaggagcttagtgccgttctacagcagtgcttgctggcggacgtgtccggcattgactggatggttcggcacgggcggagcctggcactttccgtggctgtgaatgtggctcctggcagactttgtgccggcagatatagcagtgatgttcaggaaatgatcctgagcagtgccacggcggacaggatccccattgcggtgagcggggtccggggcatgggctttctcatgagacaccacatcgagacaggcggagggcagttgccggccaaactttccagcctgttcgttaagtgtctgcagaacccatccagcgacatcaggctggtggctgagaagatgatctggtgggcaaataaggacccactgcctcccctggacccccaggccatcaagcccatcctgaaggctcttcttgacaacaccaaggataagaacaccgtggtcagggcctacagcgaccaggcaattgtcaacctcctcaagatgcggcagggtgaagaggtgtttcagtccctctccaagatcctggatgtggccagtttggaggtgctgaacgaggttaaccgaaggtccctgaagaagctggccagccaggccgactccacggagcaggtggacgacaccatcctgacatgagaggcctgggccagcagcagcattgccgctccacatctttgctcaatgttttcatttttgaaaatacatttgttccaatggggagcttggaagatggcgttcccagaaagtattttaatatcaatagaccacagccaaagccttaaatcaaacccacacacaactgaaaattgcctcctccatctctcaccttttcctgtggagaagagaaggaaaagcacacgcatgcgcctcagcaaatggcagcccaggagctgtttgtccagtttagcatggctaggtctggaactataatagcagggtcagactgtgggttcctcttctcctgtgcttgagctctggtttgagagctggcgctaccaacctttttcctatatcccgagtggggcacagacggtggatctctgcccagtgtggtgtgtctggcttggcttttcaatattgtgaggtctgaatggatctgacccctgtcagatgaaaatgattcacagctctggcagttcccaagtctggggaggggtataggtttgaaaggctgtttgaaagaggaatgtttaataaaggctttgatttaatcttgaaaaaaaaaa

SEQ ID NO: 90250 - DNA, 2209 bp, Homo sapiens; identical to SEQ ID NO: 60651
  misc_feature (1)...(2209): n = a,t,c or g

SEQ ID NO: 90251 - DNA, 2534 bp, Homo sapiens
actatagggcaaaagtgtgttttgttgttttgtgtttttttgagctcggtattatatatttttttctcattaaaggtttaaaaccaaaagcggtttctctttgcagcaaatatacattaaaatagagtctctgtacagccaagggctctgggccctggcttgccccatgtccctgcgcctccctggccaaacccaaaaataaatatagtgttattgctctgcagggcatagaggcagtgctctcctaccccctgaggaggctcgttgggagctgatggggaagccctggccaccccaggggtccaggggctggagtctgcttggagttattgcttcaaggggggacactaatgcccaatgcaaatgatgagaggaggagcgaagggggcatgggcctttgctctccaagtcccactctgctttgaagagggggtaggattaagcagcagcaaaagcatcacccactgggagactctggcctccatccccttccctccctgagataggtttctgcctcccacgcatcccgtgcagccccctatggcttccgcaaggccccctacactctgggggcacgttatggcttgcaaggggcagcactgtgcccagagcctggacacacgttcccagcttctgacaccccctaggagggggaggagagggcgtggggcctgttcccaggggctgatggcattgcccctggccctgccagcaggctgtggcactgcccagaccccagctccgccccagcccttggggctgaccccatgctaggcaggtcctgccagaacccccaccagtcccaccccttgcctcagtccatcatggcctcgagcatctccaagaacagcttgtgcatgggcaccttgccctccagcttcaccccatagaaatgggccagcactttgcccgctgtctggcggaggagcggtagcgtgagcagcagcctgcccgcccgccgccgctcagcaccccctccggggccagcccggccggcttcatactccagcagggcctcgtgcaggagcttctcgcagctgctccacagcctcggctcatcttcgatgtgcacagagtctgaattggcaagggccaaggcctttagtagaacatactcctctcgctccagccgcagggcctgcagccgccgcactagttgcagcagggcagctccccaattcccccagtccagctggccgtgccccctcttcatccaggactaagtactcagcgaaggccagctcatcctgcagcgtcagggagcgctgagccacacccagcaccagcacctccatccacacgctctgcagtactgacatctggtcagacagcgacagcgatgagaagcctgggatgctcttggcccagctgatggtgaccacaatctctcggtcaaagaggtcacagagggtagccacggctgggaggtgcccatcagggcctgcggggtcaggcatggcatagagcttctcaggctcaaccaccagcagatgagacaccagtgcattcactggggctgctgtcttccgggggcctccagcgactgccaggggcccagcagggaaggggcccgggaagggcagtgggtccacctccggccgccgcttgtacttctgccgcccaccccggacgcggtccaggcgcactccctccttgagcatgcccacccgcaggcacttggtgaagcggcaggcctggcaggccttgcgtctccgcttggtgatctcacactcgttggaggccggacagctgtactcgatgctcccctggatggtcctcttgaagaaggctttgcaggcctcacaggatgccacaccatagtggtagccggaggccacgtccccacagaccaggcagaggcgcttgggcagggagctgagcaccagcttcccaccgccctgctcgccaggcccagccccctccccatcctcctcttccttgtggcctgggaggcagcgagtgggagctggaccaggggccagggccacaggaggctcggtctctgtctccgaggaaccctttggactgtcagggctggccggctctgccttgatgtagagaggctcaatgcccaccacctggctggacatggcgctggtcacctggggctccggcagcgcggtcgggcaggcatgggggccgagcggcccggagtgccggagtgagccgggggccgcgggcggcccctcctccgccgttttctcgggccgagccgccccaccgcgccgcgtcccctcactcggcggcgcccgccggctgcttgtagcatacactctggttttcctcccaccgcaccaggcactttgtggtttctgagcatcttcccaagctcttccatccagactgccagggctgtccttggagctcatctccaatcccatggcaatcttccccagccgtggggctctcacgtttctacctctagcctggacttgctgtgagctccagacccatctctccagctgcctccttgacatcctgcatgtctagaaggcatctcggaccgaacacagcctacgtggactccacgtgtt

SEQ ID NO: 90252 - DNA, 7347 bp, Homo sapiens; identical to SEQ ID NO: 60835

SEQ ID NO: 90253 - DNA, 4929 bp, Homo sapiens; identical to SEQ ID NO: 60698

SEQ ID NO: 90254 - DNA, 4623 bp, Homo sapiens
  misc_feature (1)...(4623): n = a,t,c or g
ttttttttttttaaagaaacacacacacatttattttaaaatttgacataatccttgggtaattattagcatttttcagaagtttccgagactgatatctcaactccaaaccaatagcaatagcttatttgattggtggaaggattagagagggtcccatgatccagatgaatagatggctatcaaagaagacagaaccccatagacacaggcagcattaagtcataatttttaaattaactgtcacaaatatgaaacatctcaccagaccaatgataacgtccatatcataatttgcattttaccaaagtgtccacatagacagcacagaactaaaagttctgtagacttcagaatcatatttaaattaatttgatcctttatattaataataattaaaaactagattctacccagtgtcgtcccagtcttcacaccaacatgtatgtcctgctgtcggaatgccacctcctctgcactcagtgtcatgattcgaagattaaaatcagtgtgtcaaatcagaacataaaccaagccaggaattcatgggcccagagaggggtaaggggcttgtcctatacagcagttaagcagcccacgtgctccgcccattcccaagcagaatcagattggagctgcaggcagcgaggaggagggcgtgttctgtgttgtccactgctttgcatggtttcttgggtgttccaaggaggacagttgttgtctcccaataagacagttaattccctgaggacaggacctcttccacactagcctccgtcacagcagggtgcatgcagccgaggtgtgagcacagagcaggtccctactaaaggcaggaaggaaaccagcatgaactgagcacctactacgtgccaggtacagagccaggacaggtgctttcctgtaatcctcacaaaagcagtgagataggatcatcatccccactttacaggtgtggaaacaggctcaaggaagagcatttgcccagagtggcacagctagtcagtaggggagcatcaatttgaaaatccaggctttctcactccagggccctttctagctacataagctgagggtttggcagtaaatgaggagcccagctccgagatggttagtttggagcccaaacattagacccccttgagcacatggggccagccttgagagtgcagagccctgggtctaggaatcctggctctacagcatgacttggtgatcctgtgcaagtcttttaacctctccacaccagggctgcgctggtccagcaggattccctatcagggagaggggacttagtaaaaccatctggagagcatgtctgcaaactacagtgggccagcctctgcccagagagcctgaagttgctcacttgcaaggaagaggtgcagagcattgcaatctgctaccacacctctcacacctggtgagaatcagttctgatctccaaggttctgacctctgagagtgacgttaagtccagagagccacaccactacaccctgagagaccttcagcaaaaggcccgtgagctcaaagaaattggggtcaggatgcttttaaagcaaaaaatgctttaaaaaaaaaaaaacagatggtggttaggagaagatttgggggtaggtattgaaaaggaagaatgggactggtatgtaaacccagctgacaggacagggtcaggccaggcagagcctggaggaatcacgttttgtggctctggattgcctggtatctgtcgtgaggctgcacttgctacctcagacatgggtaggaggtttcctaaaaaaatatcttgagtctctaagttcaggtagatcttagaaaataaacatgggaagaaagaaaaacacaattcaaacggctcagatgtaatctgcttgccatgtttcttctcttcctctaagactcatctgaatgccccctgtgctataaagccttctctgatccacaaacacagttttaagtgcgtggccctcctgggtgcacagagagagcaagcccatctctctccaaatccccagtgcactgagcacactgaatcctacctgcctgttcagatgtctgcctctctcactgaaccgtagcaacttgaggatagacactgtatccttctctaccttccatctccacatggagagggaaagtgggctaaccaagaccctttaatcataagcacccagtctaaggaccagcccaaccagccagagtgataggaacacgttccaggggcatggacctcgggagcaacttttctctggaggcgcggagcatgtttccaatcccctgtaccacctacttgccccccagagccaccctgcattgggcacaattgtaatttaagagaatttctttaaaacgtgaaatcaatatttagatgcagacttcaaagcaatatagagcattggtttgtgagaatggcatcattctgctgggaaaaacaaagcccagctttggcagccctgatgggagagatagaccttgcatctaccaaggtggaaggcggggaggatgctgtctggaaagaatgctagatatgtgtgcatgtgtgtggcaggaggctctgggctcataaactgtctggctacagggaaggctggacctgatttcctgaccacaggctcttgaagcccccatggtcttgctgacagaggcccctagagtaaaaggagcaggctggaattgttcaggaaaatgttcttcccaggctggggtggccaagagaccattcatttaatgcctgatggagaagagtgaggagcctgtgcttagcagtgaatggtccggaagccaggcagtgtggcttttccaagcaggtagatgtcctcatctgtgccctggttgagatgcttcaccaaattcttctcatagagcagcgggtggtaggcacccatcgtgcaggcactatcgaagaacttctggtagtagtagcacacgtcagtcttgcgcttggatgggaggaactcataaatatccacctggtcacacagcgtcatcatgatgatgataccaagcatcccagaggatggggggtttggctgaatctcttctggggagatttcttgaagaatgtcccatagctcccaaggcatctggggcttgaggatgtaaaagggctgattggggtgcagcttacgataagtcttgtagttgttaaagaaattataatccggattctggtaccactttgggatatctgagtggtatacagatgggtcccatacaattaggattccttcattgtacaaactgtctttgaggaagcgcttctctgtggtaaccaactgagagttcatcaggcgaatggtagtttttgtgcccacatcttgttggaagttggctgtgggtgccccattaaacctcaggactgcgtcatgatcatcgatttctctgcctagttgggaggacttcagagatcccgctgacgacacaacagcacacctgccccaaggcccagccttggtcctaatgctctccttgggcagataaccctcccattcagaggtattgaagggaaaatctgtgacctctaccatggatacattcacatggtcccggaggtggcagcgcagggcctctgcactgaacttgatgcctggtcctggccccttgtaggacactttgtacttgttcatgcttaggtaattcttccagatcttttgcagcctagggataaggtttttggaagagctgtccttgttccacacctggaaggaggcctctggtttggccttggctaggcctctgagactgccgagggtctggcggcccctgtgggggtcctgggtgctgcttgaggatacagactgggaatcagaccccatggccaatttccccagactctttaacaccctggaattccttggtttgcaatttaaaggaatcatagtaactccctttcttcttttccttccacacacagatgactgcaaacagaagaaagaccaggacgcagcagctgaactttttcttcaggttggtgtgaatcataatgaagatgtgttcagggaagtcactttgttctgagcaggaaaacaagcctgcttctggctaatcccccaggggcggcaggcccttcaggtcctcaggaattagcactattatccatgggagggaaggtttattgggtctgcaggccaaggcccatttttctcaggatgatcaaaactcatctcagcacggggatggacacctggcaccagggcttgggacaggctcaagggggccagtccatttcagctgggctccatgacattcaccacttctccctggactgctggttgcagggctctgcgcaactggctctccccttgctcgctgcactctcggccgcggaggctgcggttgctcagcacgctcggtggcgaccgcccgctccgcgcccacgccggtcggtatcggctccctttgttaacgccgggcagtgccccaggcgtcttccccagcccggccctgcccaggactcccctcccccaagtgactccagaaaacgcgctcggcaagggcaggatcgcccgggagctgggaaccccactagggagtctcgaaagaggggtccgctggggaagaacgggggacagaagacacgaaatcgtcgacccggaaattccggagcggtnnngcaggcag

SEQ ID NO: 90255 - DNA, 2632 bp, Homo sapiens; identical to SEQ ID NO: 60582

SEQ ID NO: 90256 - DNA, 1956 bp, Homo sapiens; identical to SEQ ID NO: 60878

SEQ ID NO: 90257 - DNA, 627 bp, Homo sapiens
gtggcctgctgagaaatgagcggctcctccccatctcacccccagcacacgcagggactactacctgagtctgcaaaacacatagcatttttgtccgtggatggtacacaaagctcaatctttttgttttcttctggggaaaaaattaaatctttatatgttaatatgattgatattcattgtgcaaaaaaaatcagtgtgtttttaaagaagtataagggaaaaggaaaactcatatgtccttctgtcactctgagacatacactggtaacatctgtggcaagcccctttccaggattctggaatgtaccagtatatatgaatgccataccacagagaaatttaccattccaagagtgtacctataccttgttcttcctataacatcagaaataggtttttacctcagatgtcttcatgtcggtaattatagaactacataattatttttatagctgtattatgtagatttaacaggttcctcattgataaaacaatgtttttttggttgtttattcagtatctgaataacgtttctatggacatccgtaaacatgtatgaggggacttttaaaagttcatggaaaatggaattaaaagaaaaataaaaaaatataaactttaatt

SEQ ID NO: 90258 - DNA, 840 bp, Homo sapiens
tttttttttttgagtaactagtttggtttattctgcatcctgcatccccggatgaagcaaacttttgtctttttccatctggaactcttaaagtggtgagatcatcaaaaggattgactgaagcagcaagcagaaaagcaccttcattcacaagatgcaactggtgagtgctgcaggggccatgcaggtggctacagcttgcaaccatccagccaccgtgccagggtatcggagtactggcagtaccgggaccaggtgggccatgctcccatcccttcttttccttttacaatggtcttggcacatttaattgtcttctctaaattaggattcagtaaagcggaacatgacatatggcagcggttcctgccatggtcgccacaccagtcactgccacgcatctgaaagaggccaaagccagtgtagccctcacgtgtgttctcgtagatggccacttgggttgaacttgctctcgaagtaggccaggcacacccagttctcaaggctatagcgctcaaaataatccaggcctccatcgtggagtttcttagccactgtgcaacggcccaagatgtaagcaccacttggaaccaccaggtagccaaggagggagagaaccacggatgccttcatcttctccaggctcctggcaggtcagggcaacggtggccagatgagtgggtggagtcacagggacactggttctctgaagggaaagaagggcacagtccaccagcccttccaaaggctggcttttggtgcctttccaaggggaggggaagaacagccactgcagcagcttcgacgtgtgttgcagggaagttgctccacctacatttg

SEQ ID NO: 90259 - DNA, 789 bp, Homo sapiens
ttcccgggtcgacgatttcgtgagagcagattctaataggtaacacagaaggacaaacaattatgagaggtaaaatactactttaccagctaaagtatcagctggcaatcactctctatttttggttgttttttatgcaaaatgacattattcaggtatcaaaaaataatttatgacaccggagtgcatcagatgcgttcatttttttacaccatatgcagtagcgaacagcaagaaagcattacagatcatcactcacttgctgagatatgccaaaaatttaatattctacctgaacatgttgtgatcgagcaggtagatattaaagaggttgtttcagagcaacgtttactcagacaattgattcatcatgaaatgaaccggcaggacacgcttgtcattccagatctaagctgtcgtggcagaactgtgaaggacgtacagaatattttattgttctgccttcaaaaagaaatgtttatctacagctaccatccagcttcaaggatagagccttctgctgaaagttgcttgtcttttttgattgctcgtcaggatacgattgacattcacaatctgaaatcaactaaaagccgatatcgacatgttaagaaaaaattaggacgaaaggagggaagcaaataccgacgtgatatcacaatacttaagaaaggtggatttactcaggctgagattgcaaagaaattgagtatcagtttatcgactgtgaagcggcactggaataacggaatcatcggttaattccagaagctaattgcagagtaactt

SEQ ID NO: 90260 - DNA, 4300 bp, Homo sapiens
gaccgttttaaattcgcgggtcgacgatttcgtgtggaggccatggggcgcgtcgtcgcggagctcgtctcctcgctgctggggttgtggctgttgctgtgcagctgcggatgccccgagggcgccgagctgcgtgctccgccagataaaatcgcgattattggagccggaattggtggcacttcagcagcctattacctgcggcagaaatttgggaaagatgtgaagatagacctgtttgaaagagaagaggtcgggggccgcctggctaccatgatggtgcaggggcaagaatacgaggcaggaggttctgtcatccatcctttaaatctgcacatgaaacgttttgtcaaagacctgggtctctctgctgttcaggcctctggtggcctactggggatatataatggagagactctggtatttgaggagagcaactggttcataattaacgtgattaaattagtttggcgctatggatttcaatccctccgtatgcacatgtgggtagaggacgtgttagacaagttcatgaggatctaccgctaccagtctcatgactatgccttcagtagtgtcgaaaaattacttcatgctctaggaggagatgacttccttggaatgcttaatcgaacacttcttgaaaccttgcaaaaggccggcttttctgagaagttcctcaatgaaatgattgctcctgttatgagggtcaattatggccaaagcacggacatcaatgcctttgtgggggcggtgtcactgtcctgttctgattctggcctttgggcagtagaaggtggcaataaacttgtttgctcagggcttctgcaggcatccaaaagcaatcttatatctggctcagtaatgtacatcgaggagaaaacaaagaccaagtacacaggaaatccaacaaagatgtatgaagtggtctaccaaattggaactgagactcgttcagacttctatgacatcgtcttggtggccactccgttgaatcgaaaaatgtcgaatattacttttctcaactttgatcctccaattgaggaattccatcaatattatcaacatatagtgacaactttagttaagggggaattgaatacatctatctttagctctagacccatagataaatttggccttaatacagttttaaccactgataattcagatttgttcattaacagtattgggattgtgccctctgtgagagaaaaggaagatcctgagccatcaacagatggaacatatgtttggaagatcttttcccaagaaactcttactaaagcacaaattttaaagctctttctgtcctatgattatgctgtgaagaagccatggcttgcatatcctcactataagcccccggagaaatgcccctctatcattctccatgatcgactttattacctcaatggcatagagtgtgcagcaagtgcccatggagatgagtgccattgcagccccacaacgctgcactccttgcctatcaccgctggaacgggcacacagacatgattgatcaggatggcttatatgagaaacttaaaactgaactatgaagtgacacactcctttttcccctcctagttccaaatgactatcagtggcaaaaaagaacaaaatctgagcagagatgattttgaaccagatattttgccattatcattgtttaataaaagtaatccctgctggtcataggaaaacacacggttctaattaagtgtgaaggtatagctattgcacttatgccatctccaaaatttcttaagtattctttcactatccattaggagtttttcttaaacttgtctgataataagaatcacctggagttaggaggtggtggttgcagtgagccaatctcaccattgcacttcagcctgagcaacacgagcaaaactccgtctcaaaagtaaataaaaataatcacctggagtttgttaaaccatatggattctcaagctcctctcttgaagattctgattcagtaggtctgggagtggcgccctggattttgatcaaaattgtagagcattttaaggtgagtacctgagggagaacttaaagacatcttagttggggagtagtccttttgaattttacagctagatataatcttcagtcagataaaatttatgggagctggtgtcttatgcctgactcttagtaatttcataccggtttgaagtacgtgtgcccatgcctaaagccttgactttcagaatgttgtcttttgattcttctgtcttgatttgattaggggtgaaatttagaagtcttagtaatgtaacttgaagatgttaaacaaaaatctcaagtaaaatgaaaagcaaatatgggctactgaattaagaaactggcattctagtattaaatcctcacttcaggagcttttaaaaatactgagacccccccataaccagagattcagattcaaagactgaggataggaccttagcattgtagctatttaaagtttctaatgtgcacccagggttgggaatcaccaatgtgggtgtgaaaatgcctacaaagggttttagtgccttagaagtcctaagaagcccaatctgtatcaaagcagatccattttgcaaggatctttcttttagaactttctcagttctcttagtaagaactttagaagtaatcttgataataagcacagacagcctaacagcagaggcaacttaaataactcctgagcagttggcactagaacagaatacttggaatgacaccaaagttaaccaagtccagcatatgtccaaagagttaagtgtttcatttactgtagcattctgggtgagaaattggttgctgaaatcttaagacaagtggtctcaacccttggctgcacattggaatcacctgtagggttttaaagcatccaaatggtaattaacaggcagcaaaacttcagaactagttctgcatctactgtgcaaagatcatgattaactgtcaagacactggtagaacagaacaagcaaaagattaagagttcaaaagtaaatgcaaccaatttaacatgtagtgttattaaaaaattacaaaggcctaggaccagcctggggcaacatgggtgaaacccccatctctacaaaaaatttttaaaaaagttggccaggcatggtaatgcgcgcctgtggtcccagctgctcgggaggctgaggtgggaggatcacttgagcctatgaagatcaaggcagcagtgaaacatgatcatgccactgtactccagcctgggcaacagagaccatcttaaaaaaaaaaaatccttccattgaatagaaacttcaaagtccttcatcagatcatggcattagctactttagcaaaatagtgtaaactttggttctgagtaaaaatgacttcttccctaccacagttgtgaatgttaatatgctgataaaactgccaagatatatttgataggtaggggattaaactcatggtttgtcaaaagagtgtttttttctagttttattcttaacagatatgttgaggtattcatatttgtttccttttgtggttttaatgaagacaatttgtaaagtaatactgttatgtatatgctaaatgttggtaaatactaattaatttccatcatttgtagacttgttttgcaatgggatatatttttacttataataccaatttaggctgggcgcagtggctcacgcctgtaatcccagcactttgggaggccaaggcaaacggatcacgaggtcaggagatcaagaccatcctggccaacatggtgaaaccccatctctactgaattacacaaaaattggctggacatggtggcgcatgtctgtaatcccagctactgtaatctcagctacttgggaggctgaggcaggagaattgcctcaaccgggaggcggaggttgcagtgagccaagattcgcaccactgcactccagccttggcaacagagcgagactctgtctcagaaaaaaaaaaacaaaaaccagtttaggctgggtatggtggctcaccagcacttatgggaggctgaggcaggtggatctcttggaggtcgggagtttgagaccagcctggccaacatggtgaaaccctgtctttactaaaaatacaaaaattagccaggcatggtggcgtgtgccagtaatcccagctacttgggaggctgaggcgcgagaatcgcttgaaccctggagatggaggttgcagtgagcagagattcgcaccattgcactccagcctgggcaagagtgagactgtgtctcaaaaggaaaaaaaaataaaagtcgacgcggccggcaat

SEQ ID NO: 90261 - DNA, 1659 bp, Homo sapiens
tttcgtaaggagattccgggccagggtcgcggcggcagtcggcaagcgttcgattctctggcgttggatcgcgagcggtgtctgcttgtcccgccgagggctcccaggacagggcagggatctagggggtttgcgcacctgctttttaatgccccgcccccccttttttttttaaaggggagggggtgaaagtgagggaggaaaatggacagaatactgactggaacgttaattcgagcatttcatatgcgaaaagcggaataacagttccgtattcttctttcagtttctccattagattagcttcattttcgaatgctccgttttgcatgcttaattttgaaactagcccgtggtttggcagaatttgactgaattcaggggtgagagtttgatccagtccaagtgtatttgaatttgagcacgcagttcaaccagtgtttacaatggaatttctgaagacttgtgtacttagaagaaatgcatgcactgcggtttgcttctggagaagcaaagttgtccaaaagccttcagttagaaggattagtactacctctcctaggagcactgtcatgcctgcttgggtgatagataaatatgggaagaatgaagtgcttcgattcactcagaacatgatgatgcctatcatacactatccaaatgaagtcattgtcaaagttcacgctgccagtgtaaatcctatagacgttaatatgagaagtggttatggagctacagctttaaatatgaagcgtgatcctttacacgtgaaaatcaaaggagaagaatttcctctgactctgggtcgggatgtctctggcgtggtgatggaatgtgggcttgatgtgaaatacttcaagcctggagatgaggtctgggctgcagttcctccttggaaacaaggcactctttcagagtttgttgtagtcagtgggaatgaggtctctcacaaacccaaatcactcactcatactcaagctgcctctttgccatatgtggctctcacagcctggtctgctataaacaaagttggtggcctgaatgacaagaattgcacaggaaaacgtgttctaatcttaggcgcttcaggcggagttggtacttttgctatacaggtaatgaaagcatgggatgctcatgtgacagcagtttgctcccaagatgccagtgaacttgtaaggaagcttggtgcagacgatgtaattgattacaaatctggaagtgtggaagagcagttgaaatccttaaaaccatttgattttatccttgataatgttggcggatccactgaaacatgggctccagattttctcaagaaatggtcaggagccacctatgtgactttggtgactcctttcctcctgaacatggaccgattgggcatagcagatggcatgttgcagacaggagtcactgtaggttcaaaggcattaaagcatttctggaaaggagtccattatcgctgggcatttttcatggccagtggcccatgtttagatgacattgcagaactggtggatgcgggaaagatccggccagttcattgaacaaacctttcctttttctaaagttccagaagccttcctgaaggtggaaagaggacacgcacgaggaaagactgtaattaatgttgtttaaataaaaatgcagtttagtgat

SEQ ID NO: 90262 - DNA, 1837 bp, Homo sapiens
ttttttttttacaaagacatttattttccccaaaatatacccccagtttacaaaatccctccgagtcccacatttaaattagaagtcctcacatcttccattcctggggcagggagagatgacatccggaaggcatcagaacgtctgaagtctcactctaccagaggccaggagctggccagaggcaagccaggaaaagactgccccagccccagaatagcaccatggtgggggtggggggcagtcccctcggtgtccccaaagcattcctggccctgccctgccccaggctctgccttttctgctgctatgaaaggtccagagggccttggtgcctgcccacctgcccacacctggacagacattttggacaccaccagattctctagccgtggcgaggggctatgtccctctctccaggtttccgccccaaccccatgctctgggtaagaattatgggtgggatgggggtgaggtatccaggaagccttgagccacagaggaggtgtggagcagggagccaggcaggagccccctgcaaaccgcagggtgcagtgtagttagttgtctgtctcccagctggatggggagtccttgagggaggaactttatcttcccacgcagggcccccagcacctaacacagtgctgacatctgtagttgctcaataaacatcaactgaatggatacatgaaaagaaaggaacaaagaggtgagaaggcagagggacagaagctgacccccaggggccccatcacagacccctggagaaccagtgtgaccagcacatgcttccgtggggaggatgggcaggggagaggggcactgcagaggaggctgggccaggggggaaccacacgtgttccagcacgtgcacctgcaggtctccatgcacagctgtgcatgtggtgggcgcagagtgccctgtcttcacttggggcagggagggaaaaggccagtattaaggctagagcaagaggaggaaggaggggaaaggaaacagcttctagactccaggagatgttgaggccgcactgtccctgtctgagaagaaaagattctatgcaggtggaagcagggctgaacatgatcactagtgtatcacggccattggagaaacaaggccggggtgactatgcatcgtgtctttggtgaaataaggcagggggtcagtcagtctgaatattgcatcttttggagaaaaaaggcagccagatggtccacgcagcactggaagaagagggtggtgatgtggtcagtgtactgtgtccctaagaaatgtatgtactgtgaaataaggcagcaggcaggatgacttagagaactaaggttgtgggtggtctgttcattgtgtctataagaaaaaaggcagcaggatgacttgggaatcatgtccattggagaaataaggctgcacagtggtctgtgtatcgcatcctttggagaaggagcccacctgtcagagcaggatgcatctgttgggggcagggctcacagtgcagccccattgcagccagagggtaggagctgtagggaggggtagcagctccctggtcctcatggtcaggctatttcttgtccatcatcttctttgctggtcagagtgtttcacgaggctgcagggctgtcttggagccttctccctccccatcctggtcctcagctcctgcattctcctcctcacagctctgtttgatctttctccagcacacgaaagccagggccaccagcagtgcaatgagacagacagacagccccacggtcacccacagggcctctggggggaatgtcataggctgccctgtgatggtgacagagccgtgcgcatcctgctgca

SEQ ID NO: 90263 - DNA, 2548 bp, Homo sapiens; identical to SEQ ID NO: 61051

SEQ ID NO: 90264 - DNA, 3327 bp, Homo sapiens
  misc_feature (1)...(3327): n = a,t,c or g
gtcctgccgcttggccgcggggcgcctggctcagtggcttctgcgggcttcgaggagcgggatgttgcgggctgggtggctccggggcgcggcggcgctggcgctgctgctggcggcccgagtggtggcggcgttcgagcccatcaccgtgggcctagccatcggggccgcgtcggccatcaccggctacctgtcctacaatgacatctactgccgcttcgccgagtgctgccgcgaggagcggccgctcaacgcttcggctctcaagctggatttggaggagaagctgtttggacagcatctagccacggaagtgattgttcaaggcgctgactggcttcaggaacaacaaaaatcccaagaaaccactgaccctttccttacacggctgggctggcacaggcaagaattttgtcagtcaaatgggggctgaaaatcttcacccaaaaggtctgaagagtaactttgtccacctgtttgtatcgactctgcacttccctcatgagcagaagataaaactgtaccaggaccagttacagaagtggatccgcggtaatgtgagtgcatgtgcgaactctgttttcatatttgacgagatggataaattggcaccccgggatcattgaaagcaatcaagccgtttctagactactacgagcacgttgaacgagtgtcttaccggcaaagccatcttcatctttctcagcaatgcaggcggggaccttataactaagacggctcttgacttttggcgggccggaagaaagagggaagacattcagctgaaggacctggaacctgtactgtctgtcggagtcttcaataataaacacagtggcctgtggcacagtggactgatcgacaaaaacctcattgattactttatccccttcctgcctttggagtacagacatgtgaaaatgtgtgtgagggccgagatgagggcccgtggttctgccatagatgaagacattgtcacaagagtggcagaggaaatgacgttttttccccagagacgagaaaatctactcagacaagggctgcaagactgtgcagtcgcggctggatttccactgagctcctatccagatggggtaggagacagctgggaggctctgcacgccagaggccttgcctttcagaagaaccctgaagaccgctttggggttttgcctgtttgcaccttagacttttgggtatagaatcttttttttgagaagaggtctcactccgtcatccaagctggagtgcagtggtgcaatcctcaactcactgcaacctcccgctcccggtttgagtgattcaccattgcctcagcctcccgagtagctgggattacaggcatgagccactgtgcccagctgggatatagaatctaagagttgattgtggaaaacacgtgaatctattgcgcgcatttgtcatttagcaagatggcagcagtccagctgttctttgcagctggagatgaacttttaaaaatccccttcacacttaatgtactgaccgagacagaagtacctgaaaacagctgtgcatggcaggcccggcaatagcttctgacccacagcacccgcgcctcagaagctacggtcacaactaaaggagtccagggacttgctgcaggctggggggcactgggtggttctcaccagcaggctgcggggcactgtgttctcattggccaaaaacatccttttgctctgtctcgttctttacacagagttcactgacttgaagtatactcagttaaaatcggggctggaggtgcagacggtgtctgaccggaggatgtggccgtgcccgccgagcactcttgatctgagctgacctgtgtgtgtgtgtgggggggggtggggccttcacctaagacctctgcagcagacctggacagacaggcccctcccgcctgtccatcgctctagctgctaatacagccctggctgtggaatccttcaccgtctcagctggtatcagccccagcctgccttgtgccatatctcagcttggatctctgctagagtccccccaaccatatatcatagagttgaatcacaatgagaccgttggctttgaatttgagtcgttggttcccatggtgagatgcttgttaagactttatacttgggtcaatctctcactttattttgtagaaccatttgaaatcctaggatgtgcttgttctggaaggatgacatgggcccagactgaacaagtcagcttgatgatcttaaatgatggaagtataggacgttgcttattttaaaacaagggaaggacacaaaatggaatgactgcttagtcctttctcagatactcttaaaacaattttttattgttaaatttgtggtaatacatggtcacaaccgtggatcaaacaaggtcagtctaaagtggcaggtcctaggtgtgacctgataccaccaccctttgtggcagcaccgggctggactgccctgatccctgggacgtgagacttagcttccagccagtgtgaatcattgtatctgtctcataatcacagcacagctgcagacacaacaacgtgcagcattttttacataaaaatatggtagaattaatttatgacatggaaatgccttacgtggtatcacacttagtcttgaaaaaaacaccaaggtgacgtttaaaatttttagtacatatcctcaaattggagctaagttatacttcttttataaccttttgggcatctggtcgagagaagacaagattttctctatttacagtgatgcaataaatatgtttgccacctttggactgccgttactgatttgtaacttgaaaaggctatggttgatcatgaccccgcctcccccacctcccttataagatgtggacgagagctttattgacctactgactataaaatagtaaattctagattttatcatgtgaaatgccacttgctaactttttctagtttatttggttccaaagttcagaatgaatttcagcagcacagctgtgagactcaccatatccgggacaggcgggtgggcagtcagcgcgatacagaagcaatatttaccttaaaggctcttccccagacaaatagaagttaaattagctgatggatatttcatcaaagagatggactttctcccaaaattaacgtgggaggaaattgaggtactggtaaagtaaaactcacctctgacagcctgaacctgagctcaggtgaggaaacctaaccattgaaactggtaaatannnnnnnnnnnnnnnnnnnnnnnnnnnnnnnnnnnnnnnnnnnnnnnnnnnnnnnnnnnnnnnnnnnnnncccggctcgagcggccggaattc

SEQ ID NO: 90265 - DNA, 2966 bp, Homo sapiens
  misc_feature (1)...(2966): n = a,t,c or g
tactcggggcgggtgctgcttgctgcaggctctggggagtcgccatgcctacaacacagcagtcccctcaggatgagcaggaaaagctcttggatgaagccatacaggctgtgaaggtccagtcattccaaatgaagagatgcctggacaaaaacaagcttatggatgctctaaaacatgcttctaatatgcttggtgaactccggacttctatgttatcaccaaagagttactatgaactttatatggccatttctgatgaactgcactacttggaggtctacctgacagatgagtttgctaaaggaaggaaagtggcagatctctacgaacttgtacagtatgctggaaacattatcccaaggctttaccttttgatcacagttggagttgtatatgtcaagtcatttcctcagtccaggaaggatattttgaaagatttggtagaaatgtgccgtggtgtgcaacatcccttgaggggtctgtttcttcgaaattaccttcttcagtgtaccagaaatatcttacctgatgaaggagagccaacagatgaagaaacaactggtgacatcagtgattccatggattttgtactgctcaactttgcagaaatgaacaagctctgggtgcgaatgcagcatcagggacatagccgagatagagaaaaaagagaacgagaaagacaagaactgagaattttagtgggaacaaatttggtgcgcctcagtcagttggaaggtgtaaatgtggaacgttacaaacagattgttttgactggcatattggagcaagttgtaaactgtagggatgctttggctcaagaatatctcatggagtgtattattcaggttttccctgatgaatttcacctccagactttgaatccttttcttcgggcctgtgctgagttacaccagaatgtaaatgtgaagaacataatcattgctttaattgatagattagctttatttgctcaccgtgaagatggacctggaatcccagcggatattaaactttttgatatattttcacagcaggtggctacagtgatacagtctagacaagacatgccttcagaggatgttgtatctttacaagtctctctgattaatcttgccatgaaatgttaccctgatcgtgtggactatgttgataaagttctagaaacaacagtggagatattcaataagctcaaccttgaacatattgctaccagtagtgcagtttcaaaggaactcaccagacttttgaaaataccagttgacacttacaacaatattttaacagtcttgaaattaaaacattttcacccactctttgagtactttgactacgagtccagaaagagcatgagttgttatgtgcttagtaatgttctggattataacacagaaattgtctctcaagaccaggtggattccataatgaatttggtatccacgttgattcaagatcagccagatcaacctgtagaagaccctgatccagaagattttgctgatgagcagagccttgtgggccgcttcattcatctgctgcgctctgaggaccctgaccagcagtacttgattttgaacacagcacgaaaacattttggagctggtggaaatcagcggattcgcttcacactgccacctttggtatttgcagcttaccagctggcttttcgatataaagagaattctaaagtggatgacaaatgggaaaagaaatgccagaagattttttcatttgcccaccagactatcagtgctttgatcaaagcagagctggcagaattgcccttaagactttttcttcaaggagcactagctgctggggaaattggttttgaaaatcatgagacagtcgcatatgaattcatgtcccaggcattttctctgtatgaagatgaaatcagcgattccaaagcacagctagctgccatcaccttgatcattggcacttttgaaaggatgaagtgcttcagtgaagagaatcatgaacctctgaggactcagtgtgcccttgctgcatccaaacttctaaagaaacctgatcagggccgagctgtgagcacctgtgcacatctcttctggtctggcagaaacacggacaaaaatggggaggagcttcacggaggcaagagggtaatggagtgcctaaaaaaagctctaaaaatagcaaatcagtgcatggacccctctctacaagtgcagctttttatagaaattctgaacagatatatctatttttatgaaaaggaaaatgatgcggtaacaattcaggttttaaaccagcttatccaaaagattcgagaagacctcccgaatcttgaatccagtgaagaaacagagcagattaacaaacattttcataacacactggagcatttgcgcttgcggcgggaatcaccagaatccgaggggccaatttatgaaggtctcatcctttaaaaaggaaatagctcaccatactcctttccatgtacatccagtgagggttttattacgctaggtttcccttccatagattgtgcctttcagaaatgctgaggtaggtttcccatttcttacctgtgatgtgttttacccagcacctccggacactcaccttcaggaccttaataaaattattcacttggtaagtgttcaagtctttctgatcaccccaagtagcatgactgatctgcaatttaaaattcctgtgatctgtnnnnnnnnnnnnttatataaataaaccaacccccccacccctttttttgggttacaaagaaacctcccttttttttggtgggggggtgggctcattgggggagggggattttttttctttcggggggagaacaaccccaaaagcgttggttttttgttttttaccccggttggaaattatttaaaaaaaagggaaaccggttgggaaaatccttttgggcctttcccctaaatggcaaaaaagggccttgggaaaaatttcccttaaaccta

SEQ ID NO: 90266 - DNA, 1886 bp, Homo sapiens
tcgtcgcctttgcctgccccgccgcctcccctggctgtgtggagagaagcagggacgtggccatcgcctgccatgggcatcgtctgctcctgaggctgctccaggtgccttctggaactgtcccagtgcgaatcccacccatgagggcccggccccaccggctggcgcccaagacccacttcccctgagagccactcccaggccatgttctggggaaggggaaggacctgccgtccctctgcctgtgcccacacatggcccactgtgccgcagcggacgtcaccacccgcttcgatgaggtgttctggtttggagacttcaacttccgcctgagtggcgggcgcacagtcgtggacgccctcctgtgccagggcctggtggtggacgtgccggcgctgctgcagcacgaccagctcatccgggagatgcggaaagggtccatcttcaagggcttccaggagccggacatccacttcctcccatcatacaagtttgacatcgggaaggacacgtacgacagcacctccaagcagaggacgccctcatacacggaccgcgtcttgtacagaagccgccacaagggtgacatctgtcctgtgagctactcttcctgccccgggatcaagacgtccgaccaccgccctgtgtatggcctcttccgggtgaaagtgaggccggggcgagacaacattccgttggcagctggcaaatttgatagagaactgtacttactaggaattaaaagacggatttcgaaggagattcagaggcagcaagcactacagagtcagaactccagcaccatctgctccgtttcttgaagtttgctgaacgaggactcacagctgcaacgtggggtgattgtattgatcaaaacccactgggaaggacaaagagtttgccgcctttcggggatccgagggactgtggcgaccgtgcctctgtgccagcgtcccaggaaggaagccaaccctgagcgagcctgtcctctgtggcaggtccacacggtgtgggtgggcagggcttggacccccgtctccatggcaggtccatacagcatgggtggcagggtttggacccgcccagcagcaccacggaccccagccactctcgggggcagacgtcagaatccgttcctgagcagctcccgtgccctgggggcagtcacagagccccccaacacccccgtgctctgcaccagcctctccctccacacccgaagcaggcgtccatctgtgtcctcctggcagcccctcaaacacacaccaccccatgtcacacgggtatccagagcaaggctggatctgggctaggtgacccctggggcctcagacctctgagtgggccccagagcccagctgaggaagccacacagcctccaggacgtggcacggttcccctccacttggctgcaagtcgcctgccatggggcgaggaggcctgcaccccagtataagggcctccccagctgagtaagaagctgcttcccctcctctcataggccaagcctattgtgtgaaaccgtctcatggtcttggtgacgtagaccatttttgaaaccgtctcatggtcttggtgacgtagaccgtttgcttctttaactccagccgcggaatgacattagtggaaccgggctggggaactgctggaagttcaggatgccaccaccttgaacacctaggccagggatccccaccatgtcccgggtttctttcttcgagagtatagaaccgttcattcttgctttgtgtcccattccatctcttgaaaaaatgtagtctttgaatgtgtgaaaatctagggacattcaatctagtcttttaaattatttttccatatttatatttttaaataaatgcatatattgagtcttaaaaaaaaaaaaa

SEQ ID NO: 90267 - DNA, 4113 bp, Homo sapiens
aatgaagccttgaggacgtcgcaccggactggaattcctgggtcgacgatttcgtggcagcggggaccagggctggcaggttaagcctctgggggtggatcctgaaaggtggtccagccgcctggccctgcgtgggaccctccacctggcagcaggtacccaaacaagggctggacagcagggtctcgctctgtcacacaggctggagtgcagtggtgtgatcttggctcatcgtaacctccacctcccgggttcaagtgattctcatgcctcagcctcccgagtagctgggattacaggtggtgacttccaagagtgactccgtcggaggaaaatgactccccagtcgctgctgcagacgacactgttcctgctgagtctgctcttcctggtccaaggtgcccacggcaggggccacagggaagactttcgcttctgcagccagcggaaccagacacacaggagcagcctccactacaaacccacaccagacctgcgcatctccatcgagaactccgaagaggccctcacagtccatgcccctttccctgcagcccaccctgcttcccgatccttccctgaccccaggggcctctaccacttctgcctctactggaaccgacatgctgggagattacatcttctctatggcaagcgtgacttcttgctgagtgacaaagcctctagcctcctctgcttccagcaccaggaggagagcctggctcagggccccccgctgttagccacttctgtcacctcctggtggagccctcagaacatcagcctgcccagtgccgccagcttcaccttctccttccacagtcctccccacacgggcgctcacaatgcctcggtggacatgtgcgagctcaaaagggacctccagctgctcagccagttcctgaagcatccccagaaggcctcaaggaggccctcggctgcccccgccagccagcagttgcagagcctggagtcgaaactgacctctgtgagattcatgggggacatggggtccttcgaggaggaccggatcaacgccacggtgtggaagctccagcccacagccggcctccaggacctgcacatccactcccggcaggaggaggagcagagcgagatcatggagtactcggtgctgctgcctcgaacactcttccagaggacgaaaggccggagcggggaggctgagaagagactcctcctggtggacttcagcagccaagccctgttccaggacaagaattccagccaagtcctgggtgagaaggtcttggggattgtggtacagaacaccaaagtagccaacctcacggagcccgtggtgctcaccttccagcaccagctacagccgaagaatgtgactctgcaatgtgtgttctgggttgaagaccccacattgagcagcccggggcattggagcagtgctgggtgtgagaccgtcaggagagaaacccaaacatcctgcttctgcaaccacttgacctactttgcagtgctgatggtctcctcggtggaggtggacgccgtgcacaagcactacctgagcctcctctcctacgtgggctgtgtcgtctctgccctggcctgccttgtcaccattgccgcctacctctgctccagggtgcccctgccgtgcaggaggaaacctcgggactacaccatcaaggtgcacatgaacctgctgctggccgtcttcctgctggacacgagcttcctgctcagcgagccggtggccctgacaggctctgaggctggctgccgagccagtgccatcttcctgcacttctccctgctcacctgcctttcctggatgggcctcgaggggtacaacctctaccgactcgtggtggaggtctttggcacctatgtccctggctacctactcaagctgagcgccatgggctggggcttccccatctttctggtgacgctggtggccctggtggatgtggacaactatggccccatcatcttggctgtgcataggactccagagggcgtcatctacccttccatgtgctggatccgggactccctggtcagctacatcaccaacctgggcctcttcagcctggtgtttctgttcaacatggccatgctagccaccatggtggtgcagatcctgcggctgcgcccccacacccaaaagtggtcacatgtgctgacactgctgtgcctcagcctggtccttggccctgccctgggccttgatcttcttctcctttgcttctggcaccttccagcttgtcgtcctctaccttttcagcatcatcacctccttccaaggcttcctcatcttcatctggtactggtccatgcggctgcaggcccggggtggcccctcccctctgaagagcaactcagacagcgccaggctccccatcagctcgggcagcacctcgtccagccgcatctaggcctccagcccacctgcccatgtgatgaagcagagatgcggcctcgtcgcacactgcctgtggcccccgagcccggcccagccccaggccagtcagccgcagactttggaaagcccaacgaccatggagagatgggccgttgccatggtggacggactcccgggctgggcttttgaattggccttggggactactcggctctcactcagctcccacgggactcagaagtgcgccgccatgctgcctagggtactgtccccacatctgtcccaacccagctggaggcctggtctctccttacaacccctgggcccagccctcattgctgggggccaggccttggatcttgagggtctggcacatccttaatcctgtgcccctgcctgggacagaaatgtggctccagttgctctgtctctcgtggtcaccctgagggcactctgcatcctctgtcattttaacctcaggtggcacccagggcgaatggggcccagggcagaccttcagggccagagccctggcggaggagaggccctttgccaggagcacagcagcagctcgcctacctctgagcccaggccccctccctccctcagccccccagtcctccctccatcttccctggggttctcctcctctcccagggcctccttgctccttcgttcacagctgggggtccccgattccaatgctgttttttggggagtggtttccaggagctgcctggtgtctgctgtaaatgtttgtctactgcacaagcctcggcctgcccctgagccaggctcggtaccgatgcgtgggctgggctaggtccctctgtccatctgggcctttgtatgagctgcattgcccttgctcaccctgaccaagcacacgcctcagaggggccctcagcctctcctgaagccctcttgtggcaagaactgtggaccatgccagtcccgtctggtttccatcccaccactccaaggactgagactgacctcctctggtgacactggcctagagcctgacactctcctaagaggttctctccaagcccccaaatagctccaggcgccctcggccgcccatcatggttaattctgtccaacaaacacacacgggtagattgctggcctgttgtaggtggtagggacacagatgaccgacctggtcactcctcctgccaacattcagtctggtatgtgaggcgtgcgtgaagcaagaactcctggagctacagggacagggagccatcattcctgcctgggaatcctggaagacttcctgcaggagtcagcgttcaatcttgaccttgaagatgggaaggatgttctttttacgtaccaattcttttgtcttttgatattaaaaagaagtacatgttcattgtagagaatttggaaactgtagaagagaatcaagaagaaaaataaaaatcagctgttgtaatcacctagcaaaaaaaaaaaaagggggggcccttttaaaagaacccttggggggcccaattttaacgggggagggcaaggaaaaatttttttctttatggggggcggaataaaaaccactttgggaattttggaaaggaaccttttttttgggggggggccatatgggcccaccccccccacggattttaagggctttagggaaaaaaaaaatttttaaggggaaaaggggggaaaacaaccccaaaagccttgctgttgaa

SEQ ID NO: 90268 - DNA, 4357 bp, Homo sapiens; identical to SEQ ID NO: 61377

SEQ ID NO: 90269 - DNA, 462 bp, Homo sapiens
cgtaggaatgctaacgttcacccaagtgttgacattgcatttcgagggaatctagatttttttctcctctcccaaatgtatcaaaataggttaagccacttttaacgattgtgttaaacatcaggggtagttttaaaggttataaatgaattcattaacttggcatctgcagtttacaattattgctattttacaggctcatcagttagcatctatgcaagtgcaggcttataatggtgggaatgccaaccccccacctgccaataatgaggaagaggaagatgaggaggacgaatatgattatgactatgaatccctttctgatggtaagagaaacagatccctatgctgtgcacaggaaaatttttggatgatttgccacatttttctttctaaaataagtctagagcgccaaagaccagtaatacggatggttgtaatattgtccaggagtttctgaat

SEQ ID NO: 90270 - DNA, 465 bp, Homo sapiens
ttgtgacaagtgcgtacacccctccaccaactgtcaatgttgtggtctgtggtatcagtccatcaacagatacgatgagcatggatactgttgttaccagtgagttgataatatcaagcaaaggccaacattaccggttcattattcgttcaagtctgagtacatataaaagtatgataaataagatgccggtgccgtcaaatccagtgataccaatatatggttcaggggcatgtgcgatgataaaaaaggtcatagatgtcccagttagggccagccgcagcattttcacgtggcctttcacactgaagcagaaggggcgatgttttattttcggctgcacgttatccatcgcgtcatgcagtcccagcagcagctctttccctcaactcttttcagctggctgcttgagtaggttctgcccaccgatagcccccgccacggcggcgtagcaccgccctcccc

SEQ ID NO: 90271 - DNA, 1169 bp, Homo sapiens; identical to SEQ ID NO: 60517

SEQ ID NO: 90272 - DNA, 368 bp, Homo sapiens
  misc_feature (1)...(368): n = a,t,c or g
gcaaaactcccgcatagctgccaaaataactgctgagtgctttgcgatggagagaaacaaaggaatgttgggtcactgcccgagtcatggggtctctgcctgagccatagaaagcttttgatttctggagccacattgaatgaactgattatgtttaaaattataaaagaaaaatatagcctaagttaattgagtgcaataaaccaatttaacttatttgttcttacgtgtaacaattgttgagtaggtaccatggtacccactctattgctaagctgtggaaggagccttgctttggaattctctcagctcctctttcccatcatttccttagctgagtcccttttcagcctcctgtgctaactgan

SEQ ID NO: 90273 - DNA, 357 bp, Homo sapiens
aaagggacaaacgagggaacagaggcagccatgtgaacatggcccttggtgcaaaggagggaacagagggagccacgcggacacggtcctcagtgcaaacaccaccagtaagccgagcattcacgggggacgtgaaatgtgagcagatgcaggtccagatgtgaaagggaaacacacgagctgctagctgacaaagagcgtagcgtctgctcagaatgctcatctcagaggaaataaaggtttcataaaacaggataccaaaagccggaaccataaatggccagtacaagtatagaacaatgctctattaaccatcgggtaaatacacgattagctcttaaggaaataccttttcat

SEQ ID NO: 90274 - DNA, 386 bp, Homo sapiens
cgaagggaccctagtagtagttgtggccaagagtttttgcttgtcttctgggggctccaccccaaagagatgcaggtcagcaatcatccagtgcaatcaacccaagatggaaggtctgtgttattggccccagccaggggttccctatttggtgatgagcagcagggtgtgtgtgggacccatgggagattgactggcctcttctacttgttgactggagcttgttagaggtgtggtaaggcatttagggtctttgctccttcagtagtccaagaatagcaaagtcagttccactgcagaggcagtggcagagagactttcagttgcccctggaggctctgcccagggagttgctgagttgctaatggcccgatagctctggcagg

SEQ ID NO: 90275 - DNA, 393 bp, Homo sapiens
ccgggttaggctttaaggaactgggctcaagcccaagttcttcaaccttggggacaaaaatgagaccccgtttccaaaaaaaaaaaaaaagaagaagaagaaccaaggatgtaatccctctatcttgggattaacatggggctcttcatagctccaggtactttagtccttcgagaaaggaggatgtcctttgctgttaccttgtggttggcctcttgaaatcattctatgctggaacgaattctcattgcatttttaaagtatgctatggcatacctggcctacttcttaccaacaagaaagctagcattttctgacttctcagctaacatggaaagctggacacaggcacaaatgcacacctacctacctgccttcagagcaaacaagctc

SEQ ID NO: 90276 - DNA, 398 bp, Homo sapiens
cggcacgagattatgttaaaaataaacatattgaagttttgaaagaataaatgacttgctcatggtttgatgaactgccagtggtgtaataggactaaaaggcatgtttcatgatattctggtacttctttttggtgtgaacaaacagaatatttatattgcaatcatgttctcagaggcttcatcaaatatgattttgaagcagacatttttctttattctctgtcaaaatttggtgtactttatataaactgattaccattagaaataatgaggaaagtggtgtgtataaaaagttctaaaaatataagtgctaatcagtagaaacctaccacatcttaaaagaaatagttccactgcaacttgacctgtagattttataagtaattttagatatt

SEQ ID NO: 90277 - DNA, 375 bp, Homo sapiens
  misc_feature (1)...(375): n = a,t,c or g
gtgagtgtctgttaaatgagatgtatctgtattctgagtcaaacattccatggcaattgctttaatcacacaaaacaggtatcaggatcctgagaggatcaaattgtctgtaggtttatttcttattgggatgttctcaagtggtgttttaggttaatttatggtatatatatgtttatatgtgaatatacttatgattttagttgtagcaatggatagatactataagcagagttagttgttgagattaaaacccatggcctaaaaatagattcttggattcacatcttagctcacttaaattgtctttgtgactgangtgaagttgcttctttttaagcctcaggtttcctctcttgtgaaatggaaacagga

SEQ ID NO: 90278 - DNA, 358 bp, Homo sapiens
agacttgaatcattcttcttgtatggcatagttagttgtcctttcctatgcaaggaatacaaacatggctttcggtctgagagcctgttgcttgctgagatgttcccagctgttcttcagtgctgagcattttttgggggtaggggttttctattcccaagcaccatcactgcccctctctgaggtgtaacagctgtgaaagtgatgtccagaaggacagggagggaaagagagattagtatccaagcccacagagaataatttataatgaagctttgaagttaatagctcttgttttgttttctttgtttaaactggtagactggtactgaaggcagatctaaagaatgttttgaat

SEQ ID NO: 90279 - DNA, 359 bp, Homo sapiens
gaaaggataggcatttaataaaagagaaaatagatgattttatatgtatgagaaaatacatcgctttaaatttactcgtgagattcaccaatgatttctgaacaccaaacattggggtggcccagtgacttaatcggagaaacacagacactttgaaaagaaatgtgggatttaaaaacctgcaaaactgagtctgtcattctttaaaatgccatctcaagtcacaaaataatgatgttaaaatctgaaaccatatgtgttttgaatggtttaggttctaaagaaaggtacaataatgccagtcttttgggtttgtacatgatttgtttctttctcacataatctgtcaaaactttaag

SEQ ID NO: 90280 - DNA, 391 bp, Homo sapiens
tgaagacaggggctcacggagttgctcaaggcaggtagcagagtgatattattctccagcgatgatgggggagggacgagagaagaaaggggagggagaaggaggggaagggagggggaattccttttgtgaacagcagcaattctggctcagtttgtttcttagccctcctccatggctgtgtgtggggaaaggtgcatttcctggacctaaagaagctggcagtcagaaccttgccatgggctgcgcagagtaactccatggggttgactggataaggcactgagttttcttcaattagttaagattttgttttccaaatcagttagattggtccatgagcaactggactattacaatcctgtataaaaacagagattttgaatttaag

SEQ ID NO: 90281 - DNA, 1193 bp, Homo sapiens
tgatccatacctagtgtggggatactccacttgttttgtgcatatttgtgacaataatgatttgtgaaagcaatcaggaaaaggagagaagcaaagtcaggtccaaaaatgatacctgaactgtgtcacttaagagttgctgaactgcaagaagaacgtggaaatattcttgcatatggaatctactgagctctctccaaggcattcatcttttgctattcattggatctctaccaaggtttcttcacctctaaaatcggaataataggggttcctatgggattatgtagtaagatgctgcagaattttattttttaaatatgccgtttagagcagacacagtcacaataaaagttaaaaagttacaatgtgtccagtgtatatacccaggaaacccattccttgggtacttttcaaagagctgctgttatactgagtctctgagaagtccccttaagataataagctggccactttttcagtatgggttcagaatgagtatcttagtattctttctattttgctatggttctagtttatcaacctactttattagctgaactgttggccattgcttgctgaccagtagaaactcattgtgctttagttattggaaagtcaccaacttcacgtccatttcattctctggtacagggaagagccatccttgggattatgttggcgatcacagttctgggacagttcttcattaacctcaatcagtttgatcctgaagtaggcgatgaggaggagcagcagcaaagtcatggggaggaagaccccaaagaacaggaaccagccagggagctccctcatgaaagctgacagcacagagctcattgccaaccacacagaccccacggggaccatgggagtcacactcaggaccagggcagctttcctctgagtctgtacttgttttcttctggggctccggcctttgctcagcatgtcctcagtggaactttttgtggactttgctctatttaaatagtctgatgaatgctgataggattgctggcaggttactctgtaactcagctactaattgtagaggaattgaaaggtccatcttccaaactctttcagagataagtatgtatctggcagcgggggaatgaccttgggaagctgagtttttttgtgataagtttatttggaatgaaaattacccgatccaagcaaaaaaaaaa

SEQ ID NO: 90282 - DNA, 375 bp, Homo sapiens
  misc_feature (1)...(375): n = a,t,c or g
aacgaagtgagaaaaagacattttcggatgaaagaaaactcagagacttcattgccagcagacttgtgtaaaaaaggaagttcttcagacaaaaaatgatgacagaagggaattctgctggaacatcagaatgaagaaagtacaaattaataggtatagggaattgcctaatcttctcctgttgagtttttaaaatgttgggtaagaagcaaaattttttacaatggccgatgtggttcttaatgtttatgaaggtgatttttaaaacaatgtcataaaagtggggagagtaaaggaacctaaaaagtaggaaggtttctgcattccatttcaaatggcaaaatgttgagtagactgtaataattgttgtatatn

SEQ ID NO: 90283 - DNA, 613 bp, Homo sapiens
acatattccttcaggagtcacaacccaggagacaaagataagggctacaatagaccggtgatgaaagaaggtgcacaaacagatttttggttttattaagtaatcaagatcacacaggtcacgttagcctgccaacactatacaggcattttttggcacatgcagctaccaatatggcttcatctgtccagctatatatggcttatttggcacttccgcacaatggaattgatttctgcatcagttttaagtgtagatttacttatattaggcttactatataaattttagtttaatttcgcagttcctatatcagctccaaatgttttcttagattattaaatattccctaggtagaaaattaaatattaaaaagtagtagtattgacttaattcctgaagagatagagacaagaaaaaagatagtcattataaacctcaagtgttctacattttttttacctttaaaatactagtaaacattatcatatatacatacagcttaaactctggggattaataaagcataacatataactacatatttaaagatttatgtgattagagaattttaacactgttttaagagtaagaatttaagattatgaatctg

SEQ ID NO: 90284 - DNA, 327 bp, Homo sapiens
gacaaccagaagctcaggggcagcctggggggttttctataaagcaaaatgcagccattgaaagggctgtcctgggttctgccattaggaacttcctatttcttaggtgggggaaacttttctctaaagcaatgagggtaccagcaaatcagagacataaactgagggccactggcatacggagcttgctgcatgggttaccaggtttttattttctttaagtccattctttcaggctgtatttccagctttgctttggaagctctggccactctgagcccacattccttcgtggccctatgcctggagctgaggtcgacgcggccg

SEQ ID NO: 90285 - DNA, 452 bp, Homo sapiens
cccagcaatatccatatgccatattctcttccctttatatcaagcagttgctcttcctctcttcccatctggatgcccattatttctttctcttgcctgattgctctggctagggcttccaatactacactgaacaggagtggtaagagaaccccctccctttttcaagtttctattcaaatatcactttcctactaaaagctgtctctgcttgcccaagttaaaatggcaacattgcacacaaacatcctaacccttttccttgccttatttttctatttggcatgtatcactaacataccacatatgttacttacttaacttgtttactgtctgttcttccacaggaatgaaaactcctttagggcaagaattttgcctgttttgtgcagtgatgaatccctaatgcctagaggagagcctagtacataataggcactaagtaataactg

SEQ ID NO: 90286 - DNA, 388 bp, Homo sapiens
tactaaaatacgaaattggtgtgtcctcaggagaggaagcaggggagaaagagagcagtgtttctgcctgtgatatgaaatgtggtataacgtatttaaaaaccacaggtgactgcagatgaggagaatacaggaattgttattggggaggtgagtggtgcgctctcccagttcttatgagcactctttcattttgccttccttttagctcctctcaaactctctgcatcctaattacccctgctgcaaatctgactgagaactcttctttcttatattaaaaatgtcttaaaattacatgggtaacatgcgaatacattcgagctatataagagtcttacattagggaagcataccgactacttcctttgctgatcccctatttccg

SEQ ID NO: 90287 - DNA, 330 bp, Homo sapiens; identical to SEQ ID NO: 36736

SEQ ID NO: 90288 - DNA, 892 bp, Homo sapiens
ccagggatctgagcagctccttctagcatccttcatccttcaggtaccagccatccagacagtgcttgagctgcagaaactgagaccagacctctggcctggccctccccaggggcctcctttcctatagtcactgcttctgcatcagatactttcagctgcaactccctactgggtggggcacccatttcaggcagaaggttttggtaccctccactgaccctacacccagggctgctactgccgcttgtggcttcaggatgaaaggtgagaccccggtgaacagcactatgagtattgggcaagcacgcaagatggtggaacagcttaagattgaagccagcttgtgtcggataaaggtgtccaaggcagcagcagacctgatgacttactgtgatgcccacgcctgtgaggatcccctcatcacccctgtgcccacttcggagaaccccttccgggaaaagaagttcttctgtgctctcctctgagctcccctgtcccttctcacaactcctcccttttccctctcctgggcccttccttaggtcagtaattgttgtgagccccttaggctccttgcatcccatccctaacccttgcctgaccatgtgaggttatctgaagcacaaggcccaccctcacctatctgtcgaccccatttcctaccacctttgtggccgaccccaagcaccccagagatatgaggcaccctttgctccacccacagcagggccccgtcagactctgccagcgcgtcctgcccgcttccctcggtgacctgctcagacaatggagagggatgggccaggttcttgctctcagtctcacctggagctactgggagggtaaagccatttgaagaataaagtcatccagagcctcaaaaaaaaaa

SEQ ID NO: 90289 - DNA, 444 bp, Homo sapiens
gcgcacagaccatacatagcacaatttgaggtcaagagaaagatgcagtattaaatcataactgcatagaattatggtttgtaatagtgtaatacagtaagtccatagccacctcttgttgccactgcagggagctcaagtgttataggtatccacttaaaatgccatgtgacactcatctctgcatgagcagttcctcgctccagtaaattgcaaatcaaagtaaaagcgatccctctctgtctcatgtattttttgtgtttaataccataccacaaaactttgaataactccatgggatctatacagagtgccactagtgatgctggaagtgctcccaggaagcagagaaaagtcatgacattaaaggaaaaagttgaattcttgatatgtactatagattgaggtctgcagctgtagttgctctgatttcagacacgactg

SEQ ID NO: 90290 - DNA, 2706 bp, Homo sapiens
gccgggattgaatttagggggccctatataaaaactaatacgtcgcaagcccgcggacgtaaacttggatcctttaaaacgggcccccctttttttttttttttttttcacagtacaactcaacactttattccattgtgattggtatacatgtaagattgagacatcaagagactaaaaatcagtgcagaacttctctgaactaaagggccgtgaaaggcatgattggttttggcacacagagtggataaccatacattggctggaatgaggtggtcaggaaaataaaatgcacaaatctaacaccatgttgaaatcatgtctgagttctggagaaagttaaagtgtaaataattacaaagactgacatgcaactctttaccttacattattcatctacagactatttttctcccttagagatgaggagatggccttagtaatctgttcagagtagctgaaaagaccaatcaatacacattagaaagatctgcctgatttctatagcaattcattatagctgaagaaataatgctaaataatgtattttctctatatcatcctttaactaaattgaatcacatcacccaagtaattctgacttaacttttacttagttaaatataatttctcctgtcttttaatgtcaaaaagcagtttccgttagtttatccattggtgtatatcacaacagatgaggaaaacttatgtgatagtatctttccttttcaaaaataacattatgctaatgagaacatcaaagaagtaatactatgctgcaagtaatttaggttttcacatcatcaatcatatagggagtccaaagaagccagcctagcaggtaacatagcagagcagaatgcaatgtagaagaggcacacagagtctaagtgatttctccagacaaaagagaaggaaagacagaaagaagcaaaagaaaggaaaagtgaaaaacagccttctgcagaacaaattgttacaaagaaaaatctatttgcttgcaattgattaaacataatagagaagagttctttgatttgggatgatagaagtaaagatattaaaaattatatgctggtaagcctaaactggcagattgggccatttttcctgtggttgtatttgagatgttgagctctcacagggagaatttttgcttttgccaaggaagggccagatttaacccaaaaggacaaccttgagaacattttttctttgttaacttgggcatgtggctaacattcgttctctctctggtaaaaagatattattcatctctgatgagatggttcaaaatatgacagtgaccaagacgtggtttattcacaggatgcacataattggatatctgcatatggcatgaattaaaaagttaagcaacaaggaagagaaggaggagaaaaaaacttttgcaaatttctgacataaaataatcaaataaaagggaaagatagtggttaaggatgttttcattttctcagaggtttctcacttccatctgctacgggggaaatgaaatgaatgaaagtaattctctttaggtcaccaacataaggaataatttgactgcaaacatagaagtgagcagagcaagacttgaagtgatacttcttaatctctttgattcttaatcttaaacaacaagccacaggcaatacaggaaaggtggagatgactaggaagtgtgataatgtgcctggatcagttaccattcattggaaagtaccgtttcccctgcctgttaataggctgattcctgcaggtttgagtaaaggaatcatctcttccttcagtgccgcattgttctttgtaagagatccgtgtcagttcaaagttgtgtaatttaaaggctagagaagaaagaagtttaaattggatcccacagtaaatattcacggatatttcaaagtagaattgtccactgtctggggttgggttcaagcatcaaggtgatcgcttcctgaacatgttcattgaccatgaggagctgtttactctggctcatattagactaccagtaattattttcagacatgatgtctcttttgaaagaaatgactttgctgggactagggataactgcaggggtaggaggactgggaaatacggtggagtccagggtaggtgggaaacagaaatgagtagaaggaaaaaaaaaaaatagttcctccaaggtcatatatggtcagtaatgaagcaaaaattcatggtatgtgacttaaagactttctaagacattgtacccatgggatgtttccaagcttcttgatctttaatcttttagcaaccttctgatactggatttaccttcctaggtgtggtgccctccttctggaatttagatctctggggcaaaccctgtcaggatgtgcctctgtgtagttaacactgccccagacagcagctctgatttcagtcacagttctgctgagaagcctgtctgcccctggcaggggtgaggggagggttgttggtggcagatgtagtcagaggcagaggagaccaatggcagacagggtggacctgcaggaaggtagccagaaggaaagaccttgggttttacccaaggtcaaggtggctgtgatagaagagcgaaaggcaaaagtaactaactgaatttcagaattcagaagtaaaagagaaaggaggaggatccctggaccagggactttcacaggaaccaaacatgattcatgaaaaaaaaaa

SEQ ID NO: 90291 - DNA, 380 bp, Homo sapiens; identical to SEQ ID NO: 37675

SEQ ID NO: 90292 - DNA, 387 bp, Homo sapiens
  misc_feature (1)...(387): n = a,t,c or g
cttttctttttgccttttggccctaggatcgtgtttaggaggattatcccaccccgagattatataaatcttatcctatatttctctaacttatatggttttatttagaaaatgttttgtcctgtctggaattatcttgatgtatggatttaggtattctaacttttttgccccaaagggttagccagttgttaacatatttaccttttcccccaacatatgaaatgtcatacatgtatatactttattctgtgtttggattccctttagttccattgaacattgtggcaccagtacaccagcctgtagatgagttagaaatgggactttgtatcttttaatgtgagacctcctcttgatcttttttattttttacaatattctgan

SEQ ID NO: 90293 - DNA, 370 bp, Homo sapiens
aaagatgtgaatattaggggcatttgaaacatcatgaataaacgttgctatttctgttcatgaattttaagctgtttgttcttgcaaggttcccagtcatcccttcccaaatagtgctccttaaaattttcatcaggattttgaataaacaggaaatatgtccatttctctcagtattgattactctctaggctgtctgacagactcacactaaattgccaatctgcttcttaggagtcaggagtgaaaacatcagagtgggtgagagcctggtgggaggcctgtgagctgggagttatctgaatagagatagcatactggctgtggggctagactcctcaccatcatcttggaacatggctgggaaata

SEQ ID NO: 90294 - DNA, 864 bp, Homo sapiens
tagggcaactttttcttgtatatgaaatgagccaatagatttgtttgaggaagagatattctattccagagggactattacagaaaattaaagtacacataggaatatctttcaagtctttttcctcccataaatatgagtcatattagaaagttattttaaacctagtctaatatctgattgtcaaaagaatgactctgatagaaaaaggaatttttttgaacctttttttttcaggtataaacattcattcaatccaataaagacattttagaaaaaaagtcaacctatacaatttattttatttttcctataccttggctaaacaaaatatatttggtgatactgtaaaatactaagcattttcagtaaaactggcaatcaaatacagcttaaccttcttctgcgtgacaactgaggattttaattggaaaagtattatagtctataaacaggaatacccaaaacatatttaaaccactcgagcactttgatttttccatgttctttgcatctagattgaaacacatcacaggaaatttcaaagaccaacggctgaatatttttcatttcaacatttccagtggcatcctacaagagaactagcactcacaatgagtcatctgaattttctttaaatcgtaactcatttttaatttctaaacaggttttacctccttatcttcagaatctcctccttccaatagccagtacagtagctccattatgaattgcagactttgcagaccagccttgggatgaatttcagccaacatttggaggaaccccttagttcagaagtgaacttagctgacagcatccaaatgtattatggaagcatcacacttaacacctccggacagc

SEQ ID NO: 90295 - DNA, 303 bp, Homo sapiens
cttacatgtaagatatacatgcttattttagataagacttctaaaataagcatgtatatcttacatgtaaggaattattaacttcattttttcataaaaataatcagagtaagactttcaacagatgtcaggatagctgaagttctccatgactgtcatacgtttcacttatgacaggtttgtaatttctgttagggaatgtcatctaagtgctctgcatctggtattttctcatgcaccctcatgacacgaaaaaagcctttgagtatatctcttttctctctatttacatgttcaccactg

SEQ ID NO: 90296 - DNA, 370 bp, Homo sapiens
tgaaaatactttattgcagaaaagattctagcatgactccaatgctgcaagtgttaggatattttttcagaggtactcatcaaacttgatatgtagactgttgatgcacagagaaaaaaactgaggcctaacattcatagagagtcagagaaagtaaagatggaagagggatctcccatagcaacacaagtggcagtggctgcgatcaacttttgtttttttaatatcagttttttttgtttttgtttatattaacagaagtattgatgtttggggctggatgattcttggttataggaggttgtttgcagaattgtaggttgtttaacaccattcctagccattacccactagatgtgagtgacacctg

SEQ ID NO: 90297 - DNA, 607 bp, Homo sapiens
cttgtcctctcttagagggagatgataagatattggcagccaaaataaagaatatagcactcggtaccgctcctccagacagaacgtgttcagtgctctcctggtgtgctgctttgttcatagcccgaagctggtctgctattggatgtgtccaacattttccaaaaagtagagcactaataataatgggaaaggatccatagcgagcacatttggaatcttccattttggctgagcaaatggaatccgcgtagaaatccaggatcatgacaaaaaagataaccgttgcaaaaggcataatgagagaaaaccaagactccactttactctcagttgtcacagaaagaacaatgacccatgggcacaagagaagcacagaaacaagatgagataaagcttgaagacgtttagctccaccaacgtcgacagagagctttctggaagctgtatgaaaaccaactttacaacacaaagccagtactagcaataatactccacccttgtgatctgccacacctaagaaggcaatggctgtgtaaagcatatgagttagagcactgtcatgatgtccttcagggtgttcagccattttagccatgctcgtgcc

SEQ ID NO: 90298 - DNA, 1136 bp, Homo sapiens
tgcaaaacttcctctttactgttcaactccttacaacttgcataaaggcgtcatttctacctcagagctgggggaagtcataattagtgtaccacccatgtgctgggcacagtgaattttaatgcctcccctttagaggagaggttatgataatgtgaagacccccccccaccacaaaggttgtccggcactttggtgcaaaaaggattggtccaatcttgtgctggcttggggtacagaaaggcactgaagttggtggctcaaactcctctgggctggggtggggcagaggtgaacagggaagtaagtggtttgggacaggcaggtttggatgtgggcttgggttcttgctgacggaggtagttggtcctgcgtgggggatggggtggtaagggcagcttgagcctcaggctgggtggatgctgctgtgctggcccccatctgcccagctcaccagctcactgctctggaaccacagctggatctcccgctgggccccctccacggagtcgctggcgtggatgacattcctgctgatgtggacgctgaagtcaccccttatggttcctggggcagcctcagccgagtcggtgtgtccaatcatggccctcgaggcgcggacgacattgtacccttcccagaccatggccaccacaggcccagagctcatgtagcggatgagggcagggtagaagggcttcctccgcaggtcctggtagtgctcggcaaggacgctctctggtgcctgcagcatcttcatccccaccagcgtgaagccccgcctctcaaagcgctggatcacgtccccaacgagccgccgttgcacgccatcgggcttcaccgccaccagggtccgctcccgggtccaggagggccctccttcctatagtcccaggctgctccagagccaagctaccctccggcatcgggtccctggtttccagaggagcccagaccctgtatgtcccacagaatctggacagagccaaaggggctccgccaggccaggaggaaaagttaaccccagcaggcggctgaagcccacgggaggaagaccccctggttggtttgttcccccaaaacccagtttgcagggcgccttgtgtagcctggggctctgctgcggctggtgcggg

SEQ ID NO: 90299 - DNA, 337 bp, Homo sapiens
ggcacgaggaaatgaaagtacaagaaacagttacaaatggtggtggtactggaagtaagcgtcccatagcttctactgggaacttcaaaaaggctgtggttttgtggatattcttcctttggcagtctactaaattataagaactggaatattaatagtattgaattctagctcttcaaaaatatcaccaacacaatctgttgtttataaaagctgagtttattcttaccatcgtaaggaaaagaactgccttgacagaatcttactactcttggaatgacgatggcaaaattgggattcttacgaggtttggggtctagtatgatgtgagttttca

SEQ ID NO: 90300 - DNA, 829 bp, Homo sapiens
ggcacgagctggaagaaatgaagttagagaggcaggcaggggttgagtcatgtagggctctttaagccatttaaagaagccctcatcagactgtagttgttatctacttatctgcagtacctggcacagagcaggctgcccaaacatttgttgaacaaataggttaggggaagttctttctagtcataggactagagccattttgaaaccttcattaataaattacatgttttgttatacaagtctccccttttataggttgattttttttttctgtgccagctgtgtgctgccacagggcgagggatgtggggcttttttattttatttatggtggggttattaaaaaattaacaatgggattgcatagcattatgacaggggggccaaatggttaaaaagtcaacactttggtatttggagggtgattatatagtttggatattagtcacagcttttggttttttgttttggggtttttttgatggaatctttccctgccacccttgctgaaatgatgccactgctctccagcctaagtgacagagcatgactccctttccatcatagaagagagaatctccaatgctacctcaataaggatgggtaagggtcgaatgcgtactattcgcccgggattttgttgaaagggtgagaacaccttatttcgggacccggtagatggggctggggggggttgccccctaaaaaaggggttgggttgaaaacaccctttcaagcctttaaagaaatattttgggacgggaaatatggcaccttgtttgggggcctcaggccacatttctcggcggggaaaaccttccctgcc

SEQ ID NO: 90301 - DNA, 358 bp, Homo sapiens
ggcacgagaatttatcctaaatatgcttatcagcttctgcctcataacacacacaagaactgagtagctctaaatacatatttatttagctcatgatgtgtgagctggcaagttcaactgggcttagctgggcagttctggtgtgggacatgctagattatcttaactgggctttgtacatgcatctgcagtcagctgatggttcatctgggcctggctgttgtatgacgggcatagatgagacgacgagtatcataaactgtcaggcagctcccgcggtcagggatgccatcagctctctagacaaatcactcttaaacaacattcgaaatacacaagtaatgcgtggcttgtcacg

SEQ ID NO: 90302 - DNA, 996 bp, Homo sapiens
ttttttttttttaatgggccattgcatacagtttatttcactagattgcaattttatacacagtatgaaggggtttcctgatagcacatatatagtttactttctgtactgctgaagaaccaattgttttttacattgtatcataataccctatcattaaaacattattcagtgaattttttccaactacatataaacggagatttaccacacacattctttaccatggtgcaagaatgcctttataacatatttgaatcacaaaatgtgagtctaaaatacatccctgtaattaaaacactactttaaagttacaatgccccatgttatagtagccagatttgattaatccctgtataaatcacaaagcaatttggtggataatgtcttggctaactggcagcagcttttaaccgtgatattaaaaaaaaaattctttaattaagaaccagactttcacaatttagaaaacttcttcccttatatgtcaatattctcagtcaaaatgggatatttaaaaatttgtagtctctaaaacaaggaaaataaatccaaccctcccttagctgaaaggatgcggttctaacattaggtttcgtagaaacctaagaatagcattgtacgaggagtggaaacaagtcataagaaacataacatttcttttaaaacctcttaaattcctctgcccctccccatctctgtcaaacacagagaaagaatactgcattacaaacaaagatgtgtttccgtgaaatgatgtaaacaagtcagagagaaagatttcttcattttcctattttgtggagtggggcagtgggatatcagttaaataagaaatagagctccttaatcaaagaaccacttcattacacacaaaacagctcggggcaactgctgaaaacttctcctgtgtttcctttccttttccccaaagtttgagaatgtttgaaagttcaataaatagtagaaaaacggacgcgtgggcggacgcgtggg

SEQ ID NO: 90303 - DNA, 445 bp, Homo sapiens
  misc_feature (1)...(445): n = a,t,c or g
acaaattgcagattagaggacatacaaatgagggagccagttgctacttttgcctttattattaatgttttgtggctctgcgggtcattcatgatgttagacaatagggtgattatttctgttctgctgaaagacaatctgattgtgttttgtgtagaatgaggcactgatccgctctgcctgcctcccatgagaaatgccgcagacctttgtctgctcaaacctcctcccgtcagctctggtattgtgatggaagtaattgaccaggcctcatgggtcagcatatatctgtactgctgtttattcttctttctactttttaaggactaaaatcactttcttgtaaaatattacaaagacattttaaaagaaaagactgtccattgtatttttccacccccttaaaatatattcataatgatctttttaactgggtgggacttgn

SEQ ID NO: 90304 - DNA, 1159 bp, Homo sapiens
ttttttttttttcttaggtttgagggggaatgctggagattgtaatgggtatggagacatatcatataagtaatgctagggtgagtggtaggaagttttttcataggaggtgtatgagttggtcgtagcggaatcgggggtatgctgttcgaattcataagaacagggaggttagaagtagggtcttggtgacaaaatatgttgtgtagagttcaggggagagtgcgtcatatgttgttcctaggaagattgtagtggtgagggtgtttattataataatgtttgtgtattcggctatgaagaatagggcgaaggggcctgcggcgtattcgatgttgaagcctgagactagttcggactccccttcggcaaggtcgaagggggttcggttggtctctgctagtgtggagataaatcatattatggccaagggtcatgatggcaggagtaatcagaggtgttcttgtgttgtgataagggtggagaggttaaaggagccacttattagtaatgttgatagtagaatgatggctagggtgacttcatatgagattgtttgggctactgctcgcagtgcgccgatcagggcgtagtttgagtttgatgctcaccctgatcagaggattgagtaaacggctaggctagaggtggctagaataaataggaggcctaggttgaggttgaccagggggttgggtatggggaggggggttcatagtagaagagcgatggtgagagctaaggtcggggcggtgatgtagagggtgatggtagatgtggcgggttttaggggctctttggtgaagagttttatggcgtcagcgaagggttgtagtagcccgtaggggcctacaacgttggggcctttgcgtagttgtatatagcctagaatttttcgttcggtaagcattaggaatgccattgcgattagaatgggtacaatgaggagtaggaggttggccatgggtatgtcaggaaagcttaaacatgccttgatatttagaacatccatttttgaagggagaagcaggaaataagatgtatgtttcttaccagattctgatattagatgattagtgtgcctataccaacatattttgatcctatttcattgtcttttaaggccaatcttagattgttaaaaagatctcttccttcg

SEQ ID NO: 90305 - DNA, 315 bp, Homo sapiens
tatgttttaggttgatattaactaatatgttttcctatgcagtgagaaatgttttgcttctttcctttcagaacagaacaatccatatgcatgtatactccaaggcaaccccttgacttttctgggaaatttactttcttgggaataacctaagttatttctgaataaaatgaatcttaagagcatggctctacatcaggaactctttcctttctttccacttccaggtgacttgctcatagattttacagaacaaactgtagccttttggattatttggttagaaatatggcatcaggagcggccacttgctgt

SEQ ID NO: 90306 - DNA, 1332 bp, Homo sapiens
agtctgcagcctgaaacaggagtttgtgggtcagagtttgtgggtcagagtttgtggggctgggatagaaactcgggggattggcgttcagatgctgaccacttccctcttctctgagcagggtgacttcaccgaagaccagaccgcaggtaggttatctctgatccctaccgaggtcacccttagggagagggacaccctccccccagcacctatcctctaatcttaatctgtcatctctttagcacccccatgagattaccccctggattattttctcttcttctggatcctccattttcttttctcactttcttcctccctccccttccactctagatctgatcccaagcactgggtgagttttaggtggtgtggagttcaaggaggccttccagctgtttgaccgaacaggtgatggcaagatcctgtacagccagtgtggggatgtgatgagggccctgggccagaaccctaccaacgccgaggtgctcaaggtcctggggaaccccaagagtgatgagatgaatgtgaaggtgctggactttgagcactttctgcccatgctgcagacagtggccaagaacaaggaccagggcacctatgaggattatgtcgaaggacttcgggtgtttgacaaggaaggaaatggcaccgtcatgggtgctgaaatccggcatgttcttgtcacactgggtgagaagatgacagaggaagaagtagagatgctggtggcagggcatgaggacagcaatggttgtatcaactatgaagcgtttgtgaggcatatcctgtcggggtgacgggcccatggggcggagctcgtccgcatggtgctgaatggctgaggaccttcccagtctccccagagtccgtgcctttccctgtgtgaattttgtatctagcctaaagtttccctaggctttcttgtctcagcaactttcccatcttgtctctcttggatgatgtttgccgtcagcattcaccaaataaacttgctctctgggccctcaaaaaaaaaacccaaaatcctggccactatgccaaaaaaagacctaaaatacccctaccccaagcccatgcaagactgggaacatgccggcttctctccagcctatgtgcctttggtccaagaggtctcaccctcctgtccctggctgggctaggtggtcctgtccaggctcctgcagcgcccccctcactttgacactggactacgatgcagcctcccttctgtgtccccttgagggtaccctgggtcccctcatcaggggcagaggcatgaaagagtcggggctggatggccaggggcttctgggcccgatgcctaga

SEQ ID NO: 90307 - DNA, 343 bp, Homo sapiens
ggcacgaggagctactgacgtcgtagttaaaggcccagatcataggaatggcatctcatttaggtaatggtataaacactttcagatcattttgtcatgtaaacagaatgatgcttttctaattcaaatggttatttataattttgacatttggtctgccctaagaggcctgaagtctgtgagcgcacatggaattcctgcctgaaaggagggtcttagtggaatattctagcacctctagtctgagtcgagtatttgtatcaattttatatttagatcatattctactacttactctactatcattgtagcctactcttatactatcctctacataatctcg

SEQ ID NO: 90308 - DNA, 354 bp, Homo sapiens
ggcacgagtcaagatgtacattaaagttcatttattttaaaatgtttattatgaaataattataatctgaaaagaagttgcaaaataatatagagtcctgtgtacttttcacccagttttccttagtggtgacatcttataaagctgtaccacagaatacaaaacagaacattgacattgctattttaacagagaagatgtctctgtgggtgggagtttgggggtatgattgatctatgtcgtaccgtgatatagtgatagacaccattcagggctttaaacacctgtatttactgagattattattcttctgtatatctatagtattctacttgtaataatattctgtatgcg

SEQ ID NO: 90309 - DNA, 345 bp, Homo sapiens
ggcacgaggaagcagaggtacaaaatttgcattttctggcctataacctaactgtctcaggaagtgtctctacagaagtagtttctggtttctctagttttatagaattaagaatttaagaacagaaagaaaataaagtttcctgcttttcaacagaacagggcaaagctcctgaaacaagaccatatggaagcatcccgcatgagtgcccgtgtgtttgatggtgaggttggggcagatggtaaaggcagggttcttggctgcttggtcaaggattttggagatgatagaagttaagtggctagtgctaaggaaagactgttgtatgttgtgtgtattgggcct

SEQ ID NO: 90310 - DNA, 528 bp, Homo sapiens
ggcacgagtgtaaaatctgtgtaaccagataatttgatatgaattccatgtatggcattacagttcctaatgttttaaacaagctactgaaagtagattcttttaaaaactatttcatatgctttgactttaaatttctcaccctaatcctgtggttcaccaagtaggaagaagatgctttttaatattttaatatgaggaccatctgtagttttaatggttttgttgtaaaacatgtgctatagaaaaagagaaaggcttttgatatcttcaaagttgctaaagtagttttaatgttttaacataattttctttgatttcagagctgtccggagcttgtacagcatctaaggtgagcaaatacgatttatattccttgatattgacagacagtgctgttctttacagctggcttttaagaccggtcagaagatattctcctcaggaacaagtttattttcttgggcaaagatttttaagagtctatacttaatcacgtcttgaattgacatagcatagcttttcacc

SEQ ID NO: 90311 - DNA, 1286 bp, Homo sapiens
tttttttgtatttttagtagagacagggtttgcccatgttgctcaggctggtgtagaactcctgggctcaagcaatcctcccacctcggccttccaaagtgctgggattacaagtgggagccactgtagccagcaaaataattacaatggagagacctggaagatcaccttagtcaagtgatcaaacttagtattacaggccatctgcggttacgaggcaggaaggatacatcacctatgcagtatttttcccaaaaatgcttaacttgaatttcatcatgaggaaacagacaaatctggattgtgggacaatttacaagacaactatctttgactcttaaaaaatgccagtgtcatgaaagatcaaagaaagtagaggcatgttttagattaaaggaaatgaagacatgacatgcagtgcctgatctttgattggattctgtactattctttcatctttctggcttgtttgaattttttccaatacgtaaatttgggcaaaagaggtaaccgagacaattgattaatttattgttgtggcttattgggggcactttcagagagataaaaacaatccctgtaactgaagtaaaaggttaatcttaggcagtatagcatggtcattaagaatacagattccatagccagactatgcttcaatctcagctctgctaataatgtgaatttgggcaaattgtttaatctctgttccttggccttgtcattataatagtacctacctctaatgaattttgaggatcaaatgaatcaatacctgaaaaatgcctggtgcacagtcagtgctcaataagagttaactataattattgtgttgcagaggttgtggggggccttttctgagtcctccaaaaggatggctttattggggccatattaagactatgaaaacagaagagggtttcatggatacaagaagtctgtgagttgggggtacaatgtatagagttttagattaaaactgcatccaataagttggcctgagacatctttcaaacctataaaggagcaatcacaagtgactagtagtattcctttggctccaggggaagcctctgaattttatatggaatggaccccgaaccggaacccaacattttgttggatagcaaccttacctctgccacaaaggggggttattttggtcaaccccgaggccccagcctggctttgtgtccccaggcctcgacgctctccggcgccaccccctggctgcaccttctcccctctggccttccgggggccccacccctaaccccgccaaaacg

SEQ ID NO: 90312 - DNA, 466 bp, Homo sapiens
  misc_feature (1)...(466): n = a,t,c or g
ctcgacgntgcagtaccgtccgaatcccggtcgacccacgcgtccgggagagtgtcatggaggcctacgagcaggtccaaaagggacccctgaagctgaaaggcgtcgcagagctgggagtgaccaagcggaagaagattaagaaggacaaagacaaagcgaaactcctggaagcaatgggaacgagcagaatgaacgaggaggataagcggagcggcctggacaagcggaccccggtccaggcggcctttgagaaaatgctgtagaaacggcagatggaaaggattctaatgaaggcgtccgggggacacaagcagagaatggatgacttcaccatactgctttacacgctcacgaagcatttgaaaattgtgatagtcagctggacgaagttcacatctgtcccaatgaggaacagacatgagggatcatattagactatactgaggatgattatgataaatag

SEQ ID NO: 90313 - DNA, 1075 bp, Homo sapiens; identical to SEQ ID NO: 60406

SEQ ID NO: 90314 - DNA, 372 bp, Homo sapiens
acttcggtcgtactcgtgcgcctcgcttcgcttatcctgcgcaaccatgtctgacaaaaccgatatggctgaaatctacaaattctataagacgaaactgaagaacacttagacccatgagaatagtccattgccttccaacgaaaccatagaacaggagaatcaagcaggcgaatcgtaatgaggcgtgcgccgccaatatgcactgtacattccacaagcattgccttcttatttcacttcttttagctggttaacttttgatgatgctaggaagtttgctcaagcatttttgattgtgctgcctgatctaattgataaaactactgacgataatttcacgctttaatgtaatttataatcttttatacg

SEQ ID NO: 90315 - DNA, 1467 bp, Homo sapiens
ttttttttttttggagacagagtcttgctctgttgcccaggctggagtgcagtggcgcgaccggagctcactgcaacctccacttcccgggttcaagtgattgtcccacctcagcctcctgaatagctgggattacaggtgcatgctaccatgcctggctactttttgtatttttagcagagacagggtttcaccatgttggccagggtggtctcgaactcctgacctcaagtgatccgtctggctcagcctcccaaagtgctgggattacaggtgtgagccactgcacctggcctatataggcttttttcttaaacctatttagtaatgttttcccaagtttattttttatttttaattttttccccaagtttatttttctatttttttttcatggaaaaatggggtaacttagcagtttcaatattgaagactgaagtttaaaaaaaatttaaattcaaggtacttttaaaattcagttagaaaagtaggctttaaaaattattagagacaagagtaccaaagcggtgtgtgtatgtgtgtgtgtgtatgcatgcttgtggattggaaaaactttggagactgattacttttcattatatatgtgtcacagtgaaacagcttttatgtgtcatgtaagattactgcttgcctctctaaggaaggtcgtgactgtttaaatagacgggcaaggtggaaccttttgaaagatgagcttttgaatataagttgtctgctagatcatggtttgtattgaactaacaaggtttgcagatctgctgacttatataaagctttttgattcctactaagctttaagatttaaaaaatgttcaatgttgaaatttctgtggggctctatttttgctttggctttctggtgagagagtgaggaagcattctttccttcactaagtttgtctttcttgtcttctggatagattgattttaagagactaagggaatttacaaactaaagattttagtcatctggtggaaaaggagactttaagattgtttagggctgggcggggtgactcacatctgtaatcccagcactttgggaggccaaggcaggcagaacacttgaaggagttcaagaccagcgtggccaacgtggtgaaaccctgtctctactaaaaatacaaaaattgtttagctctgtttttcataatagaaatagaaaaggtaaaattgcttttcttctgaaaagaacaagtattgttcatccaagaagggtttttgtgactgaatcagcagtgcctgccctagtcatagctgtgcttcaaaaacctcagcatgattagtgttggagcaaaacaaggaagcaaagcaaatactgtttttgaaattctatctgttgcttgaactattttgtaataattaaactttgatgttgagaaatcacaactttattgtacacttcattgcaacttgaaattcatggtcttaaagtgagatttgaat

SEQ ID NO: 90316 - DNA, 443 bp, Homo sapiens
ggggagtggcagggagtgcctggcctaatgatcagccatgagaatgtcgcgagatccccgggtcgacccacgcgtccgctttgacaaagaaaactacaaaacattgatgaaaattatgaaaagaaaatgaaatatgaagacaaccaatgctcatggattagaagaattaatattgttgagataatattactcaaagcaatctacagatttgatgcaattgctctaagagcgtccaccgagccctgcgcaccgatgtacatctgctacataggcgtagagggcaccgacgaggactaccggatgcacggtgtccatttgtttgaatgcctaaccaaggagctagccctggaccatgaccacatacttatacgctatttccccttggagtcttgacttataggtatgatatggacgttgatgactttgttatgatcgttcactca

SEQ ID NO: 90317 - DNA, 367 bp, Homo sapiens
cccactcgttcggcctgactgcttggtcatctcactggtgtgagctgcagcatacgctttgctcgaaatggaccccaactgctcttgcgccactgggggctcctgcacgtgcgccggctcatgcaagtgccaagagtgcaaatgcaacttctgcaagaagagctgctgttcctgctgccccgtgggctgagccaagtgtgcccaaggctgcgtctgcaaaggggcatcggagaactgcatctgctgagcctgatgtgggaacaggtcttctcccaaatgtgcatagaacaacctgcacaacctggattttattaaaaatacagcactgagccatttgctgcaatacattttacactaaatatgtgag

SEQ ID NO: 90318 - DNA, 450 bp, Homo sapiens
ggtgaataatgatcccgctgtaccgtgcccgtatctcccggtcgacccacgcgtccgcccacgcgtccgcttcataatttttgtagaaaagattccaggacgggagaagccatttgaaatggtaatagagaaattgtggaagtagagttattttaagagttgggaaagtcctagaaaatgatcttgggagaatatataaacctgaagttggatggggagggctgcattatcagcatgtggagtcctatgtaccatactgagttattacctatgatttgcaggctagacgtaacccactgatggaaatggtgattattgagcttcatgtaggcctaaaagcgtattctgatcctgtagatgattaatcatgctcttatatcatcatttatatgtatccctttgtaatcatattatggaatcctgggatgtttagagtgtgcctcttatggg

SEQ ID NO: 90319 - DNA, 375 bp, Homo sapiens
aacttttcagggatgccactatatgtaaattgaggggaaattatattttgttttgctcttaacgtgactgagagatatttcatattcagagaatcctgacaacagtgaacaaagagccaaaccaatctgcatttgtaatctatatgttcacggtgactctcaagtatagatacaagcatgtgatttctttgtcttctagtggagtacccaagttattgcatatggataccatatcttatgtaaattgcattctttttttatttctgctttatatagtttgaacactatattgatcttttgaaattatgtatgtaaatgtgttagaattgtatgccagcatgataaaatagaagttgcaaaatattggatatgaag

SEQ ID NO: 90320 - DNA, 445 bp, Homo sapiens
cctgagctcagcctaggcatagcctcagggtgacaccactgttaaatgtgtttgttatcttcaagccccctctcctttcctctcctgcaggctctgtggcctcctatgagctgacacagccacccgcggtgtcagtgtccccaggacagacagccaggatcagctgctctggagatgtactgagggataattatgctgactggtacccgcaaaagccaggccaggcccctgtgctggtgatatataaagatggtgagcggccctctggaatccctgagcgattctctgggtccacctcagggaacacaaccgccctgaccattagcagggtcctgaccaaaggcggagctgactattactgtttttctggtgattagaacaatctcacagtgacacatgcagatggggaagtgagacacaaatccatttttcatctgtctcatct

SEQ ID NO: 90321 - DNA, 403 bp, Homo sapiens
ctcttagcatatgaatagttgtttaaatgctgggtctgatcatttcaatatccttgctatatctgggtctggttgggatgtttgctctgcctcttcaaactgtgtattttgccagttagtatgtcttgtaatttttcttgctatctaggtagacatgatgtgctgggtaaaagaaatggccataaataggcctttagtaatgtagtggttaaggtgttgggggaggaaatacattcttagtcttatgattaggtgtcagtctcgtagtgagcctgtgcctccggactatgaactttacacatgattctcaggttttatttttttctctcctttggtgagacaggatgaagataacttatgagcttactctatctagctagagtgagctggagttgggtatttc

SEQ ID NO: 90322 - DNA, 423 bp, Homo sapiens
ccattttcaggttgtctgtacgttccccactttaggaataaatatttggtcttctgcttcctctaccaacatattatatttaccatttatgtatgccagggcttggccagatacgtaaatatttaggctctgttgtaactactttgctgctacagtacagaagaaaccacagacaatactcatatgagcggatatggctgggactcaccctgacttgctgcaacataccaagagagtggactctgcacttgttcctgcgcttgagggggggggactaagcttaccgttttagggtgtcaacaaaattcattgcactttcctttcaataaagttagtgcattcccacaaaaagagcaaaaggccagcgcgtctaaagaatccttcggggggccaaattttatctggacgtgcaacgtggtttgt

SEQ ID NO: 90323 - DNA, 413 bp, Homo sapiens
  misc_feature (1)...(413): n = a,t,c or g
tgcatcctggaatcctcccagataaactacccacctcctgtactgctttctggttctgcttttgagggatcagaactaagacaaaaccttgcttgaaagtcagtggtaatgggcaaatttaagggagttaatggggttaactattaagttagtggggttagtggagagagaaggggaggaagaaagaagcgtcaccttttacttagctgaaaatgtgttccagtcatgatattcacaaacgtacctcttatgctaggaagatcttataaaagacatattctctattttcaaatgatggctgttttcagcacagtttctggggctatatgtccactgacattttccttatgatatttgattttcagtaactaggtatgtctatggactccaccctttgttttttctgataaaan

SEQ ID NO: 90324 - DNA, 4194 bp, Homo sapiens; identical to SEQ ID NO: 60362

SEQ ID NO: 90325 - DNA, 5594 bp, Homo sapiens
caaagttgtcatgaaaatttattaagaaaaataaaatagagttcattttattaagagggcattaaatcttagttggtaatgtctctttccttctttcctttgcagagtatgtatgtaactgctctgtggttggaagcctgaatgtgaatcgctgcaaccagaccacagggcagtgtgagtgtcggccaggttatcaggggcttcactgtgaaacctgcaaagagggcttttacctaaattacacttctgggctctgtcagccatgtgactgtagtccacatggagctctcagcataccgtgcaacagttctgggaaatgccagtgcaaagtgggtgtcattggctctatatgtgaccgatgccaagatggatattatggctttagtaagaatggctgcttgccctgccaatgcaataatcggtctgccagttgcgatgccctcacaggtgcttgtttaaactgccaggaaaatagcaaaggaaatcactgtgaagaatgtaaagaaggattttatcagagtcctgatgccactaaagaatgtcttcgctgcccttgttcagcagtgacatctacaggcagctgctctataaaatcgagtgaattggaacctgaatgtgaccagtgtaaagatggttacataggcccgaactgcaataaatgtgaaaatggctattacaattttgacagcatctgtagaaagtgccaatgtcacggccatgtgtacccagttaaaactccaaagatttgtaagcccgagagtggtgagtgcatcaactgcctccataacaccactgggttttggtgtgagaactgcctataaggttatgttcacgacctcgagggaaattgcatcaagaaagttattcttccaacacctgaaggttctaccattttggtttccaatgcctctttgaccacatcagtgcccacccctgttataaatagtacttttacccctacaaccctgcagactatcttttcagtaagcacttctgaaaacagcacttcagctttagctgatgtatcatggacccaatttaacatcatcattttgacagtcatcatcattgttgtggtgctgctaatgggatttgtgggggctgtatatatgtaccgcgagtaccaaaaccggaaactcaatgcccccttttggaccatcgagctgaaagaagacaatatcagtttcagcagctaccatgacagcattcccaatgcagatgtttcgggattgttggaagatgatggcaatgaagtggctcccaatgggcagctgaccctgacgacgcccatacataactacaaagcctaaggagctagaactgttctgaattgttaaaccacagtgcttgctaagacagagtcagcccctgggccagacaaagcctggctagagtttgctgagaaagcaaaggcaaatagtgcatctgaaattttcaggtacaaatttgtaatgcgcttagcctatctattgctcttagttttcccatgaagatctgaagcgttcactgtcattaggacttgaagtaaagtatatttttgtaccaaaccacatgggagtatggaaaggctgaaccccatagtgcagcccaaaaccactttgacctccagatagactcctggggaagcattcaccaagccagtggtaacaagatgatgaatgtggagggggaaaagactgctggaagacttcatctccattcctgaaacattttttttaaaacagtgtcagggattatattcgttttactatacaaaaggacatcattgaggaaaagcttgtttctaggctgtatcacagtaaataatcttgattgtttctagaacaggggtagaaaagtcccaagatcttcagaagggcttggttttttcctcccaggattcttgctcagtgatgagttgaaagcacaggataagcttctaagggaggaaggcagcattggggagcaggaggctgatggtcctcctcagggtctcagtgtaaatgataaattgtctaaaaataaggaatattcctgcctctagagaaataaggtgtacatagttaatgtagcatatctggtcgacgttgtatttgtatctatttgtaaaaaaaaaatcatgtcatattttatcatctggaatttatttgtacagcagttaatggtgttgtaaaaagaaaaatatggggattgcttaaaatactgtaaaatagatggcaatattgctagagctgggactctggtgagcatccgtcatttttagtccttcttgaggacattgctgaaatttataagaggtcgaatgtttctttctttcctttctcagtctaaaagtaaagttatatgctctttgacttactatgattcaagcaatagattttgaagtcagtaatcgttaagctgggacataggatgcattctccaaaaacattaatctaattagacattagccaccctatatattttacatagattaatataaaacatatcctcattaaaaaatgtttttcttgaatgtaaaagatagtcttccaaaggatagaaatattttagttccaagagaaaagccatcatattacttgggatctgtagttttcatgcctatgaaatatttataatcctccctcaccccaaataaaaaatctcctacatgtgaacatagcctgtcactcatttgccatgaggtatgtgccatctccctgcagtgctatagttctcccattgtcttcctgtctggttaatgagcagctttgtagatgggtgtgtctagttagttcttgctttttgatggagttttttcctagaggccaactactgttgctctcgtttattatgatattgacattttgggttaagcaaggtgggtgggaaaggtggtcagatgttaaatataacttattaggaggaacagtgaactgtgaagtggttagaaaaaaaataaaaacttcttattagattagacctaggaaattcaagctgacccctttgcctaacttccctagagaaaaacctagaacttggtcatccctttataggagacccctaagttgttctcagggtttggagatgatgttctggagggagtacaagcaaataatctacttctggtaatctgagggtgctttgcgtatttggccattgctcagaagaatagaggttacattatattacattatatgaaaattatttagtttttctatagccctttgtagtttgcaaagcacttttccatatgtgtgtcctctcttccacaccatagccccctgaggaagtaattgttgtccccattttatagatgaaaaggctgaggcacagaggagctaaatatcttgttcaaggctatacaatgtgtgtgattattaggcttggaatcagggcctctaactctaaagcacatgttttttcaactatatgcagaaattgcctagccatggacacaagaaagctgggaggaagagttctacttgtggatgtttttaattttttttaaatatcaggagcaatccagggccatacagctatgaagcacttagtgaaaagaacacaagaagatttactaactgaagttagtattagtgattagaaaacaaaactgccagtttgtgcttcattaaggtgaactcatctctccaagcaggaagggaaaatttgctttccctagcagttgctgcatatgtgtgtacagactgcacaattctaagaaattgtgcaaaatggcatacctgtctttctcccagatacaccgccccctgccccccccaaaaaaggtcaggattaaaggtggtgagaagtgaacatttattaaacagaagttaaaccaatagagagaaaggaggtttgttggagtctaagaggattttgaccatgtagaaattccttgaaacagaccttaaaaggtattgaaaaattgaatcacaaagaaagtttacctttaaatacttgttaatggctcctagatcatggttataatttttctcaatgggaaaaaaagtcttaaaatttgttttaaataagatcctctaatgtctcgagctttttgattctggaaataatttgctttaaaatataaatcaatcagaaagtgatctaccactgaaatcattctaggaaactagcatgggatgcactgcacaatgttctttcctctaaaggcatgggccccataaactgtggcatctggcagcaggatgccatcagtcctttagaaagcctaattttgggccgggtgcggtggctcacgcctgtaatcccagcactttgggaggccgaggcgggtggatcacaaggtcaggagttcgagaccagcctggtcaacatggcgaaatcccgtctctactaaaaacacaaaaattagccgggtgtacgtgcctgtagtctcagctacttgggaggctgaggcaggagaatcacttgaacctgggaggcagaggttacagtgagccgagatggcgccatttcactccagcctgggcgacagagcaagactctgtctcaaaaaaaaggaagaaaaagaaagcctaatattgggagaatgtttgtgtaaggattggaaatctgtttatttttaaataagatagcactgatgtgaatcttatttggaaattacagatactgccattaagcgatgcttttatcttcattaattcattttggtaagcgcctatgcatttctgatggttaggtgccctaggtagtgttaagtatgtccgtgtcctcccttactcccctctcgctccctctaccctctatcccctagggttcttttattaatggaatttctccagttatagagaaaaaaatgacatttgaaaactaaagctcatttatattaatactaaggtcctgtgggcctagtgcgttactcttcccagtgatacctagattttaagagtagagaacagaggaaacatgggatgagaggagagaggttttttagacaacatttgtagacacctcaaattatatcactgttctctagcgccaatattcccaggtaaattgaccattaaagcaatactcactgacctactagtttattttggtcagctgagtaccatcaggatatttaaccctttaagtgctgttttgggagtagaaaactaaagcaacaatacttcctcttgacagctttgattggaatggggttattagatcattcaccttggtcctacactttttaggatgcttggtgaacataacaccacttataatgaacatccctggttcctatattttgggctatgtgggtaggaattgttacttgttgctgcagcagcagccctagaaagtaagcccagggcttcagatctaagttagtccaaaagctaaatgatttaaagtcaagttgtaatgctaggcataagcactctataatacattaaattataggccgagcaattagggaatgtttctgaaacattaaacttgtatttatgtcactaaaattctaacacaaacttaaaaaatgtgtctcatacatatgctgtactaggcttcatcatgcatttctaaatttgtgtatgatttgaatatatgaaagaatttatacaagagtgttatttaaaattattaaaaataaatgtatataatttgtacctattgtaaaaaaaaaaaaa

SEQ ID NO: 90326 - DNA, 1258 bp, Homo sapiens
tatttttttttacccctttattattccattagggacccctgccggccgtattattatataaaacaatctgccccttgacataaaaatgcaaatttcactatacagaggtaacacaccaagcacagtaacatggcccccatatctctagtatttcaatgaaataaactcattgtgaattcaccccgagttgtgtttataaatattagacaaaccacaaaatatattccaaatacataacattttacaatatttttcaagcacagacaaatacatactttactttacctacattgttttcatgatccaacttgcattagcactaaaggcaatattgtgtgtgtatatgtatttgccatatgtgtgtgtgtattatatatatttatttatatccacaaatgtacactcagtggcatttatggaaaatttaaccctttcaggctgtgggttttacccaccatagtatctgagagggagaagaaccaataatacgtctcaaattcctcaattagggcaaaataagcacaattatgcatgaggggcatatatgttgtgtctattcaaagacacacatatatacagattcatatataaacacacatataccaataatatggaatatacatatactcacacacttgctttaaactctatatctcactctataatatactgtccatctctggaagcaggcttttcctcattcgattcaggcaactggtgactatcttctaacaaaacttaaatggatgtttctaaaaggctctgattctatgccgagcaaatggcatttcaagattccagtttaacttttgatggctgtttaaattcagcagaccctattctgtcaacttcttcacttaaaaacatttctattcaacaatgaagtttccacctaagagaaaagagatgttagctggaaatgttaaaataatatatttattactccttaagataaatctgcatcgttggattacatgtgatatttatactatcatattttttaagtattttacaatggaaaatatattagttccataatttaaaaaatattatataatattattttgaaagactgagggccagatgatttgtcatagtcagaactttagagaaaattatatgacgcatgatcagaaggggactaattttgtgcagactacactgaagttgccctatgtcagaaaggatgacttagaagtcgtatgagaaaagaaggagaaaaaaacaaatttcaatttcaaagctagccatctgcaag

SEQ ID NO: 90327 - DNA, 946 bp, Homo sapiens
  misc_feature (1)...(946): n = a,t,c or g
attcggcacagggcagatcttggggccgcttctaccggcagatcaaaagacatccggggatcatcccgatgatcggcttaatctgcctgggcatgggcagcgctgcgctttacttgctgcgactcgcccttcgcagccccgacgtctggtaaagctgggacagaaagaacaacccggagccctggaaccgcctgagccccaatgaccaatacaagttccttgcagtttccactgactataagaagctgaagaaggaccggccagacttctaagccaggctgggctgccagtgccatgcaagccacagccagccagcccatccacttcttccactcctccccgcaggccccaaggcatcactccggccaccctgtcccgctactgcttacacaggccgggttcccacgcagaggggaggctgctccacccctactctcctcccttgctcccagcagcggaagcgcctctgacccttggcttgagtcccacgtgggggaggaggaggcaggcagcaccagcaggggtccaccaagagcccagaccagcccctctgccctcctacccgggcctcgaagggtgtggcacaggctacgtgttgagcgtggcctacgtgagccaacaagaagcaggggcctctgagtgccaagcgacgtggcgggctccacgttagcccaggctctgagagccagcccagggncgggcgctgctcagcttgggctggtcccagggcctgcccaggctggggcacctttgcctcctgaggcgcagcgcactcctcccctgcccaagcctactgccttcccgctgccgccagtaccccctccagccccacacctgggcctccccctgccactcccctcccttgctcccctctgtccccagggatcaaacagaagccgccgtgggcaaaatacaatttcatttaacgaaattgaaaaaaaaaaaa

SEQ ID NO: 90328 - DNA, 431 bp, Homo sapiens
ctgggcctgtaaaatcagcctaatgatacatggcaattcaaacaaacttttcaagaagattaagtaacagcatggatctcagagaatgtatcaactgaaaattggtataaaatacaggaaactattatcattatttacactgagatcaactctaaaaaaatgtcaaaaggaatagaaaacaccagaaaatgagaataaatgggaaaagttttgagcagagaaggaacatttttaaaatttaccacaaagctccactatatctaggcataagcactgtatatactttatctattatcttacttaggttatgtcattaagtgatgtgaactgattttgcctcctttcaacctttattttttttgacgcttaaatccttcccctgaaaatgatatttttttctgtttgttcagcactgggctacaaaacattat

SEQ ID NO: 90329 - DNA, 417 bp, Homo sapiens
  misc_feature (1)...(417): n = a,t,c or g
tgtttaggcagcattttatttatggaaaataacaagcaaatgcccgttagaataaaagcagagcactatcttttgccagtgacagtacaatgtggtgacttcaacatggaaacaatatggttaatctcctggtacatttctctgatattatgaaaaaattgtgtttttgtctaaagtgcccaaataaagcccaaggagtaaatgtaatgtggtaatcagtcacttaaaaaattgatactgcaaaaataaaataaaaatgtggatataattaagggtcagaatagggcacattttgaagagtttatttaacaaatcattaaaggacatttttataagtatagtctcaagtagctcttacctctatggtttttaaagggttaaagaaaaatagaagacactaatagttgtgaatgtatn

SEQ ID NO: 90330 - DNA, 763 bp, Homo sapiens
aataatttcggtacatttcccttctttttgggtacttgtgattttcctcaatgcactagtgtgtatctatggaaatagagcgccagtgtcataaagtagcaggaaaatacatttttagtaagtctgttttacaagcttatactcatagacttggacttgagtaaatttggccctattaaatggcatagaatttgcctggccttaatgttagagtaagttacagtatagcatttaatagtttatttattttaatggatagcacatatatatattgtgttggaatttctttttatagtatgacacaggctatattaaaagactgcagttattgcttgctgtaggaattgttcatgttccgcaacattgtgtacatgtatataataacccttttcctgattaaaagaatagtacatgggtattgggggtattcacagggggtaaaatacaactctattttaacacagaaagacaattcttaaccagcttggattggttacactataacactttcttagtgttttagttagctccctccttttaatttttggccatttccttcaaccaacagcgggggcattttgataataaagaatagcttaaacaagcaggccgggggcgggggttcatgcctgtatctcccacacctttggaggctcgagcggctggtttcttcccgcgacccgcactttttttccctgccccctttttcccccccgcttttgccaacttttaaccgaggagcgccggcgcccccctccgcccc

SEQ ID NO: 90331 - DNA, 630 bp, Homo sapiens
ctttctttaaaagtatcaggaaataattttatttttaaatcctaaggcggagatgtaagacagatcttgtagcatttatagttgcctagtagagaaaacaatgagtatttacttatgttcatgaatctgatttttaaattgtgctgttacagggatatacatataaccttgcaattgttatttctcagtgaatacttttacaatagaagttttaacgatgtaactcaaatatggagaaacaacaccatcttaaggtattcagtgatggtgatgttaggaaaggtcaaaaaatagatactgattattgggatgttaaactgctgcttttgcccttggtaaccgcgccaatgttaatatgaaatatatagtatatacatttgataaacatttgttaacttgaatagtgtgtctgctgttttgataagattctacaactgtcattgggatacatactaagttataagaagaccattttagactttcccagactaagatataatgttgcattgtaaattaaagtaagttggaacagggaagctattttgtttttaagagcggggaaaaacctaactctaaagcagcttaaatgatttctgggtacatggtttcatttttaaaaaaatgggctgc

SEQ ID NO: 90332 - DNA, 423 bp, Homo sapiens
aaataatacatgaacacacatgtattctcattcaaactttgtggaactatatgaaataaaatgtagacattctctttccccttgctttcccatctggtcctttgtaagtgttagcgtaaagatagttatgttgacatatttaaatatatgttgctgctgctgtatttttaaaaaacataaatgatactttattataaatattactctagtgtttgttttttgtacataatatgtgctggaaatttttttatgtcagtatgtcattcatattattattgttattataaaaatactacatgcacaaggaaataaaaattgaaagatttaaaatggaaagttgaggaagatctaaaatggaaagtgaaaaactccacctatccccaagttccatcccttagaggtaactgcttttcactgtatttg

SEQ ID NO: 90333 - DNA, 652 bp, Homo sapiens
gtaactgactgcttccaaagttatgacttaggtttcatacaatttaaattgagtcttactgttggtagcttagtctagaccatgctctctgcttgttgatagctcatacctctctgatatttcattattgaagtaggaaaacccaaatgaatttatcaggaaacaattggaatctacagaagggcttcttaaaatgcttacaatgttactttcataaaattaaccccactgctttagagccatttatgccgttaaaacaacttacgaattatgttttcttcttgttttgttttgcgtgacagctatcctaaaaaaaaatgatggggttttggatagatgaattaataaaaatggttagataatgaagagatggctggcagaagtggccgcctatttaccttcctactaggagtcaaatgtgttttgcatctctacacagattcttaaaactcccccatagaaattaatcatcatctcttgttttggtaactccattaggatttctcagggtgtcactcagaacctgggaggttgaaaagagtcggggcagcaggcgcttgtgcaggaaaggagaaaaatagaccgagggctctgggactgggagactgtcacatggaaccccactatggagccctcttgtttaaaatattta

SEQ ID NO: 90334 - DNA, 869 bp, Homo sapiens
atttacattaatgcttaagagtgaactttttaagtgtgggtaaaaacgaaataattacttacaaagtttaattcttccatttcctttgagagaggaaagttatggaaaagcagctcttatctaaagcaaagagcccacagattgatttcattggccctggatgtatttaatggatttttactatgcacataatttccagaagcattgttatttatttattaattataaatttagtgtaaccatttcatagggttacacagaactacccagttgtgcatgtctgatgtaatttcacatatgaatgtatgaattacttgtcttattcatgttgatacagcctcagtccatggcgcatccgtgtggggggaccccaacatacccagaatcacagatatttttcccaactattcatgaacgtccagtttctttttcaccacctcccacctgcccaccgaaagtagccatttcccagcggcgtaagagcacctccttcctggaagcccaaactcaccacttccaacccctgctgaggactgttggccaaagtcttcttccacctggtggcagcccaactaactggacaccagaggccgtagttatgttgggtactacagccagtagagtaactggagagtcatgtgagatacaggtccatcctatgtttgaaccatctcaagtttacagtgactatagacctggactagtacttccagaagaagctcactattttattcctcaggaagcagtgtatgtagctggggtacattaccaggcccgggtggcagaacagtatgagggcattccatacaactcatcagtactgtcaagtcctatgaaacagatacctgaacagaagccagtacaagggt

SEQ ID NO: 90335 - DNA, 626 bp, Homo sapiens
atcagccactgcagctccctgagcactctctacagagacgcggaccccagacatgaggaggctcctcctggtcaccagcctggtggttgtgctgctgtgggaggcaggtgcagtcccagcacccaaggtccctatcaagatgcaagtcaaacactggccctcagagcaggacccagagaaggcctggggcgcccgtgtggtggagcctccggagaaggacgaccagctggtggtgctgttccctgtccagaagccgaaactcttgaccaccgaggagaagccacgaggtcagggcaggggccccatccttccaggcaccaaggcctggatggagaccgaggacaccctgggccgtgtcctgagtcccgagcccgaccatgacagcctgtaccaccctccgcctgaggaggaccagggcgaggagaggccccggttgtgggtgatgccaaatcaccaggtgctcctgggaccggaggaagaccaagaccacatctaccacccccagtagggctccaggggccatcactgcccccgccctgtcccaaggcccaggctgttgggactgggaccctccctaccctgccccagctagacaaataaaccccagcaggccgggaaaaaaaaaa

SEQ ID NO: 90336 - DNA, 1346 bp, Homo sapiens; identical to SEQ ID NO: 60420
  misc_feature (1)...(1346): n = a,t,c or g

SEQ ID NO: 90337 - DNA, 2660 bp, Homo sapiens; identical to SEQ ID NO: 60403

SEQ ID NO: 90338 - DNA, 385 bp, Homo sapiens
ggcacgagcctctgcccaaaccacactacgctcgtactcgtgcgcctcgattaaattttgctccccaaccatgtttgacaaaccccatatggctgaaatcgagaaatcccataattcctaactgaagaagaccgagacacacgacaaaaatccactgccttccaaagaaactattgaacaggagaagccaccatgcgaatcgtaatgaggcgtgcgccgcccatatgcactgttcattccacaagcattgacttcttattttacttcctttaacaggttaactttctaagatgctgagaggatggatcaacgttaaacgactgttctggccctttcacatcaaataactactgacaacgaagggcgcgcctgcctttcacatctg

SEQ ID NO: 90339 - DNA, 845 bp, Homo sapiens
cttttcttggcacgaggattacataaaaacccttttttatgaagttgaggactttggaaatattcagcaaaggtgagtcactgataaatgttggcgagatgactgcaaaagatttgggaagaaatcataaaaatatagaagccggctgcactcagattttcttaacatttttgagtttaagttcttgctatactttagagaaacctaagcttggaaccacagaagattatcacatgtttggttatgcagaaaatatgaaaactccaattactggttccatagtcaaaggatttgcatattttgaatatgatacatgtatatatttcatggtaaagtaaaatattaagaataacacatacatatcataatgatcttctactttaacttttattttcagctcaactttaactctttctgttaatagatctattgccagccttgatcacattgatgaaagggcttccactgtgtccatattttgcaatcaatttggagactaaatctgccagaaataaagtaggcaggaacaaggaaacttacgatagatcattgagctaggaaagtccgctcaaggaaattgctgttggtggtggcatgggcaagaatactgtgatattctttgttgaagaaagaagccttccctttgttcagaatcagagctggtataaaagactgaataccaatcaggcacagccaccttgggatattaaaccttttggaaacttgcgatcaggctggaaccatgcctgggacccctataatcaccccactctttttctccatcactgaatcctctttacatccttcctgaccttattaacaaactggccatggcatttattcct

SEQ ID NO: 90340 - DNA, 1340 bp, Homo sapiens
ttttttttttttatatttgtaccgtttttatttgtaaaaataaccatctgaatgcatttccatagtatattacagttaagtacttcattacgttattagagcattcagtagttgcaaaagtattaaactgtgcttgagaagattcagattgtttcaaagtcattcactgaactaaaagtcattttccccatttttacagtcatgacatttaccagagtcattcaactccaatttacataagaaaacattatagacaaaatcccactgaaatcatcaaacaatattttatgctgttacaaatatgttatgcaaaatataacactggcaccagatttgtatcatcgtgctttacaaagatatattgcacatgctagagcataaaatatgtagacaaaactaccaaataaaagatatttgcattgaatttttagatcacataagaaacgcatagaattacattttatacaaacactcagattgtcactatcttaaaatgcttttcccctataatactgacctatggtttatagtttcgtaagacgaaagcattttagcactgcaaaatcaaacaattcctatagaaaacttaagcattttcatattcatttcaatgcaagtacaaggggaaataggaaaaaagacactttatacattcaaagaaaagttgaaatgaaaactcactggtatcatattgctctgataacactcaaatgaaaaaatacaaaacattccacagaacattttcagaatatacaaatataaaaaggcactctaacttcatattacaagacaataaaacggatgagttcttcaaccaacacaacatataagcacaccaagttgctcaacagtacaaagaataactagtgcagcaaatccatttgatgttcttgttctaatttaataacaaaatgataaaccaagcagtgtttactgcctaaagtaccaaaacatactatggtgcccttttagtagtgataaatagaaataccctgagctatttactgtagaatcatagcagattttaggcaatttggagatagtaatgtatttagcaaagacaggcagacactggcaaataagtaagtgcaatgaaacatgatccttgtagttgtggttaaaatacagtctaaaaataacacaaataaaagcactaagcaactaagactcagttaaaaacccatttttttttcttagaaagctatggtgcaaacataattttatttctaagagatgtaattaaaatacagaaatgatagtttttaaagtcatttctttaaaaaaattttgccttggggtatgggagaaagagaaagagaggaagagagagagagagagat

SEQ ID NO: 90341 - DNA, 653 bp, Homo sapiens
cttgatgccacgtagtggggcattcgacttccccaggtctggggcacttttcccattaatttcaagataatgtcacatcaatctgtaactaattttatgatggttatacaacgtataactaattgtataactaattccatattcttcaagtgactagttggaaatagccatgagaaactggcttccgtatgttttacttattaattatttttcaggtcagacaggtaacatgcgacgtcgtaacaaggttccagggtggcacatctcactcgctgcatgaaaacacccaattgtcatgctcatgaacaacaaaaggatctccggatgtttttataggggctaaaacgtttatgtagtaaaatgctttgctggttacaattactttttctgctggcacatatgcagaggctgtgatccataacacctgccactcacaatacgcctctcagcagatggagcatggcaacccagccacgtatccgatgctggcagccaaaatgaaccacaaaaaaagtaccggtggccgggtgcagtggctcacatctgcaatcccggcactctgggaggctgaggtgggcggatcacctgaggtcaggagttcaagactggcctgggcaacacggcgaaaccccctctctactaaaaatacaaaa

SEQ ID NO: 90342 - DNA, 610 bp, Homo sapiens
ctcatattaatgctacaaactctctagaataactaaaacaataaaataagccacttcacaactgctccctcaagagaacactggtcctaggaccagatgacttcacagagctaactataagtgagataagcagatacaggcagatatatattatgtacagtagtcagttacgcaagtctggcatcataagagtttacctgacccttaacacacagctgtcaaatcctggcaattttggctcctcaatttttcaaaaatttgtcttgactctccacctccacctctactgccttatttcatgtcttcatcatttattacctggattactgtaagaatctcctaaatagtgcctttatctctagtattacaccttctaaccaatctattaaatgagagtggtttttgttccaacagaagtctaattatattgtgtcactgcttaaaatccctccatgactccctattgccaaatccaaagaatcccctcgaaggctttttaggctctgaaccttgccatctctccagtctcccctattgacgcacccccatctcacacccgcgcttttttgaaccatttaaggcaaaatttttggaccatgcccggcctccc

SEQ ID NO: 90343 - DNA, 973 bp, Homo sapiens
tttcttagtcatttcacttggatccaaacagaacaagaattaatattttgtgatttctgtacacctaccgagggggattttttttttctctttttcaaatgtaaaaaggggttaaacaaaataggagagctgattcaagaggactattaacaatctccttctcttatctgcttccctccctccctacagatctttctaaaagacatggtaagttagatagtaagatgtgaggccatctttgaaaaatgtcagctgtgtctagccccagggcattgggcgttccaaaagaaggaatacatttctttaaatgtatcattatttcggttcttaggtttttctcaggagtttatgtctgtcttgtttctcctaccattctcattcattcattaattcagtcagtcattccctgagtacctaccattctgccaagtgctaggtatctctagaaatcataagataaatgttttcccttcagggagcacactgtgtagagtagtgatgaataagcagtccaatataaagtgacaaaaattattaatagaagcctggaggaagaaggatctaaccaacaggtagctggtggaagcaggtgaaggagaacactcttagaatgaattctacaggtctggaggaggcttatgggtgaacaaatggacaaaggagtcaagtagaagaagggcagcgaggaagagggaacagaatgtgcaaggtcatggagctattaaagaactaaaagcctttttaataaataagtattttcttgaaaaagattctttttggagagagtaaaaggaaatgggccaggggccagaagaggagggtctgtcttatgataaaaaatttaacttgggtgggtactataccccgcctgtaatccggaattttggaagccgagggggggataactgacctaggggtcaggacacctgggcactgggaaacctgtttttctaaggcagaacctaacgggggc

SEQ ID NO: 90344 - DNA, 609 bp, Homo sapiens
agacattgactttatgctcaagtttagtggctgaaccaagagatgttggcattacagctcatccaacgccatcaagttagagtgctcgtgtctcctctcagctatttaactgtgcccctgcaaaattgttcagaatgaaaccagaaaaatctgcctcttttgcactgtagatgtctcttccatgtgccaaatgtggagattagatgctacaaatgaaagccaaataaaaaagaagtatctgacaaaagcatgggttagagggctttcctaatctgtgtgaggtcaatccaagggatgtttacatactgtagataacctacttgaacaaaaatcagtattatagagaataaatggatgtaagaaaattacatgtacaagttttgtatatttgttaataattttggaaataaatatgatgtactgcatctcagcaccttagcacttgttttaataaaggttaaatacaaggagaacaaaaatcagcattatacacaataactggatgtaggggggggccctgtacaagatttccctagggggccataattttggccgtaaagaagacgaaatggtttttccccatcctaggactccccccccccccccccc

SEQ ID NO: 90345 - DNA, 791 bp, Homo sapiens
gtaggctcaatttcccttagaactttttgtagttgaaataaatgaattaataacagtggagctgttgaggtagtccctagacctgttagatagcccttcactgggtggtaaagctggtgtttgcttttcatagctgattgagcatgctgcagacctgctttacatttttataggtcattgttttagaaatggagatcttgtctgtttccttgaaagccattttactgcagatgttaacaggtgttaagtgcatttaccttgctgttgttgcccttgactgaattaaaacaaacaaaatgagcagttactcagatattagtaacatgagatggaaaattcttttgggcatgcagaaatgactagtaagggtttagcttcttttccattgctttagatatctcaggcattgagacaaatggaaatcatgagaactgggagcactgttgaggcatgataccacctagctatttttgccttcttctttcttacatatatgtatatctcctctctgccagacaagattgccgtcattgttcaggttggggtaactgtgtgacaattatttgtacttagactaacatatgcttcagtactcaaagatatctgactattctaagcaagaaagtagtagaattgtacacattgccatgagatggcactttctgaggatactcactaaaactgagtttcttcattagaaaaatctcactttttatcatcatactggcataacagcattgcggtttgccgggaaatgaatactaaaatcattattggctttctcaccggcg

SEQ ID NO: 90346 - DNA, 722 bp, Homo sapiens
tttgggacccatcttcttgattcaagctgactcatcaggatgtcagtgcagttggtcaggctcaatttgctggtgtgtccagacattcatgagcctgtactttgtcttctgtatttcaaggtcctttttatcctgtagtgctccgggaaccatctgacttctgcaggctgtctctccatcatgttttgatacgtgattgattttgttgcatggggataacttggtttctgagatgacattagcagccccttttctgctgacatcggggggccttctaagcatgtcttgaagtgttcagagcttcctgtctcctgttaactgcatcctagcttctcagggttccaaaatatgatgttcagatggcaggactgctccagctggcacagattagtgtgaaaatgtcccttcctgtactagggcttgatgtcctaggaaaatggtacaggatttttaaaaatactcacttcttacttttttgcttctcatgaccaagcaaccactaaatacttagttttaaaaatttgtattaccaataccttctctgtattcagcaatatttttgacttaatggtagaactttacatatatccctgttatgtatattttttcccatacaccagttaggttaagggacatctttagcttttaaaaaagtacagttcgaaatataaagtaaaagcagttaagtcttttccaagtacaaagtgaattggttccaattg

SEQ ID NO: 90347 - DNA, 644 bp, Homo sapiens
ttttttttttttaaactggggaactggttttcctgagaaccatgctctttgatttgggacaggaatagaaaaacaaaagaacatggccaaatgctgctcctttttcccagagatagaaagcatcttttaaatcatcctccattttttttttgtcttttacattttttttaaatgatggaagagtaaacatttttttttctcaaaaaacaaacaaaaaaatctgtaaacaagaaggttcaaagtgagaacctccaaaacaaaatggaaagcctattcaaagtgcagggcccgtcctgggtggcaggtgggctgcaagtcacagctgtggccacagtttttcaaactgcagagcgaaattctttagttttacaacatgaaaaaactggtgcaacactttcattaataatcctaagtcagcatcctaacttgatcttttaaactccacgataccacaataaggtaggcaacatcaaggcatagtagagagcgcacgcctcctaagaacacccttgagtaaacattgacactgggacagctgccccccatactgccgatgagacggagagaacatcattcagtgcaaagggaaaagctcatacgttatcagcccaaaaaatggttttgcgaattccaccacactggac

SEQ ID NO: 90348 - DNA, 2973 bp, Homo sapiens
ttttttttttttgtttttagacaagatatttattttgaagttccaaatgacattagcagaattgtgatttttatgtttactgaatggtgcatgggataaaaaggggttctaaaacactttactagatcatccaaaccctacaatagacacttatggcatcaaaattcttgtaaaaggaccacttccctactccctccaccctcccctcaaaatacccatgttcacaaagaacaaaacccttacagcttaaccaacaaaaaacgtgtcatacaataattctaaggcaatggttctatgaagacaggagaggtagcaggctgaaccgcattcactgaccctatctctcagctgctcctcctcactagtcaggtttttcctgtgtaccccacttcattatttccatcatgcttacctctctgtttactggacattccccttgatctaataccaaacttagccagtctaactgtaactcagatgataatctgaccacttcctggtaagaacaaatggttaatgttgtcacagtgattaataaatacaaatatgaattaatttaacaatgaattacattttatcccatccaggcatgaagaagttaaaacctggactcactgaccctgtgttaaaatttagtgctaaatgtaagcaacaacactggagcattgttattttatcaagacacctgaacatagcaaaattaattttgttcatttttattaacataggacatactaaccaaatattatcatttaataaaatcaacgttacaaagaaactcactagcaaataaacaaacgatattcacttgactcttctcttggttgaatgattttctattaattagtagtacacagctatttttatcaatttatgcttaaactgccttatgatttcaatgaaatttcttagcttttacttgttgaataattttttcaattgggaatcttttcataattcaaaatagttcctgaaaattaatgcatccttcaatgtcttctacttaagctgggtgcatttaaaatacaacacaattctttgaaaggagactatgacatttgagcataaagcctataagaaaaagaaatgtcttccctccccccatgcttcacagagactatatgaatgttccatactcttcatatttagcaacaggagttccttagagatcaaacagcagaaaacaggaggaacttaggccatcaatggacttgtaaaacagataaaactccaaatgtattttaagattccatcttctccacagatgagaaagtgctgaaagggctcttcaacttttctttagcgacatcctctgtgccccaattagaaaaagagttgcaggatggtagtcctccttaaacagcacagactcaatctggaaagagtggcagaaacccctctcccccaacaatgtatccccgaaaataaactgccaagtgcaagagggacaatcttcagaataaataatattctgaaggactgacaaaacagactatttttagacaaagaacacaccaaatactccgaaatttcaggataaccatacatcaagtacttcgtgcaagtaatatttttaccagttaaaagtcattatgaaacacacattcttttaactgaatttcatatgttatataaaacttgaaaagtgtggcacatttctactattaaccattacattgttttttgttttttaaaaaaagtatatattaatcaaaagtatacattacccagaccttttgatttaaaatataactgaaggaaaatataaactctgagtaaacaggcattcttctacacaaacatgagttatttcagtaaaaaaacaacaacaaaaaagcaatttcaatgtaattaagccacctctgattaatacatattttcatgcatgtggaaaaattatttttaactagaactttaagaataagttccatagcaaacaagttacagcatttattcaataaggaatattaaaataattcattagtaaaaaataaaataacttcaaccatatacgtattataatttatcatgtacatactccaaaatccccataatttaattaggaaatttatagaacatctttttaaagtatgtcttaggaaaaccaaccaaaacaattggtgccttaactaaagagaatgtgcatacacattgctatttgacctatatgcaaaagtggaatgaaatacataggaaattaaggttactgctttcaaaaatttctggaatattagtacttaagtcaaaacacttacctgcagaataaaaacagcctgagtatttccaaagctgaagtaattttctgaatgttaaatatcacaagaatgaaaacagtctccattaagcatttacatgtggtttacagttgaggcagaagatgaaggtctgccaagcagttttcccatatcacctgaattctttcttcccttataaagtataagcttcaagggaaatgattacatataaaaacattccaagtgagttggggttcctgactgcaacattcaaccaaacggaaagaggaattttttaattctcctaagcaggacctacccaaccactgcagacatgagcattaattcttatgccagacaaggtaagcgtgtcctttgaaatcaaagctaagcttgacaaataactgtactggataaactggatacatgaaccacctcaacaaagatggtactttaagcatttatacacatgaaaatgatgaagtgtattatttagatatggtctttcttcatctttctctgaatcctgaaaggttagcaagtcattatactcatacatcttgtaatccctttctccacaaaatacatacacatatacagcttcatatgtcaatataatatcatcaacacagcataaagatttaagcagtagacacaagtcacatgaaagaggctctatgcatcatgtggcctgtccgaataaaaagcaaacattagaatgccatttcagctcgtgccg

SEQ ID NO: 90349 - DNA, 1915 bp, Homo sapiens
ggaattcgagatgtctagactggtgcgttgtggtctccggtggggccagatccccagaacagggagagactgcatacaagtctgagtggcagaagcttcaagtgggtgaggatcggtgtgtgagacccgcgagtgggcacgtctctgaatgtgaggtctcgggcagcacgtgaggtagaacgagtgtgagcgtctccacgcagtggctggccccgtggccggggcgtctcttgcatgctgttggtggtccttccccagttcctatctcccacccgcctggttccagccccatcccctctcccactgagtcacaggtttgagattcccagagaggccaaagacagctacaggaagtaccctgggggctcagctgagagagagtcacagaaaggccagagggtctcaggaaggtctggaggtcacagctgggctcacagaagctcttgggccctggcatcctgggtgaccggtgttcttgggtattggggacaggacagagagctcattctataaccacagttgtcttttaaaggccaccctctccagccccttgtcccccctgtgctgtgagcccaagtcccttgtgaccactcagtgtcccgtccccacccctccagccgcagtttttggctacaaactgtcacagtatacattggtaataaaatatttccccaacccctgtctgccgtgattggccaaaagcaggaggcagggcagcgtcatatattttcatctccagggagacaggtgcagttagggtgtggtagggcctctctcaaggggtccagaagagtgggggcccctgtcacaggtccgtggtgtccaggccagcgttggtgtaggatggcccctccagctgtccacttgcgcctgcctgccgtcctaacaggaccacgctcaggggctctggatctggctctggtggtgtgtggtggtggcctgtgcttcttgaatttcccgactgttcttgcccacatccacagagttgtcgtccagggagttgacgctgacagagtccaggtcattggagggagagaggtactccaagcccaggtctttgttggggaggttcagcatggggttggctcgctcagtgttgtacatgttagtccctgggatggcaggggctgagggcatcacccctgctgctgtcttcctggcctccttggcagccttcatagcttgaagcttccggttgtagctcttccgcacacacacgaaggccatggtcatgatcacaaggaccagcagcaaagccactcccaatcctatgatgacactgatgagctgtttcgacaggtctgactcctggctctcctgggagcccagcaccaccagccccagctgcagcagctgcatcagcgagtcctgatcattccggatcatcacactcagctcatcaagggtcagggctgacccattggggaagacaaagtaggcatcgaggtaggagtgaggtcgggcccgagctgcagaatctatgtcctgaatgtccacaatgtatactgtagtcctggttgcctgggtaagagccgcattaatcgcctgtctgttggcgcccacctcctccttcggtgtggagaactgcagccgcgagcggtaactctggtccacggtgaagagattcagggtggtggtggcttccaggaaaggacccaaggaaggtctgtccctggcctggactgtcacttggtaggtgccttggagagtggagtcgaggctggtcaccggctgaatgctcccagcgaacacgtcggcctcggaggaggtgaagatcgagaagacaccctggaaagggatggtggccccgtccttagagatgaagtctactcggaggatggagaacaggatgacgccattgttccctgaatcatcgtctctggcctgggagcaagagtggacaatatctgggggc

SEQ ID NO: 90350 - DNA, 2350 bp, Homo sapiens
atacgtggctgccgtctgtccccgctgaggaggtgcagcagccggagatggcggcggtgctgaacgcagagcgactcgaggtgtccgtcgacggcctcacgctcagcccggacccggaggagcggcctggggcggagggcgccccgctggctgccgccaccgctgccaccgccctcgccacctggatccggtcgcggcccgggcgcctcaggggaacagcccgaagcccggggaggcgggcggctgggggcgcggcggaggaggcgcggcggctggagcagcgctggggtttcggcctggaggagttgtacggcctggcactgcgcttcttcaaagaaaaagatggcaaagcatttcatccaacttatgaagaaaaattgaagcttgtggcactgcataagcaagttcttatgggcccatataatccagacacttgtcctgaggttggattctttgatgtgttggggaatgacaggaggagagaatgggcagccctgggaaacatgtctaaagaggatgccatggtggagtttgtcaagctcttaaataggtgttgccatctcttttcaacatatgttgcgtcccacaaaatagagaaggaagagcaagaaaaaaaaaggaaggaggaagaggagcgaaggcggcgtgaagaggaagaaagagaacgtctgcaaaaggaggaagagaaacgtaggagagaagaagaggaaaggcttcgacgggaggaagaggaaaggagacggatagaagaagaaaggcttcggttggagcagcaaaagcagcagataatggcagctttaaactcccagactgccgtgcagttccagcagtatgcagcccaacagtatccagggaactacgaacagcagcaaattctcatccgccagttgcaggagcaacactatcagcagtacatgcagcagctgtatcaagtccagcttgcacagcaacaggcagcattacagaaacaacaggaagtagtagtggctgggtcttccttgcctacatcatcaaaagtggaatgcaactgtacccaagtaatatgatgtcagtttaatagacaggccaaaacacacactgacagctccgaaaaagaactggaaccagaagctgcagaagaagccctggagaatggaccaaaagaatctcttccagtaatagcagctccatccatgtggacacgacctcagatcaaagacttcaaagagaagattcagcaggatgcagattccgtgattacagtgggccgaggagaagtggtcactgttcgagtacccacccatgaagaaggatcatatctcttttgggaatttgccacagacaattatgacattgggtttggggtgtattttgaatggacagactctccaaacactgctgtcagcgtgcatgtcagtgagtccagcgatgacgacgaggaggaagaagaaaacatcggttgtgaagagaaagccaaaaagaatgccaacaagcctttgctggatgagattgtgcctgtgtaccgacgggactgtcatgaggaggtgtatgctggcagccatcaatatccagggagaggagtctatctcctcaagtttgacaactcctactctttgtggcggtcaaaatcagtctactacagagtctattatactagataaaaatgttgttacaaagtctggagtctagggttgggcagaagatgacatttaatttggaaatttctttttacttttgtggagcattagagtcacagtttaccttattgatattggtctgatggtttgtgaactcttgctgggaatcaaaatttccttgagactctttagcattcatactttggggttaaaggagattcctcagactcatccagcccttgggtgctgaccagcagagtcactagtggatgctgaagttacatgagctacatgttaaatatttaaagtctccaaaataaaacaccccaacgttgaccttacccggctgatggttagccccttgctgcctgctccatgtgtcttatgagagcccgtagttacagggtcctctaatttgaaatccataagttaacaagtctatatcaggtgcagctggctttgattaaaggccatttttaaaacttaaaaactcaacacctcacagattataatagaaaaagaaatggcctcagtttgatctcgttcagaatgacccagattgtttctgctttgggtgcagctgtttagttcagagttatattacagagaattattttctgagataatcttaaactagaatgttcaaaactaattgataattgaagtatcaagatacgtagaacacctcagagatttttcttcaggaacttccacaaactttgaatccttggatt

SEQ ID NO: 90351 - DNA, 3261 bp, Homo sapiens
  misc_feature (1)...(3261): n = a,t,c or g
gcgtgcaagtccctgcctgtaacggcggcggcggctgctgctccagacacctgcggcggcggcggcgttcccgcggcgggcgcggagatgtggcccctggtagcggcgctgttgctgggctcggcgtgctgcggatcagctcagctactatttaataaaacaaaatctgtagaattcacgttttgtaatgacactgtcgtcattccatgctttgttactaatatggaggcacaaaacactactgaagtatacgtaaagtggaaatttaaaggaagagatatttacacctttgatggagctctaaacaagtccactgtccccactgactttagtagtgcaaaaattgaagtctcacaattactaaaaggagatgcctctttgaagatggataagagtgatgctgtctcacacacaggaaactacacttgtgaagtaacagaattaaccagagaaggtgaaacgatcatcgagctaaaatatcgtgttgtttcatggttttctccaaatgaaaatattcttattgttattttcccaatttttgctatactcctgttctggggacagtttggtattaaaacacttaaatatagatccggtggtatggatgagaaaacaattgctttacttgttgctggactagtgatcactgtcattgtcattgttggagccattcttttcgtcccaggtgaatattcattaaagaatgctactggccttggtttaattgtgacttctacagggatattaatattacttcactactatgtgtttagtacagcgattggattaacctccttcgtcattgccatattggttattcaggtgatagcctatatcctcgctgtggttggactgagtctctgtattgcggcgtgtataccaatgcatggccctcttctgatttcaggtttgagtatcttagctctagcacaattacttggactagtttatatgaaatttgtggcttccaatcagaagactatacaacctcctaggaaagctgtagaggaaccccttaatgaataactgaagtgaagtgatggactccgatttggagagtagtaagacgtgaaaggaatacacttgtgtttaagcaccatggccttgatgattcactgttggggagaagaaacaagaaaagtaactggttgtcacctatgagacccttacgtgattgttagttaagtttttattcaaagcagctgtaatttagttaataaaataattatgatctatgttgtttgcccaattgagatccagttttttgttgttatttttaatcaattaggggcaatagtagaatggacaatttccaagaatgatgcctttcaggtcctagggcctctggcctctaggtaaccagtttaaattggttcagggtgataactacttagcactgccctggtgattacccagagatatctatgaaaaccagtggcttccatcaaacctttgccaactcaggttcacagcagctttgggcagttatggcagtatggcattagctgagaggtgtctgccacttctgggtcaatggaataataaattaagtacaggcaggaatttggttgggagcatcttgtatgatctccgtatgatgtgatattgatggagatagtggtcctcattcttgggggttgccattcccacattcccccttcaacaaacagtgtaacaggtccttcccagatttagggtacttttattgatggatatgttttccttttattcacataaccccttgaaaccctgtcttgtcctcctgttatttgcttctgctgtacaagatgtagcaccttttctcctctttgaacatggtctagtgacacggtagcaccagttgcaggaaggagccagacttgttctcagagcactgtgttcacacttttcagcaaaaatagctatggttgtgacatatgtattcccttcctctgatttgaaggcaaaaatctacagtgtttcttcacttcttttctgatctggggcatgaaaaaagcaagattgaaatttgaactatgagtctcctgcatggcaacaaaatgtgtgtcaccatcaggccaacaggccagcccttgaatggggatttattactgttgtatctatgttgcatgataaacattcatcaccttcctcctgtagtcctgcctcgtactccccttcccctatgattgaaaagtaaacaaaacccacatttcctatcctggttagaagaaaattaatgttctgacagttgtgatcgcctggagtacttttagacttttagcattcgttttttacctgtttgtggatgtgtgtttgtatgtgcatacgtatgagataggcacatgcatcttctgtatggacaaaggtggggtacctacaggagagcaaaggttaattttgtgcttttagtaaaaacatttaaatacaaagttctttattgggtggaattatatttgatgcaaatatttgatcacttaaaacttttaaaacttctaggtaatttgccacgctttttgactgctcaccaataccctgtaaaaatacgtaattcttcctgtttgtgtaataagatattcatatttgtagttgcattaataatagttatttcttagtccatcagatgttcccgtgtgcctcttttatgccaaattgattgtcatatttcatgttgggaccaagtagtttgcccatggcaaacctaaatttatgacctgctgaggcctctcagaaaactgagcatactagcaagacagctcttcttgnnnnnnnnnntatgtatacacaaatatatacgtatatctatatatacgtatgtatatacacacatgtatattcttccttgattgtgtagctgtccaaaataataacatatatagagggagctgtattcctttatacaaatctgatggctcctgcagcactttttccttctgaaaatatttacattttgctaacctagtttgttactttaaaaatcagttttgatgaaaggagggaaaagcagatggacttgaaaaagatccaagctcctattagaaaaggtatgaaaatctttatagtaaaattttttataaactaaagttgtaccttttaatatgtagtaaactctcatttatttggggttcgctcttggatctcatccatccattgtgttctctttaatgctgcctgccttttgaggcattcactgccctagacaatgccaccagagatagtgggggaaatgccagatgaaaccaactcttgctctcactagttgtcagcttcttgggtaagtgg

SEQ ID NO: 90352 - DNA, 869 bp, Homo sapiens
aagcaaggaggggttgcttccctccctacctcatccatcccacacaccttggccttctgcaagccaagtggttctgcaaggtcaaggcactagtatcagatggcaagctcagtgcccgggattcccactgctggcaggagaaggcccattttcacagtccacagaagcgtgttaggctggggttgggggtgggatgggctggtgagaaagttcaaattccaggaagccactttttattggatataaggtatctaacggcaaaagtacttagtagcaaagtggccaccttttgattgattgggcttcctcataggaagcactgagggtgtgtctttgtacttggttcattgcccttcacctggtagagaaagagaggtcagaaatagcaagcaaaaagcaggactcccaggagccacaagaaaagagcacaggctgcaccaaagcaggggcagcagagaataaaatatccctttgaacttgtcaacaattaaaaaactgcaaggagtcaccttataacactatttccagtaaaggtggaattgagtatcagagggattactgcggtgttaaggtagccctgccacgtggctctccaggcagggccaagaagacagcacaaagtatgggtttggccataagctcatatgctgcccccaaagactggggagagctgtgtgcctcagtgttgcagtgtgaattcctaaatagagggtaaagtgagccctagccaggaggtgtttggggctctatcgcgcatctctcctaccaagttgggcaagagcttttaggagattcatccagctttgtggatttagaaaggaagccttcagttccaatcagaatcctctttcctttttaaaaaaaaaaaa

SEQ ID NO: 90353 - DNA, 373 bp, Homo sapiens
aagatgccacaataaactggattttggtttacattccttttatttttcctttctcgaaattgaagatgatttataagcctatcgctttaccatttcattttcttacataagtacaagggagccacttgcccacatacttcagtataggcatttgttgttgagtgtgtgaaaatacagctcgttactgcgccaattaagacccagatgcatttcacccatctagggcttcttggctaatgcatgcacttctgccttttaattactgggcccttattccttattttctgagagaaataatagaggatatgatctattacctttcaattatatttttctcagttatactaaaaaattgcatactcctgggatgtat

SEQ ID NO: 90354 - DNA, 873 bp, Homo sapiens
ttgttattaactaaattatttattgggtccagtaacgtattccataaatattgtacacataaaaattgtgttatttttattcctgtatgctcagctgcccaagaagcagtcggaggattaacatgtttgtgagatgcacaaatacattctgtcgcgaatattagtttaagtaattttatattaaactccctcgatacttacaatatgaattagataattcagaataaacattccattgggaaaaagctacacaatttgttataaaacatccttaaaagcatcagaaaattaatacagcaatgaagaattacaggaccaaattaagaatggtatgaaagcctgtttgtgacgcttatgtttgggttatctctttatttgagtgactataaatctcaaaagagaactaaagggagaaataaccgtatctactaacatgctaagggtacttaaacatctcttagtaattgagaaaattgaaagaaaagaaaaaagagaaagggagaaagagagacagcgaaagggataatgaaggagagaaagaagaagagaaaggaagaggaagaaaagtaaaaaggaggaggagggggaaggaagaaggaagaaaggtgaaaagaaagaatggtaaactttttaacaacataatttatccttctagaatatgaatgttggtctatttgatgatgtcccacagattcattagtctctgctcattgtttattttttattctttctgtttctcagagtattttccattttcttctcttcaagttcatggcttcctctgtgtgtgcaaatatactcttaaatccctctggtgatttttaaatttttatcattgtagttttccactccagaatttgttatctctttgct

SEQ ID NO: 90355 - DNA, 2061 bp, Homo sapiens
  misc_feature (1)...(2061): n = a,t,c or g
aacgttattagctgactacgccaagcttggcacgagggaactggttgaggctgctcctttgattttatgtcgtgtaaagtctttgttccccagccccacccctgcctcctcccatcgggaaaccccccatgggagtcatcagtgggcgggagtcggtgcctgctccagtccagccctgccttgggagatgctggaggaccctgtcgccctgaaggcctgtttgctgcacatctgcctgcagagccaaacctcagggcccggtgcagtgtccagcctggtatctggcatcccagtagcttccatgttctgtgtatgtgtgtggtgtgccccttcctcccactgtttgaattcactgaaaagcccccatgtctctccaactggctccccacagaccacttctgaagggctcacctgttgtcactccctcctgctccctcagtcccgtgtcatgagaatggacggtgtccagggcttccggtggggtctcaggagatgcccatgctggccctgcccgagctggctttctcggcctgggttcacagttcagctccatctctacgctgggcgaggagcagacagcagtgggactccatgggttctggatccctttctgggggtccctgtggaggcaaccaggattttcaggagcagccagtcagcagctcagccagggatgacagaaccatccctgcttactcacctctgtagtgtgagggtctgtgggtggtgatggaggagggactcagggagaggccggtgaatacaggggctgacgctcttccctcgtgcatcctcctgcagtctgacagaaagcagcccaatagcggggcaacctcagggctaccagcgatcccctgagagtggggtgggcaggttcagctgtgagagaggctccggcagagcaggtgtggactaagccccctgaccttcacacctgctccccagagaagccccagccagttgcaccaagtagcagaggtgagtagaggggcctgggggcttccaaggccccaggtcatcctgttgaactgagagggacaggtagcccccctgcctgcggcccctggccccatgggcacctgagggcagtactgcatgggaagagcccaggatgcctcaggcctggcaactgtgacaagtatgaggaaggagagagaacgggaggggaatcaggcagggcgcattcgaggaggccagaggtggcgaggcaggcttgccctgcacaaaccacaacagaagttgcacacagaagtcccagggacctttgtgctgggaactgaaagagtggggaaggtggaggggaccatttcagagcaggctggaatcaggtgcttggaccagtgaagacatgtcttgcttcctccagctctctctggggccctcccactctccacacccacagcagagacaaattgaggcaagagttgagagagcatctgtctggtgaggtgatgggagcagtgtgcatggggcaccaggagttcctccatcccacctgccttagcgatcaggactttaggggggcctcttcaaagatagtgacccttctgccctgactcctgcccatctaaggacttgatttgctgctttctgaaaaccctggggctgaaaacttcaaaatcagggcctggcagagcctagcttcgccaaggtcagcccaccaggagccctgccttcgtctccataggaaggacacatgtacagcccttgcccccggccctctcattcccacttctgcttggcaatgctctccatctcccttatgtggactcttgttcttgtctgatctcttgtcaaattgttattttgtaatgaactgcgtctccttattaaagaaatgagctgaaagaaccctgggggtggggggtgtctctggttgtttttgctgcgctaaggtgggggtgagggagtgggagctgcctgtgagggtcagtatggtgggtgagggtggtgagatggtcctaaggctctggcttctaacccagaatctcccttcagggaagcaccaaaaggggctgaggaagtccnccgcnatagcctatcgatctcgatggggcgcag

SEQ ID NO: 90356 - DNA, 1257 bp, Homo sapiens
gcttttgcagcaatccctacaaacacattgcttttggaacagaaggcactagatgaaccagccgagactgaaagtgtctccaaggacaacacattataaccaccagtggagactcctacaactcttccaagagcagctggtcgagaaaccaaatatgcaaatctctcctcaccaacttctacagtatctgagagtcagctgactaagcctggagtaattcgcccagtacctgtaaaatccagaatattactgaaaaaagaggaggaagtctatgaacccaaccctttcagtaaatacttggaagataacagcgacctcttttctgaacaggatgtaacagtccctcccaagcctgtctcgctccatcctttatatcagactaaactctatcctcctgctaagtcactgctgcatccacagaccctctcacatgctgactgtcttgccccaggacccttcagtcatctgtccttctccttgagtgatgaacaggagaattctcacaccctcctcagtcacaacgcatgcaacaagctgagtcatccaatggtggctattcctgaacatgaagctcttgattccaaagagcaatgaagttggagcagaggctgaaaacacaggctgctgaagttttttggaatgctggtgctaaccacttgctagatttaacttttttttttttccaaaaggagtgctccttttatgagcggcagtgcaccaaaaccaaaaaaaaagtttgctgcaattatatagcgatcacagtggctctgctaacagccagcataaaaaaaatttacctacagctttttgcaccactgttctagcctttaatgccttctacttaatattaagctgaccgcaatactaacgtgcccctatatttggcagccaaataaagaagaatcgtgggtaaatagaagaatggctgggactatttttcaatacaaattttatttaatgcatacatttctaactgagtcaggtttttattccccttttacttcacttttttacatgaaaaaaatcacaacttttaaagtaactaattagctttcagaagacgctgatattcagaggttctctggtgagatcttgaacatgagaaagttggtattttgtataacacacattgctttcctgttctgttgggattcggtgctgctgggacagactatgtgccaggagcagcccagtgctgatgaacatcgcgttactggagtgtctgtgtctgggataccactgtctctctgcctgtca

SEQ ID NO: 90357 - DNA, 1050 bp, Homo sapiens
ggaattgctggtagatgcgtttccagaacgaggatgccatttactgcgagtgttaaaaaaaacgttgggtgatgagggacacattgcagaaaaaggatgaagttgaccagtgaaaagttgcccaagaaccccttttatgcctctgtatctcagtatgctgctaaaaaccaaaaattcttccagtggaaaaaggaaaagactgattacacccatgctaatttggtggataaggcattgcagctcttgaaggaaagaatactgaaaggagacactctggcatatttcctacgaggtcaactatattttgaagagggatggtatgaagaagcattagaacagtttgaagaaatcaaggagaaagaccatcaagcaacttaccagctaggagtgatgtactatgatgggctggggaccactctagacgctgagaaaggggtggactatatgaagaaaattcttgattctccatgtcccaaagcaagacacttaaaatttgcagctgcttacaacctcggaagagcttattatgaaggaaaaggtgttaaacgatcaaatgaggaagctgaaaggtaatcctacctgagaacaagattaggtttgaaggaaatgctgaaaccgagaataacatgcctcactttctcttgtagactgtggcttatcgcagcagacaatggaaatcccaaagctagtgtgaaggctcaaagtatgctcgggctgtattactcaaccaaggagcccaaggagttagaaaaggcattttactggcattccgaagcatgtggcaatgggaatctggagtcccagggtgcacttgggctcatgtacttgtatggacaaggcatccggcaggatacggaagctgccctgcagtgcttaagagaagcagcagaacgcggaaacgtctatgctcaagggaatctcgtggagtattactataagatgaaattttttacaaagtgtgttgcattttccaaaaggtgaatgtctttgtctgttctgtgctgctgtaacagaatatcacacactaggtaatttatgagaaacagaaat

SEQ ID NO: 90358 - DNA, 629 bp, Homo sapiens
  misc_feature (1)...(629): n = a,t,c or g
tactatttcattctttagttctgaatcttatttatgataaagtgtcagcttggggtccctctaccacatgtgtagtatgaatttagatctcacatctgtgaatggtgcaggactaggatccagtttcttccaggtaactttttccattcctagtcccaaatgcaaggctttctcttctcctagctagagagctgtttctacttcgcatttcatggatggagcagtcctttttgtttcttaatttatgctcagttccatcttgttttgggctgagtacatggcctgtggcctaaactcttttgtaactcctagcgattcaggtattcatgtgtatcatttgtcttcagctctggacttcagctctgtaatagccttttaaatgagctcctctgattccactcttgtacccctaataatccattcccaacacagtgatcattaatatatttacattttagggcctgtgtttttagcttcatctggcaccattcctacccatgctacctggccatttatttccctaatgccttgtgnncccactcggttacagggccctttgaacttgccatttccctctggctggaatggtttttcactgccacccaccctctttcttcttatcaattacc

SEQ ID NO: 90359 - DNA, 405 bp, Homo sapiens
gggaatgaccacatttgtgtgctgaaataacatttagtactagagataaaactggaataagtgatctaaactttgaaatgttttgaatgacctttggctacaaagtcaaattataatgctttctatttcttaagataactctttatggaagttctagtatgtacctaactttggcaccttagatttgccccacactgaatcttatctattaaacctatctcattctggggtgagaacccagatgtgtaaaatcgtatggccagaggtgactgagaagtgcattttgactatgtttcatagtcttttatccatcttagcataatctttttaccagcaccagtggagttgtgaactcgctcaatttcttgtgatgtccagtgtaaaaatgtatgcctataaatgtaa

SEQ ID NO: 90360 - DNA, 624 bp, Homo sapiens
gaaagaagcttttactaagatttactcctctcaaataattaatttattattttcagtgattggagatcaagtaggtgaaatcaaaatatagaaaattttgctaataatgcccattttgttgcttggtatacttttaaatatactactttattccagtatgcatttgaagcaagaaatccattttgtgttttctaatgactttagaatatttctgtttaaggtagagattttctaaatattttgatatgagttgaaaataagtttttgtttactgttttatttagagttgacaaaaatattttgaagtgttacttacaactagacagtatttgaaacgattccttaattccatgggtttttgttggtgttgctccattatgcttttagtatacagtagaactcaaacattcaagaagaatgttatctgagactctataggtcccactataattaactaatcctcattttgaatagatctaaaacttttatttttctgggtcaaagaatcattgttttctcaaagacctccttacttttatgacaagcactaatggttgggctttttgaaaaagaccttatttttaattttaaaaaaaatggaattttttactgcattaattaaag

SEQ ID NO: 90361 - DNA, 2317 bp, Homo sapiens
tttttttttcagttgagcagacatttattaagcacctatcaagtgcaaggcactgtgctaggcgccgtgggaaatacagagaacacaggcggtccctgcccacgaggagctcacagtctagaaagggcagcaagacagtacacaatcagtggcagcagcaccagccagagtggcaagtgctcaaagcgagacacaaagtgctgtgcggtcacaacatcatggggatgcttctggcagaagcactggaaaggagacgaggactcaggctgggccttccaggagggaagccatttgggagaagggcatctctagcggagagaggtccatctgcagagcccacaggtcatgggaaacatgtggctgcagggagagtttggggacagtcaagtatggctgggaggtggacagccacggacactaagctcaggagatgtgaactttgtggtctggtcaaacagccactgcagatcacttcgcaggaggaggggtgactagaagtatgttactggaaggtaaatctggccacactgcagcatctggacggcagagggcagcgctgggaggggccagccagttagggccccaccacccctgggtgtctgagagtgggagtagcgggcaggggccagcaaagcacgagggcagagcaggggaccatacggagggtgggtgtggaagaagggaggggccccatgcaagctgcaggtctggggagcctgaggatgtcatagggcttcctggtagagtggaaagtgcactcctgaaggtcagggccagtcactacagagaggggacagcgaggagagggacggtgtggccctaagggtgactgcagtttctcaacatgtggtccgtggatcacctgcatgggaactgcctggggaatgcgctcatttgcagattcccgggccttcctccagaactactgggcaagcatctgccgggtcatgcccggtaacctacattcttaacaccagctgccctctccaccaccacgagccccaaaggtggggaaaagtctgcaagccacctgcagaggaagaatagggtgttaaggactggctttaggcaaaaagaagagacaaaaagaatgagggaggtctgggagtgagggaagtggtgggaagcagggaaagtccggtcaagccatgtgcaccaagacagagccccagcgcggccttgcagccaggcaccgggccgtccccaagggctgctctcagtccgctttcacttggtgggcgaaagccacatttgcaaactgggaagtggagagtgggaggtgaggggaagcactagcaatgaatgaagaggattcttccgggaatcaggctgtttcaatctaaaacatccaagataagtggaaaacactggggaggaaggtgatgaacagacggaggtgagccagagacaccgcctgggcaagtcggccaggaggcgggaggcgtgggtcagagacactgcaggaactgggtgaggacaaggaggtgcgaggaaaggggttgggggatggtcccacaggcagccacacctgaggcgtgggaggcaggtaggagctgggggagggcggggagaagaggggtttctgtgtgtagatctgagtcctccctcacatcccagccgtgccacaagccgcatcggcatgaggccggctctcccttcttcactggtctcaaaagccacccaggcccaacgtcccggccagacagccgagcctgcctagcaacgctgaccggccgcccaggatggcccagacaccttctgtctcctgaatgcagcctacaggggttcaaacagactgcttgcattaaggtaagacaaggctcttttacttccagagacagcggcctggagcctcgggaagaatgtaggcccaggaatcacccagcccctcaggacaacctctctgagcaacagacatcctccctgttgaatgagagtgacatctctgccctgccacctactttacatggatgccacgaagtgggagagcctgagcagtagacagggaagcggcgagcggccccactgcaggaggtagacaggctacagatacttatgcagcagccacactgaggctagtactggaggaggctgggaaccagtaatgagttcttaatggtttgattaatttgggtttttaaatattaaatattaaatatcaaggggtttcggaaggaatgatgaattccgtctcatgctgtaactgatgaaggcaaccaatgagcaatccttccttcccatagccgagaaagggaaaggggacaggccaatccctctgaagcagtaagtcagaacacgaagacttacagaactcaaa

SEQ ID NO: 90362 - DNA, 2704 bp, Homo sapiens
  misc_feature (1)...(2704): n = a,t,c or g
gctttacttagatagtaaactatgcatagtattttatttgtaaccccatgtgttaagaagggacactgttaaagtaacaatcatttaaaagtaacaaccaacaaactggtatttaatttggtattttaaatagttaaaaatcaaatggaaacagtgtctaaagtcactaagataattcataacaaaacccattaatccaagctccacttattgtaaatagaattcaccatgagctaacctaaaatgtacctgtggagataaaacaagagtgtaagttagcaaagtattaaataaaatttcagggagcccctaaatttatttttaagaactttagaactaattctctatatgcaaacactgattaactcaaatatcttgtaagttcattcatacatggccttatttgaggcagtgtatttgtattcactagcaaaattcatgtcagtaaaatatttttgaagcagtttatttcccagatatttcactagtttgaaatagtcatttcagtgattagtctgaatttctattgaagcctaagctttgaatgaagacatgcttctgaaaataaggcagtttttctctagtctgcttatcaatagaaaacaaatctttggtttttagttaaagtgacaggaaggatttttgcaaaaagaaaaactaaagaaccaaagcaattaaaaagctcttgataagcaatggggaactccaaacccatcaaggtcagtagagtacctaaggcacctcagcttcagatgtgacagtcatctttgcttagagttctgataatctatatacatgatttttaccatcttgagaatgtgaagctgaaaaggtaacatccaacaatgattactgtgaataagaaaattactgtgataaatgggagagacgttggagatctctgttctacctcccatatttataatgaggaaaccaaatcccagtcaagaaacaggtgacaccagtttgtgtagacaaattcctaatctgtttctgttagggcagggcaaattctagacttctaactttgaattagtaaaccaagtgtgaagggtttcagagatatgaattggagccccctccccccaccaaaaaaaatcctcataaatccccaaaggcaagttggaaatgtgtaatagtttactgttgtaattcgtttataccatgtgttggacaactcagctaatatgttaattgatttatacaattcctttcaattttaactaaaaataagcagaccaaaattaaataagaaagttacataagattccatttgagcatacataaggccatgatactttaatgtgaaccaccatttcttggaagaaagaagacatccaaatgtccgattcagagagaaagttcctggccagtcatccagtagactctctccactcttcaatgggaaggtgatgcttatatttttaaaaatctctacaaagctcacatacaacaagacagtacatcctagatttgtgactgatatgagcatttaaggctgtcattttcaagtataaaagtttagtgttccattacccaatctgtgcagtagacatagctataagctcaagtcatgtgaattaacagaagcccaccaaagacatttaaaaaattataatttgggcaacagcaagtttaaatgtaggaaaggctagaaaaaatgtgatgagattgtttctctaaaatgcattaggttgttcacaatgaagctttgtctaacaccattatctgatgcatccattatctgatgcatggcatatgcaataaggcagatccacagcagaccaaacaaggaagctgaattaggtaatagaactagtaattaagatggttcacctctaacacagttctgtggccctgttccccccagagaaagattagaaatggctccagtgtaccaaataagcttcacagaagaacatgaaaattttcctccaacttttttttcttttttttttcaagcagagcctttcacttagggaccaactgcttgtagatgaaataaatcaacattaattacttctagcctgatgtaatatggctggagaaaaggggtctctggaagccggtattttgtttaacttacattctaggtgtgtatataagttgtcgctctataacttctgctgtggttccaacatctatatctgaaaggtggaagcagctgctctgttacaattttcatgtaacacgcttggattctaggtctttcctctttaacacaacttaaagaaagtttcttgtggtttggtcagcatacacacttctcatttcatttgatgtacacagccaaagtgggaattaaaaaaaaaaaattaccaactagttcagagagctaaattgagtctatcattatggcaaagtctgacccaaaattttaatttgtaattttagcatgtgtctcatgcactttggggagcgtcaaactaattttacaattgccagaagccttgttacagtttaatgcacattacctaaaatgtgtacatttttagtgttcatgataaatgcagttatgaccttattacacttttggcattctttaagaaagcacattaagctttaatatagaaatatttaggttacacttggtgctccaagtaataataaaacatttggtcctttttgatccccatacattctccccctcaggggatgggcccatctccngggacgcctgggaggganctttnggctaccgtgg

SEQ ID NO: 90363 - DNA, 545 bp, Homo sapiens
ggcacgaggctactttttaaaaaagtttaacaggactctaaattatatgctgtaacatactgtattctttcctgtgccacacagataagtaagcacctaccaagtacttatggattagccactgggaaaaagggaaatacatagattattacagtatgggtaaactattatgagaaataaaaacacaggttccaaggaggaaaaatgacctttggttaaggaaattaagaaaagcctcctggaaggggtgacatttgaaagctgtgtaggattagaatgtggattaattctttgacctgtgtagttatttctctcagtctccttatatgttaccgacatcatcagcattctacccaaacttgcctgcattacctggttttaataaatgattttgctcctaatgcttgagaaaactagggactgagaaaacttggggatgatttaagtgttggcctcccccctcacctctgcctgccacaagagaaacttgtctgatctcacatttaatcttaacctcctttccttcagtatcaggcctccctttt

SEQ ID NO: 90364 - DNA, 726 bp, Homo sapiens
ggcacgagggtagtgacaccaagtcctcagagaaatatagcagcagctggggcagccctgcagcaacttgggaattgaagtagcacctgagaaactggggaagccagcagtatgtatgacagtcccatcataaggcacctcagctctcccctcaggttggtgtgtcctaggggaattcctgttagatgatgtgccaatacacaccagcatgctttttgctaaaaggcagattctgcagtctaccatttttccatcatatgtctcagagaatatgggcaattgtatgtgatgtggcttgttctacagatagtctagagcaggagtcctcaaattgggttctgcagagggctagccttctgagagagagccttaaagatggtatgaggtgggaccaggaggaaacctgtgtgttttttcttcactgcttctcctagggtacctccacttcagcatgtttctaatatttgaggtctatgtaagattgtgtctgtgaaggacattttacactaacaaagatttaacagccatagtcttcaaaggaagtacatatcctggcctctgaaatgcctaagttaattggagaaagacagcgtctttaaaccagttatggccaatcacccggttgtggaaggaacccccacggtggtgtggggccaagaactctgcctgcagatcgcgctggcagaacggaggcttgtctaggcggaccgcctgggtgggcgggcc

SEQ ID NO: 90365 - DNA, 736 bp, Homo sapiens
ggcacgagcaatggtggcttaaaatagcaaaagtttattatctctttcagttatgtaggtggactggatgtaggttgatagatttgtttccatctctgatgtggtgtctgctggatagctggggcatctaaaatagccttactcacatggttagcagttggtgcttgttgccagctagaactcagctggagctgttgacaatgttcacatgttctcttgaacatggactttgtatgattgtttgggctgtctcactgcatgggacctagattctaaacagaagtgttataggtgaccaattggtagttgcagttttcttaagacaaatccttaaatgttacactgccacattccattggtcaaaagaggtcatagagccaattcagatttaacagataggggaaagtcatgctgaaaaagaacacgtgggatgagataatgttgtggcccttttaagaaatataattcacttaatttcgaaatttcctgtgaaattttgacacttactttgaacctttgacaggataattaccactttttcccaatagttttaaccttccttcttaaagtgcttttaacacctttccagaaaaccccctttacaacaggtggaaaccccccgatttaaagtcaaccagccctatactaccccttgggggtaaactggccccttcttcaccggaatccccggcacgaattggaggaaaccccccccccaaattcgtcccgtcttagc

SEQ ID NO: 90366 - DNA, 713 bp, Homo sapiens
ggcacgaggaaaaagggatggagggaagaaaagaaaaaaagcagagcaaagaaaaagagcagctgtggctacgtaatgaggctttgccatcttgtaaagaggatcgtgggggagttggctggctctggggcttcctggccactggttgcgcgtaggtgccaaacacctgactgcgtctagtgataccaggtgagcgggcttccaggcaggcatgggagaggcaccttgtgtattttattttcttccttttgagaacccattaaaatgatggcaaaggaattaaaaacaatacccaataaatccacagtgcaaaaagacctggaaaacatccattgacaagagacctaaagaaatctggggtgataggaaatggacagagagtgctcagtgacctcagagagcctgaagaacctggggaaaggagtctgatggaaactgagccattcaccccaggggccccagaggctgaggactgggccgcagaaggtgggggcaggaatcggagtctggtgcacagggtggcggagctcctggcttcccttccctaccccagccaccaccaccagcaggtccctctggcagaacaaagatttaaccctcggataatctgaaggggctctaaacttggaaaacacccgcccggggtggtaggaggccacaactctgactcgtaaaaacagaggaggttccctgacaaaataggttcccacacg

SEQ ID NO: 90367 - DNA, 623 bp, Homo sapiens
ttcgcggccgcgtcgaccctctatgtactatgctacagtcacaatagtctcctttctgtccttcaaacaaaatgagactgtcacaatttcagtctatgctttgctggtgcttcttctacctgaaacacgcttctcacagatctttatttggctactttcttctgatcattcaagcctcaactcaaatataatctcaaagaggccctcttctccaacctccttatctagaggagatgtgcatcagctctattattctacattttttttctagcaatccattccttcaacattactcttacattttattcatagtaataataactgaaatgcttttacatgtaattttttgtatttacttctgtttctctctccaatacaacataagctacaggtcaagactgttagttgtttagtacttttagcctgttcttgcctttcttctacagcctgtcttctatgacatccatccttgtatccagaaaaaaacaaatggaaggagtaaagcaactgagcagaagctagaggctgaaggggtgtatctgatattgatagaaattagagtgggtcaaggaactgataatggacttaaaagacagtacgagtacctaacagctataataaca

SEQ ID NO: 90368 - DNA, 371 bp, Homo sapiens
ggcacgagaagaaaataattgaaaaataggcctggcataaattttttttgtaaaattatgtgcttcattatgtctgacatatccacttctgaaataattgtgaaaagaagaatctgcttagttttgttaactattccgttgtaatacatcatttgcgcatttgttttcccaatatggctcatgatctgtttcctgttattaagtactctgaggatggaacttaagtcaaccaaacactaaatttcaaaaagaataaaatctatttctgtgggcaagtctttgaaaattattacagaacctaaacattggacttgttctatttagatgtctatatattaggacatacttttaaagccatagttctgtctacc

SEQ ID NO: 90369 - DNA, 338 bp, Homo sapiens
ggcacgaggactaagagctgtatgattagctaaataatttaacagtttgggagacagctctgcattgaatcattctgtgtttaccttattctgttttggcctaaagtccatcccattcaagcataccagttttagctgcttaaaattaaaaaattgaaaacattatcttcattgtagtgaaatactaatgatgtgtggaaggggagttggtggaaaatttaaatcaatttatttacttatgaaaagagagaaaggagacttgtactgccatatagatatggctgtattttatttaactaccttattgttgagaataaactcttgtctttaggcttagg

SEQ ID NO: 90370 - DNA, 409 bp, Homo sapiens
ggcacgagggcagctcaagcaggtttccaagttcctgaagtatttgcatttgtaattaataaactggatgtagaaggcttgtttggggtgggggtagggtggtggtataactagtatagttctctttttctcctcacttctggaaggtagctggttgctgatatagtggatgggtatgccattattatctcagaacagttaagggaagaaaatgtttggcttctaccctgttctgaatgaattattagagcacaatattagcatacatgaatcttcaaatttgagaatcctacttcatggatttctcttgaatcaaatcctgttgggaatcatggaagtctagtatatactgtcaaaccacaacttagctgaaagtttattttgttttgtttttctaagagacaagatc

SEQ ID NO: 90371 - DNA, 419 bp, Homo sapiens
caatctgccaactacatttttatacaataaaattatgcatctcaagtgattatctcgtgtcttagctcagatttcctagaaaacacaggcaaaagcttacgtgctaacactttattgggggaaggggtgttaaaatcccagggaatgaagagttagggaaatagagaaaccatctggggaatgagggagggcaagtcaaaaatagagtgttcttgagctgatcacagctgttcagcagaacagtgtgttgctcagttgggtgggatgcctcctgagagaccatatgcattacagaacaaaacagtgcctccccggggaaggaggataggcactttatatgcaggttccttacatctcctgtcacttactggtcacagagcgttaatcacatcatacttcctgctgatattaaccagaaa

SEQ ID NO: 90372 - DNA, 969 bp, Homo sapiens
tacggctgcgagaagacgactgaagggatagcagttctggttctcaaactcctgaatctgagaactctcgagatttccatgcgacagaatcccaaacagttctgaatgtctccaagggagaagcaaagccaactcgggcagatgcccatgtgaacagagtacctgaaggaaaagccaagagtctccctgtacagggtctgtcagaaactgttggaatcttacataaagtcaagtctcagaaatgtccgatgcttcaccatattcttatattctatgcaattgttgtctgtgcactaatcatctcgaccttctacatgagatacagaattaatactctggaggagcagctggggttactaacctccattgtggacacccataatactgaacaggcagcaccatctggcctgaggtcacaagtacaattcaatgtggaggttctctgtcaagagcttacagctaacatagtgaaattagaaaagatacaaaataacttacagaagttgcttgagaatggtgactgatcgaccagattgcttgggccatcggaatacctcatgtttccctttgaagaaggtgcttcctgaggcgttttgtttgagtgcaccctgctggtcagaggtgcaagcagatgagaatccagacattgcatgtggaggtctccagctcaggaaagtggggagggaaataattttggttcttgtgcaataaaagttgaccttgactctctgaggaagattttgctgcttttgcctgaagaaaacagacccatctctggaggtctcaggaagggcccagcgaacacactctcttggataattaccacgatggcgtcagcaaacactccaccctgtgcctttttagtccttcccgccctcctgcctctcccttacacccctcttaacgactttcaaactaaaggatacatcatatactgacaaactcaatgtggtcctttcaagaattagc

SEQ ID NO: 90373 - DNA, 594 bp, Homo sapiens
aatgactcaaaaggcttaggttatagtgttattagcgtttctactaaatgctgtgtgaccctgagcaagtcttgcagttttgaactttaacatcctcatctgtcataaactaaataaactaacatttcatgagtaattatgtcgtgccaggtacgttgctggtcagcttacttattatagttcatttaattcacctattcaccttagagaataaatagaatctacattttacaaatgagaaacctaagtttccagaatattaaggatcattcaaaatgccaagcaataagcattagaggacaattttactctaaagccatgaacttccttctgtttctaaaaagaactttaatatttttgaaccatattatatgctaacagtaaatttccaaattgccttaggtctggctttattatttttattatcatcaggtttcttatttgcagtgtactctaattattgaaattttatctatttgtcagggcctggacactagtgatacactagtggctactctatagcaatggcttttttctttgaaatcctaaagcatttattatctgatacccatttagtagttacatatttgggag

SEQ ID NO: 90374 - DNA, 381 bp, Homo sapiens
aaggccctgaaatcagactgtgtttaaattgcaacccaactgctcagcaagcagtgtgacctccaacaagacacttcgtccactctgttgtgttatttgtagaatggaaggagtagtatcctcttcatgaaattatcgaatacattaaataaaagaatacgtatgaaagtgcccagtgtagctaggataatatatattataattggtatattattaaattagctcacctagtttccaaaaatgcccattttgtaaacatgcaaactgaggttcagatagatgcaatatttaggtctcaataatcaagggataaacagagctgaggtttaagttcaagacaatctgacttaacgcttatatttttattatactttgtccctt

SEQ ID NO: 90375 - DNA, 341 bp, Homo sapiens
aaaagaagttttcctggtctctagagttactggaagatttgctgtagttttagaaggagccaatgagtttgatttctaaagttttgacaacattgttttttaaaggttaaaatggaatttaaaggaagtgtggcttgggttggcttaagggctgagtgaggtggagtgagagaaatccatggggagtgctgacagtggagatttccaggactggtgcttgaggctaatttgggttttaaatttagaaaagagaatgcacatgaaatactttaatttgctagtggtacaaatctctgtatgtagcataatgtaaagctaatgacaatatattttcagaagct

SEQ ID NO: 90376 - DNA, 331 bp, Homo sapiens
gcatatttagcatttaataacctaaatagcctattgccctaaatatttatgatcacaaaccataaaggaaagaaaaactaaatttcctttctaggacaaaaggtgaagtcattacaaatatctccaactatatgacagacctttataaaaacaatactatgtatgtatttttatctactttatctgacaaatgcatccttttcccaagagttgtgctggtatcaaggagcaccctacttattataatagctgtatgactgtaacagattcataatctgggttactttaacagttgacctaagctgaatttgtgtgcccaacttcttgttgg

SEQ ID NO: 90377 - DNA, 644 bp, Homo sapiens
  misc_feature (1)...(644): n = a,t,c or g
cttagccattgcagacttggtgacacatgtgaaattgtaaggcaccagatctcaagaagaaccttctgagcaaatggtgttcagaaactccttcttacataacaatgcctggcaataagtgggctaaaaatattaacagagtaaacaacaggcaatgaacgtgcaaaagaaaaggcattttggggatgggtttcaaaaacacacgcttcttggaaagcagatgttattttatttttttggtatcataaggaatattttagtagtgcagtaggctgtactataaatactgagaatatcatgcttgattctgggagaggaaggcccaggttgaagtgaagtgagtgatatttgaggaagtgtgagaacaggacagagatggtggggaatacataaagccaaggacgcagagtgaaatagaccccataataggctcttggagaacagaagactaaaggcttggcatagaacgagattcccaaagctctggattgtacatagtgggtagacagtgaaagctttcaaatattggaggattcgaatcctacatgttatgtactgttgggtagaaagaagaaaaagggaagaaacaatgaacggcatcttgactgcagtcnnatgactccaagagcttcaatccatttctg

SEQ ID NO: 90378 - DNA, 347 bp, Homo sapiens
  misc_feature (1)...(347): n = a,t,c or g
gttgaatacttaaacattaatggctgtagaaactagcctacgtagtacttatttttcagtctctgtaaggtgtgaagaaaatggttgggttttctttatttcaaaggacaacattcttggatgtaaaaggaaaatgagcttttgaaaaacatgttacaaaagaaaatcttgaaatgtttctattgctgtttgggcttgagagtgaggaaggatatcagcaagtctcaagtcttactggaaatcacctggaggagctgcagaaaaaaaactgaacagattttccttcacttgaacacaagtgtagaactggaaaagggatcctggttctgaatgttctgactgtgaan

SEQ ID NO: 90379 - DNA, 613 bp, Homo sapiens
cgcggccgcgtcgacgccacccttgttgagtgtccctttcttcgatgcatcatccgttttagtgctgagtaagtacacagtacactcatgctcggagggtgtgtggcactgagcacgtcctttcctcaactcttcctcttcctccatggcaagcccagccacctcccatattgtcaaagctaagttttttccccctctgacactggtgggagcagagccagcaggttcagtgagggattcaccaaaggtagtcagtgtcattaggtgtttctcaatttgagaatataaccagagctggcagggataatcgggttgggttgtggggaatggcaggaggaatctgaaggaatgtgatgagctcatgaatcagcataaccatgtctgtgcaaaagagtgttgtccttccatgtatcaccttgggaggagcatgcccttactctgatgattgcccaaaaaagttttttaaaaactacttccaaaacttttagcatctgacatagtgatagatcgactattcatatttttcagcagttgcttaacacgtactgtgtgtcaggctaattgtttatttcgttttgtttttgtaagagccaattcattcaaagccaaaatc

SEQ ID NO: 90380 - DNA, 423 bp, Homo sapiens
  misc_feature (1)...(423): n = a,t,c or g
ggtgttcggatatttcccccatatatctcacacatacctcatattaacatggcccaaactggactctgtatccaacttcatattctgaatttctactcctaaactcattatgcacctattcactagatacctaaaagctgtcctaggttcctccccctctcttattcctcattgtttgcaggttatttgtaatgtcttttatctgccatgtgcatttatgctgccactgtggtagttcagactgttgttccctcttatttgcattattgaaatgagccagactgcctgccttagatccccctgtcctctagtgcaccctgcacagcatgcccaatctcacctttctatctcctttaagcccaagtcctgcttcagtcatggatgatccatggtaaggatgggttatgatctaagcacttagcn

SEQ ID NO: 90381 - DNA, 375 bp, Homo sapiens
cgaaaacaaactcaaagataacatactgcttttcacttttgaaaatcatgaatgttaggcatatgagaattgtaataacaagcatatgattattttattccgcttacttttacaacataatttgggtgccatttcttcaggagaaaacatttgtcatttggaatgctctgtttcagtccttaagcttctacgtataattacagcatattattcataaacggagtccccaatgaaaataggattaagttccaaaagtttgcttttaagttagttgcttctaagtcttagacactgtcttgaataaaatttttgtagagatttgatattccctattaagttttaagggcctttcccactctgacttctactctttcc

SEQ ID NO: 90382 - DNA, 352 bp, Homo sapiens
gaaacatgttgcttaggcatgtcctaacccagtttccttggaatgccctggattcttagaaagattgttgggtcagaatgtaggtataatgaacacgtactggtatttattattcgcatgcacgtgtttctggttggggttctgctaaaacaggcttcacttaaaatacagggttcaaatggagagcttcagaaatgttaccctgagttacaatctgctaatatgaggccaactaacatatatgtttaagtatttggtatggcctacaattctgagtctgctttgtgtttgaagcgaaagaaacggcattaactccatcagtgaggtaaaatttgtgaaattctgagagatg

SEQ ID NO: 90383 - DNA, 336 bp, Homo sapiens
aactgagaattaaatgaggatgtaaagagtcaaacaatatctgacctatagaagtgtcatatgctttagttaatattataatgttattgcttattttaaaaatcatcatgcaaaacaaagctgttataagtgtattttgctgaactttgttactttttagacagctaaatgatgcacatcttccaattttctatccacagatggaagattgattgcatagagaggattctttacaaaattttctctaagtccaggtattttcaatactttcttttgttaagaacattcaacatgagacttattcttttagcatcatcttaagtggacaatacagta

SEQ ID NO: 90384 - DNA, 685 bp, Homo sapiens
gctgcacctgggaagaaagccactctgcggaacactcatccaggctctcatttcccagcttcttgtctgggttggaaaacaatgagacatctgccctgaatgcccaccttttccatcagtggcagtaggcacataagtcttaggtgagtacctgtcacccaccccgcccacactccctgtgcaggcccctgttcctctagctcatgcccctaagcctcttagaggtggatgaatcctggcaagtcccctaggatacctccacttcctaggaatcccttttacccactcagcgatttctagaggggtgatgctttagccccagagaatcaccagcaggaatagcagagcctttggtcggaaagagcttttgtactcttgtgggtggtaacaggaaagcaagcactcactgggtccacctgtgtatggggctttcctactctgggccttcccgaaccatggtcctacagtggcctctcaggtgacatgaagtacaggtcatgtcacctgaggtcaggtggcattttcttaagcctgttttgtaaggcaaatgcctcctactcgaaactagaagacagatgggttgagctcccctctttgctccggcagcagtggccaccttgctcttgcccctgtgtcactgccctggggcctttactcgaaatggtcgtcccgagggtatactata

SEQ ID NO: 90385 - DNA, 466 bp, Homo sapiens
  misc_feature (1)...(466): n = a,t,c or g
tggggccgcgcnggtcccaatgagagcgtcgttgaacgcactcggnaccgacnncccgggncgacccacgcgtccgggttagttcattaaacaaaattagcttttgtttgaactgccttcctacagcgtcctaaatttgattttagttcaaaggaattggaaaatgtattttaaaactacctttccaacttacagtttatggacatatttgaggttgcaactggcttttatttaattctttatttatactacactatgataacgattcactggattatcatctgaatttctcttggaaatgacctaagaaatgaacagtaaagttggagaccagtgccttaattatggccctgttcctcactcatattgcagattggggtcaacaggtgtccttcttaagactttgtttttatacctgtgagtttggggtgctgtataaatgttagagtcccaggatcacacaagt

SEQ ID NO: 90386 - DNA, 398 bp, Homo sapiens
ctagaaaaaccttaaaaatgaaattcccggccatgacaggaaggaaggtcagacacgccttgttatgcccgctcccttttggagtttaggcacagctgaccagcattaggttaaaatggagatcctaagaccgacagaacagactctctgtggccataagattccaaattatgaacaaaacctaaggtcacacaaagcaagggttaagtcactccctacaaaccataagagctccttaaacaggtataatgtagcttactttccaacctgactctggtatagcatccatgacagatagcagaccctgaagaaaatcaaagtattttactgcaaatatgtttctttgacatattttgaaatggcactgcaaagctgtcttttgtgggggaaatttgcat

SEQ ID NO: 90387 - DNA, 2150 bp, Homo sapiens
ttttttttttttcccactttaatgtttacaatttaataaatctcttcattgcagacatgtatggctgtttggtagtattcagaaacatcacagtaatggcagtttcttcaattggtgtgtagtcctcaataattatatatgaaattgctgtcaaaccagtaagactgcatttatacatccatcattttcaggattgttggtaacctgggcatattttccccaaataactttgcctccttgtgtcacaaggcccaattcgctcacatttacttcaatgacagtacctttggtaataacacccaaagttgtatacagtggggatgagggattcttctttacaccaagtattggtaggcaaaaggtggctttcagttcaggatgtgttacatgggctttcttgaaacgcaagcccattggcctgatgaatctttcatatttaggtggttttcttgtaaagccatctccaacaaagcacactttagtaaccattctcttccatgccttcttctttctctttcctgttcgaataacttttaatacttctgtttctccctgggcacgtactttaggcagagggacttcccattttcccgccttctcttttcttttctgtttaatcatattggaaagtactttagctcgagattgtccctctctgtccagcagataggcaggtactgctccctgtggtgtcttttcatcattcttttgtttggtgtttctcttttcatgcatcttgatagtctttttcatttgtattttctcagcatgacgctgtttatggtaaagcttagccttcagaccaatcattttctttgccttctttgaacgttcatgagcctctcgactttccttctttctctttttctcatggtaatccaaacggtatccatagcgtttacggtgtaattcaatatattcattctgtggcatggtgacggccgcagagccgccaggagcagccgctggagtgcgaaaacgctctcaattttcgggtctcaaagacccacaagcccacaccacgcaggccgggacaggaaagagtcaccctttaaaacggccgagtgaagagcaagaaccacgcagcggttccgagcctctgttttccgcttttagctaggaggacggaagttgctggcaggcggcatttggccggtacaccgccggaagtgtggaggtgtggctgcccgaggcggtagagcggagaaagcctattttcttttcgtttagatacattgccttttgcctaggctggcgtcgagacttgaggccgttgcagactttggcgcggctcgcgcctcctgcttcaagagcccagcggtgagagctggcctgcggcacgcggcctaatgccagacagtaacagtttggaggatcaagatgttgaccaacttgaggatatttgcaatgagtcatcagacaatacccagtgtgtatattaataatatatgctgctataaaataagagcaagtttaaaaagattaaagccacatgtgccgcttggaagaaattgcagttctctaccaggcttaataggaaatgatatcaaatcccttcattccatcatcaatcctcccatagctaaaatccgtaatattggaattatggctcatattgatgcaggcaaaactaccaccacagaaagaatattgtactattccggatatacaagatcactgggagatgttgatgatggagacacagtgacagatttcatggcccaagagcgagaaagaggcattactattcaatcagctgctgttacatttgattggaaaggttatagagtcaatctaattgatacaccaggtcatgtggactttaccttggaggttgagcggtgcctaagagtgttggatggtgcagtggctgtatttgatgcctctgctggtgtagaggcccagactctcacagtatggaggcaagctgataaacacaatatacctcgaatctgtttttttaaacaagatggacaaaactggagcaagctttaagtatgaagttattactataagtagccttcagaagagtggtatcacaaagttgtgtttcttttgtgtccttaagcttgtctcacaagaaagatgccaggcctctaaatgtaataagatagagggtcaaaggttcaatcaataaaaatattttattc

SEQ ID NO: 90388 - DNA, 371 bp, Homo sapiens
agaatatgtacctcaaaatgtcattagagctgaggttgaccaacccttctgagaccttaaagtaagttttgtgatggctgtcaggaataaaagaatacaaagaaacccaatttgggggatttctattctagtcatgtttagagcaagtattggagtatgagatgtgttcagaattaaattctatttgtattatccttgatcccagcttttaaaagataaaaatgtgattattagaaataaaaggaaaaaatgtgattattaaaaatcagagatgtattaatcagcaagacagttttgaatctattcatataatgtttgaactaaataattgtctccccaaagaggtctcttcatgaaattgagattgtagg

SEQ ID NO: 90389 - DNA, 708 bp, Homo sapiens
ttttttttttatgtattcattgctttatttgtccttttcacgggtcactacattttagggcatttgatctataattggtagaacaggtttcaggcagggaggataggagcatcatcttccatccccatccacctccgctctttatcttgatgtcacaccaagtgtgatagcgcctccagcagtttcttcacagcttcagaagcctctggtcccagctcatttacacacttccttagcccctccacaaggtgctcaacagaaatgcccagagttttcagaagaagctttaatggatccataaagggaagaatgttgtccagaggtaaaggtgccaacttgtcaacaggaaggggcactttgttgatgaggaaggcagtagcagagtaactacaaaggctgatggtcaccagcaggaagatagttaccagcttcatgacagttatctgggatatttttcaggagtttaaaaatcagaaaaatctagcaaaatccaccaagccagtggttccacttgcccacagtgtgtccttcatctaactctccagttagagagttaattttttatctagaaggaaagacaagtatgaaatcattgctgtaagagcagaattatatgattgtgaagagttgtaatgaaatcatgtcttaaattacatgtgatacgaacaattgttctttttctgctttttcctgaacagaacttttcta

SEQ ID NO: 90390 - DNA, 2091 bp, Homo sapiens
ccatattccaagtgatgtgcaaagtgattaaatttctaaataggttttattttggccaccatcatttaatgacattcaattaaggatttcttgaacaatttctaccaaaaaaataatttcctcctctaaaacattgataaaattgataactgggtacctaacagttgcaaaacaagtctacaccattctttagtatgaaaagcaacataaaaaaatggagcatcaaaatattttatttcaaatttattttatgccagatccaagctgtaactggaacctattcccagtctatgggtttctgaatttcattttcctatttattgtatttttatgagaaacttgttgtaatgagtctgtaccactttatttgacatttactaaagctgtataaaagccatgcacagtttatttacagtattgtacattaaatgataatgtttgaagatcacacaaagatttcacaaaactataactaatacagaaagatgtgtgaaaacattaggggctttcaaaattttaggtatggaattttgcaaagattattttggcttataagtgttaggcaatcactaacctgaaataagtgacaaaaacatgcagatgattaccatttcaacaaatgaaaacctataaatgtctagctaaaagctaaaatattgtgtagctgaaatactaccatataacaatgggaatttataaaacaggaaaaaaggttattctttaaaagtcttccatgagtaatagattttcagtaattttctataaaaacattcagaaattaagtttctcaaattatgtttatcaccaaaattatgttttcagtagtgactggagctatgacttttaaataattatttattgtactataggggaagtatcagcttttccctgtaggggataggctggagaaggaaatcaaccagtaaatttagattcaagtaaaagatcctagtacaaatatatcattaacacagagtggagagttacaagaactgcaggtccacatacttttaactgtactcttagaagtgtaaactttaggtttgttcaatttaaggtctcctattaggaaatacctcttcattgagagtataggaaatatcaatagatatttcttctttaaatccatctcttccagtttttactgttgtggctgaagtacatttaaatattcagactgccccaactgataagttgtgtttcttccacagtcgacatactgatacctctcctgggatatctgttcagagtggccaaagtatgttgttgtcacagtaacttgcatcatgagtactatgttatgcactttgatggatatcagagtacagaaatcatacatataactcatttcctctgctataacggtaggtactgtgtaatcaatttgtttcatatcaagtggaccaataatggttatgttgtttaagcgtgcctttccaataactgtttttgaaaattgaacttgggcagtgatgttttcaacttcgacagagtaatagttattgtttgttatatttagtgtgtttgtgatatttaaataaattgtacgcttctgaacatcataactgacataggctgattttacaccaatgtatttcacgtcgatagagcgagggaaaaggaaaaacacagccaatccagaaaggagtagacagacaaacacagaagccatcacatacagctttgttcttcttggccttaatctctgatcactatatggaatcaatgccaccagttggttttcttgccccctaggaattcttcctgttccctgacaagtagggcaggtgacactatctcttcctgtaaattccacatatggaaactgagagacatctccatttcttccatcttcattatggacttcactattaaccagtccattcctcatgttttcagatgtgactccatcataagcatcttctttgcttgaatgcaaaggcaaatgagaaagagactttcccatgtcggcacgcggggcgctgcgcagtcccgggctgcttcggcgcggacagggccgaggacagggtcgtggagtccacagtcccgggagccggggggtggagcgaccggcctggagcgcgcggtcgc

SEQ ID NO: 90391 - DNA, 1355 bp, Homo sapiens
actgcagaacggagtgaccacagaccaaagcaaatcacgcaagtggatcaaaaaatgtttattctgaattctttaatttaaaaaaatcatacctatgaggtgtgctacaggaattcagatacaataagttgcatataaaacccgacctcattgctcattgtggtaaagcaaggatgatgagaaaatgcacctcaggagcaaaaacacgcttcacgggcactccgggacccaagtcccgagacatttccacgtgaccttctggaaagacacaccgcccacctgactgcacgacgggactggtccagcctcccggctcctcaggaaggagatgagtttcctacaaagtgagtggccacaaatgccaggacagcggtgtcctggagctgtggggggaccttggggaagaacacacactcatctgcacttcacacttctagccttcaactgatcaaactactgaaattgaacatgatattttggcaaaaatactacacccccattgacaggaggagggttcctggcggctcacagcagagcaggcactgccttccttcccaaggccgagaggccatgctgtgacatggcacacacaccgccccaggctgcccggtggcccagggaccatatgggtgacagttaagacatcagcctttgtgaaaagccaagcccgacgcagacctcaactgcactgtgcgtcccaatccagagacccgcggggcaggggaggatttcaaggactcagtgacactgcccggcggggacaggagaggctcccagcagccctcccggtgacctgggcatcaggggatgggtagagatgaggacaagccggagtgggcacaggaaaaaaaccagggtctctgctagaagtcacctgatcctgcgggctgtcacggtatgacataggcagatttcccatctgacatggcagctcctgtgctctgggtgacttagctccgggttaacttccatcaggcccagtcctctcctccccagcagtgagactctagaggaagcccctcgtctgggacagtccttcctgcctacccgccacagggccgacctgaggcctcgtgcttgtcctgggaggtcccgactgcacttgatgggcacgagggcaacacgaacacaagagaatgcgagctccctgaagctgccgcgtgacagtcaatttggcaaaaaagaaaaaaaaaaccgatcaatgcataaaaccgaattaccaaagtcctcctaaggaatgtgattacaatatattagcaaattctgtggcataaacattttcgaaaagcatcagcaaaagtattaaatataaaagcaatgtgtatattcccctccccgaccttcaaaaaaaaaaa

SEQ ID NO: 90392 - DNA, 486 bp, Homo sapiens
cgggggccgggatggaaactggaactgacagctatcgcacgagatgacttaaaagttgtggaaaatgttatagctaagtcattattgattaaatccaatgaaggcagctatggctttggattagaagacaaaaataaagttccaataataaagttggtagaaaagggatctaatgctgagatggctggcatggaagtcgggaaaaagatttttgctattaatggtgacctagtttttatgagacctttcaatgaagtggattgcttcctgaaatcgtgtttaaacagcagaaaacctctaagagttcttgtgagcacaaagccaagagagagaagactgtcctgcttgcccacctcctgacactttgagggcatttaaaaggaagaagacagactggaaaggaataagggagtagtattgaaagcaatcattacgtcctccctagggccccctgatttaaccctacaaatactgatctactgatca

SEQ ID NO: 90393 - DNA, 2059 bp, Homo sapiens
tgttgtacatcaggtcatgctgtttgtcacgttttagccatcttaagaaaggacagaagctgcattccattctgcagtcttggcaaatgactttcttctgtttccacctctattttgccttgtttatttcatctccattatccctctttcagtcatgaatcatgacttttttttctacagtagtcagagttttgtaggacaaactcaggtctctctggcctctcagcaagcttcagggcttcatgcatgcctgcagctgagagtgtctggttgatattctggtactggcactggagccggctgcaataggtggtcctcaggtcccagttgaagaaggcataaataaaagggttaatgagagagtttgcatagcccagccatggaaatatcctctccacccacagtgggatgcagctgcaggcagtgccatagacagaagggtctggctgtcaggaggaaaaagggcggccagcacatggtggaggcccagacgatgatccccaaggtagtcgctgctttctgtttccgcttaaagatggagatattttttcctttcatgcttgaggagtctcgaaagttttgcacactcttccacctcctggaacttcactgtgccattcagggtgactactgctgtctggctccactcgagggaagccaggtaacctgtgttaggccgcgcttttcctggcggccttgtaaatctgttagtacatgaaaagcatgacgcacatggggattaggatgccaatgcggtggagtaaatcgtgtagccaaagtcttgactgaccaagcacaccttatcatcgtttacattctgagcccgaccaaaaatggtaggtaaagtgacaaaggcggaaagaaggcagacagaaagaatcatcttcgtcatgcatttccccttctgcctcatagggtacgtgagaggcttcatgatcccaaggtacctgtcgatgctgatcacgtacaaggtcaagatccaggccgtgcagcacatgacattcatggagaagacgttacagaaaaagtgtccaaagatccacttgcccccgatgaggtcggtgacactgatgaagggcatgaccgccatggccaccgagaggttggccagcgccatggacacgatcaggaagaagttgcctatgaagaaagggcctgtgaaggcggcaaatttgccacagtagaagtgacagataagcctgtggatgaggctctacgggaagcaatgcccaaggtcgcaaagtatgcggggggcaccaatgacaagggaattgggatggggatgacagtccctatttcctttgctgtgttccccaatgaagatggctctctgcagaagaaattaaaagtctggttccggattccaaaccaatttcaaagcgacccaccagctcccagtgacaaaagcgttaagattgaggaacgggaaggcatcactgtctattccatgcagtttggtggttatgccaaggaagcagactacgtagcacaagccacccgtctgcgtgctgccctggagggcacagccacctaccggggggacatctacttctgcacgggttatgaccctcccatgaagccctacggacggcgcaatgagatctggctgttgaagacatgagtgacccactgaaccaagaacttactggaagtgtgcctctgtgtctccttcctcgggggtaaggaggggacagtgcttcccaagttccagctgcaagtccaacttaaccaactttccttcaaagtcagttactgccaattttctgaaaaaagcatgttccatatactaagtctcttttctcacggtaggaaataatacagccaagatatgcagcatccttctcattgatgtagaaaattctgcgatagaccagaaaaatcctggcagcttttctccaggcatctgggtcactaaaaactgattttctaaaattattggatttgtattttgttattaagggggaaaatgtgatttgtgcctgatctttcatctgtgattcttataagagctttgtcttcagaaaaactaaaaataaaaggcattgacttaaaaaaaaaa

SEQ ID NO: 90394 - DNA, 447 bp, Homo sapiens
  misc_feature (1)...(447): n = a,t,c or g
taganattgatgnaccattagtccttnggcggacgatattctaaagccccaacccagctggactgttactgttataagaaacactagcattttgcaatcctaagtcatatttttcttgttacttgatcatgttatatagattagtttgaaaatggtcaggcccttttgcaaattcactttatttcataatatcattcattcgttcatttattaactaccagctatatgctgggcactgatccttatatatgaaaatgtttatttcctttgattaccaaaaggcagatatgctgttttgccattttctagaatctaaaggctcagatgctttagtcaaagcattcatatatttattctgtaatttttatagtctgtaatttttatagtgattgaatcgaaaatagttgaccagtacaatagtagctgcattttgcatgtgctctccct

SEQ ID NO: 90395 - DNA, 441 bp, Homo sapiens
  misc_feature (1)...(441): n = a,t,c or g
ntttgtagatccctagtctagtgtggcggaattccatgcatgcaaaagagtgtgtatctactgcttaataaagagaatgttgcctacatcaacaaatagcgctgaagcctacttattccttagtaataggattcccctgacgctctccccatctgaattttatgtttgcattccatataccttctttctagttattttatgtgctgcaaatatagtttagttttcctctttttgaattataaattatatattgaattcacatagtatatattcctctgtgacttccttttttgcctcaatattttatatttgtattttttctgctagatattattttattgcattgctacaccacaatttattgacctgatctattagtgattgatccttgattatttcctcccccatcccattttttgctctaaagaaaaatacagctgg

SEQ ID NO: 90396 - DNA, 710 bp, Homo sapiens
ctagctttacgggtggaattcgtttgtaccctacttatttttgagtagtcttttattcgctcataaataggttgaagacacctttccatgtcagtacatctgtctttgccttttacatgactattgaatatttcattttatggctgtattataatttaacttcttattgatggacatttacagttctaatttttttgcaattataaatgttgaggttatcaatatatttgtatatagatttttttggttacttaagtgtttgtatagaacaaaatcatacaaatgaaattttaattgacattaccaagttactctccccaaaggtaatttgataatatctatcaaatttaccttcccaccaacactgagtgaggaattatcagtccttaatttttgccatttggctaggtaaaatatctcattttaatatcttctattagtaaagttgagaatgttttaaaacgttagccattttgcatttattctgtgtattacctatgtcccttgcctattacatccatattactcttagattgtctttttattgatccacaaaagttcttaatatattatcagtatattaagatatattatccaatattaatttctttaaaaaaaaattcaggctggccggggcggctcatgcttatagcccccgtgctttggcacgccccgggcacgaaaatttgccttgacgcccagagctctcg

SEQ ID NO: 90397 - DNA, 824 bp, Homo sapiens
agagggcccagcctacccagaatatagaccctttctccagatcactaactttcttgaggatctgaagttaagccacatgcctagactcttcctgggccagcaaccattttacttagaatgtcaaggggaaatccccttggaaatactccagtacccattgcctaaggactatgtgcttattctctttttgaccaatcattataattccagagatttaggaagcccattgctgtatcaaggactataaaatggtggtggccaaggtgtcaaggatcccagacctgcctaggactctctgtgccattgtccctggagagagaacccagttactctcacttccagtgcagtggctcctgatctttgagttgtttggcttgtttttacatgtgattatttcacttttaaacatccaggaaagaggcatctgcagaaataaggatttctttaataatttcttatgttgggcacttggaatgtcctgccacaggtacatgcaccatggaactggcaagtgggcagacagaaaggacaggctggcagtgcaggtttcccaggatctcatgaggtagggctgctgctgctgctgctgcaatatctgctggccggaggctttgcttccattttagacatcccaaacaaagtcatcttgggggacctagccccaaaccaatcttggtacttagatcaggctgcctgacataactgagtctcattttctgtttcggatactcccaggttctcatgctgcttcccagtgcctcccccattagatggtacctaaagtaagaaagccattgacacagagaggagagaggaagtgagac

SEQ ID NO: 90398 - DNA, 1206 bp, Homo sapiens
ggcggaattcgccctgcagttgagactgccaaatcccagcaccaccgcaaagcaggtctgctgtccagggggactgttcatcctttcctatttgtctactaagtgaggatcatgataactacttcgcagtctggttaaaggagctacatgactttgataccaagaaggtacttagaatggtgcctggtccagcaagcacgctatgactcagagatgaggggggcaacaccatgcctccctatccaggcgccctcctcctttccagccagtgatccaaccccttcacaatgcaacccaagacccgcagccctgcccatggggctccgcccaccactgccattgacgaacatttccgggctactctgttgcactctcactccgtcctctacccacatttcttgagtgtcaactctgtgtggatgctggtgtacacggcagaaccagcccgagccccagcgtacacagaccccggttctacctcggtgggcggtgggcagaggcctgggtgctcggccgccagctgctgggacagaccctcaggaggaagggctgggcataccctggactgggagctctccagggccacgcgggtgtgctgctctgcctgctgaatcatctccttcttgctctgcaaatcctcctgcagctgcttccacctctgcaggtggttctggtccagttccacctgctcctgcaactggctgaccttggtgtccaactctgagatgacacagtcccggctggggagctttctctccagttccgacacttgctggggacagcccgggagaaaaaagaagtggcgtcattttcgcccaacctgaggattgggggcacccatcccctttttccttaaagaaggacgacggccaagggcagcggctcacgctggaatcccgcccttaggaaagccgccgtggccgggccaccagggttctaaactgaaccgcaccggtcacatggggaatccctgcgtatgaaatactacaataatgacgttagccaagcgggtaggccccctcacggcaacaagcggcaaaaactgtccgctacctgtgtgtcacaacttcgcgcagcgagctacgacgcggcttcacactcggcgagtagcactcgacgagggccatctacgcttggagtttatttttcgtgcgaaccgcggtgcgctgggccacgggcgactcacatctccgtgcagtgcggtcg

SEQ ID NO: 90399 - DNA, 824 bp, Homo sapiens
ctgggccacaggagaagccaattcagccccaatcttccctggtgggagctcagagccttgtgaaggggagatgggcaacaaaaacaagggagggaaactgactagtctcagaatctcgggtagggcatcagaacgtgagaaggaaccaaggttggtggctaaaagggaccctagaatgcgccagagaggaggtggcagggcctttagtctggaaagtccccttcccttcatgtccatatgctgggctacagcgccctctgctggcctctcctggtaatgcctaggaatctgggttggtaaatagggacctccttggctttcttccacaactccagacctcaagggaatgcaaatggggaagctcttcctctgttctcagccagtttttctcacacgtctcatctccagtcccttgatgcccactcccttcagaataaaggaggtcaagccacttactatggcttatgaggccctgcatggcctagcacctggtaacatcgctggcgccctctctttctgctccccctttgaatatcaaatcagtgtttattttgttctgaggagccataagtcctttttggaacccacaaatgatgccatgaaccactgcattggagaatacagaggtacatggaattttgcataaaaattcatgaggttctcaaaacctccacagcccaatcatggctttcaagttagagctcctttcctatgccctgaccgtagtgaagtgcttgcagcaaccagaaccgtccgtacgtgccatcctcctcaagactcttccctaccttcctcttaacccagctcctactcgttcgagttcc

SEQ ID NO: 90400 - DNA, 457 bp, Homo sapiens
  misc_feature (1)...(457): n = a,t,c or g
nattggagaatttgagaccattaggcagagcggnggaattccaagaattgtagacatatttaaaaatcaccacagaggccatacctgatgctgcattatggtactctgtttccttatggcaaataatgcaatttgcaattctgtattgattctttgactgtgtatgtgatgtttagctcaaaagctactcaagggcagggactatgtttggttcaccagtagactcccagtgcttggaatatactggaagatcaatgagtacatgaatgaacgaatgaatgaatgaaaaattaagcaaatgctgttgctgaaaaaatcacaaactaaagtaattcctaggttactaactctcttgcattccatttatcatgactctcctctaataacatctgttacagaaaagcagaagagcaaagccggaaaggacccgtggggtaaatcagagagtgactctatn

SEQ ID NO: 90401 - DNA, 726 bp, Homo sapiens
gcccaattcgtaaattcccttgctcttgcaacatggttttcttaggtacaattctagtagtttgagagatattacttctcagtaccatgaggggaaattttcgtttgaacagaaatgttcatttcatcttccagcatccatttttacttttgagaagtctgctgtggtttaattgccactcctttgtaggtcatctctcttttctctctggtacttttaagtttgctttgttctggcactctacagttttactactttgtgtctagatgtgaatatcttcttacttgccctgcttggtattatctgcgcttcttagatctgtggatttatgtctttaactagttgtagaaaatagccatgattttgcaaaaatagtctctcctttattctttctgctgcttagaatttatttagacctatgttaggctttctcattttatcctaaattcaagatttcttttcaatttaatttgtccttagattatatgccactgagggtgtactgtcagaatattgttttcaggccgggtgtggtggctcatgactgtaatcccaacactttgggaggctgacatgggtggctcaacctgaaaatcaggagcctcgagaaccagccctggctccggcttggggggactccctcgcctctacctaccacatacgcacacttcggcctggggcatggggcgtgccctccccacaccgccccgctgccgccccttggcc

SEQ ID NO: 90402 - DNA, 921 bp, Homo sapiens
ttgttactgctaatcttgcttcttaaagttcacacccagagcaaaaaacccaatcagcaaactaaccccaaaatccaatatatttagaaatgtaagtgttaagagatgtgcattatgtacgaaattgaaaattggtgctaaagtggcaatgtcaatttaaaatttcttgtccagatctgactgactgactcaggagattatagttcctactcattctctttccttttatcagatctttcaaaagcgctttttaaaattgatcaatgtgcaattctgtttgagtctctacagtcctatcccttttggaatgaacagctacacaaataaatattcttggaacttcgaagttgtcttcaaactagctctagaaaatgtccctagttgacattagtgttggtctgttagaaggggaaattgatttgactgcttcatgttttgaaaagagcattaagagggatttgaggaaggtatatgtggctttcttttttcttaagtttgaattacacttgatttcctttgggttattaggcagataaacccttgtcattagtaatacttagcactgtccaaaatgaaaaatgactgccagtgtgttgcacatacataagaaaattacatcttactgcgaagtctttggtttgtttccttatttggtttgactttgacttactattttgctatggtcatatccttaatatctgcggtacatttcatatatatatatggggtgggagcataattgccattcccatgtgtctcaaggaagcttaatgaggaaactaatgagttaatattaactcttctgaagaaagctgacattttaggagtattaagtcatctgtcgttaaggagcagcaagaatatattatgattgtatcacatgttccagaagagcattacccccttacatagaaagctccc

SEQ ID NO: 90403 - DNA, 526 bp, Homo sapiens
cctcatacccagcctctctcttctagagggctctgaggcttctactacttccgggcctgtaagtgggatttgcgctgaactctccaaggctgaacccacctccctttctgagaaccttctccctgaagaagtgaagctgaacaagaatgctgatcagatggattcctaagtagcagcagcacttcttaccctgggcagaagatgtcctgaacacagtagttcagctccctttggtgctcatggcatgatctggccttttgggtggtctagaagtttaacagttgatctttttctaaagcatttttgcatctccaagcatgatgttcatacccactatattagggagagcacacttgtgtgctcctctgtgccagtattgacagatctgcaattctcaggccctttattagcccaggcacaccagtgtgagaaaagccacaccctcagcggagcgcccatactgcttatatctggaaatagcaggcagctgtttgcaacagcctttgcaacacagttgttgcttatt

SEQ ID NO: 90404 - DNA, 715 bp, Homo sapiens
gtccatgacgtgaattcagtgtttgtgttattgggttggaccattcataaatggcttggtgctgtgttttctggagtgagttagttctctctctcatgatactgtattatttcttgaggaaatggattatttctttcaagagttagttataaagccaggacatccttcaggtcttcctctctttgtagatggctacatctgctttgacttctccagtatgttgtgacacagcatgaaagaccttgccaggagctagggccatgtccttgaacttagcctgcagaaccatgagctaaataaatctttaaatgacccagtcccaggtgttctttaatagcaacacaaaacagactaagacagccagtagaggagattgagaaatatggcaagtgaggtatgaggagaacttgagaagtgtggtatcctggaagtcatatgaagaaagcagtataaggaggaaaacatgatcagttcccacaaaataatgctaataggtaaagtaaaatggggaccgaaattttacttttaaatttagtaacattaaaatcattagtgatcttcaccttacctcttttgggacaactgttggggaattggtgaatatcctcacagggggtctcaagagagaaagggagggaggaatatttaaagaccgaagctgcggggcgaggactgtacccccctttgcttaaaggccccagcatcccccctggtc

SEQ ID NO: 90405 - DNA, 883 bp, Homo sapiens
gccaggggcttcaggcccagaaattctaattcacttgatctggagatgagacctcctctcatggtattttataaaagatctcaggtatttataatacacaggtatggttgataatcactggcatagagtaattttattgatctgggatccattggcttctaaggggttcttacactctcacattgttatactgactttaatgtttgtgtgcacatgaaattttctggtcatacaatcccaagaatttatgagatgggaaaagaggatgtggccacacagttaaaaagcattcatgcagaaagagaaaaacagaaatcatagagctcttctacactacacagctttgagaatttgaggaggaaggggagcaatcagtgaaagcataaaaagagctagcaaaggcagaaagaagcagtggtgtgctggagctggcaccagcttgtgagagcccagttgtgtttatcatccccatttccttgttctgtgatgtcatgttgatagcatcaaaaaatggcaaatgctacatatcatttgactccctcccccaggagacactgtaagtattaggaaggccaggtggggagaagttgaaaggatatgcattagtgcttagtgctgcagggctcagcttgtagagcctgagagcttctggacttgcaatctgccccttccaattggatttgggtttagttggcacagactggctgcaattgcctgatctcattgggttaataaggggttatgggcctggctcctttcccaatatccatgaaggatcctggcggtggctaataccggaatgatacatcaacacaatgacctcggccccatacccagggcctgcatcctcacaggcgcaaccgcccccccagcatccctactc

SEQ ID NO: 90406 - DNA, 1540 bp, Homo sapiens
aaggaacatcatgttaaacactgaaaaagaaactagaaatggaatggagtagaaagagaggctatcaaggaaggggttttttggaaatacagaaatttcatctgaaacctgcagcgcaccccacacccatgacagaacgacaggtgcaaagaccctgagcaggaacgagcttggcctgctgggggaagccaaagagccaaggagtccggaatgtggggagtggggagcagagtccaggatgagggtagggggcaggcactgcacagacatgcagggcagtgcagcccagcacgcactctgaatgtcatgagatggcccaggggaggatgattgaggtgagggttggggtcacatttacgtttaaatgtgactctgccatttcccacatcatcaacctccatgtggctgaattcactggacagtcctgggcctcccatcatgtaacccatcaaaaccattttgcatagttggtggctcccctgctctagaaacagtcttcacctgacttccagggactctgtgctcctgagtttcctcaaactccactggccgctccctgccaacctcctttgctccgtccacatttccctaacactgtgacacttggctttgtggctcagaaggtggttctctatcttgctttcactaattattttgcatgttatacctagagtcctccccctaccccaggcaagtattccagtgtgtttcttaagtgtgtctatttgtatgcattcttgagaaacgtgcttttctctgtaatgtgtcatgtttcattgtattgcccacctagtgtcttctcagggtataggttctgtctcaaacaggactgtgaggccctttggcctcatcctcccctcccctccccgccacattgtgggtcttcctggcaccccagatcagctttgtctgcccgtgagacacgggggccacacaggctttgcctcaggctgcaccaggacattccccagagctgagtcctgtccacacagcctgcttgccggaaaccatgcaggacccatcttcctcctgctctgatcaaaccccaagaaccacatcaccgggggccatggcagggatgaccttcaatgaaaaagaaccatttgcttattctcttcacaactgaactcgagtgaagggaaatgtgcatccacttaaaagttcggctcctctctccacagaccaatcccctccactccttcactttgttcaaattcagtcacttatccatactccagacatggcctgagcatgccctcacgccagtctcatgcagacaccatgcaggaagggcacaggataaggcataggcagcctaagggcagcaatgcgtaaggagagcacacagaactcagggaggagccagaggtggccactgcctttggtcctaaccctttttggggcctcagggccccgcatgtaaaaatgggcttcctaagaatatccaccttggtgagatgtggtgaggaatgaacatggcagtggtgtggcttaacatagctgctagtaacaagaaaaacgaattccacgacactcgata

SEQ ID NO: 90407 - DNA, 2195 bp, Homo sapiens
tatgttcacctgccccagccccacccaccctggcccactccacaggcccctgaccatggtcactcacggagagggatggaggagaaggtggttgaactgagtactgagaacccagaggacagagcccacagcttccaagcaggaaaagggacctctctgaaaaatctggataaccagaattatcacagcaccttctcattcccagcgcgtccttctgagctcagaccttgagcatttactgggtttctttttgaggaagagggaaagtgacaaaggacaaaacaatgcaaatcttcatgactgaagacgatcaaagactccctggagcgagaaaacagttactgccagaagcagaatggaagagccaaaaagtacacaaaatggacgccataaattctgaaataaaagtgtatgatgtgttctgagtcactgtagaagtcatgcatttattatcaagatagaaaagagcagagaatgacgtggacattggtcctcggagaggctgcataggtggtgcggtccccgggggattctggatgctggtcttttgaccgtggcggcagcctcgcgcctgcccggatggctccatccagacatttggcaaggctgtcatctgctcttgggtcctttttcaagctgatttcctgcctccccaagaggaggtttgagccccattctgccttggaaataaatcctgacagatgtggcacagcatatttgcagggaatttgcagggcctcgattattgggggaatcagagcccattccacaccgagccccatccacgtggctgagcaacacccctgtgtcccctgtatctgtctcactggctgtctttctgccagtttcttaaagaaccacaccattactgcgtttgccgttcgaagcgttgtcccaacaatgcagatggttctgacaagggctctatatgctggcagaagggagcttccaaccttttaacttgaggaaaatgaatctctgagaggcttgagagtgttgccaggtggagcttttcaggagacaggggtcttgagcccaggacacctaactatcgagttttcactaggagacttagtggtggctttcatgaggccagtcgttctcaaggaagggctgggggccatcagcaatgtctggagacatttttgattctcacagcttggtggggactgctattggtatctcatgggtggaggccagggatgccaccgaacatcctacaatgcacagggcagccccccacaaataagaattatccagccccaaaatgccaatagtgccgaggtcaggggaccctgtgctggccatcctatctctgattctgaaactatgcatgctttccacttttccccatttgtgagtcattgagtaaattaaagctcttctgagcagcagcagtgatcatggtcactgccctgagttcaaataatgcgagctgaggacagtgatctgcaactcccagcatgtcatgtggtctcttagaaatccatgtgactgtttccaccatcttgggcatttgtggggacccccagactggagggagaaagccctacaaagtggatgggagtgtggggctgaacttttccctacccttaactttgtgtctctgggacctccagggacctggcccctcaccaatgcatatgaagagtatgcttggggaagagcttaggaatggggtgggcatgggagtgctgggtagcagcctttgagcaaatctgcatcttctcttatttctgacctttttccatgtgcccagtcctatttctgccagttgaaggcatactaatattctttatactatttaatcttttgcagaaaccttactattataacttgctactctccagataccaattcttcatgccgagagcatcggaaatgtttttgtgtcttactgatgttttcatgatcaacttgtaaatgtaagcagttgacttcataaaaggtattttaactattcttggagtcctttgctacccaagcacctggtttcaccatgcgatcactgacttctctacagtgaagactctttcttaatataggatttcactgtgctcttttgattaaaaatatctaaccttaaaagacgtaaaaatgtatctgtgaaatctcactttgttagcgttggctgctgttgtcattttctattatgataactgaaaagagaaaagaagaaaacatgaaaaaaaaaa

SEQ ID NO: 90408 - DNA, 998 bp, Homo sapiens
  misc_feature (1)...(998): n = a,t,c or g
gcgccggggccaaatgagnccttgactgagaccctaggccgnngcgtggaattcggcttttgtcataatcttccagaacctcgtgatgttcctgagcgtcctcgtggactggatgattccagacatccccacggacatcagcgaccagatcaagaaagagaagagcttattagtggatttcttcctgaaagaggagcatgagaagctcaagctgatggatgagccggctctgaggagcccaggaggtggggatcgaagcaggagccgggcagccagctcagcaccttcaggccaaagccagctgggcagcatgatgtcgtcaggctctcagcacaccaatgtgtgagcagttcagcctgcagcagaggagggcacggcagcagagacacgcacatgcacgtaagcatgttcctacacccacatggcgtgctgtctgtctgcaggggcctggcttgatggggtcttgaagagggggcagtgtgtaaaaagaaagagcctgacagaatgagtgtaggaaggaagagaaatgatgctacatctcagaaacttcaagcttaagtttcttttaggtccccttttaagctgcatccttttgagggattggaaccccactggggtctctccaccccagagtctcaggcaccgcgagcattcccatgtaccctggggcaccctcttgtacttcaccatcatttctgactttgaccagctgtaagagaaatgcagtcaggagcacagcatcccctacttactatcactacaagaaaactgagtcactttccagtggggctgcccacagtctccagcaggatggcaaatttaagtttacaaggctgaatggtgcagccgctggacctgatagttaggtgcaaaggtccaaacctgggcttgtctccacttcacgtcacaaaaacgtttggagctaaatgcagataaccatcattttatgaaagttcagatttaaaataataaaataaatggacacattctttataaag

SEQ ID NO: 90409 - DNA, 584 bp, Homo sapiens
tttcgtgtggcaccatgagcagctcaggtggggcgcccggggcgtccgccagctctgcgccgcccgcgcaggaagagggcatgacgtggtggtaccgctggctgtgtcgcctgtctggggtgctgggggcagtcttcatctcccaaggccgccttcccagcgggctccgcctgcctccctgctgactcctgcccgtgtctcttgtttcaagcttgcgcgatctctggcctcttcaactgcatcaccatccaccctctgaacatcgcggccggcgtgtggatgatcatgaatgccttcatcttgttgctgtgtgaggcgcccttctgctgccagttcatcgagtttgcaaacacagtggcggagaaggtggaccggctgcgctcctggcagaaggctgtcttctactgcgggtgaggggttgctgggcagggtcccgtgacacagttccccaaaaccccactgacaaaataggacccaaaagtcaggtgagggtgggcagtgtattcagttcctctctgtggaagtgtaaactgggattgcctttgtgcacagtgatttgctcatagctgccaaaacgtgcccca

SEQ ID NO: 90410 - DNA, 521 bp, Homo sapiens
  misc_feature (1)...(521): n = a,t,c or g
nattgaccccgtctttgagcccgtttgcccgggncgacccacgcgtncgtacagctataaatatccagagtccaaggttacagattcacagtttaagtaaatctttcaatttgtgcgatagatcattgccagctctggtaaaccaaatgatgcctatattcagctttacaagaacacgaactccacagattggtctcaaatttcactttactttaaatagtctttagaccttttctttcttctctctaaacaaagggttatgattactccaggatttatgttttcagtagtgcttgggttaacagtttctttgcttagaagtttacccctaaatgctctgaacctaatagccaatgctttaattataattttaatcaaggccaagtaaaagaactttgggcttatgatttacttttgtaacatacactatcatattcagtatttacaagaatccaatgaaatctgtactctcctgttttgctgagaaggagactgaggatcatataaatagtaaggaactn

SEQ ID NO: 90411 - DNA, 955 bp, Homo sapiens
gaattcggcacgaggagaagacgattctttaggaggaggacagggaagcgaatgctacccaggtgtctgtgatgagcccatgttttccaaactcctccgtgattctagaacagtgctagagaagccgtgagccagctggcagcaaccactagaatggaagctgcatgtgggcatggcttagttttgtccactgctggatctcagcatccaaaacagtctaccacctgatgtctcagtatactggctcgcggcacatcgggcaaatgaacctatcagataacaacggcagatcagatgcctgagcattcagaagcaacagctgtggagcccccgtgggttcagaaggcctggttcccgtctccagaagcctggctctcctccctcctgggcccactactttggcttcttgttcctacgtacaaggagttgcgaagaaggcaactcttcccctccctgaagccaaaggaatgaaacagactagggcgggagaggtggccatccgtcattagttgcggccatcagtaacagcaacaggacacggaacctaaggctgtatccatcctgggcccccagggaaacatcagcgggagcggtactaaggaagtgctcatctcttagagacaaaggcccatggaggggaacagtaaccatcccctcccaattcagaaaatgttaacataagcacttcatttctcatgcagataaccacataagtctattaataaaaaagaaggaaagagaaagaacaaaaaaacaaaggggggggggttctaaaggacccctgggggggcccgaacttacccggtctttcaaaaaaaatggtttttccctttcgggagccttataatacactatgtgggaatcttttaaaggaaccctatcttctggggggaacaatattagaaaaacccacctgcaaaaattgaatcccctagggaaaatacaaaattgttag

SEQ ID NO: 90412 - DNA, 482 bp, Homo sapiens
  misc_feature (1)...(482): n = a,t,c or g
gagatgctnccattgatcgcctgcagtattccgccgagctgagctgccgttccagctggactgacgccatggaactcagcgccgaatacctccgcgagaagctgcagcggcacctggaggcggaacatgtggaggtggaggacacgaccctcaaccgttgctcctgtagcttacgagtcctggtggtgtcggccaagttcgaggggaaaccgctgctttagagacacaggctggtgaacgcgtgcctagcataagagctcccgcacatccatgcctttgaacagaaaaccctgaccccagaccagcgtgcacgtgagcgacagaaatgagggactgggatctgcacagacattaaattataaatctggtgccttcaagatcatacacctgctcacaggcgagaaccctctgcaagtcctggtgaacgccgtggggggcggcggccccgggaggactccacacgcattgggcgcgccgggact

SEQ ID NO: 90413 - DNA, 476 bp, Homo sapiens
  misc_feature (1)...(476): n = a,t,c or g
attgtagcccatttgatgacactaggccagngcggnggaattcgtaaaaggactattgatgagtgctaattttcaaatgagtgaaaatcatgagtttacagtgaagccaactgaagaaaatatatatttcttaagccatcagaaagtatgacctaaaactgatggatttttttcagtattggggattgttggtgggtttcagagaacatttagggagaaagttgcattgagagaaatgaaggcaagagaaaggtgacaagcataaattagaggatttcaatgcggtgatgaagtgaaagcagattttctaccagagaatgagagagaagaattgagaaagtagtcaaaggagggaacttaagtttcagaaatgaagacgttaatttttagtatgttggcacgttttgaaaaagagaataacttcaaaatggcaaccaacctgtatttagtaatgccatcagggttatttctgtggn

SEQ ID NO: 90414 - DNA, 430 bp, Homo sapiens
agtcactgtggtggaattccacccttttctcgataccagacatgtggataaaagtagatgtatgagagagggaaggaaatatttcttatccctcatcaattgaaaaatatataccttgttctaatccttttattttctggaatcccaggactgaacatgtatgacagatatctaataactggaggaatcctgagatttttcagtctggcagttttgatgagtcacacaaatgaacatcttctcattgctttttcatatagggcattatcatgtccaatccagttttcttaaagcacacatgcaaaaatgaaatggtcctaaaaacctggttgttatggagaagcatgtttgtatcagtatgagacaaaataaaatgtgatcttgtgaatatccttgataataaataaaataatctatgttacctattgcg

SEQ ID NO: 90415 - DNA, 453 bp, Homo sapiens
  misc_feature (1)...(453): n = a,t,c or g
catagacatcgatcgcaatngcggnggaantntaanatgggataaaagggtgtgcaagagatcacagtaacaattgttgaacttaatgaactcttagactcctggacagacaacttaaatggctatttcattcaattctttgagtgacctataaggtcacttaagaagatgaagtacagagatattaaatcactagcccaagtgacagcatcagcgtttgaactcaggtctttctgtcaggggggtctcttcatgactgtgatattactgtgttgctgattataaaggcaaaatactaacatactgcaagaaagatgtaaatggacgtgtgaattcaatgagtgatgaaaaccatttgggccaatggagcacagggctggaggtgcatctgagttggcggtcctggtaatggcttttgaaggatgggagattttagacatatattaatgagaa

SEQ ID NO: 90416 - DNA, 451 bp, Homo sapiens
ggagcgttggtacccgaaccatcaaggataatgaagtgaagcagccacagaggccagaagaaaactagggagcaggtgcatcatggaagccagcggagggagagcttcaagaaggaaatacaatcaacagtgaataagaaggctgaggaagtttgtaccttagtcattcctgttgtcattttttgaccaatttaaatttcatttacattctattcctgttacctattaaattcaaaaataagtgtttaatacattacataaaatatagccatattgtatagatattacagctaacaattatggccttatcaaggtacatctctcctcttgtattcttatggtaatgccagaggtattctttccagttgtgcttgaagcaaagcctggaaacacataaagaaactattcctgcaattctccagtataaaaatgaaattttattctatagaaa

SEQ ID NO: 90417 - DNA, 1007 bp, Homo sapiens
tttcgtctcggaaaggagccggagacccagctgtcttcgcactttagctccagccccgtggacatttcctgttctgcctctggaaattcaagctgaaagttacaaaacatccttttccctggaaccaagtgcttggttgggagaccatgccctccccttccttcctcggaactcctccctgatcgccccgtggcttccccaggagagatgcgaaatcagcggtagcaggtggcgcagaagggagaggggagcgaccctggggaccgactctggggaccctcgccgaagagtcccaagggttccaaggccagagagaggtcctggacttgattgctggcatgtttactcttccaagtacactgagatcaaatgcaaagacaaaccatcaaagaaaataactctaaaatctggacatgatatacaaagtgactgcctaaaggagctgaagagaggacataagtggatcgcctctgctgttgcatgttggcttggagaacagaagatgaggagccaaataagcaagtccttcagccccaggcttctagcacggggctgcatgtaggctatgcattctggggagtgaggagatcatgaaagctgaaaataaatgaaggaatccagaaaagcaagagtcaaagaaggcatctgcaggccaaatctctgatcaacccctgacccacatacacacaaaatacactcaaagcagctcagctaaagacaaagatctgcactcagagtagagctgcctccccagaaacagagctcgcagttcaggcccagcaagaaaattacctgcaaaacaaaggaaaaacaacactcatcagagaaaaagaacagaatctggaatcttcacaacctagcattcatcatatccaagattgaaacccaaattatgggacatatttaaaaaccaggaaaatggaacgtagtcttaagagaaaagtcaatcaaatctgacctggagatgaataatatattgaaacttaaaaggcaaggggtttaatttt

SEQ ID NO: 90418 - DNA, 494 bp, Homo sapiens
  misc_feature (1)...(494): n = a,t,c or g
cccccgccccccncnccnattganaatcgagaccctaggcagtgtgcgtggaattccggatatggctggcaggctgtggtttacaagccctcactctaactaaatgtatcatctcgtgggttttaatgctcagaagttgatttctattttgggctgctaccaagatagctattgtgataaatttcattcagaaatattcaggaaatatgtaccaggaagtatactccattgttaaataatgaatacgttggaactacaggaactccccctttcctgaatttgcacctttcaggaagagccgcatagctagtggtgcttagtgctggcttggctgtcacgatgcctggatttgaagctcagctgtgttaattaagcatgagccttgtgaccctagacagttaattaaccaccctgcacttcaggttatgcatctgtagaatggggatgacaataatatctacctcatagagttgctaaaattaaatgaaagctga

SEQ ID NO: 90419 - DNA, 333 bp, Homo sapiens
ttttcgcgtctacccgacctgaacctgcatgctggacagttatgctatactggtgtttcacaagcccatagattatttttggccaggccatgagtaagacagagctatgcaaggtgcttataatgcaaactttaaggaggaatttattttcaagtgccaaccctgcacttgttccatagagtgcccccttaaattttgcaccctgggctctttacttaccttctcctggtcctagtgatggctcttggagagagctgaccactgcaaacttgtgcgccctagaaactcatttttgaactcacacatattccctgggacacatgggaatgtagg

SEQ ID NO: 90420 - DNA, 1838 bp, Homo sapiens
ctcctacgcctaaaatgaccaatgtgtgatttcagtggaataaatggcgtccaaagtcacagatgctatagtctggtatcaaaagaagattggagcatatgaacaacaaatatgggaaaaatctgttgaacatatataaatcaagtttattaaactggggctaaggaataaaccaaagaaaacagcacatgtgaaaccagacctcatagatgttgatcttgtaagagggtctgcatttgcaaaggcaaagcctgaaagtccttggacttctctaccaagaaagggaattgttcgagttgtatttttcccctttttcttccggtggtggttacaagtaacatcaaaggtcatctttttctggcttcttgtcctttatcttcttcaagttgctgcaatagtattattctgctccacttctagcccacacagcatacctctgacagaggtgattgggccgatatggctgatgctgctcctgggaactgtgcattgccagattgtttccacaagaacacccaaacctcctctaagtacagggggtaaaagaagaaggaaattaagaaaagcagcccatttggaagtacatagggaaggagatggttctagtaccacagataacacacaagagggagcagttcagaaccacggtacaagcacctctcacagcgttggcactgtcttcagagatctctggcatgctgctttctttttatcaggatcaaagaaagcaaagaattcaattgataaatcaactgaaactgacaatggctatgtatcccttgatgggaagaagactgttaaaagcggtgaagatggaatacaaaaccatgaacctcagtgtgaaactattcgaccagaagagacagcctggaacacaggaacactgaggaatggtcctagcaaagatacccaaaggacaataacaaatgtctctgatgaagtctccagtgaggaaggtcctgaaacaggatactcattacgtcgtcatgtggacaggacttctgaaggtgttcttcggaatagaaagtcacaccattataagaaacattaccctaatgaggacgcccctaaatcgggtactagttgcagctctcgctgttcaagttccagacaggattctgagagtgcaaggccagaatctgaaacagaagatgtgttatgggaagacttgttacattgtgcagaatgccattcatcttgtaccagtgagacagatgtggaaaatcatcagattaatccatgtgtgaaaaaagaatatagagatgacccttttcatcagagtcatttgccctggctccatagttcccacccaggattagaaaaaataagtgctatagtatgggaaggtaatgattgtaagaaagcagacatgtctgtacttgaaatcagtggaatgataatgaacagagtgaacagccatataccaggaataggataccagatttttggaaatgcagtctctctcatactgggtttaactccatttgttttccgactttctcaagctacagacttggaacaactcacagcacattctgcttcagaactttatgtgattgcatttggttctaatgaagatgtcatagttctttctatggttataataagttttgtggttcgcgtgtctcttgtgtggattttcttttttttgctctgtgtagcagaaagaacttataaacaggtgggtataatgtagacttccgaataagaatattttatcgttttcataatattaaaagtattcctgaagtactttattatttcattatatcatttttacctaattattttttttttttgcttttatagtacctaaccaaataaaatcttaacaattc

SEQ ID NO: 90421 - DNA, 364 bp, Homo sapiens
cttggcttgactctttaggctaccatgacagtgtcctgcactggattgcagcctcttccttttctcctgccacaccctcctgaaagctgatggatgcccaggcctttgcagactctgagctgcaactttttccagatgccttgtaacttaaggagacggttccctcacctcccctggacaggcttcttctggctgccctctttgagcatacggctggtttgagtttccagggtacctcagtcctcagctcaaaattaatctcaaaagaaaagctgatggctgatgttttcctttctgccccagtgcacagggagcattgcagaaaggtcagactggcacttggctgacagcctgagcctggaag

SEQ ID NO: 90422 - DNA, 443 bp, Homo sapiens
ctgtggtggaattctggacctgcagtgaagatccattgatgttagtggtggagctggcctcaccactttggtctcctgacttgcagtctactgcccttcttctcacaatatcattttatctaaaccagtatgaaccttggtctggaggcagaaattttaattttagtaatttatctctttagaccataccagattgtcacttctttttccatttctctagacaaatcagtcattttctccagaatgtggaaaggcagtgggttttggagtttgacttttccacttcagctttaaccttggacaacttacttaacttctttgcctaatgctcttatatgttaaatgggaatgagaatacttacttaataaggtggttgttaggattaagttagatgacctatatataaagccttttcctctgtgttggatatatttaaaaaatt

SEQ ID NO: 90423 - DNA, 472 bp, Homo sapiens
  misc_feature (1)...(472): n = a,t,c or g
ccattggtccggattgtgtatgagacatggggtggcagtttgacagactctgatctgaagttcttgtcgaataaggaattgctgaaaatgatactggccaagaagctgttctgctgcaagagttcatgtgctttagtctccaggatgtcgacagactgcagagcctggaaacggttcagtgccacgcaggaagagagattgaccaagatgctgcccaagaaacggaagcgtccagcgcctgcatggttaaacatctcatccagcagccctccgtatgtctggagtttttcagtaagtttgtctacatcaatgtgcaactggttttctacaaagtttcttacaaatttgtttctcagggcctcctgcagctggttgaacatctggccacttccacttctctggaaaaggctggacatttccaggaattccaccgcacttcaaagggtctacgattnnnnnnncccctngcccc

SEQ ID NO: 90424 - DNA, 469 bp, Homo sapiens
ctgtggtggaattccaaatgctgccttatccaaataataaaagtaaattattaataagtcacaatttaatgaagattgatgttagttgatctttatattcttgaaatcagccatatggttgtgtgtgtatgtatatatttttaaaggtacataaagataataagctcatctctgaaaatttttacatttggcataagaataactggataattaagcatcttattctctggcctgtgtctttacagttaaaggtagatttactcacctctccttttttgtttttctaagttcatcttttttgctgtttcaagacagaggcccattttagctttctcgcatatccttttgtttgtactttggaagcctcacctgcttaattgttgagtttttatccgtggtcttttagagggggatatgtagggtagaagctttcacaggttcttgtttgcacttggcccctgactgtttt

SEQ ID NO: 90425 - DNA, 742 bp, Homo sapiens
cgtggtggaattcatgatactgtgtttcatattgaggtaagtcattgttttttatatagaaatgattagtgagtgatggttaacattgcattgtcaacaaaacctcccagaaaacctattgtggaagaaggcctatgagaattaataaactttcagttaagatttatgaagtagttttattttaattatgtatagtaacaaaacaaagaacactgtcaaggtgtcttccagaattgttccttcaatgtgtagttatttaatattttgcatattgatttttaaatgtttaggggcctctaaagtgcctaataactttagttgttttggcttttttacttaagtaacttaaaccattgagtaaacttactttattgtaagtaactttagccagacttaaacttgtaggttttgatttggtgaatatgagttcatgatgttttcttttctttttgttattataaatactggatttagtgctgaggtttagttgaatgttcctatttcttcagtctaagggaatgtccttaaaaagcataattcacgagaagaaaagtataaagaaggctgggcgcagtggctcacgcctatacttccagcactttgggaggccgaggtggctggatcacttgaggtcaagagttacagaccagcctggccaacatggcgaagccccgtctctactaaaagtgcaaaaattaggggtggggggtggcacgcatctggagtcccagctacttggggc

SEQ ID NO: 90426 - DNA, 741 bp, Homo sapiens
ctgtggtgtaattccaatttttgtacatgatttggcaccatacacatccactatcaaaacatcttcttaagttgggtctcttattctttcggatgtctagactttgagaaaataaaattgacacaattgtctgagtgactaaaacaaaatatacgattcctttgttagagaacaagcttattaaatatagtttgagacatgcactgactatatgaatgtatcatattttttctaccagccccacttgtttggtaaggtctagtgaagtacaacttgttcttgtggttctttgggatttgtattgtgctctttcactcctaagaagctgtgtattctcacttcttagtcttcctctttttcttttcttcactttttttttcttaccctaattcagttaattgatcaaaagtatttattgatttcctgctacacagaggtagttttctagtgtcagtgaagaatgcagagaaatacaaggtgggtcccactaggttgtggagatgacatgtagaaaaagaaatgcaatggataagttaacaagccgtatgaaagatgttactagagatatatgattgtcaaataaatggcacagacaatatgcactctaaattcaaaggcctgacacaagtgattgctctgacctgggccttgagggatggctaggacttaactggtaaggaggaaagagaggaaatggtatgagcaatgcaaaacaggcacaaggcgtggattattttttta

SEQ ID NO: 90427 - DNA, 2055 bp, Homo sapiens
ttttttttttaggtcatcaccacagaactggcttttactaacaaaaccaaagaacctcaaacactttttgtggacttcaaattctttccttcagattttaaaatgacattatgcatgtacatatttttaaaatttagacacattttagagaacacaattgtgaatacaaatctaagaaatgaatgagatgtactgaaatctgattcaaacacttatcttaaactgacttctgtcaatcctctgtcctgtgaagtaagtcccgtttctcctttgcctggagggaccgagctggaattactgtcacatgttacagacatgaggcaggggttaatgcagaaccacggaacagcacctctgatgacatctagtggataagtaggaaggtgtcaacccaggtggcttttaaaaaaatctgtaaataaaatctcctcctttattccacagattttaatctttccctcagtgtgttagaaagactaatagtgtttttcaaacgtgtgtggatggactcacctggggagacacccgcatcctaggccacctttgtggctgctctgcagacacctggctgcacccgctgcctcctcgtctgagaggggctgccctggagagcaccgtgctggctgtgttgcctactggcttcccttgagaaatggggaggcaggacctctactgagtgctgtgatgtgttatgttttgatgtggtgggtggggaggatgggaacaatgttatttggatgagattggacatcgtgtgaggtcttcagcaaagcagctaccctcagctcattgacgacagcatcctgcctgcaggtgtgggctgctggactgcctgcaaagcccatcaacaggccctggaggccaggtaaaataggatcaggatgatttctattcacagaagtcatcaatctaacatgaaagaaaataatgactcaggagcaagggtgtctgcagcaaacagactctccaggcatcgtttagaagctgaatgtcacacatttcgggtgccagccccacacataaccacacaagtaaaaaggaagcttttctcctaaactgacattcttttttctcttttctgagaggtgtggacactggggctgggaaatgctcaggcctccccctgcagacaaggactgggctgttaagagaggcctcttgtctttcatgacacaagccttagctcacaagacgagaagtacctagtcccagaccacctcttccatgatgacagaaacccttctaaaaactgaaatctatgtgatagaattaatgaaggtaggctaacccaaattactgctcacattttttcaaataaaagtcacacaaataccataatgttgttggttagaacattatgtttctcatatctataaataagggctagtactttttatcacccaaaagtagacaaaaaataggaaatgcattcattccaaatttagattttgataactttccaaaaggttgaagtaagtttaattgcagggacatgagtccagttgagtgtctttctgttaatctgcaataacccatctggaactgtatttacttttcttagaacagtaacttataatgttgataaactgaggtggagcctgttttagtaacatatacctgggtaaatgttctggaactgccagtgcttagtcactgctgcctacagtgtggccatcaaaggcttcttgggaaagctccctttgggtccagaagtcttcccaacaaagctccagctgccctggactctacacaaagcacctgaagcctctgctgggaatggggccctgacagagctgcaatgcactctgaggcttctttaaaacacgaaggtgagtgtaaaatccaaacaggaagcgttcagctgtgcactcccaaaccaccccagcacgcccctgcagaactgctggtcctgtccgtccttggagtggtcgctccctcattctcatctggaaggtgccacagaaaaggctgacaatgtattatcactaggatagaccctagataatctttctgatatacaagatagacaccacctgttccctcatttgtcaatat

SEQ ID NO: 90428 - DNA, 744 bp, Homo sapiens
ctgtggtgtaattcgatggagctggtccctgcccacagcccccgccacatcagtggcttttcccgcagctccccacaaaaggatgtgccgcctagcagagatgagaatcaggttttcttgtaagaaagagttgctgaaggaaagccggtcacgtgcagtgatgttgtgaaagaaagtgatgacaagctaaaaaaagaaggacactgagaaaacattattatcagcagagtttatctgggccagatttggggaccccaaccccaggatgctacctcaggagtgttctgagttgcagcgattacaagcagattttttaaggacaaaatgaggagatgtggcaaggtggtcccagccccttcacctagaggggcccttgttgacagaggtgagctgatgaatgatcagttgaagactcccgtgcttctgggaatagtcattgtgagcatgtggtcagcccggttgctagaattcttcccatgagcaggtggggtccaggaacttcaggggctgactgtggcctcatgcccagtacctttagccattttaatttaccaaacctcattgtcccattctcttttcaggttcttggccataaaatatggcttttggaaaaataaagctgagacttggagttcacggtgggggctcccccatctgtgaacagaagcagaagtttggaactgccttctttactgctcgagagggaaaacttgagtgaaaaccacgatgctggcgaatgttgct

SEQ ID NO: 90429 - DNA, 2586 bp, Homo sapiens
ggcacgagtgctctgctagctagctgttcaaaactgcacaaactcacctgcaattgtgaggttttctggccaatccagaggtgtgcctgcagtgtctgagtcctattctgccccaggagcttgtgaagaacccacagaaaggggaaatcttgaggttggtgaaccacagagcgaaccagtccgtgtccttgacatggtagccaagttggagtctgagtgcctgaagcggcagggccagcgtgagcctgggagcctctcaaggaataacagcttccgtcgaaatgtgggcagagtattgcttgcaaatagcactcaggctgatgaaggcaaaacaaagaaaggcgtcttggaggcacctgacactcaggtgaatcctgtggggtctgtatctgtggattgtggcccttcaagagctgatcgttgttctcctaaggaggaccaggcctgggacggtgcttctcaggactgccccccattgccagcaggagtgagtttccacataaacagtgcagagttagagccgggttcgcaaactgccgtgaaaaacagcaacagatatgatgtggaaatgacagatgaactcgttgggttacctttttcctctcatacctattcccaagcctctgaattgcccacagatgctgttgattgtatgagcagagagcttgtgtcccttactagccgaaatcctgatcaaagaaaagaatctttgtgcattagtatcactgtgtccaaggtagacaaagaccagccttccaatttaaactcctgtgaagacccagttccagggatgttgttttttttgccacctggtcagcacttgtcagactattcccagttgaatgaaagcacaacaaaagagtcttcagaggccagccagcttgaagatgctgctgggggtgacagtgcatctgaggaaaaaagtgggtctgctgagccatttgtactgccagcctcttctgtggaaagtacattaccagtgcttgaggcatccagttggaagaagcaggtgtcgcatgacttcctggagaccaggtttaaaatccagcagcttttggagcctcagcagtacatggcttttctgccccaccacattatggtaaaaatcttcaggttacttcccaccaagagtttagtggcccttaaatgtacctgctgctatttcaagtttatcattgagtactacaatatcaggccagcagattctcgctgggttcgagatccacgctatagagaggatccttgcaaacagtgcaagaaaaagtatgtgaaaggggatgtgtccctgtgccgatggcaccccaagccctattgccaggcattgccctatgggccagggtattggatgtgctgccaccggtctcagaaaggattccctggctgtaagctggggcttcatgacaatcactgggttcctgcctgccacagctttaatcgggcaatccataagaaagcaaaagggactgaagctgaagaggaatactaaagtccatgtgagaggcaacaaaaggaccggtttctaaagctgcaaaacacctagatacaccgttcaaatgagcgtagccccctgagtcatcactctagaagaatctgtacatcatcaggactgcattgctcaggcattttctaaactctaaatttacgagctgtacaaaaaaattggtcttgttgtttatagtggcatctcatgtttgaacccgggtggtatcccacagttggattcagttggctgtgaataactgcctgttttcctaaatcaaacccatcctcaaaggatgaagactcaccaccatccaggacattcagaagagttcactgcagatgctgcaggtagtcctcaaaaatgggttccagaaatgttttgagcactggcaacatatttgaaataagtgaatattgtcctgtgaaaagaatagcaggacttttagatgaaaagtattcttaaaaagaaaagtcaggcaccccaccttagacctcgtatgcttgatcctgtgagattgatgtttgtggctggaggtggatttcatgccctgtggtgtttacagtgtatataatggttgtgttttcatggggctatgaaagtgcacgttaaacctgagcgcctttacctttagatgagtgctttggcccctctgtgaatagcacgattaaaatccagttgtatataatggacagctaacggaacaatataatcaccacaatgcagctaggatagtgttgcggctataattttgtgtttttttttttttaattgtctagtcttaaatttgtacatcttgtataaaatatgaatggttcccccaaataaacctatgaatggtttcctgtataatatatgaatgtttctgagaagaaactctaaatagttgaaaggctaacctgctcaaaggataccaaataatggtttaactggacaacctgaaaattagcatagaaaacaatcctttgttatattttagtgatccacaagattgagaaaatattatatagttagataataacattcttgtctactttatcctgtctggttacaaaattttttaaaacttaaataaaaacatgcatcttaaatggaaaaaaaaaaaa

SEQ ID NO: 90430 - DNA, 414 bp, Homo sapiens
ggcacgagaactggggtctgtagggtattgaagatgttatctgtgtgtttttggtttcactattctggttgatctattgctatttataggagaaattagtgaggtttaaaactatcaccatcactatcatcatccccacactatttccaaactgtcattcagctattaagatcctaagaaaaatatgagggtaatgaatagatgaaattaactagctgacataagtatactgcttgtatttaaattattgattatggtgtaactttcagggaaacatctgaggcttctttggaaaacaaatgcttttattacacttagaaaagtgctccagaaatatctttttaaccaaattcaatcaatgggatgttatcccagtaatgactaatttcatactcttcattgtacattatgcta

SEQ ID NO: 90431 - DNA, 3490 bp, Homo sapiens
gtgcgcgcgtcggcgtccgaggcggttggtgtcggagaatttgttaagcgggactccaggcaattatttccagtcagagaaggaaaccagtgcctggcattctcaccatctttctacctaccatgatcaagtgcttgtcagttgaagtacaagccaaattgcgttctggtttggccataagctccttgggccaatgtgttgaggaacttgccctcaacagtattgatgctgaagcaaaatgtgtggctgtcagggtgaatatggaaaccttccaagttcaagtgatagacaatggatttgggatggggagtgatgatgtagagaaagtgggaaatcgttatttcaccagtaaatgccactcggtacaggacttggagaatccaaggttttatggtttccgaggagaggccttggcaaatattgctgacatggccagtgctgtggaaatttcgtccaagaaaaacaggacaatgaaaacttttgtgaaactgtttcagagtggaaaagccctgaaagcttgtgaagctgatgtgactagagcaagcgctgggactactgtaacagtgtataacctattttaccagcttcctgtaaggaggaaatgcatggaccctagactggagtttgagaaggttaggcagagaatagaagctctctcactcatgcacccttccatttctttctctttgagaaatgatgtttctggttccatggttcttcagctccctaaaaccaaagacgtatgttcccgattttgtcaaatttatggattgggaaagtcccaaaagctaagagaaataagttttaaatataaagagtttgagcttagtggctatatcagctctgaagcacattacaacaagaatatgcagtttttgtttgtgaacaaaagactagttttaaggacaaagctacataaactcattgactttttattaaggaaagaaagtattatatgcaagccaaagaatggtcccaccagtaggcaaatgaattcaagtcttcggcaccggtctaccccagaactctatggcatatatgtaattaatgtgcagtgccaattctgtgagtatgatgtgtgcatggagccagccaaaactctgattgaatttcagaactgggacactctcttgttttgcattcaggaaggagtgaaaatgtttttaaagcaagaaaaattatttgtggaattatcaggtgaggatattaaggaatttagtgaagataatggttttagtttatttgatgctactcttcagaagcgtgtgacttccgatgagaggagcaatttccaggaagcatgtaaataatattttagattcctatgagatgtttaatttgcagtcaaaagctgtgaaaagaaaaactactgcagaaaacgtaaacacacagagttctagggattcagaagctaccagaaaaaatacaaatgatgcatttttgtaccatttatgaatcaggtggtccaggccatagcaaaatgacagagccatctttacaaaacaaagacagctcttgctcagaatcaaagatgttagaacaagagacaattgtagcatcagaagctggagaaaatgagaaacataaaaaatctttcctggaacatagctctttagaaaatccgtgtggaaccagtttagaaatgtttttaagcccttttcagacaccatgtcactttgaggagagtgggcaggatctagaaatatggaaagaaagtactactgttaatggcatggctgccaacatcttgaaaaataatagaattcagaatcaaccaaagagatttaaagatgctactgaagtgggatgccagcctctgccttttgcaacaacattatggggagtacatagtgctcagacagagaaagagaaaaaaaaagaatctagcaattgtggaagaagatatgtttttagttatgggcgagttaaattatgttccactggctttataactcatgtagtacaaaatgaaaaaactaaatcaactgaaacagaacattcatttaaaaattatgttagacctggtcccacacgtgcccaagaaacatttggaaatagaacacgtcattcagttgaaactccagacatcaaagatttagccagcactttaagtaaagaatctggtcaattgcccaacaaaaaaaattgcagaacgaatataagttatgggctagagaatgaacctacagcaacttatacaatgttttctgcttttcaggaaggtagcaaaaaatcacaaacagattgcatattatctgatacatccccctctttcccctggtatagacacgtttccaatgatagtaggaaaacagataaattaattggtttctccaaaccaatcgtccgtaagaagctaagcttgagttcacagctaggatctttagagaagtttaagaggcaatatgggaaggttgaaaatcctctggatacagaagtagaggaaagtaatggagtcactaccaatctcagtcttcaagttgaacctgacattctgctgaaggacaagaaccgcttagagaactctgatgtttgtaaaatcactactatggagcatagtgattcagatagtagttgtcaaccagcaagccacatccttgactcagagaagtttccattctccaaggatgaagattgtttagaacaacagatgcttagtttgagagaaagtcctatgaccctgaaggagttatctctctttaatagaaaacctttggaccttgagaagtcatctgaatcactagcctctaaattatccagactgaagggttccgaaagagaaactcaaacaatggggatgatgagtcgttttaatgaacttccaaattcagattccagtaggaaagacagcaagttgtgcagtgtgttaacacaagatttttgtatgttatttaacaacaagcatgaaaaaacagagaatggtgtcatcccaacatcagattctgccacacaggataattcctttaataaaaatagtaaaacacattctaacagcaatacaacagagaactgtgtgatatcagaaactcctttggtattgccctataataattctaaagttaccggtaaagattcagatgttcttatcagagcctcagaacaacagataggaagtcttgactctcccagtggaatgttaatgaatccggtagaagatgccacaggtgaccaaaatggaatttgttttcagagtgaggaatctaaagcaagagcttgttctgaaactgaagagtcaaacacgtgttgttcagattggcagcggcatttcgatgtagccctgggaagaatggtttatgtcaacaaaatgactggactcagcacattcattgccccaactgaggacattcaggctgcttgtactaaagacctgacaactgtggctgtggatgttgtacttgagaatgatactgtggatgatactgttagtagcgaatcgcttcagtctttgttctcagaatgggacaatccagtatttgcccgttatccagag

SEQ ID NO: 90432 - DNA, 924 bp, Homo sapiens
cgccgtggaattcatcacagattaattttgtgaccagctatattcagctcaatcttagtaaatcattactttgaatggtatgtgctttcttttaacagctgctttatgattctgcatgtgagtggccaataacataagcatgagtttgatatccatgaaacaaatatacctagcgatgctgaaacctggggctttaatgagttaagcaagtgtcatgaaagcagtaagcagcacatttttacgcttatacaagggggctgactgtgaggcacactggtctgcccaggtctctgttatggatttgatgtataaacttgggcactgttccacagatctactctggcttctcactggtcctctaacagcactgtaagtattgagattaataaaatgtgctcagcttctcggtgaaaagacacaatggaaatccaagttacaattgtgcttctcacttcattgaaaagggagaaagattgtcattcagagtatgctacagaactattttaagcctttagaacataataattagaacagcaaaattaaagggtctgtcacaattccacccaccaatcaaatgggaaaagagcaacagctaggaatttaaaagaggggaattgctctctcagaacttaaaaaatgctacctgaattaaaggataaaggcttttatactcttaacttttaggcttttattccattattcagaagaacccactaatcccgcatgccctaaaacatggggttttcaaaaggatagattagagatcaatactcaaggtttcatttcggtggggattgaagcccgaattctcaccctcttagattttccaccattcgtatgagccacgttcacccatccattttgacgccacattatctttcctttgcacaaaacaaacagcctcccaaaaaacatggcacctcg

SEQ ID NO: 90433 - DNA, 784 bp, Homo sapiens
ctttgataaactctaccatgctccttctttgtagctaaaaacccatcaaaatttagggtagagtggatgggcattgttttgaggtaggagaaaagtaaacttgggagcattctaggttttgttgctgtcactaggtaaagaaacacctctttaaccacagtctggggacaagcatgcaacattttaaaggttctctgctgtgcatgggaaaagaaacatgctgagaaccaatttgcatgaacatgttcacttgtaagtagaattcactgaatggaactgtagctctagatatctcacatggggggaagtttaggaccctcttgtctttttgtctgtgtgcatgtatttctttgtaaagtactgctatgtttctctttgctgtgtggcaacttaagcctcttcggcctgggataaaataatctgcagtggtattaataatgtacataaagtcaacatatttgaaagtagattaaaattttttttaaatatatcaatgatggcaaaaaggttaaagggggcctaacagtactgtgtgtagtgttttgtttttaacagtagtacactataacttaaaatagacttagattagactgtttgcatgattatgattctgtttcctttatgcatgaaatattggttttacctttccagctacttcgttagctttaattttaaaattacattaactgagtcttccttcttgttcgaaaccagctgttcctcctcccactgacctgcgattcaccaacattggtccagacaccatgcgtgtcacctgggctcc

SEQ ID NO: 90434 - DNA, 792 bp, Homo sapiens
tggcattttagcccggtggggtacgtgaccgtatcaacaaatataaatagaaaattcagtctccaaagctggtttcccaggaactgacttcagtgactttgtccagctgtatcagaatcttgttctttctctagatctatttgaatatgtggcatgaagctatgcaccttccttccttctagtgctttctttgatagaggaatctagtctcatgggagtgtgatttttcctagcacagcaggtaatacagacccctgaactatgtattttatattagctcttgaaagcaaataatacgctttcctgtattaattgaaaaaaatgatatggattttctgctaacatgccattttctccttttggtctttccattttctatctttcaaaatatactcatttatatattccctcaaatggcatttattatgagtcaaatacatgtcatgacctgctcctaggtgttgtcctcatgtcactcaatcttcgtaggactttattgcctgtaaaataaagagaatacttgttagcttcaccttcctggcttttcttcaacaatcaaggagagcagattacacaaggctgtgaatagcaggaagctgtgattattacaatcattgggagcagccactgagaaagctgcctaccacagtctgctgcctgggtcccaatgagtcacttctttcccataagcaaaaacacattccctgcctcccagggactcccaaagtctccttattggcctactcctgggattgctctagatttcagaaggccccttatggtatcacaggc

SEQ ID NO: 90435 - DNA, 468 bp, Homo sapiens
  misc_feature (1)...(468): n = a,t,c or g
attgagnatcgtagaccctagtccgtgtggtggaattcgatgacctctttcttccttccgttttgccagtgtcactctgtgatgataggtgtaagttgactgtgtgcattgcccgtctgtgaccgttttcgactcacagaaatggcagtctgaagtggctcggcctcttgcttgagagacagattggagcagagtctttgtggatgcaaagccacctgggccactgccgtgtgtgccaccctgaacttcaagctgccctgaaccgcgtgcgtttctcagtgtcacgtacagctcggcctgaccgtttgccttttagtgttctcttccttctcggagtcctcctcctcttcctcactaacattcatccagagcctttcagtgcagaaatcaggtagctgctgaactcggcagctgcgtcctttttcccatcatctcttctgtcctttgctagctgtcatttcttccctt

SEQ ID NO: 90436 - DNA, 2083 bp, Homo sapiens
  misc_feature (1)...(2083): n = a,t,c or g
ggaattcccaggacccacagcggctgcaaaggaaacctaaaggcaatactagctccatttcaagaaccgaacaggaaatattccaagtagaattaaaccttcaaaatgcttctctgaatcatcaagggattgacaaaatatatgactgccaaggtttactgccacctccagagaagctcactgccgaggtcctaggaatcatttgcattgtcctgatggccactgtgttaaaaacaatagttcttattcctttcctggagcagaacaattcttccccgaatacaagaacgcagaaagcacgtcattgtggccattgtcctgaggagtggattacatattccaacagttgttactacattggtaaggaaagaagaacttgggaagaaagagtttgctggcctgtgcttcgaagaactcttctagtctgctttctatagataatgaggaagaaatggtatgtgtggggacttcccagttggctgtaagttgccatttgaactaaacgaaatagatcaggaactgaggacatatctaaattttctagttttatagaaggcttttatccacaagaatcaagatcttccctctctgagcaggaatcctttgtgcattgaagactttagattcctctctgcggtagacgtgcacttataagtatttgatggggtggattcgtggtcggaggtctcgacacagctgggagatgagtgaatttcataattataacttggatctgaagaagagtgatttttcaacacgatggcaaaagcaaagatgtccagtagtcaaaagcaaatgtagagaaaatgcatctccattttttttctgctgcttcatcgctgtagccatgggaatccgtttcattattatggtagcaatatggagtgctgtattcctaaactcattattcaaccaagaagttcaaattcccttgaccgaaagttactgtggcccatgtcctaaaaactggatatgttacaaaaataactgctaccaattttttgatgagagtaaaaactggtatgagagccaggcttcttgtatgtctcaaaatgccagccttctgaaagtatacagcaaagaggaccaggatttacttaaactggtgaagtcatatcattggatgggactagtacacattccaacaaatggatcttggcagtgggaagatggctccattctctcacccaacctactaacaataattgaaatgcagaagggagactgtgcactctatgcctcgagctttaaaggctatatagaaaactgttcaactccaaatacatacatctgcatgcaaaggactgtgtaaagatgatcaaccatctcaataaaagccaggaacagagaagagattacaccagcggtaacactgccaaccgagactaaaggaaacaaacaaaaacaggacaaaatgaccaaagactgtcagatttcttagactccacaggaccaaaccatagaacaatttcactgcaaacatgcatgattctccaagacaaaagaagagagatcctaaaggcaattcagatatccccaaggctgcctctcccaccacaagcccagagtggatgggctgggggaggggtgctgttttaatttctaaaggtaggaccaacacccaggggatcagtgaaggaagagaaggccagcagatcagtgagagtgcaaccccaccctccacaggaaattgcctcatgggcagggccacagcagagagacacagcatgggcagtgccttccctgcctgtgggggtcatgctgccacttttaatgggtcctccacccaacggggtcagggaggtggtgctgccccagtgggccatgattatcttaaaggcattattctccagccttaagatcttaggacgtttcctttgctatgatttgtacttgcttgagtcccatgactgtttctcttcctctctttcttccttttggaatagtaatatccatcctatgtttgtcccactattgtattttggaagcacataacttgtttggtttcacaggttcacagttaagaaggaattttgcctctgaataaatagaatcttgagtctcatgcccaanaaaaaaaaaa

SEQ ID NO: 90437 - DNA, 662 bp, Homo sapiens
ggcagagaccaggacctgggaaagatttttttaattaacttttatccaaacatgccgagcggacatataagtgccagctccgtgaattttcacagactgatcatacctgaccaataccagggcctgcggaaagttgctatcacatgacgatgctcaagcctgtcacgtgagagtgctcattgcctgtgggtctggggtgctgtatgcagagtggtttcaaagggaaagcaggagggcaggggatatgttttagctgaaaagaacatttcattgagttttggagagcaggaagggcatttcatctgggtgaatggtgccctgaaacaatcagacttgaacctagcccggtccctttgggtttaagaggtggccctcaggcatgacccatgcccactccgcctatccccaggggtcaggctccagcctagaggcagtggacaggttgccagactgataccaattctggccagcaccaccctgccatttccaactcagaaatgggtgggggagaaggagcattcagctccagttccaaacggatggtatttactactcacatcaatcccttgccatgtgtctttttagctttgaccaaccaaagggaaaagaaatgccttcctttcctaacacctcctgagtatcttacagaaggacccattctt

SEQ ID NO: 90438 - DNA, 764 bp, Homo sapiens
gctgaggtaacataggaaaattgtatggagtaagaagagagggctgtctcagccagattggatggaggaaatcaagcaggcaaaggagactggtgagaaagggccaatttcagttatcatttttttgacctatgatttacttaaaagtatgtttttgaaatttctaaacatatttgctcttttagttctttttattggtgatttctaacttaattacaggctggtcagagaatgtggtccgtatgatatcaacttgaaatgattgaaacaggtgtcagcaacattgctgaaacaggtgtcagcaaactataacctgtgagctaaatctggcctgccacctagttttgtacagcctggaagctaagcatgatttttacattttaaatattatacataaaaattatacaaaattcaaatttcaggggtcataaataaggttttattaaaacataactacctaccctcatttctttacatactggcagcggcttttttgttaccctggtggcagaactgagttctaacctacaaaaccattgcttccccaagcccaaaatattactatttgccctttaaaaaaaagtttacctgcccctggcttccaacgcggtccatttttaatgggtagggggttttgaaaacctcgttgtccccccagaccctagctcgcgtttcctatcgtccccgatgcccccacagggccgttttggccctctcatatgcctctaccgtgcccgcgtttcacccgccactttctgaagtgt

SEQ ID NO: 90439 - DNA, 1131 bp, Homo sapiens
ccagggtttggttggttgattaccccacaaccccgaaaaaattccgtctggaattctttcttgtggaagaaaaaaaaaattctttcttttttttttttttaagcctctggtatttggggttttagttttatgctgctgaacctaatcttaagtgatacacttttcagttgatgacatattaatcctttattagaaattgtaaatgagaaattatatcaacacctgaggaccaaactacaacagaatattccataggctcaagattttgagacattctggaaagagttttctgtaaggtatatcctttccgtggcatggcaacatcatcattctttaaaaaggtgactggacagacatcatttccaccatcaccaatataaacaatttgtgtataattcactccctgttgtaactgtttatctacaaattctatcaaaactacctttttgcaaagattctttgggcatctattgcaagaatgagtatgataattttcaacagtgagatgaccattgctattaaaagctgctggatttgtaaacactttatcaaatatgtcatgaaaactggcagcttctaaaacccaatctatgaagaccgaatttgaatctgaaataataatgcagtcaaatttatccttattctttcttataaagttgaagagttccaccatccctggagtgaaaggcaatgatgtcactgctcttttcatttcatgttctcttacacccttatctcccaaatacttaaagactctgcccataaattctgtccaaaatccttttcgataagaatcacgtagttcaataggaagctttttgttgggagcacattgtacaatccaagtgtcactattgtcatctatgattgtattgtcaaagtcaaaaactagcaaaattttcatggttccagaaatagatttggattacccagcattattacgtggaacatctgatagaaaacccagtcccgccgtcggcagccgccccggcgcccgtgacgctcctgcgggttcagtcctttggcctcgccccacgcctgccctctcggcagccccactcacaagcccagctcgcaagcgcaggcgcctctcttctctgaattccaccgcactggactaatgactacgag

SEQ ID NO: 90440 - DNA, 746 bp, Homo sapiens
gcgcgtggaattccagatattttggatggggcataattgcatagcatcttctctcttgcacacacacccctttcttttactttacattttcacattagcgcacacagtgaatatttcacacatgaattacaaatcctcatgttgcaaagtactgtgttagtgaaataggtaggctaatttaaaccaaagtacagatgatggatgtgatatgctatagaaactgaaatccagcaggactcttaaggacatgaggaaggaagtattccaggctgccactgacattgcatcttagcctaatgcacacactggagcatacaaactttcaggactgtgtcagcaaggtctgtgggggtatgcagtgggcgtcccacgggatccacgccttttcactgcagcccaggcagaacagcctcctcttgtactagggactatttccttgaggcccagttgggcctcaggtgggacctcagagggagtgctgctgagcaccttttgtcaccgtacctgaaggcagcataacttacccggtgaccgtggtgcctgcaaatgaaccttgtgtcggtgcttgcttggtgggaacctgcccctggcgagtcacgcaagaaaaggcacccaagtcgtaactcttcttccagtgcccttagaatgaatcacggggggaaatacccacagaatgtccgttattttggagccttttgacttccaggctggcgcctttggaaaaaggactttcggcgcggaatgcc

SEQ ID NO: 90441 - DNA, 669 bp, Homo sapiens
tttcgtgtttgctgaaactgaagtctactaggatcagagaaattaacacaggtctaatatggtgcaaggaacgagtgatagacacctgaggttataaatagcaaagcatgctgcggggtggggaagaccattctgaagtgcaatgttcaagacgctggcttaatatatgactaagtgtcagaagtcaggttttctgagaattactttccagataaacaactttatagcactgcacttaatcttacttactagagacatctcatttatcactgaattacaagtaactttaatcctattgatattgccataaagcccgttgaaaatccatcctggcacttttaaagggtttggggccctgttacatggggatcctcttgcaaaggtctcagccagaaattacaccccgagggtgtctgtatcccctggcctctttgtcaacaatcaaggagaagaggaggggcaaaaatgatctctgcatctgccagcactttcttcggcccctttcctatagggtcgggttctcccacttaagtcaaactaactttgtgtgactctttcctcctcccactgctggggtaaaaccaggcttggcttttttcaactttcaatcggaacaaaaaccttgggacaaccgggaatcaaattttcaaacttgaacccttttcccaa

SEQ ID NO: 90442 - DNA, 827 bp, Homo sapiens
agattagaaagatttctcacaatgttttaatttgatcaaaactcggaaacactcacctttaatgtcctatgaagtttaggtagagagtcttgatgtaacagaatttttctgaattttttacatctttcctgtaaaagattcagaaaagatgtaaaaaacaaaacatgctactatcaaagatttacttttttaaaaagcagtttctggtaaacatcgatttaaacagtcatatttacaaattaattttaaaaatctcatcttgtttccttagtaccctatcaatgtatggttagaaatagaggacttgtatgaaggagaattatttagcattcaattcaaatagaatacgatctcatttgaagacttgtaaagtatttgagaatttgggcaagaattggtcagttggtttcactgaatataaatcacagcatgcttgatcattctattgactggctgtaatttaaagtgatgacctaaaactgtatgtctaaacaaggaaaatctgtaagtgatttaggtactggttattttaaggaccatacctttttctaacctgagataattaagggatatactcaggttattgtacataattgttatttgttaagtcacaaggattttctcctgtgaaatccttactaattgttactaaatggacctagtagatttcctagcctattaatttgcgccctagcctattaagttcaccttaagcagaagatgcatgctattttgatgagcctgcggtttaattttacaaaggctaatttggctatttgaaacccgcccttgccttcctgtgtggagagggggaaccccacaactct

SEQ ID NO: 90443 - DNA, 1320 bp, Homo sapiens
tagtagacttctgcgtccgtggagcttgagctcagcaggttgtactgctgaaaaatttccaagggcatgagcagatggaaatcagtttattaaagaacaaagcagacatgtttcaggtatggaaatgtctaattcttctctcatgctgtgaagagttgcttgaccttattgtgtatttttatatgaattgttttgtgtcatctttcattttcttgtttcacatttaatcttgtaatctggctgccacagatatagctaactgaattgatcccactctttaagtgactattaaatacagatttggatttggatatttttctaattttttaaaattaatttttatgtgtaaagaatatttttgtctttcttactacccattcattcattattggctgatacagaagtctgtagtggtattaatgaaataggttcaagccctccacgttagtcttatatttgtgaaatgattaaaaaccattttctaattattttgtatagaaactgctcatgtaggtaatttgcactaaaattgttgtaaattacaaggaataaaatattgtacttattgatactaaatgttattccgtattggtagaatgcagaattttgtgcaagcttgtattatttgtaaagtgatttaactcattgaccacaatttgtattttctccatctgttaagatgtttaatcaaaataattggccactattcaatgaaagaactcatcactacctgttaatagatttgcgtagatgtttgagctgctagtgagatttttatttaagtaatgacagtattcaagactaatttttttgaacattcttgtgatggaatttttacacagaaatgaaaaagttggaaaatccaacccatcagttctctggatatttagttttttttaagtggacagacataatagtctatattttcagagtccagtttttgttttgctttatataaacttataggggctacaagtaaaatgttccattggcataaaagataatgtgattatcacaatcaacttgatcataaaaatgtacatccttgttcaagtctatgttatggattttgcttctttctaaagtttagcttacaaatggctataaattatttgcataggaggtgcacttaattgtttcagttaggttttaaaaagtagttgtagtttactcctctaatgaaattagagatgttaaaccctttggaatactgacttttggcctcttaggcattcgatgaaataaatcagctgcttctttttacttgtttgcatattctcaatagtcaggtaaacacctgactaattgcttgttatatgg

SEQ ID NO: 90444 - DNA, 4670 bp, Homo sapiens
gtcccccagataccaccatctacgttgaacccatcactgaggaacgtgctgcaagaactctgtaccgcattgaactgttacggaaagtccgagagcaagtgctcaagtgccctcagctgcatgaacgcctccagctgtgcaggcccagcctctacctcccagtctggtgggagtgtgggaagcatgatctagacctgctcatcggcactgccaaacatgggctgaaccgcactgactgttacatcatgaacgacccccagctgtccttcctggatgcctatagaaactatgcccagcataaaagatctggcacccaggcaccaggaaatctctgttgcctttaccagaccaactccaagttatatgaatctcttacatattctcaaatgagtaggacttcagagtcccttgaaaatgaacctgaaaatctagtgagagtagaaagcagagatgatcatctcagcctgcctgatgtgacatgtgaaaactttatttctaaagttcaggatgtcatttccatcaaccatgatgaaagtctgctgcctgagtccttagagagcatgatgtatggtaagaaggtgctcagccaagaaccaagctcttttcaggagagcccaagtaccaatactgaatctagaaaagatgttattaccatctcaataagcaaagatgggaactgccagtctggtggccctgaggcagaaatagcttctggccctacttttatgggtagcttagaagcaggaggagtagctcaagcaaacatcaaaaatggaaaacatttgttgatgtctatttcaaaggaaggggagctctgctgcagtgaggcaggacagagacctgaaaacattggccagctggaagccaagtgtttagcttccccttccttgaatccaggaaatgaaagtgggtttgtagatatgtgcagtcttagtgtctgtgactccaaaagaaacctgtcatcagatcagcaattaattgatttattggaaaacaaaagcttagaaagtaaattgattttgagtcagaaccacagtgatgaggaggaagaagaggaggaaaccgaggaggaaaacttagccatggcagtaggcatgggggaaaggccagaggtattgcatctcacggagcccactactaacatctcaagggaaaagaaccaaggcttccaagatgaaaccaagaaaggaagcttagaggtggcaaaccagactcctgggctacagagggctttccccgctccagcagcctgtcagtgccactgcaaacacatggagaggtggatgcatggcctcgagaatgatgaatttgaaatcgagaaacccaaggcttatatcccagatctgttcaaaagtaaaaccaatactatcgccatggagggtgaacccactgctattccatcacagccgtttaaagtgaagcatgagcttttaaaagaaccttggaaagaaagtgcagaggggcaaaacgttttccccacatatcctcttgaaggaagtgagctcaaatcagaagacatggattttgagaataaagatgattatgatagagacggaaactgccatagtcaagattatccagggaagtactctgaagaggagagcaagagctcaacatcgggcatcacaggagacattggggatgagctacaggaggctcgagctcccactattgctcagctgctacaggagaaaactctctattccttctctgagtggccaaaggaccgcgtgataattaaccgcctagataatatctgccacgtggtgttaaaggggaagtggccctctagccagcagtatgagccctcaggcacactgcccaccccggtattaaccagcagtgctggttctcgaaccagcctctcagagccggaagcagcagaacacagcttcagcaacggcgcaacattggtcggcccagatccacaaggagagcttcttagctccagtattcacaaaggatgaacaaaagcacaggcgtccctatgagtttgaggtggagagggatgcaaaggctcggggcctggagcagttctctgccacccacgggcacacccctatcatcctcaatggctggcatggggagtcagctatggacctctcctgctcatcagaggggtccccaggagccacatcccctttcccagtgagcgccagcacccctaagattggggctatcagttcacttcagggagcccttggcatggacttgtctgggattctgcaagctggcctgatccatcctgtgactggacagattgtcaatggaagcctcagaagagatgatgcagccacgaggaggcggagagggaggcggaaacatgttgaaggagggatggacctcatctttttgaaggagcagacacttcaggcgggaatcttggaagtccatgaagacccagggcaggccaccttgagcaccacacaccctgaggggccagggcctgccacctcggctcctgagccagctacggcagccagcagccaagccgagaaatccattcccagcaagagtctgcttgactggctaaggcagcaggctgactactccttagaagttcctggctttggggcaaatttttcagacaaaccaaagcagaggaggccacgctgtaaagaacctggaaaattagatgtcagctccctgagcggggaagagagagttcctgccatccccaaggagccaggactgagggggtttcttccagaaaacaagttcaatcacactctggctgagcctattcttcgagatacgggcccccgcaggagggggaggcggcctcggagcgaactcctgaaggctccttccattgtggcagactctccctctggaatggggccactgttcatgaatggactgattgctgggatggacctggtaggacttcagaacatgagaaatatgccaggcatccccctcaccgggctggtggggtttccagctggctttgccacgatgccaacaggtgaagaggtcaaaagtaccctgagcatgctgcccatgatgctgccaggcatggctgctgtgccccagatgtttggtgttgggggactcctcagtccacccatggcaaccacctgcacttccactgccccggcgtctctatcaagcacaacgaaaagtggtacggcagtgactgaaaagactgcggaagacaagccgagtagccatgatgtgaaaacagacactttagctgaggacaagcctggtccaggtccattttctgatcagtctgaacctgcaataactactagtagtcctgtggcttttaacccatttctcatcccaggagtatctcctggactcatttacccatccatgttcctctcccctggtatgggcatggctctgccagccatgcagcaggccagacactcggaaatagtaggtctggagagccagaagaggaagaagaagaagacaaagggggacaaccccaactcccacccagagcctgctcccagctgtgaaagggagcccagcggtgatgagaactgtgccgaacccagtgcccctttgcccgcagagagagaacatggggcacaggctggggagggggcactcaaagactccaacaacgacaccaattagaacttttttcatttaagaaattattgtgacttgtaagtttcttatcccataaaggtttggtacttccctcacttcacctccataagaacctgtgtttccataagtaagattacgtacctgatttcctgtctgagaactatggtaacagatgttaatagttgcagggtctcaccacttcattagataagtgttgtctacctagtctaggaggcacagaattctcattctgttatccagttcattccagcaatcatagttaatacagtacttggtgacacgccctacccccttctcttccaagtttcccactcacttgaggaggaaaaatggcaaaagaaagctgtctagggttttaccattgaagggtggaagaacagagacaaagaggagctctttttctgtgagctgggttgcacaggaagaatgtcacagggaaccaaaaagcacagaaaaaggaagtgctggtgcatatttttgagttaaaatatttccctattttatcatgattactaagtgagtagtatagacagaagtatataactaatggttgaaaatacatatattcatttctttataaaaaacaaaaaccttaccggtagtaatataatttcccccttggtggtttttcagacacctgcagcaagaagaaatactgactgactaggcattattttctatacatccctctcaccagtgaaaagattcctcttgctgcgagaaagctttacccaccatgagttattgctgtcgacgggggtggggcaaggacccgcgctccgtagagctacacgctgcttcacaagcacacggctagcgctctgctctcacctggttcgcttacagatttctctagccattaatttgcctctctgtgtttaaagagcaccaggaccgaatggattttcacttcaggctttccttcaccaagaataaggttctttctggagcctgcaagaagacagttgcccaacactttgacacttgctagtaggtcctttgatcaagagtgtctgaggctgtcaaatgtgtgccaccctttataatacagctatgaaaagttacttctccattaattt

SEQ ID NO: 90445 - DNA, 619 bp, Homo sapiens
actcctcatggctgctcactaagcaaactgtcagactgcactgggttattgaattggagtggaagaagcacaggctgagactgtcggtgagctgagggttgctgctcaggaaggcatgggcagctcgctgaccaggaatgcctctgcctccccttgctttgtttgagaacttggccctgctctatggagcagggcctccattttacttggggtacatttcactttttctgaagtgttgtgtaaagaacagaatttaggctagatatgaatgtatacagatctcattcttagttttcacactatcctgggttataattctggattgtatctgtagtacagaaaatttgggtgatttcctatgcattctgtttatgctttctggaggtcagagggctccagcagatagaggttatttcctcagcctgtactagagagagccagtcatcatgatatttacaaaacactcgcatcatccattcatctctgcatgcaaaagataattattgatcaccatgatgtgcctgacaccatgctgagagcagccatgctagctaaaatggcacctcacccatcaccaaaccgggtccagagatggtcctaaaattcaggagcaagtggc

SEQ ID NO: 90446 - DNA, 616 bp, Homo sapiens
attgtattgagtacttagtgtggaatacctggtctatatgtctttctcctttttgaaaaggtcaaaaggcaattgttgaatcctcagcacctgatactaagatggcagatagtagatgtgcactaaatatttattggattgattacctgccgcacctactttctctttctgaaatacccttacttcttttgtctatgcaaattctgtgcctcctttagaactcacctgttcaatgaagtatttcttgctttgcagtccatgctaatttctgaactcttactgtattcatatgctgtgccacacagcaaactctaaggaatctacagcaatgacgtaagtgtccaaagcatttctgtaatacgttaattaatatagaaacaaaattactaattaacctgttaaaaacaaatatttactcagtacttgctgtggtaaggcactgtgctagtctttaaggggacataggtaaatacttccttcaaggagcttacagtttagtaagagggattaaacacaccacagataagtgggggagtttcataagggggggatttttgggagggccaaaatagggcttgatatgaaaagtaaagggtttggggaatttggataacta

SEQ ID NO: 90447 - DNA, 447 bp, Homo sapiens
  misc_feature (1)...(447): n = a,t,c or g
ntttgaatccgtancgccgcacgaccggnccnnnnctttctctcgacccacgcgttcgggcaccaccagtgtccctcagccattctcagaagaggtcttcatctttctttagcaccagaaactggccaaggacaacataggccttgtcaaagcacccttcctccagcttcttgtccataacttcaccaatcccggccaggctccctactggcttttcccccacggactctgccacaaagtctcggtgcttttgggaggttgcaatcttgttcaggtttaattgtcagcttcagttcccataatggttcctcctgccacctggctgctcctgcctatacctcaagccactagaactttcccctgtaccacaatttatttaaccaattttatatttagtttttatggacatttgtttccagaatttcctgttaaataaaaccgtaacat

SEQ ID NO: 90448 - DNA, 556 bp, Homo sapiens
tttcgtctcgcgtgcaggagtcactgggtgtgtttgcgtgtgttatgggtttgattccagagcaggttgcacattggtcctgggtggctcgcaggctcaggtcgtgcttgggcgtcctcctcctaatcgtttccgaagtagcagcagcagcaccaccaccagcagcagcagcagcagcagcagcagcagcagcagccgccgcggcaacatcgagctcagcggcacagcaggcagaactgtgcagaagcgagcaccgtttggggagtccggggggcgggtaagagggaggagggggaaagcctgtcttggtctttgggattatttttttttccccttctttccctctctctctctttcttgagggtgtgtgttgccccctcgaagtgaaggaattttgctccaaagcgagctgggaccgaagactctaggctaagttatctatgtagatggtgtcagggagcgaagctactgaccgagctgctgttacatccagctttttaattgcctaagcggtctggggcttgcttcgtcatttggctttgctgtggagcactct

SEQ ID NO: 90449 - DNA, 880 bp, Homo sapiens; identical to SEQ ID NO: 60444

SEQ ID NO: 90450 - DNA, 784 bp, Homo sapiens
  misc_feature (1)...(784): n = a,t,c or g
acttaaaatgcatttcatcctagttgttcttataatagtgacattatcgtagacacatttttaaatccagatagttatttgtactttttcacaccagtttttgcttttgtcacatttattcaaactagcacctccacagtcaaagtgttgtcatcctacagcctcaaggcccctcactctcaatgtatggaatgtcatggtacttgatgttattgcatgcccattgctgcaaggcatcacacaagatatcctgagacaggcggtgtgcatattccaagatcacagtattggtccctggaggttccttcacttcctctttgacattaactggagaagccatcctaggtagacatctctcttctggcataaagggttcttcactctcatgctgcttctcaccttcatatatggtaggaaatgggaaagtttgctttgatttcatgcagcccatgttatgaagagctgtttgtggaggaagcagtggcaaagactacttccaggccatctttagaaaacaatgaaatttgtccatgtgatgttgaccagtgctttccctctccagggcacttcagtaatcaatgttccctttcaccactcttcacgtgtagtgtttacacaacacgttgcccggcagttgcgcgcccatggcacgtccgaacaaccgtggggtcacggagacagcctgcgctcaggaaaaaacaaatctccgaagctcccggagcagccctaacganatcgacgcannnnnncctnancnnangngnnngtcgatggattcgtcatg

SEQ ID NO: 90451 - DNA, 1389 bp, Homo sapiens
taattcgcaatttgaaagcactacttaggatttcatcctgtgggccatggcctagggcattactgatttccttttccatgtcctctgtaagttcaaggagatcgtccgttcttctgtccctctctttgcctgagcaattcttttcctttgtctcaattattgacactttcctcctgagtaagccattgcttccactgcccaggcggagtcgggccgacacttcttctgataggtcaggctccagttggtatcccctcctactttcattttcaaatctgattccgaccatcgtctctgtatcagtaattttcccctttgaacacctcttttcacttctcaatgaacatagaggtccccttgtttcaacaagtctatattgttttggaacaaactgagttgttttgactccgtgattttgctcttccccccagcctttggtctttaatgtgtccatccgacttctttgagaactgtgataatttgaagttacaggacagacagagtttccatgaccactttctttaagtcgttccaataactttcggtacttctctctttcctctttttgaacaccctcctccacagtacaatggggacgcctcagacccttgccactctcttcagaaatcatctctgttacagcctgttcctgaggtttccacattaaagaactctctggattacctttgctatggcgacggccacctggtcttctattacagccttctgagttcaaagtaaaaccaaaggaaggcaggactctgcgtggctgatctcgggtaactgtcactctgatctttggatagtcacttattccattaggagatttattacccagtttcagcatgttgttccaggatccagaacctgtcagttcacaagatgaagagttcgaaaatacctctcctgaaggggccacattccgtgttccattacaagcagaagttaccatgggctttgtggtcagctggaatgggaatccaaataagctggcagcattgtagagactgtttttcacttggtgaataaagcaatctaatcttggtcttttggctggtatttcatcagtgtccactgtagaaaacagagtgctgtctgagcgccgcctcttcaggagggcccgggcagggggcaccgaccggtcgcagaaacggaaaatggtgccgagaatcctaaccagccatctgtacataccaggcccaagcagcagcggcggccgacacaccccgagacgcaaaccccagagctgtcgtcgccgctgccgccttcgccgtcttaaccaccaccgccagagttcggtcgctgatttgtgacgcgattcaagagcccacagatacagcgtcaccagggataccagaggcccccgcccgccaccgcacgaaatcgtcg

SEQ ID NO: 90452 - DNA, 769 bp, Homo sapiens
aatacattgttgtgcttgaactcttctgtcaccatgtgaacaagccctagccaacctcctggatgacgagagacacgtggccaagtcattactgataccccagatatgtgagtgtggccattctaagccatccagctcccagccaagtcacccagaagcccatggacatgtgaatgaacccagaaaagatcatccatgccagcccaaaccagaataatggccctgctaacacacagaatcttttgagaaataattaacatctttaagtgactaaattgttgggctgtttgttacacagcaaagctaactgatacatgtgaggattgaggatcaaagacattaaatgacttgtagaatcacttaagtataaatggaggcttaccatattgtgcctctttcctaggctagggctggagatacacaaaatctgaaatacatgcttgagcctaccagcactgcctgtttgagggatatctcctgcaggcctatcctaggctatttccaggatttgtggcaacaattctttcccagcccaagtgcttatcttaaaccaggccctacaaagcagcttgcctaccatctgtcttctccatctttggagcgctgaccctcagtgtctcaggcactcttcatccaatgagtctgtaaaacttgttgaaggttcttggcgagctgcggaagtcctgcgcgaggcggcccgcggtgcacggggccggggcagctaggcgcacaccccggcttcggagcgcacgcaacctccgggacgaaa

SEQ ID NO: 90453 - DNA, 421 bp, Homo sapiens
  misc_feature (1)...(421): n = a,t,c or g
tttcgtctaaaattgtatgttgcggggaggaaaaaaaatcacttttgtttgaagacaaatgcagtgagtttaatcacaggtgatctgaaaggcgnnctatcttttgctatgttcactttgcagaaactttggcgaaactggctgaatgaagatcgattccaatttgtaaatgtggcagacaataaaatttccccaagcactttgatgatgtttgtgttaatacttcctgctcagagctgtagcccatcagattctagagctaaccaaagagggaagacaacctgtcttctcccagtttccagccttgatagacttaatcattttcaaggtttaaggttgttttttgttattgggtgggggggagagagaccccccacctctcctaacttctggggttgctttcctcatgctgagaggacac

SEQ ID NO: 90454 - DNA, 509 bp, Homo sapiens
ccgcccactccagccattccttcaggctgcccgggctcttctctccgcgcatgcgcagtttcctacaggcccggaaacggatcgcgttgggtgaaggtgacggcgtcgagcgtgagtgaccctctgtgtagattaaacctgcgctccctgtttcccatttccacagccgatgtccagggtcgatacggcccttaaaatccccgcacactccaccccaggtgaatacaggcctcgcagtgtgggtccggagtcgcttccctttgggttgaagtcgctttgaggctgctccccgtccccggccttttgcttcttcctcccgcttaaaaccttttcctgaccccctcccccatccccgggctttttaaagtcttcacccaagaggtgtattcccgtcctgggtgcctcccagcctcgccctcgtcggcccctggagcgcagcgccgcagctgcagccgcagtcccggggagccttgcgtcctctgcctggtcctgggatcctgcagacgaaa

SEQ ID NO: 90455 - DNA, 397 bp, Homo sapiens
tcgagctcattcagtctaggtcattttgcgcaaacagaggccccttggaacgcatagcatttaaaagtgggacctgcccataacaccatcatcatttgaggctccaggtttaggattttagatttatagctgactcttcgtgcacctgcatcagctccttcacagagacttgctgaactgcctttttgacctctctggctcacgttatattaacagcctcctcactaatctctgactctggatttctccatgctagactgcctacacacagctgttaagtgttctttggatgctgttgttttatcttactgtgaagctcaaaacctggcagttgtctcctcttgattatggtaaatgtaaacttttcagcctagtattctttcaacacctctgtctt

SEQ ID NO: 90456 - DNA, 407 bp, Homo sapiens
acatccaaagaagattttgactcacaaatttatatagggggttattttcatcttttcacaggaattgatagaaaaattgagttcagaacaggtacagaagatccaaactacattaccaaccaacttgaaccaatcgatatttgtagcacacaatacatgacaactggagaatgtacattctttttacctaccaagatagagcacatgttgagccataaaatcctctcaatgtatttcaaaatatggaaatcatgcaaattgggttcttggagtctaatgttataaattataaatcaatacaaaaataagattttaaaactcataaaatatctggaaattaaaaaaaaatcttctaaatgactcctgagtgaaagaagaaatcattaaagaaaatatattgaacagaa

SEQ ID NO: 90457 - DNA, 1110 bp, Homo sapiens
acagaagtcatcaattctgtcatgattgacaacttgggggcctccaattaagcctcatttatactccccaccccccatttttttagagaattgattttaaagggtattgggaggaagaagtaattaagtcagagagataaaatgagaacttaaaacacttcagattgtagagtaatgcatcagagggattcttttcaagacagaattgtctgtgatccttaactgtgtgaatacactccttggatttgaaatgaagacaacccctttccacttagtcatgtgccctatgaggcttgtttctgtgtggcttgctgagactcacttaaaatgacattgacttttattaaaccttaaggtttgtgatgggctttttgcacaaaagcctacttctccaggggacgtccctgctctctcaggttgctatcttgttactctggcctgaaacaagttagcagccactttcccacagacctgcacaaggcacatcacatcaacggctgttgattagagcataatgacttgttagatcatgtttattgtgcaaatgaacctgaatgtactaggacagcatatccatgtaggcttagaaaacttaattgttattgccccttctatcttttatcaggctaaagcttttggatttatggttattcattctacctataaatatattaatagctttttgcgctggccagatatagggcatgacctttgacatcctgcttggctatgcctgggaatttgacatccttcaatttaggtggaattccctttgtttgtctcttggaataggtgcggaaaaacccattctgccttctttctcttcaggaagaacgtgatcactgcctagtcggaaaggccctgacaagcttctaacgctgtgatttctgctgcgctaagtctaacgcgccggctctcatgtaatcgctggtccctcgatcgaagcgcgtttgcccacgaccactctcccctcgcccctggacgtcccggttctttaagtggcgttactctctgcgtcagatcacatctttcctctctggtcaacctgatcgtctctagcgaacctcgctccgtcgcacatgcactggcatctctgcagcgcctgttccc

SEQ ID NO: 90458 - DNA, 416 bp, Homo sapiens
attaggtaggacttctagtacaatgttaaaaatcagtaatgcgagggaacatccttgccttgtgcttgtttatccctaccttttgagcgcctagattctccaattcttgagcctttccagtgatttctggccaaatctctttgttgcttattgtcatttgcatcttcatgatactttgtagctttgctattcagtttatcctaaatgcttctcatcctgcagtattatgttaaaatctcttgttcatctttttttacactcacgtcttctttttcttatggatttaaccctttattccttcactatcattttaatggcattttaggaaggaggaaaaatacatgctttccagcctgtgtgtttagtcacaaatgttcattttgttctctagccgtttgactccctatcagtcattt

SEQ ID NO: 90459 - DNA, 412 bp, Homo sapiens
cctgaaacacacagatccatggcacttagtttctctgtaacagcagctctaccatggtgtccagaaattttagcccctactatcaagaacaaaacatccttgtacatgtttatacatctttttgagtaggagttttccaccagttgcagggattccctgagtctagagtaatgccacaatgctgctcccttttactcctttctaagcatttctgtcagggagaagacttagattcagttgttcactttaacattttccttagatactctcttagaaaagttgtattctgcgcacttctgttatgaagggagtaagggattgctgagatttgttaagttaccaaactagtcttgatagatgtataattattacatatccaccatcacttcatttagctgggcaagtattatca

SEQ ID NO: 90460 - DNA, 736 bp, Homo sapiens
caggaactctcatctcctgggatagtgaaagtaaaggaggatgtggaagagactatttcatattaccagaacctatttttctgtcttccttgataaggctacatttcccagccctccccactcccttgcacgtaggtatggacatgtggctagttctctacaatggaatgtgaatggaagtgaggtaccaggccgaaaatgggccttctccatggtctctttttatttgctaaacggtaaaagcaaaggacctcagggaccatagaagatgacagagtcaccagatgggaagagcccacgtctgagttaccacgtggaaagttgtcccattgaacaccagcattagactgaggttagaatgagaaagaaaagcttttgtcatgttacatcactaatatttcagggtttatttattaaaacagctcacattaccttaccaaaatagatgggtatgatcaaatgtcactactaggagcattagaggattttaaatatttgatgaaatcattatgacattagttatttttgagacttctaaaacatttgattattaccttgaatatatgaacgaaaagtattgcaattgctctataagaagaaaaacactctgaaaatacgagcatattgggagtgatatccagatagtcgtgacctgggccttgaactgcctctgtttatttggcgacaagactaaatccttggagccctccctttctaaggggtacatgaacaatcc

SEQ ID NO: 90461 - DNA, 795 bp, Homo sapiens
ctacaccactgtggtggaattccagaatcagttggtgacagttgtaccagctttgccattcaagtgaagcatggtgctagggtgacactgataaattggttccagagactttcctttatggggcatcaaagttcccccaacccacgcacatttttttgggagctttcacttttgtctagagtatattttcacacttgctgccacactgcatccctcaacttcccattggacatatgggcctctttcttttggttgtcctgtcatttggtcacccagtatgtggtctgatgagagaaagatgactttttcacaacttttggctctgactggcaaaatctttttctaaatcctgcttcatttcaggccaggcagaaccacactatcaaaactatttttgactgcactcaatgctacaatgtcttgcacatacacttatccctgggcagcatcaaataaatgaccttcaaaatctataagctcttgaatgcagataacaataagagttatctgcttaaagaattatgtgttggctgggcatggtggctcacgcctgtaatcccaaaactttgggaggcctaggcgggtggatcacctgaggtcaggagttcaagaccagcctggcccgcatggtgaaaccccatctctactaaaaatacaaaaaattacctggatgtgggggcagatgtatgtaatcccagctactcaggaggctgaggcaggagaattgcttggacctgggaggcagaagttgccagaaagcaaaaaatatgcctttgcttttccagccgggacaag

SEQ ID NO: 90462 - DNA, 432 bp, Homo sapiens
  misc_feature (1)...(432): n = a,t,c or g
cccagccgcccaccctgagccccagccgcccaccctgagccccaaccgcccaccctgagcccaagccacccaccttgagccccagccgtccatcctgagccccagccgcccaccctgagccccagccgcccaccctgagcccctgggaccagcagttctgggatctggggagaacacctcatgcgtctgactctgggccttgctggtcacaacagaaacccaggcgggtctcatttcaggcccagggactgccgtcctagcagggagactgaccacagccaggaaaaatggcagcaaagcaactgaggaggcaggttaagggaacagcagtanggagggtggagggtgggggcgacngcgtcagctgagaaacgagccaagggcaggagagcgttctccgggacttagcgggcactggaggctctgcaccan

SEQ ID NO: 90463 - DNA, 396 bp, Homo sapiens
aacattttggctaatttgttaaaataattcaggttaaatgaaaaccaccccatgcagaggatgctaatgaaggccgagcacattataattcaggttaaatgaaaaccaccccctgccgaggatgggtttgggggggggggcgctttcaaaagggggttttttttaatggttttgggaacctatttattattatatagtgcctgcagacttgatggaagtgcattggctgtttattttatgcattgaagtgagtattaataggattattactattaggatattactattaggatgatatttaaagtactgtttgggaaatgagaccctttggttttgtaaaatggctactcatgattgaagagtcagaattcaggtaggttgattttgaaatgaatg

SEQ ID NO: 90464 - DNA, 622 bp, Homo sapiens
  misc_feature (1)...(622): n = a,t,c or g
gcggggaagtcaacttgatgaggggcctagtacggcaatttgcacagttcctccattttcactctgtatgccatgcttgcccttggctgtgtttggtatctctgagtccaagcctcctagtttaaattctgcagatgctcagcctcctgtctccatagggtagtctcacttgcctgaatgctgtgggaaacaaggatttgtattcttttacctctgtaactaatattgccatgaagtttatctttgtgcatatctgaactctttatgataaattcctaaagtgaattttaaaatatgtgcaattgacatgcatttctccgtatatgaattttaacccttgatgcatattatacctaataatctaatcacagttctttttttctttgggcagcatttacatttagaaagtctttcgcctgctagtttccctgtagccttttctttatcagagaataaaagtaaaataaattataagtcctcgatagaattttagaaaaaaatattttgttttcctcttctccggntaacaaattatttagaaaaaatattagagaggaaatcttccattagtgagagaacaaatacttacataaatgtaatctgtaataaccttgatttagga

SEQ ID NO: 90465 - DNA, 554 bp, Homo sapiens
  misc_feature (1)...(554): n = a,t,c or g
atgtgctaaaaaaggctttaaccaaaggcctgagcttgtcaagcctgaggccggcacgtgncgtgancgtggtgaatgtgcagcggcctctgcccgcacccagctccccggctctgggtcatgaagggccgctgggcgtttctccgcatggtgcctgtgtctcctgcattgttaggagctcctgcttctcactccagttcctccttctcactcctgcttcctcctccagttaggatcgtcaaatacaaagtcacaaaaggatggcttagccgagttcaatctttcctgaactgtgccatatggaagtatatgtcaactcgtgagcaaggtggacagcgtgagttcagtcttcatctaaatgcagccctggacagtcaaacacttcactattatgctaattcatccactgtggacatatcacatttttggttatgatgattcttcatctttgagggcaatagacaccacctatgttttgagaaggtcctcgcagaagcaatgatatgtggaataaacagaacgtcaagcctgcctgggcaaagttcaggtccctt

SEQ ID NO: 90466 - DNA, 488 bp, Homo sapiens
  misc_feature (1)...(488): n = a,t,c or g
cgccgccccccatcgagtacattagcactcngcggnggcattcacactgtatagggactcaggagagatggaattccagataatatgtcacattttctttcatgattgagattgcagtctaacagggtaggttgtaagcaataatcgtcatattacttaataacactgggaggggaggcttcttgtgacaagagcgtggagggtcgtgaaaagggggcaaaggtatgggtcatttaggttgatgaaattccagtgaggaagcatggcacatgctgttactgggttttgcagtccttcttaatgctgaggcagatgattgcaaggctgaggtagtgaatctgcattggaaatttataagaaagaatgattaagatgaaaacacaatttgacagacatttatccactgaggctagtcattgagctctgtgctggggacagcanagaggagttcctgtcctagagagaacaatggaaaattagtctgtact

SEQ ID NO: 90467 - DNA, 396 bp, Homo sapiens
tttttcagtagagagaaaagggctttacttggcggctttgggtttacaagatcgttggtgaacaatcagtctgtctggcaggaaggtacgcccacaaacattacagggaaccaactggctgtgggcacttgtccaagcagcttcatttaaagcatcaagatcatagaagcctttggcagtaatggtcctgacttctggttttttaggtactggtctccttaactctttaggcaacaagttgttttcattatgccattttttcagacattgtggctcatgaatgctaatagattttgttccatattcacgaccacaaatgtagcaaacaactgctggtggacgccgtatcattgttggcttagtgttgtggtctgtcgatgtgagagccatgggatc

SEQ ID NO: 90468 - DNA, 394 bp, Homo sapiens
agataaactgctatcggacgatctagaggattccagataaaatacccgctcatgctaatatctggataattatattttgacacatattcttatgccagtgctcataaatttacgccgaaatgactgcaaatatattcgttatctaccaaatataagatctgttgtacatttagttttataacctgcttgtctcactaaaaccatacctcaaaggtcattggttgtgagtaaatatgagtctttaccacagagatagtaaatacatatggccaataaagacagagaaacaaatatggctacaatatgttatgtgccaagtgctttttagctactgagtcgttcaattctcacggcacccttacaaggttgaaactggtgctgatctccattatga

SEQ ID NO: 90469 - DNA, 843 bp, Homo sapiens
ccacgcatccggagccactgtgctcggccctaattacattcttttaaaaactttatcttaatttttttcccagatgttgaccatattagctaagaaatttgaggtcctggaaaaatgttttaggggaagcaaaaggtttggtatgcatgttttgcttttgcttgtctttcagttcttaattcaggtgatatgagactttacagaagtcaaaatgccagagtaaaaaggtggttattaaaaataaaaaacctcaaatgtcaaaattaagttacttaaaagtctggttctaccatttactttgagtattaaactagacagttgagattgtataaccatctttgaaaatgatggttgctaaaggtctggaggctctggaggtgatccataaagccgctcttattaggtgctttcaggatttataaggcctaagtccttgtgatagcacagcttatctttattttgtttttagctctttttttttgagaaggtagagtaccagctagcaatgcgctgcattaaacacggttcattggttttttgaccgtcttgagagaagaagaattgaggaggctgagctactgtgttttcgttctaacgcgaaagatgtataggggccttttgggaacgtagaaacgggcggatgacccccccccacgtacactttttatttaacttgggtgagaggggcggcttaaaattggcacgtttgcccgggggaacgggagatttccccgtgtgggctgtaaagcaaggtataacgcaaccctaccatccatcgcacaaacgctcttttcgacggaacctccgaccggcggcgccaatagacagatcaatcgccccgac

SEQ ID NO: 90470 - DNA, 397 bp, Homo sapiens
gctcctaatctagtgcttctccaaaaatacttttaagaattagaattaggccattagttattataaggaaggaagggaaataatcattttcataaaactcagcaattcttttaatgtcaagatatggattattattacactcaacaattataattattaatattttccacggaaaagtttcatatattgaatgacccaagtactccatgtgaccttccctgtctatgtaagcctagcattctgtcagccaaataaaattttggaaggaaggtcagataaaattattttttcagtcggtattaaagaaaagaaaaaataaagaacatttattgagcatgcactaaatatgacataaaagatctttgttttctgtattagaggttgagaaagaatgaaa

SEQ ID NO: 90471 - DNA, 393 bp, Homo sapiens
cttcagctcactgcttactgtggttacaggatagcaagaaagataaagagattgggtttaggcattttgaatttggctttaaatgaacccagttgcagatgttaaatggtgatattaagtcagtctaagcattaatataaaatgatgttcaaaagttatagaacagcatataaataattgaaaaacaaaagatcattattttacccctaattactagccttggagtatgggtcaacctttccacatccctcacctttcacatgcaatgagatgctcagtgaatcccaataattatccttttcttagagtctcaagttcttatcctctgtttttattaaaacagctgtgtttccagcttggattatttttacctcctacttaaactgttgcaag

SEQ ID NO: 90472 - DNA, 612 bp, Homo sapiens
acaaatcatgcttctagttgccatcttaaaaattatgtgatgcagtgtgctataaatgtgatttagtatgtaatttgcctgggacgggggagaagctacatttattggcattgtggatgagctggatttatattactgatgttacctttgaaaggtatatgaatatttaatgataagatttttctggttgtcaaacatttgtaaatctgcaaacttcttaacaacattacacagtaaacaaaaaatacttcctgtatactaaggaagacttctaaggaatatccatttcttaaaggccattacttcgttgtagtattctgctttagtgctagccacatttgctccaagtttatggggaagcctttaaaacagtaattttcagtgggaagggggccaattttgcttttcagaggacatctgacagtgtgtctccagacattattggtgattaaagtgggaggatgctactgacatctagtgagtaaaggcccatattgctactaaaaatccctattaccaaaggggaactcttccaccaaagaaaaaaattcccgggcccccaacctgcattttggcccggaaaactcaaaaaattttttgttaaaaaaaaaa

SEQ ID NO: 90473 - DNA, 649 bp, Homo sapiens
tatcactatatggaaatccttcttagagataatctccactgatgcgatttacaacagttttcttcttagccactcttccatgctcatcctttgaatgacagccatgtatggacttgaacctcacagtcctctgtcgcacagggaagaatgccagtgatcttgaataagactcagtttttgtgttgctggaagaaggaacagtatctgggtatctgaggttggttttgtttcctttattttctcaacatctttgagctttgtttgaaatgcaaaacctaattttaaaaattctgctgttggatatatcatttgaaatgtagaaatactctgaaaaaataaacataattgaaatagctttcaactattaataattttaaaaatacatggtttcctttgtctcctctatggttttgaaatttaacaatgggatatttgtcatcattctgcaggttgagtttttcagtccagcgtagagtgattgtttctgtttttattttatttctaaatttttatgcctgcagtggatgtgcgtgagctatggccttggggcctaaacagctctgggtctcatggagagcgaaatgagtgcatttcatgctttcgctttccacaatgcttattctgttaaagtaaactcaacttatggatg

SEQ ID NO: 90474 - DNA, 1052 bp, Homo sapiens
aatataccattaatattttataaatacccttttccgggtatgggagagaagaccaatatgttataatttctttgaaaatactgattaagatttaaatgtattccacagttccatctctcttatgcagagaaagatttgttggagagagagccaagaggagaagcccatcaggaagttcttaggcgagcagccaaggatcttcccatctataccaggaccatgtctggaggtaaatgttgataatgagtgctttgcaatggtatgcaaataacatcattaaggtgactgtaagaaagtgtgtttatgtacttgaaatggtaaaacactcatttcagaatgctgtgttatttcttggattgctgttaaatctttcctgtgtgattccataaaacagaatggaaacacgaatagcactgtggcacagagatcgcaaggaaatcagaactgactttaatcctgttctgcctacttagttatgactcagtgaagatgtgggaactgctgaaatcttgatttatggtagtactcatgtttaaggttttaattgtagactttcctatttatatttaatttaaggcagcagtatctgtaatgaatgtaaaatgaatacatttacatgtattttttcgtaaacttagaacagtcatataggtgatgtaaaatttcatttaggtattgggataattttttatctatctttaaaattttcttacaaatgcaataaattaacaaatctcttacttgggacatattttaaggtaatttgacaactatccacttaaacagttgtcttaaaactgatgtatatggactagggatgcttacccaccaaaactggcccaaagcttttggaactcaagaccggggtgtgcctttagggaacccgttacccccatgtggctgtagaccgctggaatatggccagttaaaactgacatgggctctaggtattaaaaaccactgggttaaaagacttagtatgaaaaatcatcacacccccccccattactgaacagacacagggggttgggctataatcccacaccccggcc

SEQ ID NO: 90475 - DNA, 609 bp, Homo sapiens
atataaacaaacacctacttcaaacattgaaactgatttttttcatagtcggccggaaagcaagactatttgatgttcagtttggatgccctatttctgattatataatttagggctgggaatagaattttggcatgtatctgcagttcttatgccatagaaaattaacctttagcatcctctctaaaagggcaaatcatcatgcatacaagttccaaaaaaaacttttaaggtaagcttccttctaataaaagatttttctgtcttcaagcaaatgcacatctccctagtactgcgttactttcaaatattctgtgtaatctgtgacctctgcagagccatagctaactcagcccccaagccagacatggaaggatccccaggtgtttagctgaagatcttggtagacaaaggtcattttctttggcctgtctataggcaaagcttgctttcgaatccttaaatatattcaagaacacttctcagctcaccagattctagagcattgtgtacacttgtagtcaagtacaactcaggaaagcccaagcccttaatgaacctcttcctttctcttttcccttcctcctttctcttttcttcctggctttt

SEQ ID NO: 90476 - DNA, 612 bp, Homo sapiens
aaagagtttatgtgctatttcatccatttccaataaaaatgcagaagataaggtgaaaatgtatgataatattgaatatagtatttatcacagcatcagagaacatttaccaactacttagcatgtgtcaaacatttttctaagcatgttacatgtattacgtattactttatttaatctttataccaattctgagaaattctgttatttttcccattttacaaatgaatcaaccaaggtacagaaatatatcacttgttcaaagtcacatgacctgtaagaggtaactagaatctaattattatgcctattcactatgtttacaacatacacaaatgtgatttaatgctatttaaataataggaagaacaaaattcaaacaaatttaaaggcttttgaagtcagaaaagtcatatagctcttgcatccccataggccagtgttatagtgacttgattaaaataagtgttaaggaatttttgaagttggtcatactttctgaaagaaaaacctctgttgcctctagatgtagagcatggttcttttgataggctggagaaaggtgaaatgacctggaaaaatcggcaaaaccaaactaaggggcaagggttt

SEQ ID NO: 90477 - DNA, 738 bp, Homo sapiens
ccccagatacagttattggggggagggggagcggtgggaaggaatttggccggtgggtcctctggtaggtttttgagtgacgtttgggaactccaaaggggtcttgtcctgctggaggctcgagaatggtctctgagagtgactaggagggaagaggatgctgagccagttacccatgtgcctgctgagcaggtagttgatggcggtgaggaagcaggcctgcaggaagagggacaccaccgcgatcactaagccatgccagacctccatgacttctgtcagcatgatgagctccttgctgataagttggggctcaggcactttcaggaaccaccctggcacctcgtctctcagtagtgccaccggcagggtgctggagatcaagtttcagatgtccggactccaagtgccagttccttcccggtgttcagccactgtgttaatcctccacagggaactgctacacgctgctctggtgaggcattccaccggggcaatttcctacccgggagtgctctttggatcgcgtcactcgggctggccggagtccgcctcagggatgctccacaggggaggcctaagccgcctaaggggctgcctcggctgtccatcagttacctcgtttcctggtcagggaaccaagaaatgtagcaggacgagccgcagacaaaacccctcagacaccaaattgtagaaggaaggcggacgcgtgggcggacgcgtgggcggacgcgtggg

SEQ ID NO: 90478 - DNA, 880 bp, Homo sapiens
  misc_feature (1)...(880): n = a,t,c or g
cccacgcgtccgcagaccttgaagaaagacaggcacactttgaaaatgctgtaaaataatttgtagttgtccatgttggtgggtaacactggggcctatcttttctttttgttttgcattaaagacagatggctcctaaattcactgtatcttcaaagtcttaccgtaataagacataatataaagtggaaagcattaatgtagcaataaaatagaaagcctgtaagtggattaaagtaaaatgatggattgttagtaattagaaaatatagcaagcaagcttcatgaacacttgtgataattattttaaaataagaaaaggtagaggtatgggttcaagattttgaaccacggaaatgtattttggggcctgtttatttgtcctgggtctcatgagaaaacatcaactcgatcactcttaggaactttagattgctctcctaaaaagtgcttaaggaaaaaaagaaagaagttgagactgaattcatggcaatttatgggactgagctatgtgattaagcatttcatgaaaaagaggcccagactaactctatctatttatttacatttcagaatctcacaaaaataacaatttacggccgccttgaccaaattttacctcctttccccaattatggactaaccngcccgctccccccccggctgcccccaaacacacatcgccccgcgcgggggcgggtggcgccaataaaaaattttcggggggcccctctttttataaaaacatattcttctccccgggcgggggggggcaggttattttttctttttgccccgccctgccaggcccccgggggcggtcgcgcttttctgatccgtcggagtgggaggaggacacactctttgccctttcaccccc

SEQ ID NO: 90479 - DNA, 373 bp, Homo sapiens
  misc_feature (1)...(373): n = a,t,c or g
attgaaacatctctcaagcttaatgactattatttactacataattatttattttgtgaaagtgtgaggaaaactaaataaagcagtagcaatttaagtcataatattttttgatagatgacttcttccactttagggggaattaaaaatcatgtttaaaaaccacatgtgcagcagttctgtgactccctcaacatccggttggccatatagtccctttgcaccacagaggttggagtatagaatatgcccaaagctgctttgttttgttttaactatgcttcatcatctgaggttgtgttaacatagtttgtcctaatagtcttttactggaaacttgctatatttgatcatgttcagcaagtaaactatn

SEQ ID NO: 90480 - DNA, 401 bp, Homo sapiens
cggacgcgtgggtgaaagtctgaactaatttcaaagtgttgacattatacagtcatttttcatggatgtacatgttatggctggcatgtagtaggaccgacaaaactgtgaaatatataaatatcttcaaactactgttctatttcttatactttttgaaactgatctagtgatttgcttttgatttcctattgcagtgtttgattgtcatctaactgattattttaagtgatttaattatattataagatgaataaaattcaggcttccagttaactaactagcttttgttccctgaagaaattggcagaaaaggacatatctatttatgattttttttcctcaccaatttctactttaagagacatgttctcaagtagagaagattttcccacagacgg

SEQ ID NO: 90481 - DNA, 394 bp, Homo sapiens
  misc_feature (1)...(394): n = a,t,c or g
attacttagcttggttatactgccatttatttatataacttcaacataatgttggcagggaggggatgccaagaaatattttgttaaccaagtctagaaaaactgctgctgtacatttaaggctgtttttttcttacaaaatttaaccatgtggagccccagattttccgccaaacaaaaatatattatttctaagaccttcttaaagaataaaattataggattcatgtcatcttctggtgttagctgaaagaggtcatggatgcttttggaggtgaacttatcattcactatctatatgcctctgataaaccaagtttattcattcctgagagtactctcagacaaagcataaagttttctataatgttctgtgaaacaatattattatggn

SEQ ID NO: 90482 - DNA, 408 bp, Homo sapiens
  misc_feature (1)...(408): n = a,t,c or g
caactaagagatgaaagaaaacagtttattaaatcaacctcatatcaaaagcactgaacactgaagcaacttaaacattaaataattataactgtttataagatggattgagatgttaaattcctgaaaaggataaataatggaaaaagcagccccctcgctcttccttcctccatcatcatgatgngtacagttgactccatttctcaccctgtcttctcacaagtctttcagggtcaagtgatttcaggccaagaaacaaaagcaaaattgtctcattccccagtgcattcagatgaaaactgataataaaatcaggtacagttccaagaggagacactggagaggaaccacgctgggtctgtaaggaattgcaaatgagatggcacacatatttatgctgtatca

SEQ ID NO: 90483 - DNA, 771 bp, Homo sapiens
ctactgttggggtttcttttccacaaggagagtcccccagggagaaagaagcaggagtgggagtgggggagcatgttgggggaaggcagtgagggtgtcctgtctgcagcagggcatggaggggccccagcgctgcacttgcttcctttaagcctggcctgcttgctgtcagccccgggggtggtttcctctctaggaaaagctaatgtcatgcttatgctgaaaaactcttttcagaggtactttaggaggggcctggctctcgattaatctgggccatttcataccggctgtgctcacccaggcacaaacactgaaagcaacagctggcaaagccatcgcttggtagcagcttggaagacaccaccaaagaagctctcatggaagcggcagatttcctgaagcgactggaatgcggggaaggagggcagtcggggagagccgagaaccagcccccctgccaactccaccccattcctctcctcacctgaaatgtctcatccttagaacagctgccctaaccccctaatcccacacactcctttgtaggttaagacccctgaagttgcaccctctcgtaggagctatgtttttcagagatccatgtgattatttgcctaatgtctgcctccctcagggaagtaaagtctgtgacgcgtggacctggtctgtgttgttcactgtgcatccacagtgcctgggtagtgcctacatagatgggcttcacagcctcttccagataggcagggcactgagctctgtgggccacac

SEQ ID NO: 90484 - DNA, 397 bp, Homo sapiens
ctgaaatattctttgatctctctacctgtaaatcacgttctactttctctactatagactgtagcatatagatataataatgacatgacaaattaccaagagcatggagagtatgtctatttaaaagatgattgaaaaacacacacatgcaaatactaacccagacatttactttttaatgtttttcttcttttttgacttgttactagaatataaaattatatgaaacacatactgaagacaagttttaattttttttaatttaaaacacatcaggcatttcttttttactggctttatagtttaggcaatattaacaccttacatctgtaattttagcattttgaatacacagtttttaatgtacattatccattgggcagatccatagaacaag

SEQ ID NO: 90485 - DNA, 620 bp, Homo sapiens
atgtacctggaagcttccctcagtggtttctgtcctctccacttgagctctgttcacaaatgtcagaccatgactgacactctcttggctaggtggatactggcaggacagttgtaggcttgtttcctatggatgtatatttaacatgtctggtcaccacacccatatcctaagctttagagtctctttgctgtcagagacacagttccaaccttagggaaaaggagttttcagctgtattttcctgaaacattagtttatctttcctgtttgttccctttagcacttttatgtcctcacagaaagaaggtgtatttagtaatgtatgaaaaggtcagcttaggacatctggttgctgctgcccaactcttatcagatttaatgattgccacaaggataggtgacttctctgtgctttcctctccccattgtggttaggcccagctgactgagagtacttacagcatgtttgcaaagcactctagattctgagcagtggaatgtgcagttgaggttgctggtatgtatgtacctacctcttaactagcttaatcttgaccttctcacatgaaagggtatcagttttctgactgggcctactaaacagagtcatccccagt

SEQ ID NO: 90486 - DNA, 587 bp, Homo sapiens
attgcatggtacacatgattacaatggatggaatggccatcatgaggtatagcaatacatttaagtaacactgtgtcactactataggacaggcacttttctgcatactttatattattaatttgtgtaatcctcctaacaaccctctgaggaaggtactcttatgattcccattttacaaataaagaaactgagactaagtgactcactcaaggtgtagcaggtagaaagtagtggaattaggatatgagttcagactccagaccctgttattagcccctgtctttggctatggattagtaaaggagagcacagccaagggtgggacaggcagctgtagtcctctggaccagcttcacatggatggggctgcattgttacaggtggcctaactcagacatggaaactgagtcgctgctgcccaactcatgccatgaaaccattttggcctgcacagcttataacagcactctagctctagctatgacactttatggtgttagtgggtttttttggtggttggtatggaggaggggctgggctacaagttttagattatgtttcttattgcgggtttttaaaaatat

SEQ ID NO: 90487 - DNA, 4580 bp, Homo sapiens; identical to SEQ ID NO: 60455
  misc_feature (1)...(4580): n = a,t,c or g

SEQ ID NO: 90488 - DNA, 561 bp, Homo sapiens
aaacaattatttttatgttgagaagcattattttcaggggtcagaagccctttgtggggcagagggaaattaaggaggtatttaataaacaggtgcagctgaatgtgtgtggttaaagtgcaatccagtagttatttgtctggattgtttataacctgcttccagcctagacaagttgatttgaccctgctgtcctggctcattcaggccacttaacactgtttaccattgggtggggaggacgtgcatgatccgctggccgagtgcctttgtaaggtctgtaaataggatgcattctggttaaactcgttattgcctcacaaatgctagtatctgatgggtctcagatgttttcttttgcactggggaagactggaggagaatgaagctttcttgaaccagtgattgggtctctaccaaagagagaaacttaaagctagtgagagccttaagatattttatttgagcacttggctggcaccatgttagtagagacactttaaagtaacagtgcttttggttacctggtttgaattatttggggagcttctaaaaaaaaaa

SEQ ID NO: 90489 - DNA, 1618 bp, Homo sapiens
tttttttttttattagggagaactttattgaggttatgaatatattctacttgaaactggaaggataagtggtcatgaatttggggcttatggtaacctttgttaagcatctttctttttctttttttttttggtgagacacagattcactcttgtcccccaggctgtcagtcacaacaacaacaaaaaaatagagcacagctatgttttgagttcttaagcaagggcaagcttaccaggcacttacagagaaggttgacgaggatgacagggaactaattgggggagggatgccatggttgaaaacatggctggggcagcgagaagttaagatgaagtcccaagagtcgcaagaacatgcagttccaggacgtgattctctgcagggacaaagagagacagcagctacaagtctataggcagtgacaaaggatctgagatcccatcagagtagacttcaagttggagaaaccttttattggcacaggcattccttgttaacttgacagggtgaagctgtaatttttcaaaaacagtaaaagctggtttctcctaaactattttccttgtggtagtagagatcagtgggtcagaaacaactcctgaccacttggtttccttttgagccgcgtcattaggaggcaatctgtaaaactagcacaggtctcccgctgttccactggctcacccacatgattagcagagtgcacgaaaaaataaaacttctattaaagaatcatgctgagcacaagatcagagaggttgtgacattgcaaactcgatagatgcagggggcctgggagactggcgttctccaaagggctcccaacaccatctctcctctgatttctgtgacaaatgtggaaagctacttgcttggaggtactgggggaactgatgggggaactttcatcctgttaggaactccgctttccattcctgcgtctctgtcttgctccctggagatggatggatcacggagggggccacagtcagctggggcagcaggtactccctacggcactagtctacagggggaaggacgctctgtgctggcagcggtggctcacatggcctgtctgcactgtaaccacaggctgggatgtagccaggacttggtctccttggaagacaggtctgatgtttggccaatccagtccttcagaccctgcctgaaacttgtatcttacgtgaacttaaagaataaaatgcatttctaccccgatctcgcccccaggactggcacgacaggcccacggcagattagatcttttcccagtactgatcggtgcgtggaattccagccaccacttctgattcgattccacagtgattctgtcctctgagtattttaaagaagccattgtcaccccagtcagtgttccaggagttggcaaccagccagtagggtgtgccattctccactccccagcccaggatgcggatggcatggccacccatcatctctccggtgacgtgttggtacactcctgactagtagagacagtttcgccatgttggccaggctggtctggaacccctggcctcaagtgatcaccttgcctgggcctcccagagtactgggattacaggcgtgagccaccacgcccaggcaagt

SEQ ID NO: 90490 - DNA, 398 bp, Homo sapiens
  misc_feature (1)...(398): n = a,t,c or g
atgaagctatgtaagaagaacagtccgctttactcccttaagatgtaaccgaacccgtgacgcctactgagggaaaaacgtgggagagatatcttaccccagtcagattgcctcttatgggaagctttagtcattgctattgcatacagaacttctgagggagacatctaataccctcaactataaggacaagcctgaacaaacccagaccgacatctcgctatggattttcaggataatgcggcctgggctgatggtactgaccatcaccagcccttcacatgaccctcttactggcctttacatccctcatgcccaggtctgttctgctgccctcacacccttctgatgaggttgcatcgcctctttcagaagcttctcttcgtaatcatgttatn

SEQ ID NO: 90491 - DNA, 2026 bp, Homo sapiens
tatccacgaatagtatcatctcattttctactaataaccctttatttggtatcttaaaaaagattttgtaagacacaaaactttccattaaaaagttgtttatttaaaaataccttctcccaattctgattccatatcaaattaaatcaagaagtgatgttacagcaataactcatcaaagtcatgagtagggaggatggcaatgaccccattagctcattagtataatctagtaagtgaaatacaaattcaactcatttacttcttcacaaaaggcaaacataattgatatacttcatatcaaaaaactagtttataaagcttgtcttcatatttcagtttaaggttcaactgatataaaatgccttaaaagaacatccaagcaatgctttggattttctttctttgcaaaattcaaggaaaacatgattggttgaagtttcttcactgctggcgaattagttaagagctacctgagattccttcgcacttccactcttccactctttgagtttccagtgattaaaatatgccagagacataatttagagagcgctagaaatgccacacagatctcatcgcttaaaaaagagtttctggccaggcacggtggctcacgcctgtaatcccagcaccctgggaggccagggcaggcggatcacttgaggtcaggaatttgagaccagcctggccaggttttgaagtttttacagaatgtacagaatgtaatcattaaaaaaatgactttcagaaacatatacattcaaagaaaaccttttagtattctaagcattgaatactttgggggaagaactggtttcttttttggattgtttaagaagtcagtcttttctcaacagtttcttgataagcaataaatcttcgcaaattcattttcacattgtcaagaacacacagctgatctgtgctatagttacctctcccttctttacgtatcttcattttaaagaccggctggaattctttcagagcagataataatttaatttgaatcgaggctctttcggcttctttaccatctgcaaaaacatcaaagagggcatccaaagcttctcctgctaccacaagggaaggatctttggtggtaacttcaagcagaaagcacccaatgttcttaagagtttcaagtgtaccatcttctttggcaaggacgctgccagtgattcctaaaatgctaacgacattcactctaaccccgacattactactatgaatgcctgctttgcataatgtcatcagctgatcaggagtcatgcactgggaaatgttcttggaggccattgtttgcaaaagggccctcaaagcactacttatggcttctagaaagtcaacatgtttagcaaaatctggttgagaaaaaagcagctgtgacagatgctgtgcaagcgtctgaagggctgcggctcctcccaggtgctccacatccaggagggacacaagactctggagacagaagagggctctgcactgaatagtgttcatttttctaatcaaaggtttccaagtagggttcctagaacataggtcaactgcaatgctgtttggaaaggcagttttctcaaaaatcttctttgggatgaggtagttggtgagagccgtgtgaacttcatgggagaggcagaggggagaaaacagctgtcccccgcactcactgaaggaattctccataaatgcgtcactttcatcactgctagaaagctcttcccattcgtcatcagagggatcttcattgcagcacatgttgacaataatttccagagcagtctgttgggctgtcagcaatgttatagtctctgtcagttccttgtcagtggacggaagtaaatctgaaacgaaagttttccttcagactcttcttttatgagaaattccttccaattcatcatcttcagtcaaatcatccccattagtgttctttaatgtttcctcagcctatgcagcagtttttaacctgtgcgtttcagcctgtttcatatgattacccatttcaccagaaaccattaaa

SEQ ID NO: 90492 - DNA, 473 bp, Homo sapiens
  misc_feature (1)...(473): n = a,t,c or g
agcnnncnnnnnntttgaatttcgtaagctttacgcctgcggtaccagttcccggttcgacccacgcgttcgcggaacccggccatggaagatccgtcggtgactctctagccctgggcccggccgagagagcggtacccgggactgcgcccccacccttactatggccgctctcacgatcgaccgcgggaccgacccggggacccgcgcttgatgcgatgcagcgacgggaaccggcgaagggacggggaccgggacccgaagagagaccaggagagggacgggatccgcgaccggaaccggtaccgggagagggagagagagagggatagagacccggaccgaggcccccgccgggacacacacagggacgcgggccctcgcgcaggtgaacacggagtttgggaaaaaccgcgcctaagccggacgcgggacggatcccggggactgacctgggacgcagccgcgcctcg

SEQ ID NO: 90493 - DNA, 646 bp, Homo sapiens
  misc_feature (1)...(646): n = a,t,c or g
atataaaactataaaatcctatgtattgttatctaggcccaaagaagaagaaaaaaagctcatataatttactgtattaccttcctgtggtgaatttaacagtggttatgatcagaaaggatatgactgtgaagtgttttgtatgttggtgtatttggcctttgtgatctatgttttggtggtttgtttagaatcttattcgaagtttatcttttattttcactctaagggattgagaaggtgatagttggggtgtttcctatatcaggatgcttacaacttaatgtagattaaatggaaagctcactcagtgtttccaaagttcatgaacagaaaatacttacaaagtacatgcagtttccttgtgctacctctgcagtgcagaagcgatgagagggagtgggaaggtatgcagttcttaccttggctccatcccccccccgttccccccagaaccagttccacctatgcctcgacccccccaaccccccatttaagttattttttgaaaagaatcaaaggaantatcccgcctcccaacgcattctgccctctgccgatcagttttttttcctcccccccccccccccccatatttntgttgcgggttggatcccgtcccgcgccccagcctgtgttccattac

SEQ ID NO: 90494 - DNA, 417 bp, Homo sapiens
catattgctagcttatgctgcttaaatgctaaaagcttccatttcctcatcttttagggtacttttgaaattttaatgtgatcctcaatatgaacatgcttagtactgcttggcaaatagtagatattcatgctattgaaataaattgcaagttttgcatttattttattgagttgatatttttattaacatttggaaaataaaaagatattaatgaaaactttagacctttaatgaggaataaatacttcatatttaatatggcctctttctttattttattcctattatttcctttgaacaatttaaaataattgggagtattttttagggatatcttctgggtttaaataaacctaatatgcaaagcataaagcttggagatttgatatttcagagtcctagtgagaaacaatg

SEQ ID NO: 90495 - DNA, 637 bp, Homo sapiens
  misc_feature (1)...(637): n = a,t,c or g
cacttcagaaatggcagtattattattctaattttgaaactaggtacatgtccttttccctgtcttattgaaaatggaattaactttcttcctaatttaattatttttcatttccagtaagtttcccgatgtaatttaatttttaatgatacatttgtacttttttctttttaagcatgtaacatatgtcataaaatgtaaatgtcactctttacctccacccccacctgctcatcaattccacttccttccccagaggaaaccactttagcagtttcatgaatgtttttttagaaatgtttctgcctatttaaaagctatgcatttttgaaatattttaacataaatggaatcaaactatgcatatcattctacttgattttttctgtaattaacagatcttttcatcttagtgattatagctttacatcattccttttaatttaatttaatattaaattctataggatggctataccatagatgctttaaccattcttctgtcggtggacattccggttgtttctaacattttattataaacaactgtgtagtgaacataagcatttaaatatatttcctaaccttcaaagactttgtgaatatattttcaattaagacttgntacaagggccaa

SEQ ID NO: 90496 - DNA, 770 bp, Homo sapiens
cccgagacacttcctgcctcaccctgtgctgatccctaagcacctggctccatctccagccacatacgatcactacaggtttttccagcaatatccctctaacctgccgattccttacggattttacaggccagagtctgcattttcctcctatggtctcagactcccacctgtcactggcctcacccgagatcagagctctcacctgcttgaagaagccaccctggtctatccagcctcgagtccttccaggttaaacccttcggaccccaacagaaaacacgtcgagttcgaaagtccaattcctgaggctaaagactcctccaaggctgggcagagagacacggaagggtccaaaatgagcccccgcgcagggagtgcagccacgggctccccagggaggccgagccccaccgacttcatgcagacgagccagacctgcgaaggcctgtacgacctctccaacaaggcagcctccagcgcactgggaagactctacccgccagagcaaagcctcacagccttcaggcctgttaagaaaagcacagaatgcctacctgcccaggctgctgagaccacagcagagtctccagtaaggtaagaaaatgtcattttcaaaacctccaagggaatgtttctggttgggttccatgagccaggcttatacttgctcacactgcttcacgcagttgcttttctaagcaagctcctactaagctttttcttggcttcttctagcctcaatgttgtgaacggagaccctcctgctc

SEQ ID NO: 90497 - DNA, 635 bp, Homo sapiens
cggacgcgtgggtgattgtcccccgccctgagaaccacatttttggtggcagaacatattcccagtgagagaagctctgacctgcttctctcctcctgtcccatgtacaagccacacgtccttgagcacccgctatgcgcaggataacgtccttgcttctttagggcagcgacttttaaactttgttgacgataatctaaaaagaaatgcattttacatgagtgacccagcacatacatatagctagatattctgtatatttgactaaaacagaaattgtgcagaatgattttatccttactgcaggtgctacattctgatgctttctattacattcaattctgttttgttttacaaatgctggttgtactcacagcatggatttcatgatcccctgacatgatcctgatttcgtaatccagcgactcttaacccaggggcctttaaaaaactacgcctgcctggcttgacccccaaaggttggggtttatcccccgcccccccctgatgtgcggttgaagctcgaaaaccagtgccctaatgggtcatgatccacaagttaagaaactgtattactgggatacggaataccaagaaggaatcggcctttaatagagcccggcacatgcggcccc

SEQ ID NO: 90498 - DNA, 636 bp, Homo sapiens
  misc_feature (1)...(636): n = a,t,c or g
cttaatccctgatctcatgaagacgctgtcccttgatgactattttgtcatcatcagcctctacctacattgactttcttccttgtctagcccacactccttgttttattatttacccacatcagtatccacaatttctttgccttttgtgtttcttccacttttgtccagcatacctattctagtttagtctagccatttgctttctctcctcatatagaaaggtaattgtattagtgaaaatcatgtaaccagattattgccatgatgatatggcatggtccataatgtagctcaaccattcttttcctttctcacccacagctactattctaacttttatcgttccttaaacctactctacttttgaccttgtactttcagcagctggcttggctttttcataggaaacagagactctcagacttgaatactgtgacactgaccaccaggccaacttaacatcagcagatatactgtctcagatgaagaggtatgcttgatttatttcttttttttttttgtatctaccgatgatntagtatagggggtaaaaggcatccatccggtttccttgggggcctaatctcataattaaaccccccctttttatcttaagaaaccctttcccccccc

SEQ ID NO: 90499 - DNA, 817 bp, Homo sapiens
  misc_feature (1)...(817): n = a,t,c or g
gatctcttgtaggctctctgtgttccattatttttttgactatcataccaggaaaaaaccaacaactctattcattcccaaacaaaatctcttcccccttagtcaatagcttgcgaaagagatcttaactcacccttgcagataagtcttggagtgaaacaaataaatagcattgtattcctggccatttgcctggctagttgctgtctacaagggagcatcaaaacatcactacttcttatgtaacttcttccagccagtgcttttattgttcgttttagtttactggggacacacaggagtctttctgtaatgacttatgtggtaaaatgtttgagagtttgcactcaattttaaagaatttgcagtttctaacaaggtgaagaacagctataggatctaaagttccattacagcttactgtgaaagaattgacaagactggcctcagacaagctaatcatggtgcgactctctcccttcctcatccacctctttggggacaagaggattacatctcaagccagcaagatcagctgcttgaagctctgtgtaagagcactgcactgacggtttggagacctgagcctgggtcctgacttttccattgactannnnnnnnnnnnnnnnnnnnnnnnnnnnnnnnnnnnnnnnnnnnnnnnnnnnctgtcacaggagggagttgggctagatcatctttaaggtaggttctagctttgacatcatcttgggggttaggccagaggctgggaagactgggtggactttctcaattgctctgccaggagggaacaagcccagaggctgaagcttcccag

SEQ ID NO: 90500 - DNA, 401 bp, Homo sapiens
gcatctacctgggtttggagtctgataagccctgaggggaagctgtcaaaaagctaataatactgtgtgcttagccaacatatgctccccacggggtttccaccgctgctctggaagttccttcctcagaaaagagagtcagaccctccttgtctccattccatggctctagagactaagcctcgactggaaatcgcagccaagtggagttgtggggctagccagagacgatgcttaggatcctgggactcgaccattgcccaggaacatctcagacagggagacatgtagccaggtttgcacaactctgcctgcgtgcgcaaccccagctgaaccccttccattgctacgtaaagaactcaagtggcttgaaggcttctaggacaggtttttaaatccca

SEQ ID NO: 90501 - DNA, 637 bp, Homo sapiens
ctccacaccccctcacccagctgcctgaattggaaaccagcccaccatagttttaattgtgaaattcctgaagctgttaatatatgtaaacatacaacaggatgtttcccacagctgtgcataatgacttgggaaacaggccagaagacctgttttcaaattgggtgaattctataaagtcttcagttaggtttagagtaattatacatttatgcatttttattttaaaaggactttaaacaaatttcacaagttggatattttttaatcctttcaaggatttactcaagtgagcaaaagattaaaaactaatgtttactttacctttttccaacttcagattttaaacattcctctacatttattgacatcttccaaaacaattttacacagacagacaaatttgtgaaatttgagattcataataaatctgttatgagaattagaaatgtgggcttcaaggccagttggtttattcagcatctaagctttaacatttatatgccgcggggatttataacaggtttagccaaaagagactgtttaatattataaccggtaatttacccatggtatttttggattttttccttccttctctttttttttttttgaaacaggatctcggctccacccc

SEQ ID NO: 90502 - DNA, 6248 bp, Homo sapiens; identical to SEQ ID NO: 60480

SEQ ID NO: 90503 - DNA, 682 bp, Homo sapiens
ttacatttccttacatgaatttctcacccttatgttctctccgacacctgtatcatttgctcactcaagcctctggaaatgaatttctcctgcactaacaagttagagaatgaaatgatgcttggatgaagtgatgcttagggtttgtttcaatctgagagccaagttttccacacgcagaaaaccaggcaacattaaaattcaaaactcaggccacggagtctgaaatgtatgtttgtgaacagtctgatttcatgtctgcctctgatgccctgtgaatacaaatcacctcatctggggctggaggagcagagaggaagaaacctaagaatgatctccaaaacaaatctttaattcggatgagtataatagagtgtaatcccatttcaagtctgtcagcattcctttgatgattacaaatgagtcccttttcccctgcaatgtgggggaataatctggataaaataatcctttttgtctgcaaaggcccatgcgatgcgactcgtgacaggcttttcaagaagtaagtggttttcaagaattcttgaggaagaaagagccaccactgtcccttacccaaggtccattctcccttttcttgtcctctttgacctctaaaagaattttttccacttctttttcaatgggtcaggtggcctttcccgaaaatcttctccaggct

SEQ ID NO: 90504 - DNA, 693 bp, Homo sapiens
aagaactctggaggatggagggcacatacccaggattcattctgagcaggggccacatactcactggatgtgagtgctccttagagaagccacacagaggtcagagcaggagtgtggttttctgtatctgtttcttcctctaggctggtctgatttatcaccctcccttggggtttccagacgagaggttaaagatgctttgggcccagcctgtactcttggtgtagagtgcagaaggataaaaacttccagggggttatctcccactgcggaaatttacagatggcagatttctcagggcatgatgtttatttagctcatccacctcagggaatatactgagttcacaattatactccaagattgagacatgcctagcagagagtacagaaatcccatcctgtacccaagcaaatggccaatgcttgggatgcagagcttatgaaaattaagccctaacttctatccataaaataaaaagagcaaatttctactgattagcccaggacgggcttgaacataacgggctggggaaaacctgaactttctgcccatttcttgggatggggaaaacgaaattctttattggacctagcctggtttaaaaatgggggaaaacacctatggttttggtccaggggttaatcgccaaataacctttttgggaaccttttccttggtgtccccggtcca

SEQ ID NO: 90505 - DNA, 395 bp, Homo sapiens
tttcttagctgaatgtgaaaaatgccttccgtgacatcatccttacaggaacattctttacatttattctttacttctggtgaacgggggtggcgtgaaccatgaatttgtttaagcttttcagctgttttgtgtgttttcctctcaaggcatggggtttcatatttttgacctgtggtaaaggtatttgaattctgcactggcctccaaatgtaggtgtagtatatggctctgatctttgttgatgattttatacataatgtggttttttttcttgataagccaaaaaaattatacataatgtgtgtgtggtgtgtgttttaatttcaaatgatagttacagtaaaagtttggagttgggctaagtgggaggagcatcaggaagccatttttag

SEQ ID NO: 90506 - DNA, 1213 bp, Homo sapiens
ttgaactgagacctgaacggtgaaaaggcgtgaactatgccgagatctgggtgaagaagaggccaaataaagggcccaggccctcagcttggaagcagcttgttggagatgagagaggggccagtatggctggagtggagttagcaagggggagagtggtgggaggtgcgattggtcattgagggttggatcacgtggggccctgcggagtaagaagttgtttcttggcatttctttacatttctgtgttcttatctagtgattaaaagagctgaccctaaattctgaagacttggggagtccctgtttgctaacaacggagaattggttctataaggagaaatgcgaatagttccactggcaagagaagtagaaactagattactagagtggatatttgggctctagtcccaaccatgccataaccagctacagaacttgggcaactcatgacctctttgggcttcaatttccttatctataacaaacatttggagtagaatgtctgtaaaatctcctttctcactagaagtcaatgattttattatatataaatttcatttttggttttatccttttgtttctttcagacttttaccagtgatcttacagtaaccaagtccactcactagttctgatttcactcttttctctattcctttgcttctggagtagccagtgaagtacttggaaaaaaaaatgtcaggagggaaagagagaatttcataactttgcacagtgtactcaacagtgcatatttaacacattgcctgttgccctgaaagaattcccaatcaccgcatgagtcgattatgatgaccgagacttgttctcagactagtgatgtagggtttaaccaaaaaatgccattgtccttactgaggaggatttatcccatcaaaacggcatttgagaacctgacagtgggaaacctgcggttgcatttactcttttttttaaaacataatttgatttattgggaaacttatatttcaataaaaaaaaacctgctccatcttccgggtgaatttatcacacgcctccccaaatgcggggagaagtgcccatgaacccccgggcctgggcctaaaaacccggcctagacgactttaaccggcgcataataaccgggtggaaggaacaccacaccctttaacaatcataggcggggcacttgacgaaactgctctaacccctttttcattttagagcc

SEQ ID NO: 90507 - DNA, 638 bp, Homo sapiens
gattcccgcggcgaaccacgcgggcgcttcaacaattactgttttaacttttgctaaataagttactgtttacttataaatttaaaatgtactttttgtgaatagttctcacaggggaaaatagttcaataaaatgcagtttttttcattgagcagatcagctgggttcatgagttttggaattggcagatgcacgggaacttgatcttgttcctattttaaaactttgtttactggcaggtatttgactgttaaaaaatccattggtgagtttaatgatctgtttaaatgtgtgcagtattgctaggtagcctttgtacattaaaaacagataacctgatagtagttgacttttctaatagtttacttaccatatcactttcaatttatgaataatttctaaagataccctgttccatggccacagctcatgccactaaagccaatcagctgtcttgaagatgtgccatttgtcgtgaggggaccaagaaatagggggaagagatcagcccaaatccatcactagccactggaaaaaatgattcaaaatgcattctccactgagtctgaattacattatttttagccaaaggtctttgcaacatttaaagaaatagggggaggtatatcatcatgtt

SEQ ID NO: 90508 - DNA, 470 bp, Homo sapiens
  misc_feature (1)...(470): n = a,t,c or g
ggtaaggggaaaaaantttgatacccctggatcacactacgccaagcttggcacgaggatcaaattttacatagtgaaatatttatgatttatgtgcaacagatatgttatgtaattatttccctttatctcttttttttctcattatagaacagctgtcatccaaacattttgatggaaacttcacttttattaaggaatatttttaacatatattcttataaatattttagatctagcttctaacataaacataattgcaattatatctcaaacttaaacaaaaatattctagtatattcaaacatttcattagtatttaaactttcaatcttcctgtaaggtctatattttataaaatatatattaaatttgaagcatttgttttaaaaggatccaaaaaaaattttcatattgttagaagatgataggcttaattccatgtgtgtcttttttttttccttggagag

SEQ ID NO: 90509 - DNA, 1049 bp, Homo sapiens; identical to SEQ ID NO: 60493
  misc_feature (1)...(1049): n = a,t,c or g

SEQ ID NO: 90510 - DNA, 2093 bp, Homo sapiens; identical to SEQ ID NO: 60505

SEQ ID NO: 90511 - DNA, 1354 bp, Homo sapiens
ttttttttttttatgcacttggggtaataggtttattatctctatatacaagtaagcatttattgatgtttgtcaaaaataagagacaagataacaaaaactattttagcatgaaaacgagatagctgcaatagactaatactgagcttaaagactccaaaaagagcacagaacctgaaatgacagttttcaggttgtatagttatccagacaatgaagtcaactatacaaggcaagcaacacatgacaataaaacaccatcaacagtttcccactggaggatggagggaggcttgctggggcctggggccactagtgggaaaaatattaaaatctcataaatcctccgtatcttttttccatttcaggaacttctttggagtaactttcgccttcttcgtcggagggcagagcctcggcaaagcgcttcaggaaacctccataccggttttggggggaagtcattcaccacttttggggacctactcttctcatgaagcccccatatcgcttctgcagctctttggctttctctttcagttgggggcttctctttaagcctctcatgaagcccccatatctcttgctcacttcttcctcattatcactgccatcctggtggtggctacgctctcggttgtcccctgtttccagaagctcttttagcaggtctgaggaattggccagcgagtcgtcctcctctgcatccttcttcatgaagcccccataccgcttggcgaggatctcacttccattggcctcttcttctggctccatgggataaagctcatccattttcttcatgaagcctccataccttttcatgaagcccccataccttttggctagcaaatggctttcttccggtttgctattttctctgagggtgctggtgccatcttgaggaagctctggtttggacagctgcaggagctccttgcaggtttcccaaattttcagagaaggcagtttaccttcacattccattacgcaagccaggaagttgatgtcggccgggcgcactaggcggtagctgcacgtcgcgcaatcctggctgcattcggcccgcacggtcgccaggagcccggggccgagcaacagcagccaagtgcaaagtgtcaggaaccgcgccatggagttgacgctgttcggatggagcaggccaattggaaaagccgggttcagacacgactcgtcgcggtcctcagcgtctctgcggggtcacgggccaggctgcggggctctgagcgcctgcctcgccgtcccggggcttaacggctgctggagccactttataattagccccaaaccgaaggaggcgcgcgcgccccaatcgccggcgggctgcacgaaa

SEQ ID NO: 90512 - DNA, 751 bp, Homo sapiens
tttttttggaaactaattgcgaaatttattccagggctgtgggggctggggtgatccttaagggcacttctcgtttcagggctgtgggtctccggccttggcaggggcacatgtttcagggggcggggaggggaggtactgagacagggtggcgggaggcgggaggcaggaggcaggggtgcccagtctcctccaactgggcaggctcagcacaagctgcaacagtaacatgaaagcgggacggacagcaggcaccccgccggggacaggagacagccgaggcctctccctggtgcttcaccctgcagagtgtccttcatgacctaggacagggggtcagggagctgagggccagcttcatgggtttgcagcaagggacccaacgggttggagccacagagaggggatcaacagcgctatccctgatctacaggcccgtgccccctcccaagttcacttgcattcccacccacagagacctgaagcccccaacagggcatcctgctgttcacctagtgggtggagggcgggcaacagcgcttctctggattggggctggggctcagaagtaatgacccagcaccaccccaagggtacttagtaggcgagtgtccggggagaaaccatcagctgtacttagtggcaatccccaagccccagcttcagtcctcaaatctgtccccttccctccatcacacacacatttcaaggagtgtctagaagcttaaaaacaaaaagcggggagaaaaac

SEQ ID NO: 90513 - DNA, 359 bp, Homo sapiens
gccgcgttctttattactagaaagaaagtgattttccaaatgtacagctatccttttaaagtgtcactttctgcccatttcccacataagagcataaaattaatgcttgtccagagcatacagtatttgttattgattcatgtgcctatggttttattacatatgtttttaatatgttagtagtcattaattttaaataagtacctttaaaaagataggaattgtgaaagtttgttttgtgccaacagtcttatatgcatgtgagtgcttaatacatatctctggatagtgtgtttagtttcatgtatcacaaatggcaactaatctcaaagcagcaaaatcttatcaattccaaagaa

SEQ ID NO: 90514 - DNA, 1574 bp, Homo sapiens
ccacgagggcagggtggggggaagaacgcaccaaaaacgtggtgtgtgctggagttgtctgaaccgatatttctttttgttccttggtattgttgattcgtcgccgagtcaggctcatgtacaaaggcatgtttcgtgttgattgttcccatgtaagatatttttaaagccactgcttattctttgttaggaaaatgtaacagcagaaaaggaaagaaacaaagaacatgaacaaaaagcattaaactggctccatcagaagacgttgaagggcagtgaagagcacagactctgtgggcttcttagataagaaaacgtagcttcagtgggggctccagggttgcagagtatgagtgacacagaccgggactattccattagcctgtggtctgcagggtaggcccgcaggaaatgaggaatggccgagctggagagaagagctgattttggcattactaagcccagaacgcacataacccatagtgaaatgtgctggcctctggtgcattttgcaagatgagcacaaactttctgggcctccatcctaggacctgggcagacccacatggcctgggctctgaatgcccaccctgcgacggtgggttctgcatcagcaaacgctgaggagtgggcagattttctttgtcttttgcttgcattttctagatccacacctggatactgcccatgttgacgagacagcagcagggggagagggagggaaggaaggtgcggctgcaagaaggaaggcacgggacaggcatgtgacactaggccacaagcgataagcacaggcacctgacttttaagtttttgtttgtttgttgtttcccaaagtgctgataacaataacaacaacaataggattccaaccaggagcctcaagtgacagccaggaagagacctgaaggttggggccaccacaatgccaaatcgtttctaaaggaagctgaaaaatgggactgtcttttgcccacttcgttgtgttaaaaggggacatttgtccaaactccccaaccgagttctagaagctcctgacaaggaggcagcatccagccttgaccaggcctcccagttccctggaaccgtatcaggcattcgcctgcctctcacaaatgtttcagggaggccagttctgcagggtgtcagctccaggacccacagggcccagaacccagctgggagaattggttatttgagatgtggtactgcttcctcacaagtctcccacaggccatgtaaagggtatttttttgtggcttgctgtgttgctgagatcatcgtatgcaacagctgggtaataagactagcatagctcaaactatcctgccaaacgctctcatctgatttttcctcccttctcccccaacctccaatcaccctgagtcacctgtaaattcatttgtcattcaaagcggaataacaagttgtccctagcaaaaccgctgagcgctttataattttgtggtgtatttttgtcagtaggtagcagaggcggaagtattttttggtgtaattcttgaaattttctgacaggaaacaaataaagatagatgtgtctgagaaaaaaaaaa

SEQ ID NO: 90515 - DNA, 769 bp, Homo sapiens
acttcagaaaatttctgtttgggagttagctttttcatcttgtgtctggcttcagaacctgggcaagcactaccggaagccttcctattcccagctctcggtagatccaggatccactgctcgtcccagttctccagctgacagatcatctcaggtttgggaaactgaaatcctactcatggggaagtaaatgggatgtggccgttagtgagttacagagacatggcccggggctcagtggcaagcagagataaggccaataatcaaaagcggtggtgagaatagagattggcacaatctttgtaaatatctggcagtctttattgaaagcctgaacaatgttcatacctttggctgtggtcatttcactcttagaaatatagcctaaagtacaattgcaaccaagatgaatgtgccagagacgttcagcacagtggtattgcagcatcaaactggaaataaaccagcaagaccatgttcctgtagttctccaacatcacatctcggtagaggtccttctgaccccagttgaggtggccccactcctctctggtgaagtacatcgccacatcctcaaacgagagcagctccttccccctggctggtgggaacatggcttccacggcctggtcttttgcaaggggtgggatcctggacgtctggctgagctgctgacggctccgaatctccgccaagccgcctccaccaggggctgggctctccttctcgggttcccgggcctgacccgaggtctgtctggtccgcgccc

SEQ ID NO: 90516 - DNA, 1070 bp, Homo sapiens
ttttttttttttggtatgggccttttaggcttgggccagccagctttcttgaggatgagtgattaaaagcgtattgtaatttcatgtctgcttcagatcatggggacagtgccacccaggaactggctgctgaggcctgggaagctcccttgccttcgggtttggagcagtggcatcatcccaccaacctgagccatgaaagggctgagcagaaagttaaatggtagtttcctgactggaagccacacgtaggtcacttgagtagtcaggaagcacagtgggtgtggagccatcatctgtcttgggctggttcctcccaatctttgtccagtggtataaatggactgtctgctgatggccatacgcagcactggctgttaagatggggaaggggtacatcaggattccactcatagccctggttcgttattgttactcatggctctgacgtccccaagccctcttgaatgttgcaagcaatgttaaatatcacacctcggtctccttttgagcagcccaggtacctaaagcaaggtcaccaaacttgggtttaaacttcagttgccatcacagcagggttcaggttatgcagtttttgcagtgtggagttgaacgctgggtaaagaagggagagctgactctccattgcttttctagtggaaaccagccagtttgacggcacggtgcggatacaggactccatcaggctagtgttggggaaccagcccggcagccttccatgtgaattccaaagctgtttcaacactggctgataggcagacaaaaggttacttgtgtgtttctctgagaagcggtgtaaatgaagtcaccttagaatatattctgtgcggatgcttatattttgttaacttcacgacttatggcatgtcttatttaaaaaaaaaaaaggactaggggcaaataacattatgagggggtatttaattaaaaatccatgcagtgacagctgagttcgggttttatgttgggctaatacttcctaaaattatttagaacaggactggctagaaaaactttctgcgatgatgcaagggttctatgtctatgct

SEQ ID NO: 90517 - DNA, 950 bp, Homo sapiens
ctagagggcggcgaggtctctccgcgcagcgtcccaggggatgcggcgcgcccccgactgggtgcagcggcaggccgcccccggcagcaagtgccgggtgccatggcaacggcgggaatttcccagtcggggcggccggaagcagccccagccgggctcgcggcagcgaaagcaaaatccgatctctctcccgggggagcaaaatggacgaaaggcgaccccccaggcaggggcgctgggtgccttgggaatccgaggaatcccttctctttgccagtcggaggggactagatggagccgaaggggccggagatgggccgagcgctgccccccgggggtcctcggcgccgggcgcagcttacgagcgcagcgcagcaggctccattcccggccgccgccgctcagcccattacgcaaacctggcgggtccaaccaaccccgctctgccgccgctgctggaacccaggaggcgtgcttgcaggcttcgggcactacgcggggctggaaataccacgcactgccccttcgcctagacccccgctcgggccacgcgggttctgccctcaaagctggtagctgccccagacttgggggtggggggaggggaaggggcgaggctggcgccccctcccgcttttggctcccgcgttcgttgcagcagctgtcgccaaatgaaaccccagaatggggacgtgcaaaccctccacccccacccccagccacacacgtcgcggtcggagaactgagaagggggcgctgggtccgaggttctggaaaagcaagaactcacctgcaaacaggcagtccttctcagctctggacttctggatcacgacgtcgatatccttctgaattcgctcttgccttgaacacatccccattaaataaatccttggaaaagaagcagccgctatttccaccccacccccctcgcacgcgcaaaaaaaaaa

SEQ ID NO: 90518 - DNA, 648 bp, Homo sapiens
ttttttttttttgttgtagaaaagtcttttattctatcggtcaggccccatctggcccaagaatagctgagcagagcccatccctctacccgctccctcctactccggcttctctttgtcctgcttctgctcctcctccagtgccaaggttcgctcacgctcctttaccagctggacgccacagtaggtgacaaacaggatggacagcgtggtctgggggaaccctgtgagtagcaggcgccgggcaaccagctctgtgaatttgaggctgttcaggctcacaaggttgtacatgatgatggcccagaagttcatggctccaaacagggcccggaccctacgggacatctgcactgacagagaggcctcaattcgtgctaggggcccccactctgccagtttttgcacccagagctcaaagttgaggccaaagcagttaaggaatgaccacaggtagacaatgtcacaaggcccaagccacagtgtggtgatggcaaatgtggccactgtggctgccagctctgggatcacagcggaatgctccccaccaatgtggttatacacatatttgcaaagccagtcgttgatgccacggtcaaagtgcgtttccgcaaagacgtagagtgcggtgatgcacttgggaggctg

SEQ ID NO: 90519 - DNA, 632 bp, Homo sapiens
gatccattctgagatgctggtgagtttgtagtataggaatatttgtatcatgatggagtttaatgtgaaagttatagacagtgcttatgcatctgtattccttaagcatttgtgtaaaattacttttttttgcatgctattattgttctgataaaatgctaataagacaaatgtgaaaaccaactcagtttctagatggaaaacacatggaaggatagactctgctaagatgatgatttatctctttgggatcagaaaaattaatatatatgattttatgccaaagctggttctgttttacagaagttttatttttcatcagacataaagattgatctgttttcttcatcagttagaaaatgtgtagttctgtctgccacaatttctagtatgtagatttcccatggatctttgcttttataattttatgtcaggttgtggttacttaattgccataatcttttgtcataactttacaaaaacaaattcagatgaagcttaatgacaatttgtgaccagttataaaattatggctttgaattttcttaatcgggaaattttacacatgtaaatttttattctttagctttatttgaaggtagacgcatcgaatttgcagaacaaataaataa

SEQ ID NO: 90520 - DNA, 446 bp, Homo sapiens
  misc_feature (1)...(446): n = a,t,c or g
atgaatcttagctgtacgcctgcggnaccgnnnnntaattcccgggcgcgccggggcaggacatggcgtgcccacctggcagcctgggcgctgagggagatgttgctggctgcggagctgggcagtggttgtgtgaggtgtcttgaatgtgggcagtgccatgctggctaagaatgcccctgggaccgccctgggtctgtggccggtgcatgcagccctggagcagcaggacatcagtccccattctgagggtgggcctccaggtcacacactacgatcagagtccccagggccagggctaggtgtagagcaggattgggcacaggctgagtccaagggtggggtccagggcttggctgaggctgcgtgtggtcacggggcaaagaaagtgtccagccagggcacatggcctgtccagcaccacctgtgttagcccagaccaccat

SEQ ID NO: 90521 - DNA, 440 bp, Homo sapiens
  misc_feature (1)...(440): n = a,t,c or g
gcttagaatgtcgctcactcatctttcacttcctgtagcaactgtttcgtgctcttaagtctggagcgtccatgtctgtctgcacctggatggcatcgcctctccatctcgaggacgccatctggagggggcagggcagggtggctgatcccctgcaggccccagccctgtgactcaaccaccaaagcccaatctccagcccaagggaaccaagggtatcttcttcatcatccttccagtcctcttccccttcgccgggctccagcctcagcttggccctcacctccactcctctcccctctcacccctgcccccattccacttcatctccctccctcaccttatggcacctctgcctgctccttatgctggagttgattttctacaatctcaactcagccaagagatctcatcacctaaaaaagtgatgtgaaccttan

SEQ ID NO: 90522 - DNA, 647 bp, Homo sapiens
atggggagagcagacctaatagagattaggatccatcattagacataaatgagacacagaagagaacaattaaaattggaatcctacaggtatgaactgttaccatataatgtttttttaaaggtgttagcctttctcatccttaaattgccttcaacaggaattctctttttggaatatgtaaaccatgggtgggatacagaagtaacctactctaaatggaagggcaaagtggtgataagattgggtttttgaatcagataatcttgagttcaaacctcaactctatcacttatgaatttgtgattgtgtaaaagttaaggaacctctgtgtggtagttaactcttctgtcaaatgggaaaatgactttgtccctcataaagaaggtgtgaagagaataaagacacacaaaataatgccttactgtgcttagtttagcttacagatggatttatgtcaaccctagatgtgcgtgggtggacagctgatcactgttattgtgctttgatcacctacgtgtataactgaaacggcatccgtggtggcagggacctttctggaatggagcctagaacattccagtgggaggaatgaaaagacatttagatcccctcttccttcatgaaagttttacattggttaaggc

SEQ ID NO: 90523 - DNA, 939 bp, Homo sapiens
  misc_feature (1)...(939): n = a,t,c or g
tttcgtgggcgccatgcgctctgggtgaaatgagacgctggtgtggggtccccatgtagagaccctcaggtccctatccagagaccctccaggcagtgctgggaagacactggtggcggggaccatgaccaggcgggtggagccatgtgtgtctcacacctgccgcccctcactttccttcccgaggtctggtaggtcctctttgggatttgctgtttatttgtatctcccttttctttgatttaagaacaatgccaagtgaaaaagctgggaatgaatttctgagttgctgagtgttccctgctcctaggtaccacgctctgtgcttctcaggcagggaggagatggattcggtggagttgggccaggacgggggcttcaccctgccccctccagactgccgaagcccccaagaagttttgagcccagctgggcgctcgcctccccggctcctgggtgcattttctgtactggcttgagatcacaggcatcattcaacgaatgctcttgtgtcctctgcataaagagggccctacctggagcaccccccgggaggtgggactctgcagaaagccccgggggagggctccctcttgagaaaaagagaaaacccttcttttggcgattcagggagttcaggagggaggaggaaacttttcctttgccttttgaaacacaggtttttattggttgacacacaactaaaccggcaggggggcaaaattgaaaaacgccatgagaaaaacggcttcgaggtccccacaacacaaggattccttttccctgccagttaacaaaggctcattggatgcctataggggggggccgcanagnccaaactccggaaagggtgcctccattgggcctctccccttcttccgaggtgtttcgagagagcggtgtgaggtgaacccccttgagagcgtcctctactcacgc

SEQ ID NO: 90524 - DNA, 1503 bp, Homo sapiens
gagactgggtggatgaggctcaccccggcggggagaagggacgaggaggggcggacagcggaaggtccgggagtgtccgccataaagtcgtttgaggtgaccgttgcgtaattgtgagtctgtgagagaagatgtgaagtatggcctcgtcccggtcatctgggcgtgcgggtcccgggttttgatcgcgcgtttgtgtagttttaacttctagtcatggcgaatgatcgcaggagagcacagactggaccctgctacgatctctcttggagtggatcagactgatgatcaccaacaaccaactcattcccggataaggaagaagagagtgtcacctacttcagtgtggtttcaaccctacttctgcatcttaaagacactgtatggtttcagcagtagtgcccctgttcattagtccccctgatgttttcattcctcatctcatctttttcttagcagcattcaatggaatcccttcattctagaaacactctatatctttggttttcatgagaccattctcaccttgttttgtcctgtgacttttttgaaaaaaacaaaaacaaaaaaccctttttttctttttaaattctggtaaaaaacacaatgaaaatttgctatcttaaccatgttgaaatgtgcagttagtaaagtacattcacattgtggtgcaagccatcactacccatccatcactagaacccttttcatcttgcagatctgaaactctacccattaaacaactttccatcttcccatccccacagctcctagcaaccaacattctactttctctatcagtttgactactctagggtacctcatatggggtaggaatcatacagcatttatccttcttctggccgggggtttattttcacttggtattaatggtcctcaagggtttcattcatgttgtaggcatgcatcagaacttcctccccttttaaaggggtgggataatatttcatggtatgtttagatcacattctgtttatccattcatccatcagtgaacacttgtgctccttccaactttgggctgttgggtgtcctgccactgttgctcctagtgctcaatctcgtttattccctcctaatcaagtgtacaacgttggacactgtgcaggatgatgccacttcatcttggatgctaatctgccatgttgacttctgattaaccccaggcccaggaatgcctcaagatttctactttacttactgttgcttgtgtaagccaagacaaccttgatgttatcataaacatgtacttacctaagtcctgtcctttggcaaattatgggctatgagacacagcattcttgcctttccctgaggggtcaatttcagcgatcctacacattccttctgaagcacttatgctctttctatatggtatgtaagctctcggtctggggagtaacagtgcagagatctacctgtctctgttgccacatgtttctaaactttccaataaatcaccttctactgacaaaaaaaaaa

SEQ ID NO: 90525 - DNA, 476 bp, Homo sapiens
  misc_feature (1)...(476): n = a,t,c or g
caaggactaattacaagtctgacaattgaggagggcaaataactctctctctcttcaaaatttacagatatcctgacattacagccatctcaacacatattatgagttgaattatgatgggcttctaccagcactgccaagcatagcttacaaaaagctttgctccgtaggagtctattgtcaccaggctgcatgttgcaactaaatccaaataaagtctgtgactccacttccccaccccccacagtgcaaaacacttagctttctgcaagagggacagaaaagtaagctgaatgctgccagttgtcagccttttttacatactgtggcaactgccncttttaaaattatacaacaccttgaaagaaataacccagatggagatttcttcgaaaacagaaataaaacagcctgctaaacaggagattcacaccacgaaatcgtcgacccgggaattcaagaccgaggggtcagtc

SEQ ID NO: 90526 - DNA, 1959 bp, Homo sapiens
agaccccgcgggccagcgccgcgaccccttcccagcgctcctcgcgctgtgtgcggcgcgtcctctcgccggtgacccggtgtgcgtggggtcgaggcgccgggcggagtggctccgggccgaaacgccatgcggaggggcgagcgcagggacgccggaggtccgcggcccgagtccccggtgcccgcgggcagggcctcgctggaggagccgcctgacgggccgtctgccggccaagccaccgggccgggcgagggccgccgcagcaccgagtccgaggtctacgacgacggcaccaacaccttcttctggcgagcccacaccttaaccgtgctcttcatcctcacctgtacgcttggctatgtgacgctgctggaggaaacacctcaggacacggcctacaacaccaagagaggtattgtggccagtattttggttttcttatgttttggagtcacacaagctaaagacgggccattttccagacctcatccagcttactggaggttttggctctgcgtgagtgtggtctacgagctgtttctcatctttatactcttccagactgtccaggacggccggcagtttctaaagtatgttgaccccaagctgggagtcccactgccagagagagactacgggggaaactgcctcatctacgacccagacaatgagactgacccctttcacaacatctgggacaagttggatggctttgttcccgcgcactttcttggctggtacctgaagaccctgatgatccgagactggtggatgtgcatgatcatcagcgtgatgttcgagttcctggagtacagcctggagcaccagctgcccaacttcagcgagtgctggtgggatcactggatcatggacgtgctcgtctgcaacgggctgggcatctactgcggcatgaagacccttgagtggctgtccctgaagacgtacaagtggcagggcctctggaacattccgacctacaagggcaagatgaagaggatcgccttccagttcacgccgtacagctgggttcgcttcgagtggaagccggcctccagcctgcgtcgctggctggccgtgtgcggcatcatcctggtgttcctgttggcagaactgaacacgttctacctgaagtttgtgctgtggatgcccccggagcactacctggtcctcctgcggctcgtcttcttcgtgaacgtgggtggcgtggccatgcgtgagatctacgacttcatggatgacccgaagccccacaagaagctgggcccgcaggcctggctggtggcggccatcacggccacggagctgctcatcgtggtgaagtacgacccccacacgctcaccctgtccctgcccttctacatctcccagtgctggaccctcggctccgtcctggcgctcacctggaccgtctggcgcttcttcctgcgggacatcacattgaggtacaaggagacccggtggcagaagtggcagaacaaggatgaccagggcagcaccgtcggcaacggggaccagcacccactggggctggacgaagacctgctggggcctggggtggccgagggcgagggagcaccaactccaaactgacctgggccgtggctgcctcgtgagcctcccagagcccaggcctccgtggcctcctcctgtgtgagtcccaccaggagccacgtgcccggccttgccctcaagctcgtgtgggcgctcgtccacaaacactccgtggctgagaggcagcggatccaggcagcgatgctgagccacctcctccgagccttcctttcacacagaccaccccggaggacacgtggatgatggggtcagagatcactgagcctcgctcaagggggcctggaacccgggtgctggggtcatgctgcctccgtggctccaaggtgagggtcatcttcacgagcaaagagaaccaataaagtgacaacgaacgtcaaaaaaaaa

SEQ ID NO: 90527 - DNA, 1048 bp, Homo sapiens
agcatcttaggttattgaagatcagataaatttggggggaagtaagtaatggttaataaaggaacttagtgctagaatagcggaagagagatgtagtatcgtttcccgttgtacagtgtagttttcattttttttccttctaaataatttattttaattgaaaaattgcttttggttatgtgtgggataaaaggtatggaccattagaaaagaaaccacagtaaactgtgccaacattatattaagccaccatgattgagggacacgaatacagttttggactaagattaattttcaggggactatttaaattagttctgtttagtgttgagtaaatgcttggacatttacccttacggcctgaaaaccatgtattcccacagagtagtaaacgattctggatctggccacagtgtggcgatgttgcagcacagattcaccttgccctgctgaaggactgctgagttctcacacttgaaacatgaatttccactgcctgcgctgactttcctttccatttaataataccttatgataaactagggtttttattttctagcataatttcataagtgtgggtggcacacttctgttgttgttggtagagaactttaaaatttgtatgcatctggcacctctaaatgttcacatgtaacatgatacttttaactgttgtatcctccctactctaacagggaatccatgtaccattcgcagttctcactcctttgtggggatctaaaattcacaaccatctaaccttatggacatatagagtaaaaagagggttaccacaaactgggaaaggtaacggcgggcctacaaggcgccgcgcaatataaacgcgtccccaaatatcgtctagctttaccacccctccctttgtcgaacacagcggatgtcacactatatgcgatgcacccgtacattctgacggtaccctcgtcttcattctctccgagacgctgaggtcgtagtctctctctgtccctttttcactaacatttaacacctgagtcccttttcacccaagcacgtctcctacgac

SEQ ID NO: 90528 - DNA, 2659 bp, Homo sapiens; identical to SEQ ID NO: 60393

SEQ ID NO: 90529 - DNA, 613 bp, Homo sapiens
gcgtccgggaagatatgaccttcatgtagacttttggtgtcatggatgtagatgggtgctcatggaatatttctcagtcgaatacacgagttaataaatgaatgagtttgggcttcacaattaaattggaggtttagataagaaaacctcagagaacaaaacatgtataatattttctaattgatttatgtgtctgccactctggcagatgatgaattcaacatgacctttgtacttgaagtgttcatgttaatctaaagcattccttattgttttcagggctacctgagaatcctagaacatttatgaatattataattgaaatacttaggaatgaatttctctcccagcagggtcttcatatccccttcttattccttattatcttcttacttcttattactgggaaaaaatgaccctgtgctttatataaagccataacttataccgagagttttaaatgcagcagaatctcagtggaaataggatgatacaattttttccccccaaagcacagtggagagcaggagaaaagccaaggaccactacccaatgaaagaataatcagtcttttatcctgaggggatagtacctttatcccttctcttaatgg

SEQ ID NO: 90530 - DNA, 2315 bp, Homo sapiens
ggaccagcctgacgctgtttgaagagtttgagaagcaagggatttactgctgcggcttgctccgcgcgcggaagagtgactgcaccggcctcccactgtccatgctgaccaacccagccacacccccggcccggggccagtaccaaatcaagatgaaggggaacatgtccttgatctgctggtacaacaaaggacacttccgcttcctgaccaacgcctactccccggtgcagcagggagtcatcatcaaaaggaagagtggggagatcccatgccccttggccgtggaggcgtttgccgctcacctgagctacatctgcagatacgatgacaaatacagcaagtatttcatttctcataaaccaaacaagacctggcagcaggtgttctggttcgccatcagcatcgccatcaacaatgcctacatcctgtacaaaatgtcagacgcctaccacgtgaagaggtacagccgggcgcagtttggagagagactcgtcagagagctgctgggcttggaggatgcctctccgacccactgatgctgggggcgcaggactcggtcaagggaggggcaagaggaggaggagagcctgccgttccaacttgcccatcagagacccggacacggcctggtgtgtggcttgctgcctgggagggatgcacagggcctctggagggacaggatggacctggtcagaggacggttgctgtcctcatttgcattccaagaagagcatgtcctccctcgagaaacagtgccgccggtgtgatgagcacttacacccacgttctcaagggcagattctctcatgacatccgtggagcttgcgaggcagcgtggactggtgactgtgaaggaaggcccccgtggtagaatgagctggagcacgctctaagagagatgcctgcttcctaaagatctacagcaatctgggacgtggttcaagttcaagacttgaaggaagcaaagacgccctgcatggttacaatggctcaggtgtcaggggaggccggagggttttccagcatttgcctcatgccagcacctttgaaccggtctcttagaagaagacacacatcctgggtgtacagtggtgaaatggggagtgggtgcccattctgaaaaacgaggcattcctgctcattccctctgcttaactggtgggcaggggagagagggaaatgccaaaaacttggagtgaaggatgatgctattttttatttttaaatatatcttcaggttattttcttactgttgcttcagatctaatgtaaaaggcagatgtcccctcctctccacccccgacgctgaccccggcctcagtcacggctctttgcatgatcacagttctgtgttctggcctgtggcagggccgggaagggccgctggcttccgaacagacgtggttgctctccacgaggcgcatggggagcccgcgggccctaagctttgtcgcagatgtcatcattggcagaattacttgtcttgaaaaataagtagcattgctgaaacacacaaccgaattctctacgatggccatttgctcattgtctttcctctgtgtgtagtgagtgaccctggcagtgtttgcctgctcagagtggcccctcagaacaacagggctggccttggaaaaaccccaaaacaggactgtggtgacaactctggtcaggtgtgatttgacatgagggccggaggcggttgctgacggcaggactggagaggctgcgtgcccggcactggcagcgaggctcgtgtgtcccccaggcagatctgggcactttcccaacccaggtttatgcgtctccagggaagcctcggtgccagagtggtgggcagatctgaccatccccacagaccagaaacaaggaatttctgggattacccagtcccccttcaacccagttgatgtaaccacctcattttttacaaatacagaatctattctactcaggctatgggcctcgtcctcactcagttattgcgagtgttgctgtccgcatgctccgggccccacgtggctcctgtgctctagatcatggtgactcccccgccctgtggttggaatcgatgccacggattgcaggccaaatttcagatcgtgtttccaaacacccttgctgtgccctttaatgggattgaaagcacttttaccacatggagaaatatatttttaatttgtgatgcttttctacaaggtccactatttctgagtttaatgtgtttccaacacttaaggagactctaatgaaagctgatgaattttcttttctgtccaaacaagtaaaataaaaataaaagtctaaaaaaaaaa

SEQ ID NO: 90531 - DNA, 1463 bp, Homo sapiens
gcgtccgcgtctttcaactggcaagagtcattttgaccagcagattaatcaactgtaagacggatcctcacacaaagaggcaactgaaaggatgaaatcactgacttggatcttgggcctttgggctcttgcagcgtgtttcacacctggtgagagtcaaagaggccccaggggaccatatccacctggaccgctggctcctcctcaaccttttggcccaggatttgttccaccacctcctcctccaccctatggtccagggagaatcccacctcctcctcccgcaccctatggtccagggatatttccaccaccccctcctcaaccctaaggtccaccactccatcctgatgccccaagttatccacagcctccttcccgaccaagaccctatccacctggacctccatttttccctgtaaattctccaactgatcctaccctccctactcctgcaccccaaatatgaacaactgcagcaggtgccaccaccaccacaaaagacaccactacccttgtaactactgcttctgctacccaaaatatgaattccaacactgcttccaagagacatttacataaaattgcttccatttttggatgagaatgaaaaattccaaaagtgctgagctttggggagaaataatcttagaaagaaattgtagaaaaaacccatgcagacataacatttataccaatgaggcaaaaataaagaattgagcaccaatatgaagtctccactgttgtcatcaaagccaacatttttcccccagttatgtcacctaaatgagtgaacatagatcatttgaacccttaagaaaatatttattctagaatcactttgaagaaatatcaaatctcttagagtattcctaaagtgagaaaatagtttaactatcatagaaatggtgattatagcacaaatctcataatttcaaaggaatatccatttctctattttttctggacctacaggtagactacatttcttagccttccttgcaattatgcatggccatgtgctgaatttcagccaatgaaaggaaaaaagaaacaaataagagttacttctgaaactgtgcctgtgatggttaatattgtcaacttgattggattgaaggatacaaagtattgatcctgggtgtgtctgtgaggatgtcaccaaaggagattaacatttgagtcagtagggtgggaaaggcagacccacccttaatccgggtgggcacaatctaatcagctgccagcgtggctagaatataagcaggcagataaaatgtagaaagagagactggcctagcctaccagcctacatctttctcctgtactggatgcttcctgcccttgaaaagtagactccaagttcttcagtttggaattcagactggctgtccttgctcctcagcctgcagatgacctattatgggaccttgtgatcctgtgagttaatacttaataaactt

SEQ ID NO: 90532 - DNA, 222 bp, Homo sapiens
atgatttataatcaaacacctgttctttttgtaattgcaatgtctatatttggaaataaatttctacaatatataatttagccatccatttaccccttgaatgtggggacatatgaaactactccctgatatatttcatgtatcaaacagaaacttacacatacttacacatacacgtacatacttacagacatacatacatctattactagtagtacatcg

SEQ ID NO: 90533 - DNA, 1082 bp, Homo sapiens
ttcaattcttataattcccgggtagaaatttgaaggaaaagatcagcaatctttaagaaatcagattgttaaaagttatgtttgaatgtgttaattattcaagtattgtcaaaacttcatttatcttttcagtactttcttaaagatacctaaatgtgtatgttgtgctatcagcaaagattatggggaaataattacctaggaatacaatttgctgaaggtgtattttgtgatttgaggggggtggttgagggaggatcatagtcattcagaatcactcaaagaaaaatatttactttttataagctaccatggccttcaaaagcattttatttacttataaaattagctttgcttgaacccttgaacaatagataagctagagttgtatttattttttaaccaatagaagataagggaacttttctgaaaatttgccttggaatttgaggctcaggatctaatcatatgttgctaggctactgtttattttgtaggtattttgcttttctgagaatatcgagggaagcactattagtttcggttgagaaatgccatcctagaatttttgtaagaggtattaatgtacctataaactactaatttacttttagaatctgttctctcagaattatagccaaatactttacgtatctaaaaaaaaaataagctttgtgacaagtccaaattgcctatggagtttaattgtaataatttcattggcttcatctaaagtatgttttccttcttaactcttggaaatgggtaacttaacagagtctgagaaattttagaatcttatatgggggagaaacaaaaataattatgagttaatagtttttatttcatggaccccattgaaattaactcctagaagtcagaatttgaggtagaaagggcccagtttgaaaatttctcccattcacttggttaactggtgggtttaacttttgccggggctgggcccccccctggtcatggggggtttggatagtggcaaaccattattctttggggtggttccagagaggccccagagagtttctttcgggggggggggggagagatagattccgacagac

SEQ ID NO: 90534 - DNA, 370 bp, Homo sapiens
tgatcactgcattccagtcatgctagattgtcatctcctaaagctttggaaaaaaagcatgaaaagtaaagtatttgaaaaagagtatgtatgctttctttttctttgcccgcacgcgccagcactagatttttgtctattttttgtttttgccttacatttttgtctattttgaatacagatcttatttctctctctcattacactttgaaacaggtttaaacctttttgggttttgttctgtttaaagaaagatctggtcagtatctctaaagaaaatctgtcactattttatgtctttattaaattggaattattacataaatagggatgccagaattaaactctttttaagtactgttttcagttt

SEQ ID NO: 90535 - DNA, 674 bp, Homo sapiens
ctggcgcaccggccggaattccggtcgaccccgcggccgcggagttgctctcatttgtcatcaaactctaaagttatgggaaatatctgaattctcaaaataagtacagcctgtgtctatagaatctggcaactggaagcctgctctttttttggagatgttgatcaaatgttcactgataaacttgagcccccttttcttcctctgggctacccatctataatgctatgacccatctcagacacacccctctgggaagctgcctgactctgaccagtgctctgaggcctggtgcttgaggactgctcacctggccttgccttttcccgtgccacgtggcatcttccccaacaacatggtcactttctgtgtctgagcccacatcccgcaaagcacccaacccaaacccagaaacccttctgggaagggatggatttttttgagacggaggcttgctctgaccaccgagctacggtgcagtgtagcagtactgggatcactgcaaactcttgctcacaagtccacaccgttgttctgactgagcctccagagtagctggaatcattgggccgtgggaacaaaccctgtaggattctatggcgtgtagctaaaataagatctttcaaaagggaagacataagggcaataaaaaacaaggggccctcccgccaccc

SEQ ID NO: 90536 - DNA, 2234 bp, Homo sapiens
tttcgtgttcgctgctgcgcggggagagcgaggcggtttcgccggggccgtcatggagcccgactcggtgattgaggacaagaccatcgagctcatgttaccgaagtgcatgtttgggattttgttgaagaaagctggatacagtaaacggaaagaatcttggaagatgcttgactgctgtcttttctcagactagtctgaaagggaaaacccccattcattctggattggtggatctgaagtacaaaatattttccagaacacttcagttatggaagatcaaaatgaagatgagtccccaaagaaaaatactctttggcagataagtaatggaacatcatctgtgatcgtctccagaaagaggccatcagaaggaaactatcaaaaagaaaaagacttgtgtattaaatattttgaccagtggtctgaatcagatcaagtggaatttgtggaacatcttatttcacgaatgtgtcattatcagcatggacatattaactcttacctgaagcccatgttgcagcgggactttattaccgctttaccagagcaaggcttagatcacatagcagaaaacattctttcgtacctggatgccaggtctctgtgtgcagcagagctggtatgtaaagaatggcagcgagtgatctcagaaggaatgctttggaagaagctgattgaacgaatggtacgcactgatcccctatggaaaggactttcagaaagaagagggtgggatcagtacctgtttaaaaacagacccacagatggccctccaaattcattttataggtcattatacccaaagattatccaggatatagagactatagaatctaactggcggtgtggacgacacaacttgcagaggattcagtgccgctctgaaaatagtaaaggtgtctactgtttacagtacgatgatgaaaaaattatcagtggcctacgagataattctattaagatatgggataaaaccagcctggaatgtttgaaagtgttaacaggacacacaggctctgtcctctgtctgcagtatgatgagcgtgtcattgtaactggctcttcagattctacggtgagagtgtgggatgtgaacacgggtgaagttcttaacacattgatccaccacaatgaggctgtattgcacttacgcttcagcaatggactgatggtgacctgttccaaggaccgctccattgctgtgtgggacatggcttctgcgaccgacatcactttacgccgtgtcctggttggccaccgggctgccgtcaatgtagtagactttgacgacaagtacatcgtgtctgcctctggtgacaggaccatcaaagtctggagcacgagcacctgtgaatttgttcgtactctcaatgggcacaagcggggcattgcctgtctccagtacagggatcgcctggttgttagtggatcatcagataataccattaggctctgggatattgaatgtggtgcctgtttaagagtcctagagggacatgaagaattggtccgatgcatccggtttgataacaagaggattgtcagtggggcctatgatgggaaaattaaagtttgggacttgcaagctgctcttgaccctcgagccccagcaagcacattgtgtttgcgcacattggtggaacattctggacgtgtgtttcggctccagtttgatgagtttcagatcatcagcagctcccatgatgacactattttgatttgggatttcttaaatgtgcctcccagtgcccagaatgagacccgttctccctccagaacatacacttacatctctagataacagtctgcactttcacccgtttcagggttttctagtcttgaactactggctacgtggctaccaaatgcctaagggagttcgttcacagctgagttatgaagctggaattggttctagacgctgggtagatgcaaagcagcctaactcttcaagtaccgacatttctcacctctgattccggctctcctttgagaaggagaccttagcttccccggcttcaagtagaacagaagcccgtttccttccctcatcagtgaaaaaatctaatgtttcaaatgtaaattgttcatagaaaaggaacatagaatctgttttacagaagtaaatcgaccgtcaagagaagacttggcctctaatttatattgctttgcactttggtttgatattaagaaacagcattcttcttcagtgaaattttggggtgccaaac

SEQ ID NO: 90537 - DNA, 407 bp, Homo sapiens
catcaggtgaacgtagacagaagtatatttatgggagacatttcttagtttaatttacctgtgtatttagaaaattgcataatttattaaaagttaaataaaatatagccctttggcagcccaggagtcattcgaatacattcttgacataaaggaaagcccctggtattagaagactttttctgttctaagtaatttctgtttatgctgagtaattcagaaaggaacagaactgtactactacttcacattgtacatcctgtgtattctaagaactcagtgtgtgtactttggccaaccactgcattgcttttgtggaaatgtaatgcttgcatctgccttgaagcagtgtcttggccacgaggttataacaaggtctgttattttatagtttgcacctttactta

SEQ ID NO: 90538 - DNA, 644 bp, Homo sapiens; identical to SEQ ID NO: 90347

SEQ ID NO: 90539 - DNA, 370 bp, Homo sapiens
ctttttctggaagaagatggatttcttttggtcttaaaataaggcaggacaaccgccggcatatgcttaatggcagttcacagcctccacccttccctctgggcctggctgaagttttcatcaccaggtcccggttgggaagtagagacaggcagcaggtgccctgtctctggaagcctgctattaaaatgtacatactgccctgtgggaagccaggctgctgctttttcactcgatagcaagcttgccagtatggcctgtcttatagctaaagatgaaggcatttaggaggagtgtgatggaggacttggctaataggccgaaaaacagagagttgagttgtcttcactggatccaagagacatataga

SEQ ID NO: 90540 - DNA, 1136 bp, Homo sapiens
tttgcttctgtgttctgaattttttcacttacaaaatctgacaccttcaagtctggacattttaaactgtcctgccaaattcttttctatactcagggctcaaatgtaccattgccgggagtgttgcgggttatttgacataaaacagagaggggccagtggcatcttttacaaagctcagaaactttttctctcttttccccttttgatgtggggtcactggcctccttagctctgaacaccttcagaacatcagctagggtcactgcagaccaaagcacagccagaggagaagggaaatcctggggaggaaggagaaggggcgtgagtagtgaaacggcattggcggggacagggtggaggaagagatgtatgatgggccagggcagtgctgccctgcgggtgagggtctgtcagctgagtgcctgctgtgagcctcccatgggaagcagcctggggctgcagagtgagccctgatggacttggtcagactggggttaagtccagcagtgtgacctgctcatcacttttcttccctgaacccatgtccacctctcataaggttgtatcgaagttccaagaagaaaagcagagcgagtgctttgaaaggacataggaaggaaggggccctgcccctcaagaccgctgtgctgggggcttggcaaaccccttgcccctggaacagaaacccggacaagacctctggagtggatagggccaacttggggaggccagagtgaggaaaggcccttttccccaggaggaagaagagggctggactagcagcgaaggcttcttgggagaagaggaatcttgagctttctggatgggcacgggtggtgaaggactccgctgcatcacggaacaaaatggtcgggtggtatggcagaataactcccgccttccagatacgttgatacgcgccggcggaggcggttcgttcttgcgccttgaaaacgagatccggtcgggctggtttctcaacggacaaatcaatacggccgcgttttagacgcgatcaaggcgcagtaatacgtattctctccatggcccggaccgcccgctgtatctgcccatgccatcgtgcccacgagccgacgcgttctgctcgctttaccggcggagcggcctatgct

SEQ ID NO: 90541 - DNA, 1108 bp, Homo sapiens
ttgccctctgagtccctccaactagatgaaggcattctagattgcaggggaggcgggaaacagtcttgagctgcgggatgatcttgtctcctagtcacgagaaggagtattggagatcccatcatctcatctgcctgtggtcattattactaaaaccttcttcagctgcccaaaccacagtaggaggtagccttgctcttcctccccttggagccattttcatgtgggcatgaaagtgattgacaggctgtgaagtacctctcccaccatcacccaacactgtgaggtaggcggagcagggaaagttttaattaccattatacagatgaaaaaactggccctctgcagaagttaagtggtttgcatgagcctgggagctggcactgcaagacaagtctacctgctacggacagagtgctcttgtaccctcggggttctgcctctggtcactctctacatagcagaagctccactggcacttttgtattcacaactaccgggtgcgataaggcagtgagggttattatgataccccttttcacaggtaaggaaacaaggctcagagaggttcaacaacagagtcataattcttcttgttggagaattcattttgttacatttcattcccaccatctgcagtaagggagacccattaaaatatagtatcctgatttttaaagagaaggtaacattaaggccaggagggttgggatttgcccaattcactgtgggcttctggactccatgcccaacaccctcctgaggcaaagcgtcccccagagaccaaggttttgctctttttgcgcccggaacataacggcgccccgctcggtctggatcgttacaactcgcgcgctggctcttagggacagcctctctctgcgagtcctttgcctcgttcgggcactgctgcttcctcacaggaacgatcttaatcgttcccctactttccacgggccgagctatgctacttccataactcgcctatctcgcgttggtgtgcgctccgtaccatcttgcccctccgcgtgtgcgacgctagctaattctgcaccaccatcgcactgtctcttcacctccacctcatctcgcgtcacacacactcgct

SEQ ID NO: 90542 - DNA, 404 bp, Homo sapiens
cggatctgtatttgtgtgtgtaccttttgataaattttaactttctatagattcgtgtatattttatggtagtaatgataaaaatagactagtacctacatatattttatgcattcacaacatacctttttcttagtttttttagtatttctaagttacacagcttgtgttttcaagttgtcacgaatttccaaaaaagttctaatatattaaatatttattagaaaaaaacccatgtatgagtggacctgtgcagctcacactcatgttaagggtcaactgtatttacgcattaaatatccttttaagacttattgaactaaatggtgtcatagatacagacctgaataagaccctttcctggcccctttcctgggaagtgtacattctggttggtgatttcg

SEQ ID NO: 90543 - DNA, 860 bp, Homo sapiens
ctccttatctgaaaatgatcctccttccacccaaagaggtgttgtgctctaacccctccagtccttcctctttgcttacctgtcttgctcctgttccaatgtttccccataagctccatgaaaataaggccctatctatttggttcacctgtatccccaagttacagagataatgctcagtaaatgtcgcagaattttgtgaaaaagaacgatgtggaaagtgagtggggctaaggtggccagtctgtgttgggggcccagtcggtcaagcggttgaggagggttgtaggcctatgccaggtggcgggggaccttgagtccaggcccccatcctcatgggtccagccacagctcctcctgggcatccgtttcatcctcaaatgtggggaatccggcttctatgactgacatacaactcgcacattttaaagatgttttattaaaaaaaagaaaaaccaaccaaacaaaaatcccaacccaagaactcttggttctgggagactgggagcagcttaggtctgtggggagggtagaccctggaagacagaaaagtatagggagcctcaagccctgggagggagagcaagagcagcctttccctagggctgagcctctctccatggggcctgggcttatccacttggaaaagacaggttgtgggggctcagcccccagaaaaaggcagggtgagcagttctggacagccctcaggcctcttgtcaaaatcaccaaccagctgggaaggagagggtggcccagcgctggatccagcctatcagcgccgtgcccgaaggcaaggttcagcccacgatcgggagcgggggctcagatagggaggcgtaccccaaagttcagcgagg

SEQ ID NO: 90544 - DNA, 515 bp, Homo sapiens
gccctgttctgcaggtaccaggcacctgacatcgacgtgcagctgagctcggagctgacagactcgctcaggaccctgaaggtgctcactgtgtcctgccgtggagccccgtgcccagtgatgacaccatccttgctccccgtgccccccaggggctatgggcgacaccatggctgcccctgggctgggccagtggggccaatgcccaggggctgagggcacgggatgctgggatgagatcccagggtgaggggccaggctaaggtttgagtccgggaccctaagaaggcctttccttccagctggtccctgttgcagtcccggtcacctttaggactagagggaccttcctgaagctcagaaccaaccctgtccctcccctgctcggaacctgctgtggctccccagtgcccctgaggaagcccagctcctctgtcagccacacgcctgggccgacccggccgtggggctccagccagttgtgctcatgagcggactgtgccttctccctctga

SEQ ID NO: 90545 - DNA, 1017 bp, Homo sapiens
  misc_feature (1)...(1017): n = a,t,c or g
agcgatatcnntgnnnnnnnnnnnnnnnnnnnnnnnnnnnnnnnnnnnnnnnnnnnnnnnnnnnnnnnnnnnnnnnnnnnnnnnnnnnnnnnnnnnnnnnnnnnnnnnnnnnnnnnnnnnnnnnnnnnnnnnnnnnnnnnnnnnnnnnnnnnnnnnnnnnnnnnnnnccaaagtgttgtaatcccaacaagcaagagccaccatgcctagccaagtttcaagaattctcacgaatactcccaaatttggaaagaagcaaactgagggagttggtaggcaacctcaaaaaatctctcgaaagtagtaagtactcctacttactactgcaggagctcagcaaaggaatgaagagttggtagggctattttctaatgtctccaggctcagtttgggaaatgagaagcagcccgtaagagtggaatatacctgggacttgttggaatgggatttggtataggacattcaatgggatctcagatgaaaggacagattccaggtcccccagcaaggactgtgtcagccccagtatgtcattagtttttgccagtggaagcaatttatgctacagttagggtaggattaagaggtaatgggttttctccaccttttctttgctcatctgctggctcgatggagaagactccttggtcctacaggatggtatagccataaaatgaaaggagtcgcagcctaccaatcaccagatgaaaggctatctgctgatcaggaaaacctacatttggctgcatcagtcaatcagcggtgaacagatctgaaacatgtagttttaaaactccaaatctgcttgcagaggtggcatcctgtaacttcttaggggacaagtgagaaaaaaacccaaaaaactccaaaacacaatgattccaacctcttaatgttattcattgttttaaaaaacttaaagtaaatttcaagagccagaagctcttgtattaaaatacctaaattttagtcatttctttcatactatttattttttgtgtattccagctctttttt

SEQ ID NO: 90546 - DNA, 452 bp, Homo sapiens
gtctgcggcgactcatgcgtgcgctgatttggagggaagcccccaattcccatatgtttgactttaaagaacaatccagctgtatctgaagtaattggcctcctcaacagagtgcacaatgcagggtgcagtgggtggtacacaggagaaaaaactcatggaatggtggagacagccccctagtcagccagatgggccaaatcagatgtagggtcagcagtatcacgtttatacgcttggattacattgccacctagaaggaacccagggagtacctaggtttccatatatggggggattcctgcaatgattcagtcctttaatggggcatcttactgtaaatcatttaaacagcaccacctactctccagcatccggcccactgagttcttgaaagcatggttgctgtgggcatcacagctgatttctgttagttgactggtctcatccag

SEQ ID NO: 90547 - DNA, 890 bp, Homo sapiens
gttaagttaggctatgctgatcattatcacaaagtatacatcgtatgtgatgctttacaatttccctttagaagaagctaaatattcttagttaagtaaataaatatctaacttccagcttttttcttgcttaatatcagttttctgaatttcaatatagagatgccagtcatatgtcattattaagaaactagcctttaaaatgtatgactgttgctccttcttcatttccttatggttgtttagttttctgggctgaggataagtcatcaggccaaacctttcagtggaatgtgttttgctatatggttagaagacaagctgagctgctcagatgtcatagtgacctgaaagaggcagcttcaaaaattacctcttaaatagtttttgtttaatactagaatcttttagtgatcactatagatcagaatttgtatttaccaatccaagaatggaacaattaggtttttcatctgctctctacattgactgtgcccaggataccgaagtcaggtatttagtttttacgtttgtaaagctctgatgcttccagtagaacagaatttctgtaggacaatgaattggctttttctttgtgaacacagcttattaatttagcagtggttttatcatattgaactgaaatgtggcacgttattaggcttgtgaattttttgttaaccagtcttttgccttattttagaaaatattgcagcgatttttctctttaaaattctttaaagacttttgtatatttatcttaaattatatatctgaagtttttttttttagttgcagtttaggcttccagagccatatcagtctttatataaatgtgttgaataatcgtttcttctaaagcaaagtaaatttcttgtacatgttgacgg

SEQ ID NO: 90548 - DNA, 864 bp, Homo sapiens
  misc_feature (1)...(864): n = a,t,c or g
cttgttcttctatcacgtgtccactggtggagaactcctgccacgatgacgaggcagggctggagtgggagctgagtcctgcaggctgagaggcaaccacagagagccacgccttcaggcagcatgtaggataccctcttcgtgtttcactcactggtagtgacctgcttttggtacatctggagatttcaaacttcaaaaccttataacctacactttaattctggggaactgctggctaaagcttggggataagcaaccttggatcatttcttgactccttcattcattaattattatgatcttgagaaaatgacagattctctgtgcctcagttttcttaattgagaaatgggaataatagaagcacttgtctcctaggattgcgggaagaattatagaatgaatacttgctaaggatttagaacagcgcctgatacatagcagggactcaatagataataacagaaattatattattactattctttagctgtatactcttgggcaagttgctttgtttctctgatgttgnccttcagacgagattgggagcgttgagggtggtatgactgtagactgaagttgtccttcacgtgtacaatgaaaataatagtacctatcgtgaatttatcatgatcataaaaggaccgttgctgagacagatgctcagactatagaaaaccggagctcaaatgctgctagacaaagatgggaatatcctcggtgcctgcatagctatttacattcgcatgggagcagaggctttttatggaaagggccataggttaaacccttttcttttttgacgccggaggaaccatgacaaggcttgatgtgaaacaggcgacaaggaaacccgcg

SEQ ID NO: 90549 - DNA, 399 bp, Homo sapiens
catactttcactagaagaggttagtggaaccatttattaattgggaaaatgtcgacggcatgttcattaatagagccaactttcttggaattcactctttctctttcgttaacacatcttccctatgaccttttttttcttttatttcatctataaaccccatttctgtagcatttctttttttatcacactagattcttttcctccttctctctttcttgctccaatccctaccaataatgtcatgatgcagaggcatttgaaaatgaagatgaaaagatggtcactttatttagccagtcaagcttattctactgggtgtcgccaaagcgatttatcatttttattttaaatatattcatggttgaagtgtttcaacgttattggacaattaggaag

SEQ ID NO: 90550 - DNA, 426 bp, Homo sapiens
acaagtcctggctcctccctaccgattccttgcatggccctggataagtcactaagactcatgccctctggtttttttatctttccgaaaatggttgtggaggaactgactgctgaggtcttctcttcagaaatgctgcatcatccacatgcaaaatatgggtctggtgcttaggagacaacgggtgtggctcgagaggtggattttggatttgttctacagggaatacagtataatcaaagtcaagataaagatccagtttttaaaatggtctcgatcctctgcacagcatttgatgctgttgggctggtagctgttctcttcatctgaggcactgtagagccctgtacctcaaaccttttctactgctgcttgtctgtttctttcacccagaacccttcaccccacagatgtagatgttcaaat

SEQ ID NO: 90551 - DNA, 733 bp, Homo sapiens
  misc_feature (1)...(733): n = a,t,c or g
ctcttggctgcttcgacatttgaagtcatacttgtgaaaggagaggaattagaaacttagattcataggtggatgggactctcctgactttaagcatatactggaaagtagtttgcctgttatgctgtgttctgatttaattgtttcaatttgtaaatcttaaaagtggacagagaacttcagatatgtagtagaaagttatgtggtattatgatacctattttaattgttattattaatgacagcaaaaattatgatggctgcagctttggttgacagctgttttgcaaaggttatcatggtgtcagagatgttacctgatttcattaaaccggcttctacttgagatagaagaatacacttggcagaatttataattcactggagaactgtggacttgaaaagttttgttctcacacaagcttttaagaatccaagttaaaattttatgaatggtgatcacaaaagcttctaaaagggctcaaaaagcatgttacgcatcaaattgctttttaaattcaatcttctgataggtataaatgaactcagtccaagagattgattatcttaaaaactatatataggggtcaacncattccaaaaggacctgggcaatttatctgggggatataaaattttttagaaaagattttatatcttcttggaggccatttgaagtgttggggggggggggtccagggaccctgttggcagaggccctatttttaaaaat

SEQ ID NO: 90552 - DNA, 1121 bp, Homo sapiens
gaagtttatcaggaaaggagcttaaaagagaaccaaattcagcctgtgttggaactctcagtcccagaggggtgtggtttgtagctctccggcctgctgttggacttaggctgtgacccacagaaggacgccagaaagtactcaagacattcacggtgccccggtcagcactcgccatgacgaagacttctacatgcatataccacttccttgttctgagctggtatactttcctcaattattacatctcacaggaaggaaaagacgaggtgaaacccaaaatcttggcaaatggtgcaaggtggaaatatatgacgctgcttaatctgctcttgcagaccattttctacggggtcacctgcctggatgatgtgctgaaaagaaccaaagggggaaaagacattaagttcctaactgccttcagagacctgcttttcaccactctggcttttcctgtatccacgtttgtatttttggcattctggatcctctttctctacaatcgagatctcatttaccccaaggtcctagatactgtcatccccgtgtggctgaatcatgcaatgcacactttcatattccccatcacattggctgaagtcgtcctcaggcctcactcctatccatcaaagaagacaggactcaccttgctggctgctgccagcattgcttacatcagccggtaagtatggctctactttgagacgggtacctgggtgtatcctgtgtttgccaaactcagcctcttgggtctagcagctttcttctctctcagctacgtcttcatcgccagcatctacctacttggagagaagctcaaccactggaaatgggtttctgttcagatcttgcaaagatggaggctagaatctgttggaatctgcttccagtggtccgattggaagtcaccagccaagcaccaactggtcaagaatatcaggtgaaatatcagggctataaaaatatttctagcccttgctactatctgacagcagttaaaggaataaaacaagtcggggtgaatctaacttcctatctgccaactaggatactttctactgggaaaaatgcttctcaatcaagaaaatatttataataaacataattttccaattacaaaa

SEQ ID NO: 90553 - DNA, 727 bp, Homo sapiens
caggtttgtggttttccactgtaggactctttccatcctaccaagccattcccgtaacacacaatagagacttcaaagtctccaaataggcacatcatatctgtagcagcaccatttatttccttacctgaaggaaatctgaagatgtaagtggtcatttttgagagcttgattcttgatcctttaacatatattgaatgaaagcgctaaaatgtctcaatccagacgtacccactgacactactgtgctatcaccaaacactaggatgtatatattttgtcagtctgtgcacaatatctctatttctcttatttggtgctcattgattctttccttagtgttgtaaggaatcatggaaacaggaaagcttttaactcattcatttattcattcactgttttaaaataaacaggtataccacggaatacaaagatgagctgaggcacagactgggttttcagggagctcacactgtcataagagaatctgacatataaactatgaggtcagtgcagtaagacatgtccacaaaattcatgtagaatgaaaacccagcccagatttagggaatcaaagagaatttgtggggaagaaacatttgggcagacccttctggcacttggcagagtaaagtcacagggagggaggtgaaggaaacccttctaaaacacccaatggaggggacccacggtttgggaagttgctggggaggggcaaagaaaaacg

SEQ ID NO: 90554 - DNA, 632 bp, Homo sapiens
tttttttttttttagtagagtcagagttttaccatgttagctaggctggtttcaaatgcctgacctcaagtgatcctcccaccttggcctccgaaagtgctgggattgcaggcataagccaccacgcccggcccatgcatgatttttgtgatatccaccaccacagataagcaaaagagtccttgcattcaaagagttggacacctgtgcaccgtccaagtattctcttagtgcttgctgcttaacattattgtagctcttactgcttattgaactcttatttactcatgtatctgtagaccttagtagcccccaaacatccccaggctttactgcagggaccagtgcctagtgaagtggtagatgtcaatagatggatagccaaaataaccacataggtgtcttgctttatttcaggaatgcctctggctcaggcagtagccattcttcagaagcactgtcgcatcatcaaaaacgtccaggttctctacagtgaacaggtgagtggtggctgatttgtttattgaaatagcatccctcggtagtgagtcacttccagagctgatgctttgggataggctgactggcaaggatagctgtgttcgaatgggagaatctctagcaccagccag

SEQ ID NO: 90555 - DNA, 734 bp, Homo sapiens
  misc_feature (1)...(734): n = a,t,c or g
aagttatccagcttcttgatgaatttctctaaggtgtaatgattctctctgtaagttaggcacatttaggtgcttgacaaaactgtcatcagaagttttcccagagtacattaagttgaaaaactacatgtttggaaatctaaatgtgctttattaagtcttttatggagttatcttcatgagagcatgctatggtttggatgtggtttgtctacactaaagctgatgttcaaatttgatcctcagtgtggcagtgttgggagatggggcctagtgagaggtctttgggtcatgtaggtggatttatgtgaacagatttatgctctctctggggagggagtgggtgagtgagttcttgctctcttgggaatagattaattctcatgagagtgggttgttaaaaataatctggcttccttgttttttcttctgttgcttcgnctcttgaggaagatcttgtgagtttttttgcacatacctgctacctttcacgtgtccgcttcccctttgaccttttgccatgttatgactcagcagaaaagcccttaccaaaagccagcaccacactcttgaactttgcagcctacagaactgtaagccaaataaacccctttttctttggaaattacccaggcccagttattctttttattgtcccccaaagaggggccaagagcccttttattagggggcccccgatatttggccactacccctccttggggggaggaaag

SEQ ID NO: 90556 - DNA, 2137 bp, Homo sapiens; identical to SEQ ID NO: 60498

SEQ ID NO: 90557 - DNA, 737 bp, Homo sapiens
  misc_feature (1)...(737): n = a,t,c or g
ggaagaatatactgtttgcagcatgggaatccccaccactcacaaacccagaggcctgtgggactgagatccgcagtgaggagtgaggtcccctctcttatctcaggctcatgcaaggacactcactcatgggagataacagcacaggcaatgcccatgccatatacattggtctcctctctctccttttcctgttttgaactaacaaatattaactgaattcacatgaggtgacatgtgaagcctctattcacttactcgtattgctgtttttaacaatgtgttgaaaacatggcaatagttctgcgaaacgtccattgtctgaggtctagaaatgtgagtctatttcaaatgccagctaaactgtaatgaaacatcaaagagccctggagagagaggaacagtatctgtatatggaaatcattgggaaatttttcattaacatcttgagatggccaagctgttagggatattcgtgttcctgcgtgattctataaaaacctccaggctaaagttcctatgacattagatctaacatcatctaccttcaaataaangggttggtttgttttgttttgagacagagtctcactcttttgcccaanctgtaggtcactggtgccatcttgggagcacaaaacagggtttcaccctggagggccaagcttggttttaaaatcccgagccctggggaggtttgccccccctcggggttccccaaaaggggggggagatac

SEQ ID NO: 90558 - DNA, 2369 bp, Homo sapiens
tttttttttttctttttttacaaaagagtaaacattttattatttgtacatgaatcagtttggtctgaggatacacaagcatctggctaactcataaaagtagcctgaagtgattgataggagagtgtttgtagtcatttccatttgctgccacatcccttacattatctacttgctaagcactgagaggcccagaatggacacatcaaactgtcaggaggaacatatgggacactggcacctgcaatggtttttttaaaagcagagaatgcagagcagttcacagactccacttcaaagccaggggtgtgtgggaggtctcccggggaagagctctgcacaacaggtttccctgggggggccagagggcctctcggggaggaacagaaaaaaaccagccaggagtgctaccgaccagcctcagccagaatgctgtcagaacaaggccccaaacatggcctggcctcagtgatctggggatgaacggtgtcacaagggaaccacctgaagggtgggcagaggcccccgtggaggagccacatactcttcctctctcagcagccgcagcaggatgttttttttattcttgggccagctgtagacatgagtgttctgaagccaggtgggcacatgctccttcttagcatttgggaagagcacagggatgaatctgaaattcatgcttccttgttttatgaactcaatctgcatcattcgatgaatgtacttagtatgtaagccatgctcatcctcgtccagctgcgactcagcgccttccacgtcctgtttgtatttggggctgattgctacgattatcatcacggtcttatccctaaggtagcgctccatccatttaatgatatcaatgcctcggattctatcctcaaatatgtcaattgcagtttggaagccatttaccaacaaaaagttcacgaatttcaccacctccatagctgtgtccatcgaataagtgataaagactttccgcaattcttctggcaaattgcttgtttttagagttcctctggctggagggttgctagggggtctaggcacagcagctggggacggaggctggggaacctgtggtctcagctctgcagggcactccaaggactccccaggagcaccagctctattaggtggctggtgatgtggctggtcctggtgccttggaagccccggaaaggagcagtctctctgtgcgggcctctcttcttggtcccaggggctgggataattcaggataaccttctgcacagggtgcaggcctctcacactggctccaggcaggggctgcccaggcagagccggctggatcacttgctggtaggctgctcgagggtagtcatggccatatggcacctggtgatcgggacttccaggacaatggtaatgatagttccatggagcatgtggggaaagattgggaggcagcatctgtgcacatgctggatacctctgaggttcaaactgagggaactccctggacctgagaggtctggggaggtcctgggggtaacacacggaggtgaggggcaggggcctttccagctgcctgatgcccaggacatcctggggctgggaatcatatcccgtgtctatggttggcagatccaggcctgctcggttcctgtgaggctggggccgttgcaccatctcctggctaccgcccaaggagtctgctgaggcattaggtaaactttggtctgatttgtctgagtcatggccagtgtcaggagaagccgctgaaagctgagataccagccattgattacgtttttccataaatgaaaactgatgctctgcagggagggctccaaccacagactcagacgcaggctcgctgactgcagagcacccagaagggaaagctttgcccaggcctgggtgtctcctgcagaaactgtcttcactgtcctccagaacttgagtgcgcaggcaggtgacctgccgggatacaggccgctggtgatttgcaagtttcagggttgagtgagcttgagaaaagtctccggaggaattgtgaagcattgtgggtgcagacaagctgttgggtgccatgttccttatatttggagcaggtggttctgattcctcttccggggaatattctgggattggtttcagcaactgacttgggtatggttctgattcatcaacctccacaggaatgcttcggttcattctagtttcttagatccaccacggacagacagactgggcccggagggtagtcggctctcggcggcttctcgtctccctccaccttctccgggcccaggtaagtagaagaacaggctctgaagcaggaagtggaagctgtatgcaaatttctacggagcctaggaagcctctgctcaaaatct

SEQ ID NO: 90559 - DNA, 388 bp, Homo sapiens
atactaaacaacttacagacatcctattgtcgtatatgtgatataaatgtcaacatttcctatcaaaatggcatctgatgttggccctcttaaagttctgtggcttaaaatactaacagtaggaggaaaataaacagagaccaaaatgcaaactcaacaatgagtaaaaataccacagtacaagtggaaccttctataattctgtatcccagaatttttgagaagagaagataacatcttaagcattaagaaatcccaagaccctgtccagcttattgctgttggagagccccaagaccctttaatgctccagtttagaggatcatattgtcaagtcagagaggcttaaacacaatagcatcttctggaaccctagtgacctgtattg

SEQ ID NO: 90560 - DNA, 384 bp, Homo sapiens
aatacattggggggatctctctaagacgaagttatctttatattagcaaccatacaattggatactactgtggccagcttggaagacaaatgagcgcatatgtgactaatgattaacagatctaagagagaagagctcttgagaccaaggatgtagttaccaccccaagttgagaattgagtgaagtcacctgtctatgcatgagcctgatcattcattaaaagttaaacaacagattgcatctaatttttttttaaaggttaaaatgacagttttacttcccctcttttcattatttccttagggtttctgttcatgctacataccacaatactttctttttttcgtttgagtcttactagtcacattcaaagagagggcacg

SEQ ID NO: 90561 - DNA, 2252 bp, Homo sapiens
ttttcgtatcatattttcacgtcacttatcactatctgaaattgctatccatctgttttcttgtttattgtctgtctctgttactagggatcctgtgattttgggtagtacttggctgtcacccaagtacctagaacggggttcactgcacaccgaaagtacgcaaaaatactaagtgaatgaatgtcaggaggatgaaagatggagggaggtgagaaatccatcaaaggctcacagaaagaactcaattcttggatgaaagtcggaagaatcccaacagctaacaagcaaatttgctgagagggggcggggcgggccaagggcgggggcgggaaggggcggagtcaggcggaagccggggagaaggcccaggaagtgacggccgcctcccggctaccggggacttctggagtccgagaagtcaacggcgcggttgctgcggccgccgcgctccccggcccgaggcgatggagaacggagcggtgtacagccccactacggaggaggacccgggccccgccagaggcccccggagcggcctcgctgcctactttttcatgggccggctcccattgctccggcgcgttctcaagggcttgcagctgttgctgtctctgctggccttcatctgtgaagaagttgtatcacaatgtactttatgtggaggactttatttttttgagtttgtaagctgcagtgcctttcttctgagtctccttatactgattgtgtattgcactccattttatgagagagttgataccacaaaagtaaaatcatcggatttttatattactttgggaacaggatgtgtgtttttgttggcatccatcatttttgtttccacacatgacaggacttcagctgagattgctgcaattgtgtttggatttatagcaagttttatgttcctacttgactttatcactatgctgtatgaaaaacgacaggagtcccagctgagaaaacctgaaaataccactagggctgaagccctcactgagccactcaatgcctaaagactctggggagcagatgttacctaaggtagtgaccctgcattgtggtgcctgagccctggcagaagctcttgtaaaatttgttaattgtttaaaccacttcttttggagagcaaggggaaggtcaagaaggcagttttatcaatattgtgtcagtcaccacaaagtaggccagataagttaaaaaaaatttttttttaaataataattgaaacttatctcaaatggagattttggtgggaggaggagaaaacaattgtttttaaatcacacagctcaacggttgataaatgattctgtcattctgttacaggtcattcttttactaggcttagcttccaaattatgctttatagctgtataaacatcgtgattatattcatctacttagaaattgttttatttttaaattaatttgcttagctgtttgttttgatgcttagattatgttctgttaatgggaatttaacatatttaagaaaccaatatttaaaatgttggtctaggtttttttccttaacatatattaccaggctttactgtatttcactcagccttaaatgttataatatttttggataacggttattaattctttgagaccttcgtatagcctataaaatgtatgggagatgttggtattttatgtgtataaaagcaacaatatcagcaacttcgtgtttatactgcaccttggttgttgatgtcaagtaaaaaaaagattgttttgtaacacataaaaaaatggaagaaactgataccacacctaaggaccaaagataagaaagactttttgcccaagacagtgaaagtaattataaaaacaagctttgaccacttaccaagtatctgaagagatgagttcatactatgatttagaaagtggttcaattcccctgttggcatatgattatttttactaaaattaatacagctctgtgggtcttccttagtgttttctttgaagccaatctgttttttttaggacaccagcctttggtttttcatctgttcgagatgcctcttctctgtctccttatcagatagaaatggagtcatgtgctgctgcttcatctagcagaggttggcctctggctctgacactttttgtcagttgtctttaggtggtcctgaatcttgggcccttttgattgtgaatactgtgtagcaggatcttgagagtccttgttcttacataggcattgctctagtttgtctttggcaaaaaaaaaa

SEQ ID NO: 90562 - DNA, 384 bp, Homo sapiens
aatacaccctgtctcaaaaacaaacaaacatatacaatcccactgtgaggtctgctctcaccatgcgcccctgaactggcaaaggcttccacatacctctgactgcagaaaggctcccacaaacatattcatggaaataaatctaagtggagaacatcccaaatccaacaagtcacagacggaattcacatacccacgcaagcccagcagatggagaggccgattatttctgttcttactgaagtgcttttcttgtgtatttgtggtcatcccaagtatctgggaattttatattgatcttaatgtatacctcaatatttcttattttaatgcttttctttctactttcttgcattaacaaaagagatttacctttttttcctt

SEQ ID NO: 90563 - DNA, 400 bp, Homo sapiens
aatacattgctgggcacaaactaacattattttatcattcttattctgaaataagatttggcaggtaagtgagtcctacaacatgccaaatgtcccgcaatctaccgttcagagattccttatgccacctttgtaactgtgtagcaacagtaatcccttaattaagtatacaaatgtacagttcaccaacccatctagtggtttcactggagtgggagaagggagatggttaccgtgacatcattgttattatttaaactgctaagggagaatataattgttaataaaaggcttcttctccacgcccctcaaggttccctcccccctggcattttatgacgtgccatccacaatgaatgtaagtagaattatgtcgatcctgggagcctactctctaaat

SEQ ID NO: 90564 - DNA, 4220 bp, Homo sapiens
aaaggaggaagaaggagattgtgatggagaaagggggtctgtgaaacgtcaggcacagcacaaaggctttgccacgtaattacaggctcctattaagtcgagatctgccctcccaggggtctccaattttcttgtattccctacaaagcctcctctgcatgccagtttgtgccttttgaagtgccagagagcttcttgatccaactgagaaggaaaaaggagcccagcaagaagagggggagagagagaagggaaaggggggaacccaccagcaccctccgtcggactcttgaagcctttttttttaattcttaatttttttttttactctttacaaaaagtaaagtgagaatcctgctctctaatacatctgcaagacatcaccctctcctcctgaaactttagtcactcctgagaatccacaggagtgcagagaggggggaacacgttttcttgaagatgttttaaagctggaacaagccttcttctgttggtgcttgaactcttgcctgggaataacttttttaacctttaaaaaaaccattcactttgattcttctctcccaccccttcttctctcttcttctgtttgcctaactcccccgccctgctggcctccgctttcctctctcccccttgttgttatttttagtctgtgcgtgtggacacttttggagagttggaagggatttttttctcctgacttgaacatagggtgactttttaatattgtattttagtgtggattatctctttggaccgcgccggacttggcctcaggaaagcaaccaaggctgcggaaggcggctggtgcagaacgctctgctctacagaagggggtcccccgccctcttttccaatttttttttttggccttcctctccttccctccctcttcctccctctctctctctctctctccactaccccccttttttttccccactcggctcctctcccccctcgcgcccacagcgtttggtgttgattcgagcgggaagaggggggtgggtgggatcggtgggggagaccatgacctccagctacgggcacgttctggagcggcaaccggcgctgggcggccgcttggacagcccggtcaacctcgacaccctgcaggcgaaaaagaacttctccgtcagtcacctgctagacctggaggaagccggggacatggtggcggcacaggcggatgagaacgtgggcgaggctggccggagcctgctggagtcgccgggactcaccagcggcagcgacaccccgcagcaggacaatgaccagctgaactcagaagaaaaaaagaagagaaagcagcgaaggaataggacaaccttcaatagcagccagctgcaggctttggagcgtgtctttgagcggacacactatcctgatgcttttgtgcgagaagaccttgcccgccgggtgaacctcaccgaggcgagagtgcaggtgtggtttcagaaccgaagagccaagttccgcaggaatgagagagccatgctagccaataaaaacgcttccctcctcaaatcctactcaggagacgtgactgctgtggagcagcccatcgtacctcgtcctgctccgagacccaccgattatctctcctgggggacagcgtctccgtacagatcctcgtccctcccaagatgttgtttacacgaggggcttcataacggattctaacggaagacactgaaaagcgccatggctacttattctgccacatgtgccaacaatagccctgcacagggcatcaacatggccaacagcattgccaacctgagactgaaggccaaggaatatagtttacagaggaaccaggtgccaacagtcaactgagtgaaaaaaaataattaaacaggccctaaggaagaaatcaaaaaccataagacacctatcctgctctgttatttcttcatctgctggggggaaaaagtaaattacaaacaaacaaacaaagcagaactaaaatattgggaccatggcagagaaaagcaggagaggagcaaaatgaaaattagttaacaaatgttccgtcgctccctctgggataccaccaccacttgtttctgtgtgtgtttattttgtttttctttcattcatgctttgcttaatgtactccaggcttcttcagctaggttcagcccacccacccccatgattgtatgaagttttaaaaaaaactacagcagccaaagaaactatatatatatatatatatatatatatccagaatgattgcctctactgtcctcattgacttgtttgaaccttagtgccttaccctgtcctcttcccagttctctttatagaagctctaggagctttcgaaaagccaaagtctttctgaagaatctgtgctggacagacataattccctttctcattgtctccatctttgttggtcatggtaaggtttttccatcagcctctgaaaaaatagttgtgcacaacatctgctcactggactgtctgatccaatgtaattggctgcgtctggctaattctaagcactaaagtctacatctaagctatagatttaagcttgaagctacagattatatcactatcaccaccaccccccaccctatgcaatcaatcaatcaatcatcttaagttaaagatatttgttgtctttgaatgatttgctgtcacagactatttggtagaagaaatatttttcacctgagagaggaagagaaatttctctagtaacacaaagagtgagttctaaaaggcatgcccacatctctttcgtgccttaaggatagtgagatgcacacttatatatatactgtatatatttatatatttatatatatatttcatatatatatataatattgcaagcttaagtttgcaatttcccaaacaatacaaaaagcaaattacacaccctcaccactgttcttatctctatagtgatgaaacattaattagggatcttgctgcttttctttttctacacgaagttttcattaaagccacagaataattgatagggcagctgtttgagaacaggtcccattttcacattagggctttaaatgaattagaaactatttgaggctataaaaatgtccttgagtttggagcctgagctctggtgaaatgctgatacatctgatctatcatgggaattgcagttagagagagtaaggaataccatttagtcatctatccgttcttcacttagcaggaatatgaaagaaaggcacatgtttaagaggaatacctaaaggtttttctaaattccaacatttaaaaggcaattgtgggctatttttattttttaatattttgaaataaagtttagtgtctagggctgggagccaggactgatcttccatttctttttctttgttcccagccatgcttttgtaacttgccaggtggacttgaccaactacattaccatgctgtgcctcagtttacccatttgtaaaatgggattaataatacttacctacctcacaggggtgttgtgaggctctattcatttgctcctttattctttcctgtattctctgtatgtccagcactttgtagccatgggaggaaagggactataaaagtgtacaatgttaatggaatgatacggtacctgaaagccttgttttctagtaagaaaatgctaccttgctgtacatacttataaccttgtatttggaaatgagaaataggtttatattttcagatctctcaaaaatcacatcatttgaccaaagaataatttaagacacatagaacagatttttttaatttatattttcatcctgaccagcttagttctaataatttttagttgtgagtgattaaaaaactttggatcaattttggtcaaacatgccaactttgtagtctgagtgacaggcaaggatttttgggtttaagatgcacttttagcacacatttgtatttcccttggcatatcaaattgagctaatggtgatgttatttcaatctaacagccaccaatctgaaattgtatttcaaatgttgattctgtagttctttaaataataatgaagctcatcttatacattttgctttcaccaattgattccttcttcttttagcccactattaaaacatttcttactgaatgggtcatgtaggcttgctgaacggcacgccattactggcttcccggaaggggtcccccattcatccattgggcccaataggttgccggggatatcaaggttggaagggac

SEQ ID NO: 90565 - DNA, 408 bp, Homo sapiens
ggagcccataacttccttgttatagttttcccacttaatttttggagataatcgtaaaagaaactgaaaattgtttaaaaagcatctatcacgtttcttagaagaaaccaacatatgtaattattttattaaattgggaagacctgcagtctgtttatcaggttcttgggatggcatttcttagagcatttgctgctatcattattgaagtggaaatatttaaaaaacacaaagtatgcaaatacgagaaatggactttatttgaaacagtatataagaagtatgtgccagccattaggtaaatgtccactctaagtaaaaagcatccacagctactgacttctaaggacttccttttctagcaaatatttgttatacattgccacctcaagcaccaaattcccaagg

SEQ ID NO: 90566 - DNA, 439 bp, Homo sapiens
agcgccccatttccgttcgacccacgcgtccggtttgggtttgttctctgctctctaagtcctagaggaggggaagagaaagaagaagaacctagggaggtatctgagaaaggaaaaggcttaatcctttgagggcctacctgaaggagaagggaacacacaggaaatggggacccagttcctcctgagaaggaatctcactggtctcctgcagtgcagacactaccctgagcactatgcatgcgctaatattgacttcatcttcccatcctgccctcatcatccctgccatcaccaccacttggcacaatgctttgtacatcccataactgacattaattatcagtgaactaaggaatggataatgaacccagaggcacctaaaagtaaatatgtccccaattaaacctaagctcttttgctattgtagtggatacat

SEQ ID NO: 90567 - DNA, 1116 bp, Homo sapiens
atgcaattgaacatgcaatttgcaaaattcagattgggaaaactcttggatttttcaacagataaactataacaaaaataaattacagatgaaaacacaaaagacataaaaaaatgtatgaaggggcaagaccacactttaatgcctaaggatgcacatgaacacataaagatgcatctcagtgataaagaatgaagaatgcaaggaaataattactgtaaaagccagaataatggttacttatggtgggaggaaaagagaattgcaattggtatgggatatttggaggggtttggctcggggagttcttgcaaagtttgacttcttgatgtggtggtggttaaagagttgttcacctttatttatgaagccatgaatctgttttgtgagcttctctgtatttctcctttatttcacaataaaaataaggtgttgaagaagcattcaccaaaaaaaaaaaccatgagtagaggcaagggaaaattaattttaaatttaaaatgtggggataccagcatttattatgcgtgttttttaactctttgatattaaggggggccccttatctttgctaaattaccaatgggaaaaacatcattaaaaaatttacagggctccattacctaagaaaatttcaaactccttataggggttttttaacggggttccattttactttaaaaaaatttgtaccgggcccccaaagctttgtggaggaccaaaaaaaagcccacttactttgaaatgctgtggggtttggggtcacgccttggattccatccctcgaaaacgggaatcctccgcaaaattagtaggaggaaaatttttaaaacttttttaccaggaaaaaacctggttttgggaggtacaaaaggtcggaaatattggtagtctctgaaggaggcgtatgaaccatcctaagtaatccactgaagaagggttcttgttgtcggatcggcaagtcggatcaatggacagattgggatgcaataaatctatgcacggagggttcgttaccttgcatcgcaccgagcataggattgcgggctaacggtagccgcgagcggtaaacgggtcaaacccgggtctagaattgagacgtcggaccggtgggcg

SEQ ID NO: 90568 - DNA, 1186 bp, Homo sapiens
acctcccggttcgacccacgcgtccgcccattaacagagattttgttttgatatgtcagaaaccctctataaaatgtaaaatacattagacctacagcgctagatgaaagggaaataaagctttcatgatggttacatatctagaattctatccagattggttttaaaatgttacattgttctgggtgctatcctttatggcaaatgtgtattaagcatcatctatgcgagtgtactgtgctaggctttacctagcaggaatcactctgtgtgactggtctgcaaaagtatcaactctgcatctgtatccttggacctgcctttctcagcaagaaataattggttctacttaatcctcatctcttactgaggcagcggtagaacatcagaaagcacaggctttgtgctttgtggttggtcaaaccacaattaaaatcccagcacatacgctcggttaggtgtttgggacgttactttgtctgtgagcctcagttaactcatctgtaaaatgagatgatcactcctcagaaatcatacgcaccaaaagagacatggtttgctgtgggaaatgtgtaagtcatttctatgtacaacataccttatccttattcctgaccccatttcattttcctttccctaaattctatcttttcttattcagcttttaatctagttgtaactaaacatatattatgtatccctgcaatctacctgaagcccttttgaaaccgcagaaggccctccaatccacaaggggagaggacacatcttatagatcggggaccatcacttccattagcagcctgtggggagggccctataaaatttattttccctcttaggcccgggttattttatacccgggccgagactgtactccagtttgtctttgaagctacagttgctttagaaaaaaagccttctaaaccacaggtttgggttgttacacccggtcggttgaaattgttaaaatataaaggggggtgtttagagaacgtctcccgcggaatggagttaattgttatgggcggtaatatcgctgggcgcttaatttcaatggagaacaggtacggaatggagagaacctccggccgggtctattcgggtgagtgctctggaatggacgggaccgggcggtaggggggcgattggatggctgtggtctgcatggaacgcctgcggtgca

SEQ ID NO: 90569 - DNA, 401 bp, Homo sapiens
catgaaattgctgacatttgcccactttaggtgatttcatatgattcacctacctcatgcatctgcactggccactcaggagcacactggaaagctccctgtaggagaagcatcccagttgcaaatctctgcctgctcttcacagtggctgtctgtgtggcttttgatttgagtcccttatctgtaacctcaatgagtccttcagtccactggtagcatgtcccacctttctggcacaggcacggatgcctttccttgccccttccttgatttcagctgctccagggatcagcttttctccttgaagaccccccagaaagttgtgggtggtatttaagtcaggccatctgaagcacaccctccagatttgataaaaatacatgtctagtcattctcacttg

SEQ ID NO: 90570 - DNA, 1164 bp, Homo sapiens
  misc_feature (1)...(1164): n = a,t,c or g
ccctatttcaacatgctggagatatggtagtaacaaaacagatctaagacccgacccttatggagtttacattcaaggtctctttgaagcttctcgttttctgcttgtgcctttaatgttggtgttcctcagcattccagtctaggccctcatgtgtcttaaacattcacctgggcggtagtatctgcctccagttcttcactcacttccctcttgcttctcatgtatttatttccagctcagctcttgctatggatttctagatttatgtatgcaatatgcaactgcctacttattatctccacttgtaagtcccataagcatctcaatttcagtgagtcctaaattaaagtgtttctgtcctctgcccaaccaccaaagctacttgtccttttggatatctgttttggataccaaaatgcgccaaacagaaatctgaatgttgtccttgaatcctttccctctacatacttccctgtacatccagncagtcaccaagttttaccagtttacatttctaatttctttatccagttttttccattcttacaaccacttgaaaatcaagcctccatccagtattctaacaacctttttactggtttttctgattcctctcctgtctttccctaattaaggttttggaaaacagcttaagactgcaaaaccccactctgcattaactgaacggcaaacagccccttttatttagcttagcccttactagaccaatgggaactaaacccaccaacacttaagtaacagcttaggacccttattaactgggttaattcaacttctcccgcgccgggaaaaaaggcgggaaaaaccccggcgggttgaaatgctttttgaatttgaattcattttaaaaaacctcgagccgggaaagaagccaaccctgtcttatattacgtccaaggttcctagcattttactgaaccccccagtggttaaacaccccccggctcagaattttcgagaaaaatctgttactactcttatatatggggctgttagagaacattccgcgcggctgaagggttcttttcggggccgactgtccggcgtggaacggggggggaaagggggagggtagagtattccctccgatctacgcgtgaggcttcaggtagtacgatgaggcccgcaagcggaagtccg

SEQ ID NO: 90571 - DNA, 1388 bp, Homo sapiens
aaaaaagagagcaacatatttgtgtaagtttgtatatgtgtagggctgtgtaggtatgtgtatatacagccatattctaagtgtatatttattaaaatagattgcatgttgcaatacggttttctgaaaggggtctcattgactattaaataaatgactactactaaacttgtctgtagtcattaatcttaaaattacctgaaaatctgatgacagctgccttccctaactttaatgtattaggttggcacaaaattaattgtagtttttgccactattaatggcaaaaaccgcaattatttttgtaccaacataatacacctttcatattatgtattatcttgcttaatgggttttatcttgattatccagttacttccatcctcttcccaatgttaatttgcaatagttttaaaatgggaacaaatgaatcaatcatcagatagttaaaatgaaattaaatcagctgcctaataatttatggaattcattggaatgtgcttaaaatgctaaagtgtatgtcattgaacatgaaatcttttttcaggcacatacattgttggtattgatgactttttaaaacctgtgggataaacttgcactgcacacggaagttttattcttgtatatttagatttgtatgcttgtgagtaaaaatgtgcatttgtaaatactgtgtttttaggttgaatcaattaagtcttaaaactgtaaatttattaagcttgttgccagtaggtttaagaaaatcatgatctcacatgcctcactttgacatttatcatgccttttattaaaaatatcccttaggaacagtaagtttgccttaactctctgcatggtttaaaaagccattggttttgtgtgtgtttacagtaattatgcagatgactaaatgagttgacacagtaaaattacttccatatggtacagtaacaacctaactcccttctacctgatgtaaccatttacaaattatagttattgtaccagtctttcaacatttcagggttaatctgacctatgcagaattctagtgtgaatttattgtgaaaatgctaaatgaaacaatttgtcagaaattatgtacaattttcattaccttcaaaatggatcttttgcactgtctgagagtatatatttttgcaactcaagacttggtactagttttaatacttaacacttactgacccaacagaagtttggaattaccttgcatataaaaattgaggttgaataaaatgaaaaattgttgttttctgttacattaagcctcttgaaatctgtaatctttagaatcccaatattttgttttttccattccttcactcgtaacttgaactcaagttttcacttactgacgcgcttcccattaaaaaaaatctgta

SEQ ID NO: 90572 - DNA, 1482 bp, Homo sapiens
  misc_feature (1)...(1482): n = a,t,c or g
cccacgcgtccggcaagatggaagctgcttgcagagaaggggctgcctcaggatcagaggcccctcttttccctgagagactcctggaaagtctgtccttcgctgattctggccttcaaagatccctccaaggtcttaaaggagctggattccttctctgaggctctgaaaggtcttgggcctcagtcttcccgactgaagaatgggtatcccaccacagacagggaaaacttcgtggaaatgggcactgaggttggaatttcctggacgagggtgggtactggggccactgtgggcctgctgccaccccaccctcaccaacagatgcaccgcgatgaagaggacagtgacgttgacgtgacgttccagccatggcacaaggagatgctgcagcaactgctggtcatgctcagctccactgtggccacgagacctcagaaggctgcgtgtccccaccaggagtcacagtcccatggcccacccaaggagagatgcgtgcccctggttctctaaaaaggcttgaaaagtttagtcttcctgaagttcccctacgtcccaagtaggacacagagagaagaacctactccagaaatggactggtccagtcacagtcacccccactttaatccgcaggcagcctggaacagtctagaggagatttgtataaaaagtagataccaaggctggcgtggcagctctgtggcagtggctgggttggtgggcactacagtcaggcaggcagccatggccactagtgtcacggccccagtgagggcccctggcttcgctcacggatgtggtccaagatcaggtcggtggctcgatccagcaacagaggcagcagctcctgctcagcaggggagaagcagcccagcacatgggcctgaaccgcctcagggtgcgccgggcgcccgatacccacccgcagccttggcattgcattggagttgaggcagctaatgcaggaacggactccattgtggcccctggcactgccccccagcttcagagccagtctccccaggggcttgtccagctcatcatgcaccaggtagacttcctcggcagtcagcccaaacagctccgcagcccgggccacgctgcgcccgttggcgttcataagccgccgtggccggagcaggaccagttgggcatcccccagcggggccagggcgaggtcggcggcacagtgccggtcgcgcgtccaactctccgccacacccagccgccgcgccagctgccccagcaccgccatgcccacgctgtgtcgcgtgccgggcagtccgggattccccaggccagccaccatccaccgcttccccggggggcgaggctccaaaacacatcggctcatggctctactcagccgctgtccggcgcccaaaaaaccgcccggcctcatgctgcccccattcgtacgcgatgggtccccccgggtnttccggngcngttcccagtacatcgggaccccggatncacttt

SEQ ID NO: 90573 - DNA, 404 bp, Homo sapiens
cgatctaagcacacgagaacatgcctctttcaaaggatctccttcatccctttccagaagaggagaagaggaaacacaagaagaaacgcctggtgcagagccccaatccctacttcatggatgtgaaaggcccaggatgctataaaattaccacggcctttagccatgcacaaaccggagctgtgtgaggtggctgcttctctgtcctctgcctacctacaggaggaaaagcaaggcttacagaaggatgttccttcactaggaagcagcactacaagcgctctgagtctagatgagagggcaaccatctcaatatacacattttggatataaaaacaataaaatggggggccgcttataaaggaagaaactttctttcccgaaggaggcgtagaagctttctg

SEQ ID NO: 90574 - DNA, 1118 bp, Homo sapiens
  misc_feature (1)...(1118): n = a,t,c or g
tggataaatttggtgaatttttatttttggaaaataacaattgttaaaaataccctaattgttccctgtattaatttatcgaagtatactggagcaaaagtgatatgataaacttcaagtaccatatacattaatgaggcattgggagcctcaaatggccacccaggccatttaagaggaagggtttcaggactcaccatcatggttaagtcaaatctaactaaagcacaacgtcattgattccactggagatattttctctccttagtgaccagagcataggttccaagatgaaatggaatggaatacagtggctctcacctctatcggagccaatgcctacctttattaacaatgtttttgtttaataaagtattattatcctgaaatgagatttttagataatgcaacctaattaattcatatctttaaaaaaaagtataatcaattataatataatggacaatatataaaaggaaattaatttataatgaaatgatgttccgatatgtacatgctcagtaaatgctacactaaggcaaaccttcaaggcagggagcactctgagatttcctggggttggctgtgtggacaagcactgtcgtcctccaaatgggttttggagcctcctcgtggcagttgctctacatcatctgaatattggggggaaaaattcgaggccctggactttaaaatttccctttgaactggattgtaacatcttactggntccctattaattaatgagctgaacgaaaccttggtatgcattcattttaattttgtatcggaggcatgatttatttcttaaaaaatacccacttggcactatcatctccttgaaaacacgttggaatgcataatgctgacagaatgtgtgtggtgggacaaggtggggcgcaggataggaaggggtattctaggattaggcgtaggctcttcgaccccagatcgccggtatcgggaacctcatgaactagttggcttcgctgtaggctgacacctgcaactactcggcgttcggtacttgcctcgtggttggcccgccaaattttactccgtcacgtcgcgccgcgcgtcgcctttctgcactccagactgcccgcgcttctcaactc

SEQ ID NO: 90575 - DNA, 1091 bp, Homo sapiens
agcagaccctgggccctgattccaagttcaggcccccttctggcacttgggggcccctctcactctgtcctcttcccttccctgctttctcatcactctttgagatgctggtgcaaaacgcggcctctcttcatacatttgcgaatcagggatggacccccaaacccctgtgccactgcccccttcccatcctgcttccccggggccctgcctaccttcttgctgtggggagcagtcttccagatgccggcagcagctcctcagccagctgggctcagctttcctggcctgaacctgaggggggatgggcttagagggtcagctggaataaacatccgtggaaaaaaatccaagcggtcagagccgagggatcagggccgaaggctgatgaccttccgtttggcctttgggctcaagttcctgtggtgtgagggtgtaaagtgatttggtgccgggaagggctgtgcccccagcatcatcgtgtctgctcacacccaagacagggctggggcgggggtgtaaaggtgggggcaaaggctttcttcatccaacttcctcccgttgctggtcctgagtccagtgcttggagggcagggcgtggggtgtgccaaggaacctcaggttcctgtgggaaaggactgagatggtcgctgtggaattctgaacctggtcaaggcttgtaggctgagtggccaagacagaatggggaaaattgggaaaggggtgctgctgtacccctcaggttccactgggaggaaaagtgcggatggcgcagattgatcgccggaagaaagccgcctcgtaggcgtcacgcgtgatcatggccccgattcaacgctttgcggaagtgttggcggtattgtttaggtgcagattagtcatggtaccaggccggaatggcaaaggtccgcgcggatgagcaagtctcatgtcgcccgggtggtggtgcgcgccgccgacttgccctgcggggcgggaacgcggcgagaagcgggcggatgggcgggcccgtccgccgccccccgcctcgagatgactgcactccgacggcctagtctgttgggtggcgctgtcaggccgtttccggcacg

SEQ ID NO: 90576 - DNA, 1141 bp, Homo sapiens
  misc_feature (1)...(1141): n = a,t,c or g
cgtcccacgcgtccgggacacccctacacgggcagcaagggctggaaccggcagcctggtggacatccgccctgcagggctctccctcgcagagactgcagaagagggtgtgcagtgctcagcgcggaatgatgctctccctgcttttaaggagccgtgactattttgctcagcgtccctggcgtgcctttctctgtacaaaaaggagacttagaggctttcccatcccattaccacagctgggcggcttcttgcatgagggcaccttgctgaactaagtcaccccaagctaccctaggctccctgtgcactgagatgctgagtcctgaggtgccttccagcaccagtgaatgggactaaagtcttctgcagtgtcgcgaccgttctgaagtgagtattctgtggtcatttgttaccctctgtgaagcccaggaagcagggattcagggctgaccagggaccactttgttctctgcccatgcatggaaggtctgcacttgggccccaaagcctgagtaaagtttcaccgtgaacttcttccagcaggataaacagtagggttcagtactgagggtctccagtttaaaccctgattccactacaaaataaatgctagactgggccacatatttaagctgtgtttccttatgcttaaaatggcagtaagattccttccagaggccatgcagggagataatgcccacagaacgctcaaagtggggcttggcagagacagggctagacaggggctgttattaagtgctggcatctttattgggggcgaggttatttaatttctatggagatggaatgccctccttataacccacccttggtgcttaacttaagagggaggtcncaggacaaaagcatacaggaagggttgaaccttggacattttaccgcagcgatcgcaattccccccctctggtattagcggaccttcggtctacatcaagcctcgcttgcgctcttcgcccgacgagacatccgtcctttcttgcggtcccctagccggctccgcgcagtggctccgccacgctgagaataatccttgtccaccctaccctcacatgttttcgtttccatgtgcttctaccgacttcttgccgcgctgcccacgataagtgacccggcgagc

SEQ ID NO: 90577 - DNA, 1123 bp, Homo sapiens
cgatccacgcgtccgcctcccttcttatgtccaaagttagctgctttcgttacaaaattattttaacaaataatttagtgggtacttactatttgttgaggtcagtactaattatgggaaacataaatgtatagccatgacatactcataataaggcagcctatgaaaaatactattatgggaaacacaattgctaatttggttatacatgaaagtatatggcagcatggttacacatgaacatttaaccatgacatggctacctatgatacaagagtccgtgcagaatctcagttgcttccctcttaaaatgtttgccttattgtactactctgcataaagcttatttcagtgaagaatttgatgatttggagttcttacagtagtaaaaatattcctttatcctaattaacatatggatattgccatcaaccatttctacccaagatgttagttcttttctttttttgaaacggggtctcgctcttttgcccgggctggagtgcagcggcgcgaacatggctcactgcagccttgacctcctgggcctcaacggtccttctcctttaacctccgattagcttgggaccacaggagtgccctaccacccccatctaatttttaaaatttttgtactggtgcccaggctggccttcaactcctggcgtctacccctcccgcacttttgctatctcaagaattgggatgcccgccgtctacccttcccagggttgagctaagctggcctttgccgccccctcaccatacgccatgcccctgccctctccgggagtcgcggctgcgcggtgaagcgcagagtcgctccagtcccgagtcaccccctgtctctaacgacagcacgtgtgctcctctagccgatgacggccatttgttaatatacgcgcctctcctgcggctccggacggtgacccagacgcgcgatcgtcaccgtcgcggttgtcgccgccgggcgtcgatgttctctcaggttcgagacgcacaccgcccttagcgagcactgtaacaccggtctgcgcctcagggcccgcggctctggtatctttcccgcccgcatgggccgcgcagggcggttcacccaccgcttaagcagcgggatccagcc

SEQ ID NO: 90578 - DNA, 422 bp, Homo sapiens
agagtatctaacaatagaaactttggagggttgatggggccgggcctagaatttgggaataaattagtgggccgggagaggctctggagccgggtagaaccagggggagtgagtggagggatagttccattagggcactgggagtgacggtataacataaagatcgacgcgggtggggcaaggctagaacgtccccagcagaactggagaggcgtaatcgaccgagggccggtgcggtgagaaggacctaataggagcaggaatagaacgtactgatagagagggcggggatacgactgtcaggatatacgcctcacgaggacagaatgaaaggaaaaacgggccaaggcaggactttgggaaaggacttgtgggcagggatagaacgttcagttagtggggtggaagtagaacgtggacaa

SEQ ID NO: 90579 - DNA, 427 bp, Homo sapiens
cactggttggctcctggactcccagggctgtccatggcagccatgggagccaccagcgcaccttagctatagtgatgctgccttggcggaccaccaaagccagggccctactctctcccttccccatcctcatccatgatagggcaggcagagctccaagcccaggagtccaggagccaaccagtggcaaaaacacagatgaaggagccatgccacctcccacccccaggcctgcacctccccaccccactgggcacgctgggatttgtcagggatctgcctcaaagaggcaacaaaggtttttttccctccccccctcaggcttggaaataatcgcctaaccaatgtaaaactctcgccatgcccatgccttctcgctgctcaacaaaaacgtaaaaagactgcttgtccaagatgactcccaggt

SEQ ID NO: 90580 - DNA, 448 bp, Homo sapiens
  misc_feature (1)...(448): n = a,t,c or g
ttcccgggtcgacgatttcgtggagagcagagctccgggacccaggngacctttaaagcattctgccctctaagccctagcacccccggctaccacctaaccctccaggtcttggccatactcacccccatcctgggacatttgccagatctctgggagggagatcgtttgtttaggcgatgccccctggtggcatgacagcgtctgcctagacccctgacccctagcactcaactccctgggcctcctttgtgtgaagagccgcccctctgcttagcagcgtggttgggggccaaagggaaagccagccccagctgggcccccgggccccaccacctatctccttgctgggcagctccccttggcctttgggcctctccctgctcccctcggcccctcctcctgggccgccttaatgaaggagccggatgccatcaagctgtttgtn

SEQ ID NO: 90581 - DNA, 454 bp, Homo sapiens
tcccgggtcgacgatttcgtcccgcagcctgactgctgcccctgcaaagcagtccacagaacttagtggcttgttaaaggtgcatctgttgaatcaaagtcctcagcagaaagcctggcccctgcattttgttcggctgcctgcagtggccagagcaggctacatgttgagagcaggaccctggctgctgtgctctcgcacggctggtgactacagcggggtctggacgtcaggcaagcactgtttgactcccggctgctccactccccaactgagcagccgtggcttctgtggtaggaactgccagatgccccccagctttcctcctgctcccaggcacacggtggggctgtgttgccctaccccactaggttctgtggccctgtgaggtcatcctcacagctgagcaccccacacagcttccctgccctcttcttttgaattcagcatctgg

SEQ ID NO: 90582 - DNA, 406 bp, Homo sapiens
tttcgtgcgccatgtgctccgggctcctgtagctcttgctgcccatctggctctcctggaccctggggacccgaggctctgagcctcgcagtgtgaacgatcccgggaacatgtcctttgtgaaggagacggtggacaagctgctgacaggcttccgctgcttcagagagcgggaggccgcgcctaggcgggctctcagaggagccgctctaccgggagagtcggaggctggcgacccagagtcacttaggtcttctgtgaatgcagactggattcaatattctgacctgtgggaagcggaggtcagtaccccgaggtgcgaagcgggcttttgccaggagtgctttaggacgccagggaatcaggagaaggatggccctttcatttgttaattgagctgaaacgg

SEQ ID NO: 90583 - DNA, 479 bp, Homo sapiens
ccgcaagcctgggagcggcctgtgataactggtgtatctggcaggagtagcagctgccccttggcgcgactgctggagccgcgaactagagaaacacagacacgcctcatagagcaacggcgtctctcggagcgtggagcccgccaagctcgagctgagctttcgcttgccgtccaccactgcccaccactgtcgtttgctgccatcgcagacctgctgctgacttccatccctctggatccggcaagggcctggattttgacaatgtcaagatttaccgtatatccctgtttgtttggatacaccagtgacgtccacttctagaagacaaagttatattacttaaacaaccaaagagatgaataagtggtctgaagagatgaataagtggtctgaagagattaagtgcctcgcccgaggatacaatactactctatgaaggagctagaatttaaatcaccttgccttcttttaaataa

SEQ ID NO: 90584 - DNA, 2261 bp, Homo sapiens; identical to SEQ ID NO: 60398

SEQ ID NO: 90585 - DNA, 926 bp, Homo sapiens
tttaagaggcagatcttgctcttccgtggcagtccagcacctgctgcctcgccctactgcggcccactttggggccgcagggcttacccgctcctttccgtgcatcatactttgttttctgttgaatactttcctcttagatcaccaccctgagatggtagaaaacataaaaatccctgtgtacacgtggagggagaccctctgggcctgtggagcccaaatatgaatctaaggcaatgggtggattctggattaactgcgtttcacgctgggaagtgactgcggggagtttgggtcctgtgtggtggtgaccgacgattctgtcctagatcccagtggagaacaccaaagcgagcgaggaggaggaggacccgaccttctgtgaggtgtgcggcaggagcgaccgtgaggacaggcttttgctctgcgacggctgcgatgcggggtaagggacggttgggactggcacacgtgccctggctgcgtgcaaggcgggccaggcgcaggagggatgcagagcctcttcgctctgtgaagtctgagtcccagcacctggagctgtgctcaccaccctcagcagcgcggttcagtcctgcgggccttcctgttacactcatttacacttcagtctttccccaaaaaacattctgaggctgcccacagaagtgcaggtaatacatcaagacaaaaaagaaaacagccggacaggaggctgtggggctggtcagccagagggtgggacgtgtcctggtcccggcctttgtgggggaggggtggctgtgcctgcgtccatcattctggctgccttggtccctcacctttcaccctgctcctccttcaccctctggtgcatgtccagttatgctgcacctgctgctctccctggcacagctgagagcgcctgctctggccctgcgtggccctgg

SEQ ID NO: 90586 - DNA, 446 bp, Homo sapiens
tcccgggtcgagaggctgagcaccaaaatggggatgctagtcacacttacgtcctagggttcttggggatgaaatgggttcttacttgtacaactcttgaagtggtgtgcctggcatgtgacaagcatgcagcagatgtgatgctagctttcattattattggctatttgccatatccacggatgtcatcttgtcccttgtctcctttaattattgacagaagttgacacaagtgatcatctcatcctttaaaaagtgctttctctcttcccttggctactaggacactttactgtcgtcgttcttttccagtgtcattggccattttcagctccttcattagtttctctcccacttgtcttttaaatgcatgtatttctcaaggatctcttcatctaaatgtccttccctcaaattgctggcttgtgcattttcctttatagtta

SEQ ID NO: 90587 - DNA, 395 bp, Homo sapiens
attcaaggggtgtcctcctgaaggcgtctgagagggcctctggcggttccaaggctgtgcagccggggaggaaggtgaggaatatcgtgggtaagaagaggcaccaaaatcacagaatagagaggaaaattattgaggaaatgtacttgcctgtgagggtgaagctggcatttcgaggtagaaggggactagccttttttgatatctaatagtttagcattatacgtaatggactcactttagcactttcatgggaggaaaaaccaatctgagctctataaatgtggctcttggcttctcactgtgcatgcttttatgtagaaccagagtccatccttagatatttattcagcttgctggcactgaagcaacaataaaaagatgcctctaacaaa

SEQ ID NO: 90588 - DNA, 722 bp, Homo sapiens
catcaatgtatcaatgtgaaaacaatcgaatgtctatcaatgtatcaatgtgaaattatactttgatggacattaaattgtaatttcatcaatgtatcaatgtgaaaacaatcgaatgtctatcaatgtatcaatgtgaaattctctgcagccctaaaaaatagggacactcttgtgtacagttataatatctgtaagataaattattaattgaaaaaaggaatacaaaacaatgtatagagtatgccattttttgtgtaaaaagatttttagaaacatatttatgtggtcttgtatatgcataaacagctctgtcaatttagcagtaaaaaggggaaccagttgcctagcagacagtgatgggaaacattttgttgttatataccctttcatacgttaaagaaaatattttaaccatagctgggcacagtgacatgtgcccgtagtcccagctgcttgggaggctaaagcaggaggattgcttgagcccaggagtttgagtcaagccttgacaacacaatgagaccctatgttaaaaataaaaatgtatgtgaatgtaccacttattcaaaaaattaatttgcaaaatcagggcaaaggtcataaatccactactaagaattatgagctatacacaccttaaataccaaaaaaaaaaaaaggggcgcccctctttaaaggatcacagttttacttcccctgtcttggcaaattatttattt

SEQ ID NO: 90589 - DNA, 527 bp, Homo sapiens
cgggtcgacccacgcgtccgacgtggtgcaaggggatggtggccctgctgaggaagaaagggaggttgaactgcgatcccacatttgagcttgaagagatgattctagaatccaagccacttcacaaaaagaagaagcgattggcaaagaacagatccagggatggcacaaaggacagctgcccgctgaatggacacctgcagcactgtttggagactgtccgggaggaattcatcatattcaacagagagaagctcaggaggcagcagggacagggcagccagctcttggacaccgacagccgagggggaggccaggcccaaagcaagctccaggacgggtgcaacaacaacctcctcacccacacctgcacccgtggctgcagcagctgagcccacacttgttgctgctcaacaggactgcactcgtctctgccctgcccacccagagcccctctttgtgccctgatggtccctgtctcaccccttttagtttcagcagtcctcaccaccaccatatccccagtg

SEQ ID NO: 90590 - DNA, 807 bp, Homo sapiens
tggaaacccacccagaacctccaccctctgacaccatggtcaactcctgttgtggctctgtgtgctctgaccagggctgtggcctagagaactgctgccgacccagctactgccaaaccacctgctgcaggaccacctgctgccgccccagctgctgtgtgtccagctgctgcagaccccagtgctgccagaccacctgctgcaggaccacctgctgccaccccagctgctgtgtgtccagctgctgcagaccccagtgctgccagactgtgtgctgccagcccacctgctgcagaccccaatgctgccagactacctgctgtaggaccacctgctgccgccccagctgctgcaggccccagtgctgccagtctgtgtgctgccagcccacctgctgctgccccagctactgtgtgtccagctgctgcagaccccagtgctgccagaccacctgctgcagaaccacctgctgccgccccagctgctgtgtgtccaggtgctacaggccccattgtggccagtctctatgctgctagcccatctgctggcaaaccacctgctacaggaccacctgctgccaccccagctattgcatttccagctgctgccagccttcctgcagtatctctagcagcagtagctcctcctgctgtggcttcagctgctgcaggctctcctgctgcatctccagttgctgccgccccaactgctgccagaccatgtgctgccgcccaacctgctctagtgcttcttgctgctgaggctgtcatctggactcaccagattctcatcaaccagcattcttga

SEQ ID NO: 90591 - DNA, 3710 bp, Homo sapiens
gcacgagggaagaagaggatgactcagagatctcagggtacagcgtggagaatgccttcttcgatgagaaggaagacacctgtgctgccgtgggggagatctctgtgaacaccagtgtggccttccttccatacatggaaagtgtctttgaagaagtatttaaactgctggagtgccctcacctgaatgtgcggaaggcagcccatgaggctctgggtcagttttgctgtgcactgcacaaggcctgtcaaagctgcccctcggaacccaacactgctgctttgcaggctgccctggcccgagtcgtgccatcctacatgcaggcagtgaacagggagcgggaacgccaggtggtgatggccgtgctggaggccctgacaggggtgctccgcagctgtgggaccctcacactgaagccccctgggcgcctcgctgagctctgtggcgtgctcaaggctgtgctgcagaggaagacagcctgtcaggatactgacgaggaggaggaagaggaagatgatgatcaggctgaatacgacgccatgttgctggagcacgctggagaggccatccctgccctggcagccgcggctgggggagactcctttgccccattctttgccggtttcctgccattattggtgtgcaagacaaaacagggctgcacagtggcagagaagtcctttgcagtggggaccttggcagagactattcagggcctgggtgctgcctcagcccagtttgtgtctcggctgctccctgtgctgttgagcaccgcccaagaggcagaccccgaggtgcgaagcaatgccatcttcgggatgggcgtgctggcagagcatgggggccaccctgcccaggaacacttccccaagctgctggggctcctttttcccctcctggcgcgggagcgacatgatcgtgtccgtgacaacatctgtggggcacttgcccgcctgttgatggccagtcccaccaggaaaccagagccccaggtgctggctgccctactgcatgccctgccactgaaggaggacttggaggagtgggtcaccattgggcgcctcttcagcttcctgtaccagagcagccctgaccaggttatagatgtggctcccgagcttctgcgtatctgcagcctcattctggctgacaacaagatcccaccagacaccaaggccgcactgttgctgctcctgacgttcctggccaaacagcacaccgacagctttcaagcagctctgggctcactgcctgttgacaaggctcaggagctccaagctgtactgggcctctcctagactgcaggctgcagccagtccagagagaatagagcctgcccaggccttaagaccacctctcagcccagttcagttctgccttaccaaagattctgagactcatacccatttggagccagccccacttgctgccttacagggctgtccctgaggctggatctgttacaaatgagtcatgacatcatactgtaataaaagcagcttgttttctgcttgaacaatagctctgagagcaagaaggctggaaatgcacattcagaaatgaggtaagcaggacccagtgaggcacgacgtggtttactagaagtggccggtttcctggcagctttgtaaatggactctaacctcagtggaatctgggccccggctggatcaggaggcgaccatatggcttttcttgtttcacgtgaagaatctgttgcgctgagagcaccaggagcaggtagaagacccgggcagccatcctgcgggggctgagaggtgacaccaggctgctgaagtcgggctccctgttagcctgcagctccagtgccactgccctgtgcactgcttccagtgagagcagctcgagctctgggggcagcaccaaaggcatctccatgggcacctcagggagttcaggcaccacgggcaatgcaggagcttctggcgcctccacctcaggccaggcccaccgttcttctggtgggatgaggctgatgcgggacttctcctcttcagctgcctctagggagatctctaaagacaccataaggggaacactgggctccagggcctccctcgggacctcaatctcacttggaacttcaatctttctcctttcctcctcagcggctgcctcctcaggcagctctcgcctgagggcttttgggggtggctgggcacaatgggtccagagacccagtagttcagggggtagccagccagagagagttggggttctgaacaactccgcagggcctctgatggtcctctcgggcggctgcaccatgggacattcccagcagtgggctctggtttgcagttgttcctggaatttctccggggagatctgagtctccttgtcccagaacagtaaccggcgacgacggcggcggcgaggaggtggggggactgggggcctcctctctgggctgggtggggctggcagacgcagctcctccgggggggtcacctccatgagtagggccccaggttcccagcctgtcagcctcagctcctcaggacccagtgcctctcccattccttccaccctgaggggaaatgggcaagagaaatgaggagacccttcccagcactgacaccctacctggtctaggagttcttgcccttactctgcaggagctggaggtgggagccgcgggatttctaacaagatagcttcttcttcctctgcgatcagcaggtccagttctcggcggctgacctctgggagctcccgttcaccctcaatctccagcatccgtatgggctctgcctccaggatcgtgatggcctcaggtggcagcacagtgaccggaatcctctctggctccctgggctctgtaggaacttcaggagggatctcttcaactctctctgggattgcagcctctaagaggtgtcgaatctgagggatatcgaaaggactaggaagtctgggatccacagacatcatcccaaaaaagggatctggagcatcttctagggtctccatcatggccaggtggttaggaagcagcaggctgggtagctcagtctccatatctattcggatctgcagctgggcacggtggaggcgctccaagatgtgctggatgtcctccacgaggtactggcattgttgagaatagacgcggatcacaccgatctgaagttgggctgagagatagagggagaagcggggccgcggcaggccgggctgcgggggttgcactcgtaccagcacgtaattgaggatttcctcgcaggttttcaccacattcaccctcaggtattcgcgcttcaccaaccggctgccgcgagtcgccgccagccagatggtggcaaagcagccggtgtggcgctgaagcacgttgggatagtagaacattgtccctctggtctttcaccctcgattccaccagatccccgttcggatctgagtcggaattctttagggcacagaattcccaacaccaaggataactgagacgcaggagatgggcgcccctctctgtggaccctcagtggatccgcacgccacgtgatggcgtcaaacttgagacttctgggttgggttccaggttggagatgcagagctccgaggggacgtccgggccggaatccagagcaggtcccgagggagcacggtgtcctccacagcaggcctcggtcctcgagcgctgggagcgatgtcaggcccctgggccttgcactggcttgggcggccgc

SEQ ID NO: 90592 - DNA, 1078 bp, Homo sapiens
  misc_feature (1)...(1078): n = a,t,c or g
tttttttttttttcaaaaccagcaaaaataaaatttaattggggctcaaagtctgggcaagtttgtccttccttcaggaccagccgtcagcagtccctgacgaaagcacccccattatctccacagacagctggttccagaaggaccctctgaggctggtcttccagggtaggatgtgctgtgggaggggttctgtttccgaggaggagaggcgcgacacagcgtgcaaggacctgcagcaccttccacgcagcaccccctgctcctcctcctgcagcccctgccgggctctgactcctaaagtaaggcaggagcttcttcaggcccctgggntgaggaagagccacagccaccctaaaatggcttcgggggcatgcagccctccatctccagcagctctggccatccctcgtatttgttttgggtctggggctgttcttttaagaactgctcaaaggggcttttacccctgaggtctttggctcctatgaagacccagctgtcccggaagcccagttgttttgcgtaggaactccccaagtcagagaagagtttcctgctttcatcgttcattttggtccctggatcgtcgtaggaggccaccagcaccagtgcaccccccggaatttctttaaggaatttcactaggtgcataacatctccagagtacatgtcaaatgccttctgtcccagcacagctcccgtggttccattcaccagggcgatgtttaggcctctgcccacattgtttttcacaggactcatgatcatgcggtcttcaaagcacatagtagggcccacgacgttggcggccccactgcagattttaaacgcaaagtagttggctgggcagggcttgatgaggccacacttgtactttttaacctggatctccttggtgggcgaggctgacactctcatcctgtccaggtgaagggtggcttggggtcagcttccacctgggcagagggttagcctcttgctgtcctgtccatgctgagcaggaaatctggcttcagggcagtgggggaattccaccacactgactatgtctacaaangcnnnncnagggctcaaa

SEQ ID NO: 90593 - DNA, 572 bp, Homo sapiens
tgcatgtttcagatgaaggtattgtttttactcgcccctctattcctctccgtgagagccacacatgctagctgcttctagttggccatcttggccactccacccccactacatttctatgtagcttaagcctagttttcaatagggcttaatgacatgccttggagagttcctctcatcagttttgtttccactacctctgggttggtttcattttcaggtgatctttctctcctggttgcaatatagatactagaaaccataaaagcctcccaagctgaaatgctgcagacaaaatttgagagtctttggtgtggcatcccccactaaagtcttactgcctctaactggattatttgagtatccataaaactatcattatgatcaagaaaatgtgaaatattaattagattagacctggttttattctctactctaaggttaaagtatgaactagtttggaagagggattacttcaagggggaccagtagagggggcagtgtatgacaagtggcaaaaacagttgatggcatgtgattatttttccctctacctgcacgacaacacataa

SEQ ID NO: 90594 - DNA, 570 bp, Homo sapiens
aaataattacctttaaaccaccatgtaggtcaagaaatagaattttgccagtcatcttagaatccctctaattacaactgcctctctccctcaaatggaacctctatcttgacttttacagtaatcactttcttttatttatttgtaattatgtaatctaataatacatcccttatctataatttagtttttcttagttttaaaaaacacgttttttaagtctcaggtcattctatctgttaaaaaaacctggaccttttaaaaaacctggaccttttgacatttagcatttcccatggtctggattttgttaagtgcatattcatggtgtagtttaacatgttcttgtgtcctccgtatttcctgcaaattggaagttgattccagaagatttggcttccatacctttggctagactctaggtggtgctgtgttctgtcatccggaggctcttatgtcaggctgtctctttttataatgttatcagctgttgattctcaacatctagatccattaaatcactggagtctgaataatgatgatattatatatattttttcatgtattaaa

SEQ ID NO: 90595 - DNA, 426 bp, Homo sapiens
cgtcatctgcagtgacagaatgagcctggtcttgtgtggggggactactgcgtgcatctactatggggtacctggttgagggatgccttgaataactcatatgactaacgcttgatcgcctggaaagcgacatcatgggtatagaagaaaattccatgaaaagcatcattcacgtcgggaatttccattttatggggactatggatcagattatctatatgacaattgatatccttagtaatcatggagcatgattatagaggcttgactggcacattcactttgtactcatttattctcattcatcataccgcatgggcactacactgctttttgaagaattatcataaggcactggagaataaaagaaagaccatgatttagtgaatctgtgtttgatgatacttcccttgctaattatcattt

SEQ ID NO: 90596 - DNA, 1212 bp, Homo sapiens
ggcacgagctcatgaagaaattgatttaatagattgaagatattattaaatacattctgcattaatattatatgtcctctttgaatccaagtggcaatacaatagaatttcattttataaataacacctttcaagcgaacaccacagggcacagtacaaaagaatcaaaatagaacacaaatgctgtaatcaaatgcagaccccaggaaggctgattaaaaaggcatgttgctactaagaacagccgacaggttaagtatagtgggtcatagcagaaaagccagcagaacagaagggcaaactaaaataaaatggacttgcctgcctgaatcacacggacttatgacattcctttgtcttcatctctttttgaactcaggaattgcaggggagaggggggtgtgcatgtgtgttggaggagagaactaaacatagggtcattaaatttatcctcagtactcacgcatagcacaaacaaaaggaaatcataaggataaccacctgcagctggcagagatgcctacagtgtgattgtgagacaacccaacatggcttgctttgctggataccactggctttaaaaaaacacaactgtgaggtaacaagtagaccccttccataatagtgagaacagatagtgctgatggccagacataggtaaaaacggatgaatggtgagaaagatgttctgcggccctgacctcagtatagtctactctctacaggactctcctcacccaattagcttttctgctctcaccctctctcaaacacgctacttgctaatgtcaggggcttgagtatgtaaactctacctgatggtaacaaagaaagctgcggtcctgttcttaaggtaatctactctatacaggactgtccttacccaataaacttttttgctctaagcctctcacaaccacactccttgctaatgttaagagtttgcgcatttaaactctacctgaagctataccgaaaaagcacctgatcccttcttaatggaattaggcacaatgtaaggaagttttttggaatatactctctccccaatagtaacactaattttaacaatgatccccagtttcgtaatttacccccatgggtcttttaatgacggcttctctattttaacatttagcaagggaaacaataaacgcaccccgactcataaggaagaaaaaccctcaaaaattgtaatttttcttgaaaaac

SEQ ID NO: 90597 - DNA, 1287 bp, Homo sapiens
ccatgttgagaataaagactgatagatgaaagaaacataatcagcataattggatatgaattcttttgaaaattaaatttaaattgtttccatttctaattaaaattagcattttaaatatgataatggtacttaaatattgctaaatgcaggtgacaaatgtagccattaagtaacaataagtaatttaagaggtggagggagataaaatttatctttcattgtaatattatttctctcgtcctttgttacaaaattaaagtttattcttaatacaatttagaataaactttaattttgtaacaaaggacgagagaaataatattacaatgaaagataaattttatctccctccacctcttaaattacttattgttacttaatggctacatttgtcacctgcatttagcaatatttaagtaccattatcatatttaaaatgctaattttaattagaaatgtaaacaatttaaatttaattttcaaaagaattcatatccaattatgtttattatgtttctttcatctatcagtctttattctcaacatgggaattctctaacagctatccaaattaaagaagcaatagagacaatgtacagaaaataggcagagcagccaggcctcccctgcctccctcacaaaaaaaattttgaattatctgtttgagccaccataactcatcagcatagatacactattgtagaacaatcattcctgttccaaccagtgagcacacaatatctgtgataataattatagacataatgtaatatatcacatcacaaattcctgaaataaaactaattctatagattaggaacttagagatttattctgcacttagtcacataatggatgttaaaattaacgagaaactcagattgaggcaaacatgacaagcatgctttactcaaacatcatacagcacagcaacagttcaaaccttgtttcttaaaaaaagagaaggagagaaatagaaaaatgtttttatgtcctactggatttcaggaagagctgaaaacactcttattcatatagtaaagagggctttgtttgagtttgcctattacaactctggaattcctgttaatcccaagtttggggagcttgggtatacggcaaaatacacaggggcttgtttgatgataacgaagcccttggcttaacttgtaatgccctacaaaactggacatggaaattttgtattttccgggctctggggcaccgaaacataaaacacccagaaatattatacttcctcgcgctgccggcaaaaaaaccccc

SEQ ID NO: 90598 - DNA, 561 bp, Homo sapiens
cacagccccagtggccggggtccacctgcacaacatgagcctgagggaggatggatgagggctccaggaagcccaccacgcactctcctcaggaggcaggcgagctgtgttgggttcccaagctcacgactaaaccgcaggtgttcaccccacgctgctttccctcctgctgcctgagacacgggcatggctttgcccagagtggaagctgtcatagcaggggcagagccctgtccttctaccccccctttcttttctcctaacctcttctccctctggattcctgagaacccttccctctttctggttctgtgggccgtcggatccttctgttctcccctgccccccacccgcagcctgcaacgacacagttacctcagaactgaaatattcctggaaacaccggcctcgtctggttaatttcatgagccgtttttttctgcccagatgacttagttcttgtctatccaaaggcttctccccctgctgtccctgtgtagggagctgatctcccctagggatgtcccacagggctcagaatgggagagggtaagttctgag

SEQ ID NO: 90599 - DNA, 435 bp, Homo sapiens
gtgtggtggaattcctttatatgctgttgttacctgttttatctctctcactagacttcaaattccttgtggcagagaaagtatttcttgcttatcttcttatactctgtgcctagtaaaatgcttgataggtcatcaatactcaatgactaaaattttctgtaatttgcattctcattggtagtgaagtattataataatgaacgattgttatgtactgttccatttaactctattttggaatgttctcaatagtttggccgctttaagcaagtgggagaatattctcaattatatttgggtttgtactagtgctatgtgtaattaaggttcatttatttattactaagtgtttattatggacctactatatgagcaagttgttgaatggaagcgtagaagaaggaaataggccaggcgcggtggctcgcacct

SEQ ID NO: 90600 - DNA, 475 bp, Homo sapiens
  misc_feature (1)...(475): n = a,t,c or g
tttgtgtcatgtaaaagttacttgctgggacacaagggtacggagctgctctgaggtacacagcaaggcttgaggcctggctgagcacctgagggggctggtcacccaccatccacacgatgcccagtgggcagagcacagccacccaattcatctggcccttgagctgactgctggctgggccccaggcagggagggcagtcaagcaagagtggagttgagtagaaaacagcccgacaggccagtggaactgaaaacaagtcagggggctttaaggggacagtcaaggactcaggtctcattcagcaagaataatcaatttggaaagaaacgcccaaaaatcaatagagtaacagtgggcccccctgagtcatgggtctcaccccacagccaccctagaccataaccacctgattagaaacttntgaaacaagctttaatcttcttccccttctccaaactatgtaggttacga

SEQ ID NO: 90601 - DNA, 434 bp, Homo sapiens
attcttccggtcttgtttagctaattaaaatacactaggatttgtctggtttcctcatctggatgttgctagcaatggcaacatttttcgttttagaaattttgcacaccattgcatttatagagatgaattctgatatggctgctttaaaattatccaatttaaattgtccaattaaaatcattcatttaacttgaaatgtatgacttaaggaaatttttcaatttaacttgaagtgatttatttttcttagattgttcaaaatgatggcatttcagaaacattggattacctgtgatttttgttttggtaaatgtttaaaaacaataaaaaaggaaaacatttacgtgcgcattttctttatacacacacacacacgaaaaaaaaacaagtaagaaacccagaatggtccttatgcatatgagaacagaagt

SEQ ID NO: 90602 - DNA, 474 bp, Homo sapiens
tttcatgtttgggattatcagagcctgcttctctggaataaagagattactggccataagcagaatgtctaagggcctgtgagaaatgagagttcctactgtccacctcttgtcttggtgcttttgccatgacgatgttaatgttggtcatagctgggtcccaagtcttctaatcttctgtagcaggtttacgctgtgggcagcaccatgatgataatagttgtagttttgatcttttatatgtggaacaatctccttgactgtttacacacgatggactgtaatttttgtaggattagcactaatgttgaaattataatttccctttgatatccaagaaaataaggaaaaagtatcaataataataataaatatcatatgttgtcagtggtctcaatcttggatttttggaccaggggtttaagattccaaatctacttgattttaagaattttgttaattgctaaaggtgtg

SEQ ID NO: 90603 - DNA, 444 bp, Homo sapiens
  misc_feature (1)...(444): n = a,t,c or g
atatttcttgaaagatttgctttaatataatcgctgatatacagaaaagcatcagatttttctttggaagcatctgtggctgagatgaaggaatacataacaaagtaagttaacctttgttagaaaatctaaattcgttctcccatctggggaaattaactaacttggnnnnnnnnnnnnnngggggggcggctcgctattaaaacttatttatttttatatggggggcggatgctttttcatgtctcgttcctagctatttgtgttaacagcctctactccattagaatttttttttataagagacgtatcgtatttaaccctctgtataacttccttttttctttgtgttggatatagtctccttcactcatatatatgatatggctttagatccttgttaaagaatttctaattttgcccgtgactcattgacgctcattt

SEQ ID NO: 90604 - DNA, 650 bp, Homo sapiens
ttttttttttttaaactggggaactggttttcctgagaaccatgctctttgatttgggacaggaatagaaaaacaaaagaacatggccaaatgctgctcctttttcccagagatagaaagcatcttttaaatcatcctccattttttttttgtctttctacatctttttttcaaatgatgtgaagtagtaaacattttttttttctcaaaaaacaaacaaaaaaatctgtaaacaagaaggttcaaagtgagaacctccaaaacaaaatggaaaagcctattcaaagtgcagggcccgtcctgggtggcaggtgggctgcaagtcacagctgtggccacagtttttcaaactgcagagcgaaattctttagttttacaacatgaaaaaactggtgcaacactttcattaataatcctaagtcagcatcctaacttgatcttttaaactccacgataccacaataaggtaggcaacatcaaggcatagtagagagcgcacgcctcctaagaacacccttgagtaaacattgacactgggacagctgccccccatactgccgatgagacggagagaacatcattcagtgcaaagggaaaagctcatacgttatcagcccataaaaatggttttgcaaaaaaaaaaaaaattg

SEQ ID NO: 90605 - DNA, 1437 bp, Homo sapiens
agccaggctggcgtagaactcctggcctcaagcgatcctcccgcatcggccttccaaagttctgggattacaggtgtgagacgccgcgccagacctctatctcaatgttataacaaggctcaatactcagctaaagtgagcgtcaaatttttatttttatttttttcccccgtgacagggtctcgctctgtcgcccgggacggagtgtcgtggtacgggtgcgatctcggctcactgcaggcttgacctccagggaacatgggggcatgccgccaccatgcccggcgtcaaattccttttaaatcaatcatttcttcccagcgtcccccgctccctgcaactcatcttcgtttagctattaacacaaacttcagattccccacgcctgtctgcaggcagcatctccaaggaagcgccaccacggacacctggctgtccgcaccgcggtggggtcccggcgcgttggtgccaagtttcctgtaccccgccttcctacccacctctcgggaggcccggatactgagcccctcactgcactggtgaactagaacaggcctctggactcagcatctctacgctgagacctcaggatcaggtccaccgcagccccaggttctcgacccggaagctgagccttcccacgctccacacccacggctagaaccacccggggggaagccgctctcctccccccacttacgcgcctcgggcagcgcgcggtgcacacagggagctcgatctaggctatggacaaggggaagagatcttagatggaggccgcgcagaggagaatgggaagggtgcgcgagcgtctctgggaagaaggtccgaacccacgcccagcgccggagggggaaaaaaaaaaacacagaccagagaaggaaccgtaaatcaagtcggaggggaaaagagccgcaaagccttctgcggcagccgtaaagcaacctggaggcgcggtgctggcttttacgttctgagccgctcgccctgccgcttccctgcgcgccctctgcctcctacttcccgccagcttccctcggtccgcggccgtcggatctctgctgccccctgtaactactatcctgtcttctattctgacttccatggattattttttcctgtttttgaactttatatatgtaaagttcacaaatggaattgtactgtaagtggaattgtacagttcatattttaagaaaattgaccgaagtatgaaaaagaacatatagacaggttagacgagtgcacgtatcatccatgctcagcttgatgaattttccaaccaaacacatccacacagccaacatctgaatcaagacactgccagtaccgagaaggcccagctgtgttccttgcagtcactgccatcccctgccctccttcccactctgagcaaaccgcttttaacaacacagattggccgggtgtggtggctca

SEQ ID NO: 90606 - DNA, 577 bp, Homo sapiens
gaggcattatgggtcagagaagagttggcataaatttccacttgaatgagtagatgtgctgaacaggatgaattatgagatgctgaaaccagaagggtctggaggatacagggggactctgagaaggaatctgtctcattggaggaacaccagtccagacctctcttccacctcactgtcacttccaacaccttcgcaccggggatcacagtcacgctccagtcttccgtctcattgttcagcactccacacgtcggaattggcaatattcccgcctcgtcctgcagcactgccagggacacggtcacaccctcggtgtctccgaccagggacgcgctgaccgcagggccggacattcggataaaaggagggatgaaagccaggtccccccacagaagcctcaggatgccctgcagaaggaaaagcctcaaaagaagagcggccggaggctggaagcccatgccttagacctcgcgggccgggcacagcagaaccgcgccctcattagaacccaggaaggactcagacacgaaaacgcagcagccactgccccacgaaatcgtcgacccgggaattc

SEQ ID NO: 90607 - DNA, 1788 bp, Homo sapiens
cctaccccagtggtggaattcctgcaagaggcagctgggcgtgggtgccttccccgtggaaagccgctggcagggagtctacagccccttccgggactttgtgtgtgctggctgccccagggacctgcaggaggccctgctgggcttcgacgtgcagagctccagggagctgcgtaggtctcaggattacctgtcctgcgagaggacccaccctgaggacagtgtgggcagtatggaagacatcctggaggagctgctgcagcaccgggagcccaaggccctgcagctgtacctcaggaaggctctgagcaactcactgcaccccctgggaaagctgctccggacactgatgctgaccttccaggctacctacgcaggtgtcggggccaacaagcacctgcaggagctggcccaggaggaggtgaagcagcatgcccaggaactctgggctgcctacaggggtctgctgcgagttgccttaaagcgcaagggccaggccctggaggaggatgaagacacagagacaagggacctccaggtgcatggattggtgctgcccctcatgctgcccagcttctactcagagctcttcacgctctacctgctgcttcatgagcgggaggacagcttctacagccagggcattgccaacttgagcctctttcctgatacccaactgctcgagttcctggatgtgcagaagcacttgtggcccctcaaggacctcacgctgacgagcaatcagaggtactccctggtcagggacaagtgtttcctgtcagccaccgagtgcctgcagaagatcatgaccacggtggacccacgggagaagctggaggtgctggagaggacatacggggaaattgagggcacggtgtcgagggtattgggccgggagtacaagctgcccatggacgacctgctgccacttctcatctacgtggtgtcgcgcgcccgaattcagcacctgggagccgagatccacctgatccgtgacatgatggaccccaaccacacaggaggcctgtatgacttcctgctcacagccctggagtcctgttacgagcacatccagaaagaagacatgaggctgcaccgcttacctggccactggcactccagggagctctggtagcctggcctttcctggacagactgaagagctgagcagggcactgccagcctgtccctcattacccaaggcaaggggcaggacaggccctcagaagcagctcttggaggagatgagcattttgttttgcacaggaagatgctgctgctgccctgactgggatgagggtgaggggtgacgggtgtggccctggatgtggtggttttcccttggccactagcccatcttcaatgaccccttaatctgcagcagctcacaggctgggggtgaggagtccctggcttctcttagcctgagcctttctcccaagttccagagcctctccgggcctcagtgctgccatctgtacaatggtggagtgagtacgctgtaaaggaccttccattcattttgctgaattccagagtccttttggaaaactgactttagtctgctgggctgtattgacctctggcaggctcgaagcctcactgggtatgcagtcaacaggatgggcctggagatccgtgaactgcaggccacgtacccatgacgtaaacggcggcactggagcaagctggggcggggggtgggtaaaccctcactgccagcaggccccaagtggcttgtaaatcattctcctgtgatgtctgtgggcctgcgtggggacaacaggg

SEQ ID NO: 90608 - DNA, 2511 bp, Homo sapiens
gaaccaaaacaaaacttgactcaaagccaaggatgttccattcagtgtaaaaaagatgtggactttcttgtccaccttacaagacaatgacatctgtaatgtgacctgtacttgctaggctttagcaagtcactcgaggtcatggaacatgtttttgaagaaataatatcagttcatgaattctgtacctgtttcttgtcgctgaaggggtaagtgacatcagcagcatgttcattccttttcttgtcttctacctgttctccacaaaagtataaaaagccagaattgctttttgggttttgagatggcattgtcttccatttgcaaaaaacagtttataagacaaataataaagaaattgaaatgtttctgatggtttcaaaaatgtaaacataagccagagtagttatgtctcaacatcatctcttgccagccggcagctccttttcttccttgatcttctaaatgtacaggggaagacagctggcagcctgtcatgtttcaaaccttcattaaagttctggattttggcctcttcgttttcccctagatgtcattaaagctgtcagcaccattgctgtgcatgagaaagaggagagtctctggcctagggtggccgtcttctccacattggcacccggagtcctccatggggcgaggctccgcagtctgcaggtcgttgatctggagtcccggaagaccacgtacacctcaggtaccgtggtactttgtcccttgcttgctgctccagccggcatcaccccccagcccaactcagccactataaaaactgagttcaactctctgtgccaggtgttggggatacacagtgaataagaggtaagccctggcctctaagggctcctatgctggggcaggattaggcagtcccagggaccagcacccaaccagctgagcagacaatggtgagatgagtgggaagggagatgtgatttattctgcctgggactggtgggaagggacctgtgaccagccagccctgccaaattgccagacccatctgcctccagccgcttgtctcctttgctgtcggtcttccagatgtcagtgacagtgaggagctgagtagcctgcaggtcctagatgcagacacctttgccttctgctgtgcttcgggccggctggggcttgttgacacccggcagaagtgggcaccgttggagaatcgcagccctggccctgggtctggtggagagagatggtgtgctgaagttgggagctggggccagggccctgggcccagcattgccagccttggctcagatgggcgtctttgtcttcttgacccccgggatctctgccatcctgtgagctcagtccagtgcccagtatccgtacctagccctgacccagagctgctgcgagtgacttgggccccaggcctgaagaattgcttggccatctcaggttttgatggtacagtccaggtctatgatgccacatcttgggatggaacacggagccaagatggaacacggagccaagtagaacctctcttcactcacagaggtcacatcttcctagatggaaatgggatggaccctgctcctttggtcaccacccacacctggcatccctgcagaccaaggactttgttatcagcaacaaatgatgcctctctgcatgtgtgggactgggtggacctttgtgccccccgctgacaccagcatctttccatctaggcctctagaaaggggaggagctgctgtagtagcaagggtgctgatgtaggactcaagtgactaccagtccctgttaccagctgtgtggccttgggcaagtctgccagcgtcacttagcctcagtttccttatctgtaaaatgaggatagtaagaactacctcgtagtgatattgcgaaggttagaagaaacgcatggcataattacttggtagctattgttagatctgggagtgtgaaatggtagcgttttgtccctgtcttcacactatcatagggagaatcaaaagagctaacaaatataaacatgctttgtgaatttttttaaagaaaaaaatgtagaggggccaataaacatgaaaaaatcccagccctagtagcaattaaggaaatagcaaaacaggatttctgctcctcttgagtgggtctcatgggaacacaggtgcactttcccacactttgtccccccaggtgactaggttcaagagacatttgcttttggtggccccacaaacatttccttttgagggcccatagtgaatattaaagtgtgctggacatggtggctcatgcctgtaatcccagcattttgggaggctgagatgggaggatcgcttgaggctaggagttcaagaccatcctggtcaacattgtgaaaccccatctctattaaaaatagaaagaaaattattttaaaataaaattagggactcattgtcaagcctctcttttctgtattctcaggttttgatggtacagtcaaggtctatgatgccacatcttgggatggaacacggagccaagacgaaa

SEQ ID NO: 90609 - DNA, 935 bp, Homo sapiens
gggtgcgtctctgaaccgcccacatttcaagtacttggtagctgcttgtggctagggcttccatgcaggaccgtgtgagtgtaaagatttaagagcacgagatttgtagcatggtggacctgtttaatgcagtttcttgactgctgtttatgggcattgtggccttgggtgggtgacttccccctccgagcttatgtgcacctcatagagttgtcgtcaggattgaacgggatgagtgcaaggaagggctcagcatggaacccagtgcatagtgaggggaaatgcgggtgattgtttacattgaagtaatgagccagaggctggcttggtgccagggcctgccccctgccccctgccccctgggctgactgtctaggcggggttgataacaaactgcccgaacaagggcagcgaggcatcagaagtgtcaaaagggatcatctagcacagggactgggtagcaggagcaccaaggaggagggagaggtagtcaggagaggctgcatggcagaggcgcccccaccccaagctcatctctgctctcttggcctccagagctttctgtggcagcaccagcaccccatggctcccgtgagctcaccctttgtgctgtgtaattagcgcggtgtgcctggctcttgtctctaattgtgttgtacagcgtgtactttattatatcaggatataataccgctagcctggcagttatcttgttcactaattgtttcacgtgtctgtctcgtctgccccgctagatcacctgcttctcctaagcagcaggcaccatcttttgtgtcttttgtctcccccagtagggcctagcactgccagggcatggctgggtggcaaggaagcttggcttcagggccctggggttcgagtccttgccttggaacgggaccggactttgggctggaaactggaaaaacaaagtc

SEQ ID NO: 90610 - DNA, 405 bp, Homo sapiens
tagggcattttgaacattaacttcagcccaaaaaccacacctgcactttcttttcctctcttcagggtgccaccctgaccttccttaataagaataagaatagctaacattattgcacacttactgtgggtcaggcactgtgctaggtgcattatttgttccttttctctcctttagtctccacaactctatgggataagtgcaattattatctctactttccagttgagaaaattgaggcttgagggaataactggcccagtgtcacagagttaactggtgaagctagggttctcactcaggcaccctagcactagatcctgtgctcctaagcaccaagccatggtgccctgttgagcatgtaacatttaaaaggccttgactaagaggtatgagaaatgtgtt

SEQ ID NO: 90611 - DNA, 624 bp, Homo sapiens
gctatccagtttgggaagatttcataaacaaagcaggaaagctgcagtcccagcttcggacaacagtagtagcagcagctgccttcttggacgcctttcagaaagtggctgacatggccaccaacacacgtggtaagcagatggaggctgactcccagtgttaactgcattctgcacgtggactcttccccttgggtggctgcacaagaagatgcagcttaagttatagagctgagctgactcgtattttcccattttttaaaactctgtgggattccacatattagaagttgcaactagttttctggataataaagcacatgtgaagaagaatgaaaaaggaagaaaatgaaccactgtttctgcacgagttggcttgatgggttctttgatcactttaatgacgtgctggttgttgaaccttgagctgtgcctttggttgcaatttgcgttttcctccttacgtgggttttccttgtttccttgtggaatgggaagcagtagggatgattggatagaccatttttctgagtttccataaaatgaagaacccttttaaaataaggatctcattgggttgtatctatttatgcgtccctcatatttgactgcaaacctgttgaa

SEQ ID NO: 90612 - DNA, 1310 bp, Homo sapiens
ttttttttttttaaagaacattgatggggattcactgtaaaggttgcagaggctgccaaagacgaaacaactgactttaaaaatgctggaacaatgtgataaaaaataaatttgtaacaaatcttctcctttttagcccttgtcattttagccctttagtttcaactctgcattatatttagtttatatagtgtaaacttttgtttgccattaattcatctttttaggtagaagacattaaaatcacaggtttatgaagaatctctgctcattggaatgaaatgcagtcatttgaaatgagaaaggccaggatccttttttgtaccttaccctgtcttcaagagtaaaggtgaacacttacagctctcctccttgatgtcaattttgtatgttgatcattccaaactgagaagaataaagccacattttagacatatttatagaatcaattaaagctatatgtctaaaattcgtagggcaacttctgagaagaaacaccgtctttttccttttttaatggaaagtggacaatgtgacattagtcatgttgtgtgcggtgacgcagagtaactgaggtaatctgactgttgcactatgtgacatatttcaggacgtacttgctgcatttgcagcagccctctctctctgtcccttcccacaattctgctgttgctgcaacttgagttaattgtgacaaatgcatctttgtgttatattttgtttgcttcataatttccagaactatatataaatatattttttaaatagcaaatattgtagttagtgagtgatgatcactccaaccttatccttaccatattggtttcagggataggattaagagtgtctttggaagagaaaaatacacacaaccctgtggtttagaatgacgctgaggccttaggctgtgggcctagaacaactatgtgagtgaattcacccatctcatactttgaatcaagcatgcattcctgtttctcattgtgaaggtatccccagttgttttccttcagtgttgagtttttgtccttttaaattttattatattttgctctccctaacatttgactgttttttataaaagaaaagaaaaaaaaaagaaataaataataccctcgatgccactggatactcacaagcagggttatgctccttcatcttgggcttgtttgcctaaatgaaagggtttaatttattttgtacctcatatgcgtgggatagtccagggtgcagagccaggacttgctatataattaaacctgctatacttaaatgtatacgcctaggctcaatcacactatggaaagaaa

SEQ ID NO: 90613 - DNA, 431 bp, Homo sapiens
atgaagggtttcaagctctgaatggagataaagcctgtccctgccttctccatcaccaaacatccattctttcttaggcagatcaggtaaaaatatgtttgtccacgaagcaccatgaacacaacgcagtcatcaccactgcccttccttgagggaacagcttccctatgacacctaagaggactggcatccatgacgtcaagctgcaacttctcacctgaggcatagatagagaggctgtcacaaagtagcaaggatgcaaaacatgacaattgtctcatgacaattcaaaacaaagctaaagaacatcctatgatcttcagcaattctttgttaaacaaacaccttactcttctaatgtcagagatcctatctatcttaaacaaaagccttgtgattctaacatcagaaatcttatctataggaacaag

SEQ ID NO: 90614 - DNA, 405 bp, Homo sapiens
cctttagaaaaggttatctatataacatttatatatatatatactttaatatcaatttcaagactattcacttatgaaccattactaatgtgagtgttctagatgggaaagaaaactaacattaaactcttggcagtttcaagttatgaaaactcatagaggaaagtgttctgtctacaaagacaaataggtatatgttgggatgtatctctgactccaagctagattcatcaggaattaacactcaggaacaacatatagatcacaaatatgtttgcaatttacacccatgtattaaggggttcagcttgttggttcagctttgtcaattggtcacatagcttgacagaaagcatgggaatttgccttacttctacttaaattttggcgtctgatttttaactt

SEQ ID NO: 90615 - DNA, 3387 bp, Homo sapiens
  misc_feature (1)...(3387): n = a,t,c or g
attacgcgaacaaatcctttccgcaagagctgagggacctgggtgcaacgcattctggaaattgtagtctctgggcgctcccggctgaacacctccctgcggtctgtgcgagaaagagccagaagcccccaggggagggcgaagaggagggcggtggagtacgctctgcgcgcggtgcgccatggaacgggtagttcgcggtgcgcgccccatcgcgctcccagatggggaaccggactactctacccgagaggccgcgcgagcggggcgagggcaagccggccggggcctcgaacaaatcaaatcgaagcaaagaaactgccggctttcaaaatcctcctcctccgccatcatccgccgcggtgcggagagcaggtggtgctggaagcgcgtgaggccgggagctcgagagagctaacagactagccggctggacatctggaccgctggatccggaggtggcgaccccggcctgacccggaccctaaatccgtccccgccccagagggcggaggcgcgcgctcgattcccccaacgcggcggcgccgcctgtttacgtctgcagatctccaggggagcccaccagcctagtcaacatggcctcggaagacattgccaagctggcagagacacttgccaagactcaggtggccgggggacagctgagtttcaaaggcaagagcctcaaactcaacactgcagaagatgctaaagatgtgattaaagagattgaagactttgacagcttggaggctctgcgtctggaaggcaacacagtgggcgtggaagcagccagggtcatcgccaaggccttatagaagaagtcggagttgaagcgctgccactggagtgacatgttcacgggaaggctgcggaccgagatcccaccagccctgatctcactaggggaaggactcatcacagctggggctcagctggtggagctggacttaagcgacaacgcattcgggcccgacggtgtgcaaggcttcgaggccctgctcaagagctcagcctgcttcaccctgcaggaactcaagctcaacaactgtggcatgggcattggcggcggcaagatcctggctgcagctctgaccgaatgtcaccggaaatccagtgcccaaggcaagcctctggccctgaaggtctttgtggctggcagaaaccgtctggagaatgatggcgccactgccttggcagaagcttttagggtcatcgggaccctggaggaggtccacatgccacagaatgggatcaaccaccctggcatcactgccctggcccaggctttcgctgtcaaccccctgctgcgggtcatcaacctgaatgacaacaccttcactgagaagggcgccgtggccatggccgagaccttgaagaccttgcggcaggtggaggtgattaattttggggactgcctggtgcgctccaagggtgcagttgccattgcagatgccatccgcggcggcctgcccaagctaaaggagctgaacttgtcattctgtgaaatcaagagggatgctgccctggctgttgctgaggccatggcagacaaagctgagctggagaagctggacctgaatggcaacaccctgggagaagaaggctgtgaacagcttcaggaggtgctggagggcttcaacatggccaaggtgctggcgtccctcagtgatgacgaggacgaggaggaggaggaggaaggagaagaggaagaagaggaagcagaagaagaggaggaggaagatgaggaagaggaggaagaagaggaggaggaggaggaagaagagcctcagcagcgagggcagggagagaagtcagccacgccctcacggaagattctggaccctaacactggggagccagctcccgtgctgtcctccccacctcctgcagacgtctccaccttcctggcttttccctctccagagaagctgctgcgcctagggcccaagagctccgtgctgatagcccagcagactgacacgtctgaccccgagaaggtggtctctgccttcctaaaggtgtcatctgtgttcaaggacgaagctactgtgaggatggcagtgcaggatgcagtagatgccctgatgcagaaggctttcaactcctcgtccttcaactccaacaccttcctcaccaggctcctcgtgcacatgggtctgctcaagagtgaagacaaggtcaaggccattgccaacctgtacggccccctgatggcgctgaaccacatggtgcagcaggactatttccccaaggcccttgcacccctgctgctggcgttcgtgaccaagcccaacagcgccctggaatcctgctccttcgcccgccacagtctgctgcagacgctgtacaaggtctagactcaaagcctctcccatcccttggcctggaccagtgagctggggagggactcggatgaactgaggcgcagcctacgccattgccttggacaggactctggccacaggcagggcgggtctgtgtcccatgtgtcctgtcagtcccctgagtatgtgtgtgggtgtggcgcatgtgcaggtctgtgcctcctgtcgggatttgggttttaacgtcttctgctggcccagccctgctctgttgtggggagttggcccccaggggaaagggctgtgagctgctccgccattaaactcacctccacctgagggcgctctgctgatctccgcctgggccctgatggccgtccccacccacctgccttccggcccggctccctggcggagccagaacccaaggagttgcccgcgtgctgtccttcccctctgtgttgtgattgggttgtttcctgccctgcctggggctgcttctcgtcaccaagccctggtcctgcggcagctgtcacccctaccatccataccactgtgctgaccgctcagcctgaagagcagagaatgccatgggtgggactgtgggggtcggatcgtggggttgttggcagagggcaaccctgggccccacaccgtgtggacaggcagacaccagattgtccaggagcaggagctgctgggactgcgctggccccggacctagtgggccttctcctggctgctgagatgtcgtctgtgactggcctggctggagggggagtgttgacaacccaaagctgttctccagtctggggagggagaggcagggtccccaatgtccgagctgcatctggacgctgctcttaaaggacctcctggggcaggggagcggtagggtctggactgggcagatgctgtatgacctccctgagcacccgtgactgccccatgctttcccctttgtgctctgtgtgtgtctgggctgtgcccgggggcttcacaaataaagtcgtgtggcagcttcagagactcaaaagggggggggggggggggggngaaa

SEQ ID NO: 90616 - DNA, 436 bp, Homo sapiens
  misc_feature (1)...(436): n = a,t,c or g
cgctccgnnnccccgggtcgacccacgcgtccgtaagaaggctctaggtagttttaatgacacttactttttttaccagttttcagggtagcaaataaatggtagccagggactttccagtctaaggaaaatcaagaacaaatcattattttcttacaaatcattattttctttttcttttcatgtttagaggtattttcattttttattctaccaaaacactgattaaagaatataaaggcttaaaagcatgtatcatatataagagtttgtagttagggaccttcaatctgctttgatgtgtattttttttccagctgtagttttaaaagttaaaggggccccaacattattaacctatttaattcactgctatttgaaatacgtgataggaaccgaatatttattctataagtatgtctgacaaaatttattt

SEQ ID NO: 90617 - DNA, 784 bp, Homo sapiens
accattttcattttttaaagatacttactctgtaggggaatattctcccaaagtaaaaacatgtctgaaaaaatatatgcaagatgggggctgtgccccatttccacaaatagggggcagggggatatggctggatttttttacttctcagtgccacttactttgcctctgtggagactgacattttagctatcttagataaggctcatagacaaaagtttttcaaagtattactttgaaaggaatcagaaacaaaatccacccagtcatcactggtccgggtggccacctagattctgaagccaaagggctattgtgggtgcacagcgactgagtatctaaatgcaaacttcttgaacactaaatctttgctaaaattgctgggaggtgaatgtgaggcaagcttttaagtgataccagtacaaatttttcatcaatggcattttcaccatcagattgtttcgccctccaatcgcctagctctgctcatccaaatgagctatttcatttttcaattttagcgtttctcaggcttactagcctagagatcacatctgcttctgctaagcatcccccagaaacggtcctggggagctctggcttaggtgaataaccactgctgtatttaattttaaattctttgtatttttgcttttgttctttaaaaaaatacatgtaattattgttggatatatacttttccagtcaaaagttacccagcattgtgtcttgagctttacttagaagggtccagttgccctgaaggaactctcttagattagag

SEQ ID NO: 90618 - DNA, 607 bp, Homo sapiens
  misc_feature (1)...(607): n = a,t,c or g
ttttgtgaattagagatgtctctcatttttatttctttaaaagctaaatcataccatgtattatatcctgacagcaaaattatttacttttttcagataagtgtttttatctaccttttattgtgttatattgaatctagtttttcaatcacaacaaaacacttctgtgtattcctgatgacagaatttaaaacagttatctcctggagccttaacagtgactatgtattttttttcttttgttttaatctaaataatactctgattctcaactaattacctctaatcaaaaccttgattttccttttgctaaaatcatattgctttctcttaaaaatatggggtaagcatgtaacatcctatctttttcaatggaaatgaggtatatcagcacgtggtttcctagagtataaagtcccaccagctgtgccacaaaatcactttactagactcctagcacagtggcttctaaaaattcgcagtttaactgtacttgcctaaaacaattatgtatgcatttcttgggtagatgctatttaaggacagtgtctttgggaggataagggggggggacaccccggntttggttttcttttttaattaggga

SEQ ID NO: 90619 - DNA, 467 bp, Homo sapiens
ggggcttgccccgtgccctttatatgccagggaaacagacacataaccagatgatgtgagtgcaatgggggttttgacaggcactggcagaggggagccgggtgcctgggagcactcacagaggagctcgtctagctcctggcgactcctcccttccctctttagcaggggagctctttttggccttctgctaaagggccaagcctgaccatggagtgatggagcaggtcccctcccgtccctgcctcaccctgatgggaggggctgatctgtgaacagtcctcaagtgctgctttagtaaggctcaggggagcgagagcaagtgattctcctttaccccagctctgtggggtctccccacaccgacccacatgggggtcagctcttctgccatgagtggaagcagcctgagtcctcaccagaagcagatgcgggttccatgctttttgtgcagcctgcagaaacat

SEQ ID NO: 90620 - DNA, 723 bp, Homo sapiens
  misc_feature (1)...(723): n = a,t,c or g
tcgtgctatgaccggactttttcttgaaaggtaaatgcatttaccacatgcttttaatctagattaaataatcactcaccaaaagaaagtgtcgtctaattgttagtggtttctatcacttgttttctttgatgcaggaagggttgtatttgaatggttctattaagttgatggattttacgctatcagtaagattctccagtgctggatgaaacgtgaaaaagtatatatagcaccgcttctattttaatttatgcttctgccaactgtttgggttgtgctgaaagggaaatatatttcctgcttttcttggcctggatttgtgagtagctatttccctgtggtattgtacgatgattttgtccatttatgtgaaagttagggtggggtggcctaatgttttcacagcggctatggtaacatttttgtaaattcagaactgctactgtgaatttcaggattttacagaaacctatgatcctatcttcttccacctctccagtggcaaagcctagtgtaagctcatactctgtttagcaccagcatatatttcaatattttaaaaatattatgtcaatattttatgatgngctgcaaagagcaccactgacttacaagttagaaaaggagcaaaaagtgtgagaaaaattaccactgccgattctgctgcggactgtgggcctcctattctcatggctcagattcctcaacacattttcccgg

SEQ ID NO: 90621 - DNA, 1361 bp, Homo sapiens
ttttttttttttaagggtttatctttattttataaaaactgctacacacacacatacactctctctctcccctcttgctttcctcatttgacctagagaagtttggagtttgttcccacacattcttttcaaggaaataccattcagccatggtatgtttttaccacaatttattcatccattcccttactgatggtcttttttttgtttgtttttttggtccttaccaaaaaatacaatatacattagtaaacatataatcttaagtgctggcgctttttattccttagggatagattcccaggagattcctaggttgtaagagtatattaatgttaaaacagactcacaatgttgtccaaggaggctgttacaatttacatttctaaaagcagctatgaaaataacgttttcccctcctttgtgagtaagtaagatgacaacttagacaaaagcttattgggctatggatgttctggataaatttgttcagaaagtcactcaatatatagtgtgacagcacatcaatgatatccaaaaatatttttttaaaagccagttttttggttgccatttataatttccaatacatgatttgtgattgatagggaaaggctgaacttaagaatttgaaatcaagtctataaaagcaaatctttgagttacacaacaattcttgttaatatctggagagaccactgaaaaatctgatttttataaaagtgtaaacatgtaaaggaaaagtaataacttataactcatgttccaaagggaaatgttttaggttggcaacagcaaaactcaaggaagtagaaatgcctcctttaaacaacaaaatagtgtaaaaatttacttctaaagggggttatgcacgtgaaaaatttaaaaagcaatgaaacagttgacagttatttaaaataatttttcctccaaagtctctgaaatgtaacatttgtgaactacagaagcatcctaccatttttgctagacaattcatgaaatattaagggaaacaaggaaagacaaaaacaggtggtttctgtctgtgttacacaatattttggtaacagacatgcatttgtatgcaaatatcccacgggaaaataagagcatgacgaatggggatattgtctttacacggcaaactcttattctgtggtgcatactgagtagtacagctcatgtctgcctccttcacgttatagatcggttatttcacctttgcatatttgtgtaaatagtgcttctagaaaatcttcagcacaccacaagccctctagaaaattttcagcaaaccagaagcagggaaaacttcaacactgtcttctgtttcccgtacgcgtgggtcgaccaacgaaaac

SEQ ID NO: 90622 - DNA, 517 bp, Homo sapiens
tcgacccacgcgtccgatggaattacactggatcctgtgacagacacttcatgcttcatgggtcacatggtctgtttctgctcctctctgccctggttggtgtgggttttggtgttagaactctccggtgggagatctgggactgggatattgtgttggaggacagatttgcttccataccttttaagtgtatatcttttcctctttttcccagggcactctggacttcacccaacaggtaataccttttaatcctcttttagaaacagattcagttttcctagaatgatggcagaggtgataaggcatgagacagaaatagcaggaaagactttggatccaaattcctgatcaggcaatttataccaaaactcctcctctccacttaggcctgtgctctgcaggagtattggttcagggagacttaggaacttgtttttcttcttcctgcagggctctcatctgagtccttgaaagagaggaaaagaagctgttagtggaaccaggtctgaaaact

SEQ ID NO: 90623 - DNA, 405 bp, Homo sapiens
acccacgcgtccggcaccatcaaaagagccaaccagctagcctgggtaatccagaacagaaacagggtacagcttttagacaaattttcttaagtagaatgagagaaatgataaaagaaagtttcctttcatatttttaagagggaaaatattgaaactgttgtagcaaatgccatttaacaagatttctaggcactgcttatttcaagccatattcaagactacagaatttatgcataaggaagtaattaacttggagtttatttttataggattttggatctggggtaaaggtcagttttcatgtttgtaaccacttaataaaatgaattgtgcttatgtatttataggcacatgtttaggtaaaaggaaattttagatccattctaaatagagttaaatcct

SEQ ID NO: 90624 - DNA, 413 bp, Homo sapiens
ctagtggactaaatgggacacaaggaagcgtgatgttctcacagtgcagggcaggcccagcactgtggcagcggaatacctgaaatggaagtgcagcaggactgtgatcagcgaggccacgatggagatgctgcagcccacgagggagatgtacgtaagaggtgccagcaactctgcagggaccagggctggggagagttgctgcaggagggaagaggggctggaggccacaagcatagtatcgcccttcctcccagcctcagtcagagggacctcctgaggcctcctctccaagtccccttccccacaagcctagccatggacctggcttgaacaaggccatggcagatacagtcagttttgccccctccacatctcccatctccctcttcttctatgagtgcctcccttcg

SEQ ID NO: 90625 - DNA, 456 bp, Homo sapiens
ttgaagtgctagccacaggggaatggtcttatttgaaacgaccataatttcagctgtaacgttttgttctgtactgctgtcagcatacttggaattagaaaatccacacctgccatttgaagttcatgtttctttttctccccttgcccttgtgtaccgtgtatggaatgatctatctttaaacgtgattgggaccaaatcaagtcactgggcatggacattcttctggcatactacccctgaagagggatggggagaacttatagaggcagacacactgacagcagaaaaagtgacagatgatagggaggaaggagacagaaaacccaaaagccaatgtcgtgtattacagtacaacgtaagcatggaacctcatgatgacagtgaattatcagaaaagaacaaattatattgtttttaaaaagggcacgaaatcgtcgacccgggacgtccgga

SEQ ID NO: 90626 - DNA, 423 bp, Homo sapiens
  misc_feature (1)...(423): n = a,t,c or g
tttcgtggtgcctgccggtgctgccgtgggccacaccaggcatttggtcatacaaagtctacatcttttaagcttgaagctctgctgccacccgcagatacctgcatatcacagagtaaacaggactttttctcagagagctggagaccaaggagggtgtgaaacacacaaagccacaattacagaggcaggtgctttcccaattgtagagtggcctcgaggtggcctgggtggtgtatggtttggacactcttaatgcctctcttggagcactgcactttacaaagcatttgcacggaagcatcgcacttcatgtccctgacagcgctgtcaagcagacaggtgccccgtccccgcgcaatcaacgaggaaactgactacgacatccccagtgaaacagaaacagaggcagagcctgcactn

SEQ ID NO: 90627 - DNA, 440 bp, Homo sapiens
gcattcccgggtcgacgatttcgtgctggcacccggttgcgctcggcgaagagggctgggggcgggagatgacggtggtcttctccctgcttggcaccctgcgagcaccagctcccttctcctcgccactccaaggttgcagacgaagcaggtgagaggggcccctggagcgcggacctgctgggtcctggttctcccttgcgggcacggggtacccctgcctctgcccctcaggcctgggcacgtgggcagccgccgaccctctgcgccctggccccgcggcacgttgtctggacctgctgtctctgccccgcagcgcctgcctgtggaacgtgtgagatcacccgggaaggctcgcgcgggggagggggtgtctcgtcccctccggagacagaactgccatccctagtttgggaagctcctcactgcacgggcgtccc

SEQ ID NO: 90628 - DNA, 428 bp, Homo sapiens
tttcgtggtctccgcacgccgcggtggcttcagcccaaacctgggcagccagcggagaaagagttaactggcaagggcgaagaggagcccagggaggaaagaaggatattgccgtaattctgaaagtttttttccttcctctcttcccttcgcagaggtgagtgccgggctcggcgctctgctcctggagctcccgcgggactgcctggggacagggactgctgtggcgctcggccctccactgcggacctctcctgagtgggtgcgccgagtcatggagggcgcagagctggccgggaagatcctttccacctggctgacgctggttctcggcttcatccttttaccttcggtcttcggagtgtctctgggcatctccgagatctacatgaagatcctagtgaaaactttagagtgggccacaatac

SEQ ID NO: 90629 - DNA, 471 bp, Homo sapiens
gaattccggtcgacatttcgggcgcgagattttccacataaggtggctgtcgtttttctcctggcgtctgtggaggcgagtggtctgcgggcagcagctcccagaggcagccttggaattccagctcggactgggcgggaaggcgcaggcggcccaggtcgccgacacgctcacgcaccctccctgcctggccgcgcctctgcgaccaggtaaagagggcgctcgggccgccggcttctcagcctccgcgaccccctaagaactggtcttttcttcgggggtctgcagggctgaggatgcgggggaagggtgggaaggacaagggcgtggtatcatcgtcctgatttttctcccgccctggggccgcctcaaactcctttttggccactcctgctgaaggtgcgggttgagggctctgggcttctcggtagtacgcgtttcccagtttccccctagccagtccctcatgtc

SEQ ID NO: 90630 - DNA, 1262 bp, Homo sapiens
tcccgggtcgaccattccaaaaaaatcggtaagataaaaaccatagctgtaatgtattttaaacaattcctaatggatcttaaggcattaatagcaatgtttgttgtcaggctcagtaataaggtttggtggattttttgtttgttttgtttttactaagtgtatatgaacagtttaatctagaattcgtaaaaacactttgacctttgagttggtaatgcatgtaacagacttgggattcagattttttttaataataaaagagaatagaaaaaatatttcatgacaccagtctctgacaaatctggtgactaatttccatttagtatgttaaatgggtagcattttagagaatgaattctttgaagatataaatgttgttaactgaattgtgtaataaatgttgggatgtatgttattcaggtttttaaaggatttttgaaatgacacccaagaactacagtgcacaacagacagtagctaacatttattgcacatttaatatcacaaactctgttcctaagggctttacatattttatcagttacttttttcagaaccctttataggtgcacttatgtctactttacagataaggaatctgagatgtaaaatatcatgtctgagaacacacagctagtaattggtagagctaagatttgaacctaggcagttcaactccaaagcccgcacttaaagcactatgttcaggataaattattaagaatcatagaaactatatgctatcataaagattgagatgtatgtctgaggtatttttctttatgtagacatcaacagataatctcaatatttggtgtatgttatggcttgttggtgttgttgctgagggggtagagacagggtctgcttatgttgcctgggacgactggtcttgaactcctgggctcaaagcagtcctcccaccttggcctcccaaattgctaggattacaggcgtgatactatggcttttaacacagtatgagtaaccaaagaataaaggactgacatatagtcatttcgatttatttaatagtttcacatttattacttctcgtttgctgttttgtgagactcttggtttttgagggtttttcctaatggtttattttcagtgacagtcttttgccagattcgattcttctaattatttcttttggaaaggagaccatctggagtatgtttttccaagatgacttctaggaacttagtccttttttgacaggtttttctgaaacttgttttactggagaaatgacg

SEQ ID NO: 90631 - DNA, 659 bp, Homo sapiens
ttttttttttttgaaaagggttttgcttttttctcagggtggggggggggggggggatcctaagttaatgaaaccctcgtttcctgggttaaaagaaattttcttccttaaccctggaagggggtgggaataacggggttcccccccaagcccaggaaattttttttttttttaagaagagggggggttccacaatgtggcaaagaaggccctcaatctttcaccctaagaatggcccgcccgggccccccaaaggggtggaaataaaagccttgaaacccgggcccggccccaaagaggggattttaaaaaaaaattttaatttccgggggggcgcggggaaattatactggccttaaatttaaaacgcctttaaagggggtccccaaggggggttttaaaaaaaagggaaattttttttagagccaccgggggttcaattttttaaccccccaaattttttcaaccttccttttgcattttgcccgaaaaaccggcccttttcccttttcctttggggcaaaaaacaaaaaaccaaaaggccgcccctggaaaaaaaaatggtttaaaaaccaaaaaaaggggggggggggtttttgtgcccaaaggggcctttttttaggggggggagggggggcccaatataaaaccccgaaatt

SEQ ID NO: 90632 - DNA, 777 bp, Homo sapiens
tttcgtggaaaaccaaaactgagggtaaatttaaatgtttagccaaatttattgtcatggtggctacgagaagaggcattgataacaagtttcaacagccaaatccttttttacagagatttcagatgagcgtgttttcagtgatgaggaaatttcacgtttttagtacagtgaattatgtacttttttttcctgtaatcattcactgattccaagttcacgggcagcctgtgactaggtcctcagcgtgacagcatcaccctctttcttcccttttccatggtactgttttgtgaccctttaaactcaaagggaagccttatctgtggctgcttcagggcagtccttcctcgttgagtggccagtgccctgggtaaccaggtggctgaagtgattggtcagttatgtggactgctttttgtgcagtgtgtgagttatgactcatcgggaatgggagatgctggggttccaacccttcacgtcaccaaaggggaagtaatagtgtggagttctgaggagggtttgataagttgaataaggaaaggctaagataatttacaggttaccaactcatgtggggaaggtcttactgccatggtgcttttcaggggcctgtgtgtacacacatgattaaatggattttcctgtgggaggtatgggcaggagaggaacccttaccattccagtaaatagcagtttctgcaattctgttgaatatgaaatgccatacagctttatttatttatgtaagtaaaagctaaatgaggggccaggtgg

SEQ ID NO: 90633 - DNA, 1359 bp, Homo sapiens
tttcgtccgggagctgccacgtccgagacctggagcagccaccgccgcaatcatggtgtcagtaattaacactgtggatacctcccatgaggacatgattcacgacgcccagatggactactatggcacccgcctggcaacctgctcatcagacaggtccgtcaaaatctttgatgtgcgcaatggagggcagatccttatcgccgacctcaggggtcatgagggtcctgtgtggcaagtggcctgggctcaccccatgtacggcaacatcctggcatcgtgctcctatgaccggaaagtcattatctggagagaggaaaacggcacctgggagaagagccacgagcatgcgggacacgactcctcagtgaactcggtgtgctgggccccccatgactacggcctgatcctggcctgtgggagctcggatggggccatctccctgctgacttacaccggggaaggccaatgggaagtaaagaagatcaacaacgctcacaccattggctgcaatgccgtcagctgggcccctgctgttgtacctggaagcctcatagaccacccatcggggcagaaacccaattacatcaagaggtttgcatcaggtggctgtgacaacctcatcaagctgtggaaggaggaggaggacggccagtggaaggaggagcagaagctagaagcgcacagtgactgggttcgagatgtggcctgggccccctccatcggcctgcccaccagcaccatcgccagctgctcccaggatggtcgtgtgttcatttggacctgtgatgatgcctcaagcaatacgtggtcccctaaattgttgcacaagttcaacgatgtggtgtggcatgtgagctggtccatcacagccaacatcctggctgtctctggtggagacaataaggtgaccctgtggaaggagtcagttgatgggcagtgggtgtgcatcagtgatgtcaacaagggccagggctccgtatcagcatcagtgacagagggccagcagaacgagcagtgacaagacaggtggggcctggctccccacccgccagctccaggactgccccttcctgggccaactaaccaaacaactgggaagagcccccaactccaacaggattattttcccaggaggagttacagatgcagccacagattgatcatctgccttaacgtgatcggagatgctttgtaatctactgtccagctgaaagcactcatgttacgaggaagaaactacaagtgatgttcaaatctattttgggtcatttttatgtacctttgggttcaggcattatttggggggttttgtttccaaaggaactaaataaagtcatattgcttataaaaaaaaaa

SEQ ID NO: 90634 - DNA, 684 bp, Homo sapiens
tccagctccgttattgccgcgacgacgatttcgtcagaagcatatgtgcttaacagctgggcttccagggtgcctgtgcttgactggcaatagtgacgctgaacttcctggcagcctaggcaaaaaggagggctcaatggattccacagttcacgtgtcttgcatccagttagtcatcaaaccagagcttctgcttggggaggggagcagtggggtgattgctcccagatgtggacagctcagcaagggctctagaatgtgtgtatgagtgggcgtgtgtattgtggggagggacagagggagcagtgtgctgtgaccatggtttaagtactggctggatagctccttagcaggagaaaggctttctgacaatagctcacattaggggcaactcttgtagttagcgtctcagtgtcgggcatctaaattcatgtcttggcactctactgccatgggctttaatgcaaagagagaagagaggcctgattccagaagattccatagtatcattgcctctttgtctggtgaagatgaacacagcgagtcacctagctttgggccttctgaatatccctgctaatatgaagaatgcccatggttggcacggacgatgacttcctcaggaagagatcctgctgatagcggaaatgctcttactgcccaaaacagaaacatcttgtactc

SEQ ID NO: 90635 - DNA, 478 bp, Homo sapiens
attcccggatcgacgatttcgtccccagtgtctcagacagcctgcttcaggtggccatgccccataagctcctggtgacagaagaggcgagattctcaggagagggctttgccgtcccccagggttctttcaatccctgtatccccatccctatattctcccctaattggtacctttcaagatccttctatactgcctgccccctttcatgtttgctctccatttccctgtttctctctttttctgtcacctgcccttcgtccttcaggaagccaatcgcctggctgaggagctggtggctgaggaggagcgcatgaaacagaaagcagagaaaaagcgactcaagaagaaggtggctagagcatggctggagggtgcaggggagccaaagggatttgggagagggaaagaggaaactttgtgggaacaggagagagctcaagatggcctgcagtggactctctagccaggaggacac

SEQ ID NO: 90636 - DNA, 438 bp, Homo sapiens
  misc_feature (1)...(438): n = a,t,c or g
tattcccgggtcgacgatttcgtagagcgtgaagctttctctacaaagaacagacctagactcccatcaactttgtgccttggaggtagacatgcagcctaggtgaagaacaccatgcaagggagaggggaggccgcttaccaacctcctttaatactgctgcatcccttgatgtatctctttattccagaatggagaagctaggcagngacgttgctactctctttacccattcgcatgtcgtctctcttgtgagtgcagcagcctgtctattgggacagcttggtcagcaaggggtgacctttgacctccagcccatggaatggatggctgcagccacacatgccttgtctgcccctgcagaggttcggttgactccaccaggtagttgtggattctatgatggcctccttatccttctgttgcagctcctcactg

SEQ ID NO: 90637 - DNA, 448 bp, Homo sapiens
  misc_feature (1)...(448): n = a,t,c or g
tttcgtcagggttggtggcctctggagtcctggtgcctagtctgttgaattccaggcctgatgcaccccagaggaaagtcctgcccctgctgcaccccaggaggaaagtgctgcttcatggcatccatctcacaattggtgacagagtatctggaacttataaatctccagcatttgtgtttctatactcttctgctctcttgcgtggttctaaccagataacaagaaactggatgataacttcactcttataagcaaatttccttaggagatagaattactgatactaacatagaatcctaccgtctggggtgaaactatctacattacgacacattcggtctgcagatgaacggaacaaagactaccatgtctggggaggaaaaagctgatttatggcgcctggctttataaaaggcattattgcccccaaatcacattgctagcn

SEQ ID NO: 90638 - DNA, 477 bp, Homo sapiens
aggtcctgctccggtattcccgggtcgacgatttcgtggaagatgaggagttgagctaaggaggttggctccacagccttggctccaggatgcctgattggtggtccatgcaccagcagcacccacagcccctgggagcctgttgcaagtaaagactctcaggccttacccaaacttactaaatcagaatcgctggagatggggccccgagtctcttgtaaccaaccttcctcatgcttctggtagacatttaagtgtaagaacaatgtctaagggatggcatattctaacacttctcaactgcctctgccatattaaaaatcatctgtctttactgaagaatcaccctctgaatttcaaaggccatgccattttattgacctctaacctgttataattagaacatcacagaatctgaaaagccttttttttcctatttgtttttaacttttaaagttctctttctgtatatctcta

SEQ ID NO: 90639 - DNA, 452 bp, Homo sapiens
tttcgtgaccttttctccctggcacaaaatgcagattgacgctgacacggatgaaaattcctcaaccatggtcacaaggatcagagtcctgagtaacctcagggcttcccggtgttcagtgtgaggtggagctgatagagcccacagaggacctgagacaacctgggaagttcctgagactctcctgtgtagcctctagattcgccttcagtagcttctgaatgagcccagttcaccagtctgcaggcaaggggctggagtgagtaatagatataaaagatgatggaagtcagatacaccatgcagactctgtgaagggcagattctccatctccaaagacaatgctaagaactctctgtatctgcaaatgaacagtcagagaactgaggacatggctgtgtatggctgtacataaggttccaagtgaggaaacatcggtgtgagtccagaa

SEQ ID NO: 90640 - DNA, 643 bp, Homo sapiens
tttcgtatagtcagtcccctcctgtgatagcaagtcataattgatacttagttcttgaattctcagccttttagtgaagttctggggaagttagctcttcttttactgtgacttttaatatcttatacagatatgattaatttgcacagaattgaatttcagagcttcaagagattgttaaccagcaatttaaaaaacccttatgagattaattttttctgtatacacaattaacttaagcatagttgttctcatgaagcaaaacagagtagaaaatattattaaaatgtatgtgaagaaaaagtgttaccttgatgcaaaaacttaaatcagtgacctactctgttgtatattttcatgggctactatctgtatgcattattagttttccctacctgttatcttttgacacctgtgcttcataagctgttggaaagataatggatacctgtttattttaagtgagctcagtataaaggtactatgccccattcgtgcctgtctacttttgctttgacatatgacacatccagatatttccaagctgactgaatgaagttcgaacacctgtgggttcttatatgggacctaagaggcaggggtctcataccgctaaaaacttccccggacctgagagggactt

SEQ ID NO: 90641 - DNA, 375 bp, Homo sapiens
cccgaccccgatggagattcagaaacatatggacaacaagaaacttccccaaggtatcattatagtctttagacttcagacacacaccacacctcaaatatatacacaactgaaaggaaaattaaggaagtttttcaaagaaccctattccgagtaagaagtgtgttgcatgaatttctaaggtcaaagatgttgattcattcatagtgggaggcccagaaatcggcatttttaaacaagtacactggacatttctaaagctggctaaagtttgagagacactatccaagggaaatttctccgtaactctttttctcagaagaaaagtaaactaaaagtaaaaataagcagtaccactaagtttcaagtgatctt

SEQ ID NO: 90642 - DNA, 426 bp, Homo sapiens
tttcgtcaacaatagtggcataaatgggtattttaaatatcttaaaagatgttattgttttgatcatttcatggaaaaagggtactgttgattcataacaacatgaacttatttttatgtcattgattacacatttgcactaaactaatcctttcatacaacttttgaggtaaatgagaggttaaagataaaaatttttgttataaaattgttcatgtttacaaaactaactgttaagggtttatgcatacttacccctattactgaagtaaatttaccagtttcgttcatgttgttatatttacagaggccactatgactgaaaatcaggcgagatggcatactcactaaaacactgcgaacagggaaaacagtagcaatcaggatggaattatccaacagtgggtagagattattttatgtaat

SEQ ID NO: 90643 - DNA, 442 bp, Homo sapiens
ctgctcgacgatttcgtcagagtacaaaagtatttaaatctttctcagcataaaagaccacaaacagtgaaaatctttctatgttattgcactttcccctaagccttctcacctattagctttttccttttgctatgcaaattatttaatataatagaccaccttatctgcctttattttcacaaatctgatgtactttccagcatgtattatgaaggtactggtttcatcctacttcttaaccatgttcaccacatttaagacttttccataatcttacggaagcatttaccatattttgctaaatcagatggcctatgttgcttctcattcttttgacactctaatagtatgtgatgttgttgacccttcctattggaaaatatttttatgcttcacttctaagaaatttcttcttgtctctccctgccttttttaaatt

SEQ ID NO: 90644 - DNA, 864 bp, Homo sapiens
tttcgttgctacaggtatagatgttgatcattttaaatatttggaataagaggcaagaagagctaggcaacaggaagtatagtttacatatattttttcctagaactttttctctgagtctcttgagatctttgctgttgttctatatgtgagggtggaacttcgattttagcagtttccctgctttagggagaacttggcacacctgaagatgtgagtgggaggagggagagaatgactctctgtaatcctgtggattatgagttttgtgtgatgagtcagagcttttgtctgcttagtcagatttgatcctcaccttcaaagctgtctcctcaactctaatgaaaggttgagaaaaataaaaacgatgaggccaaaaaagtagctcgattattttctgctctgcaaacatgtgtcccaagatctgtgattccccccacttctttttataggccccccatgattctaaacggcaactatgaaggttatgggttaggacatttctgaatattctcttacttactaaattgagaaccttgccctcttatggcatatgcatatagaatcagtcttattaaaagagtactggtattttccctggttcccacactaattttggtcctttttgtcctgtttggtggatttcgggacacgggcatgtgaatgtatgctatttaaaatttaaaggctcttttcacatatccaccaaaatccccctcagaagaaataagatcattttggatactcttggcgattgaaagtgaaaaatttttttcattttttttacccgcgggaatattcttttctaatgtgggcctcctgcccttccggcctcactaatttcccaccttggggggcgactcc

SEQ ID NO: 90645 - DNA, 488 bp, Homo sapiens
gagaaagaggagccagtcacgttagagcctcgactgtatggaccagttttctgaggcgttcacgtttagggactgactcgtcagtaccatttattatgctgttcaagaggagactgatgcccagcactgctggctgcacggtgaagcactccatagtatgattattgctatcacccttgtgtcatcctcctggcccctcgaggtgtgggggtttactccagagccagacacacctgggttgcagctctgcttccatccccctctgacccagggcaggcccctcgccacctctgagcttcagtttccccaccttggtcacagccacggcactagcatgaccgcacagctccacgagctgctgccgcccaaagcgataatcctccagcagctcccgctccagggcggctgcctccgcggtgctgaggaaatgccgctcttcgggcgcctccgacgggtctgggccggctgcgctgctcatggccgagacg

SEQ ID NO: 90646 - DNA, 871 bp, Homo sapiens
ttagctttccagtgtccacatattcaccaaatttgatttcgttaaatatatcatcaatcttctcttcagatgggtaaaagccaattgctctcatgacaaaaggaagctctgacaggcaaatgtgttctgacacctttctggtctccattgtgtcgatgccttgactgcggagctgagaatagtagaagtagtcttctagctccctgtagaattttccttcccggccaccagacagcagaccatagaatggggtcaagtcttcacccccaagagaaaccgctgcctccaggacacttaaggtgattttccactgcaccaccgagcgatcgtgccctcccgcagtgaaggcgtagcagccatcataggaaacggccatgccggccaccccgttcgggtggcaaacaatagcagatgtcttatgtggattgccgtcaactggtaagatctgaagtcccaacttgtctctgttaataaacaccaagtagcgtttctgtagctccgccatgcttctcactgggaggacttgtgtctgctcaataggggaaccataagctggccccagaagcgtctttctgcacattttggtagtagcattaaaaagcttcactttgtagccactgttgcaaataagcaggaagagttccctggtgagtggtgggtaccagaccatgcaggtgggatagcagccctggtcggtgtggtgaatgtccaggacttccaggtggtctttgtagctcctgagaagatcatactctatcaagagcctgtctgtcccaaggctcagcagtctaggctcattgctgtccaggtaaaccccaaacaggagacttcgaatgcttgtgcggaattccaccgcactgacgtatggtct

SEQ ID NO: 90647 - DNA, 932 bp, Homo sapiens; identical to SEQ ID NO: 60472

SEQ ID NO: 90648 - DNA, 439 bp, Homo sapiens
tattccgagtggcggaattcgaactgatgagcaagggcatggtggtgaggatgtgcctatggtgtttcagggatcagtgggagacagaaaggagcagagggctgctgttgatgagaatggcccatggtgcccaggtggttagcatgacccaggaaattatctgtgaaggagctcagaagaggcagcctctctacaggcctggacttgccttctggaaactttgcaaatagaaagccagagaatgtggccaccagaacgaatgtcagttgatttctccatgggtcaagaaactgaaagtggccatctgatagcttgcagagcagtaaacagcttgagcatcacttacggaaacccagattattcttcaggggacaaacctggggccttagaaacactaatggtcattctcattgtggtcaacataagaaaacgagggact

SEQ ID NO: 90649 - DNA, 497 bp, Homo sapiens
aattccatccaaccattcaagagggagaggaaagtggccaaatgtgaagctttatgattgaaggtactttatgccccaggctgccttctggatcagaaagatactcaaagctataaagttcacacaaagccaggctttgttatcaccggagtgtgcagaagggcactagccctgagtatgtgccacctcgtacgcctctcacatgcttctccgttttccctacttcactttcctgggttcattccaagacggagaatggaagaaaccagagctaaacttgtgtgcctgcagtccagctgtcgtgcctggaggaccctgtgggcattgaaatccaactcactcatgcttatttcctgtaatggacaaacttgatgctaatgtgaggtatgttacctttctgtacatattgtgttgtaaactgagaacatttctgctatgaagactctaaaaatctgttgttgtagagttataaagttaatggatgtggattttctttg

SEQ ID NO: 90650 - DNA, 630 bp, Homo sapiens
cgcttcactatgaagccatttccagcattcaaagccaccccactcctcaacaggtgtgacgccccgatgcctggacaccatggactcctctcctagatgcttgacacggtccggcgcggctaaactgacagagcctgccagacagtcataaaattataatttcttaaaaatactttgtagctacttcaaaattaatactaatgcgaaagaaagttagtatttcccttagaagtaaacacaaaacattcactgcctcattaattcaaaagccatcattcgcggggcttcccagaatcggtgtgccagctctgctgccgccccggagccccggctggagcagctatggcctcttcttccgcagcagctgcccgttgccttctggcctgctcttggcttctggctgtgcgaagttccagtccaccggattgagaagctgctgagtcttcttatgggtccaatatggattaatgattagcgtaagcagagccagtccgacaaggaacagtgtcaaatgaggcagatacaggctgctgaccaggccgtcccagtgccagaaacacacccaccacatgtggtaggttagaaccatgcggcagtgaaacatgtgaatcatcagccactggttgagct

SEQ ID NO: 90651 - DNA, 1503 bp, Homo sapiens
  misc_feature (1)...(1503): n = a,t,c or g
tccgttagtattatcatcgagatctacgacggcgtaaaagatattactctatctagctcacacttccaggaaagaaatatcgaatgatctgcttcagtgatataagcctaaggagtcatctttctattcaccgtaggtgggcctgactgggcattgtataagcaaactcatcactagaaattgtactacacgacacgtattacgttgtagcccacttccaataaggccttatcattaggagctgtattggccatcataggaggcttcattcactgatttcccttattctcaggctacacccccttaaaccaaaacctaacgccaaaatcaattcaactatccatattcatcggcggtaaatctaaactttctttcccacaacacttttctcggcctatccggaatgccccgacgttactcgggacnaccccgatgcaatacaccacatgaaaacatcctagtcatctgtaggctcattcatttctctaacagcagtaatattaataattttcatgatttgagaagccttcgcttcgaagcgaaaagtcctaatagtagaagaaccctccataaacctggagtgactatatggatgccccccaccctaccacacattcgaagaacccgtatacataaaatctagacaaaaaaggaaggaatcgaaccccccaaagctggtttcaagccaaccccatggcctccatgactttttcaaaaaggtattagaaaaaccatttcataactttgtcaaagttaaattataggctaaatcctatatatcttaatggcacatgcagcgcaagtaggtctacaagacgctacttcccctatcatagaagagcttatcacctttcatgatcacgccctcataatcattttccttatctgcttcctagtcctgtatgcccttttcctaacactcacaacaaaactaactaatactaacatctcagacgctcaggaaatagaaaccgtctgaactatcctgcccgccatcatcctagtcctcatcgccctcccatccctacgcatcctttacataacagacgaggtcaacgatccctcccttaccatcaaatcaattggccaccaatggtactgaacctacgagtacaccgactacggcggactaatcttcaactcctacatacttcccccattattcctagaaccaggcgacctgcgactccttgacgttgacaatcgagtagtactcccgattgaagcccccattcgtataataattacatcacaagacgtcttgcactcatgagctgtccccacattaggcttaaaaacagatgcaattcccggacgtctaaaccaaaccactttcaccgctacacgaccgggggtatactacggtcaatgctctgaaatctgtggagcaaaccacagtttcatgcccatcgtcctagaattaattcccctaaaaatctttgaaatagggcccgtatttaccctatagcaccccctctaccccctctagagccaaaaaaaaaa

SEQ ID NO: 90652 - DNA, 394 bp, Homo sapiens
aatcccagtggttgtagatatcctcaaagttatccagaccatcaaaaagctgtacacctggtcagaaaatttatttccctgttaagatgttcatcccaaactgcactttagtctcctgccatctgcttccagtaaggactcctgaacaaaagtgctctgcccttcctcacttgctttgcagtagaactactgtgaatgatgttcatcctaatatacggcattgtcttcatgacatagtgagaagaccttctcccatatctgcaggcctaaaagagccaagcctccttggataagcatttatgttggcagagtccatgactcagcatgatagtacttatgataagcggagctggatttgctgatctcctctttgtagataagcctccgcctggcg

SEQ ID NO: 90653 - DNA, 1260 bp, Homo sapiens
ctcatctgactcggtaattccatttccggaacttcgtccccggctctgctctcaagccgggcttggctccccgcctgcccaaatgcgttcaacatcccccgaaaggccatttcccttccagtcttcccggagagatgtcagggtgacgagggagcttatctttcggtggctccgaaacagccacgaagccgagctctaccagtaacaaaaatggcgtcattccgccagcgccaggacctctgtcgctggccgtggtctcgcactgcttctggaggctcccattccagccagaggagagttcaagtaggcttatatggccttttgcagcccgtatcaaaactaaaagagttcatagagtcagaggttcgagccacgctggcagtcaattgcatggtgcccatccacactgagggtggatcttcctctaacagtcaaacactgactcaaatgtcatcttctctggcaacaccctcacagacacacccagaaacaatgcttcaccagccatctatgcagccctcaatccagtcaaggactggaaagactcaggctgtttctcttgcaggtcagagtgctcctggtgccatgaacggagacgacgcctttgcaaagagacccagggatgatgctaaagcatcagagaagagaagcaaggccttcgatgatattgccaaatacttctctaaggaagagtgggaaaagatgaaattctcggagaaaatcagctgtgtgcatatgaagagaaagtatgaggccatgactaaactaggtttcaacgtcaccctctcacttttcatgcgtaataaacgggccacagactctcagaggaatgattctgataatgaccataaccgcaggattcaggttgaacatcctcagatgactttcggcaggctccacagaatcatcccgaagatcatgcccaagaagccagcagaggacgaaaatgattcgaagggagtgtcataagcatctggcccacaaaacgatgggaaacaactgcaccccccaggaaaagcaaatatttctgagaagattaataagagatctggacccaaaagggggaaacatgcctggacccacagactgcgtgagagaaagcagctggtgatttatgaagagatcagtgaccctgaggaagatgacgagtaactcccctgggggatacgacacatgcccttgatgagaagcagaacgtggtgacctttcacgaacatgggcatggctgcggctccctcgtcatcaggtgcatagcaagtg

SEQ ID NO: 90654 - DNA, 1142 bp, Homo sapiens
ccgcagcggactgccctttcccaagatggcgtcgaagataggttcgagacggtggatgttgcagctgatcatgcagttgggttcggtgctgctcacacgctgccccttttggggctgcttcagccagctcatgctgtacgctgagagggctgaggcacgccggaagcccgacatcccagtgccttacctgtatttcgacatgggggcagccgtgctgtgcgctagtttcatgtcctttggcgtgaagcggcgctggttcgcgctgggggccgcactccaattggccattagcacctacgccgcctacatcgggggctacgtccactacggggactggctgaaggtccgtatgtactcgcgcacagttgccatcatcggcggctttcttgtgttggccagcggtgctggggagctgtaccgccggaaacctcgcagccgctccctgcagtccaccggccaggtgttcctgggtatctacctcatctgtgtggcctactcactgcagcacagcaaggaggaccggctggcgtatctgaaccatctcccaggaggggagctgatgatccagctgttcttcgtgctgtatggcatcctggccctggcctttctgtcaggctactacgtgaccctcgctgcccagatcctggctgtactgctgccccctgtcatgctgctcattgatggcaatgttgcttactggcacaacacgcggcgtgttgagttctggaaccagatgaagctccttggagagagtgtgggcatcttcggaactgctgtcatcctggccactgatggctgagttttatggcaagaggctgagatgggcacagggagccactgagggtcaccctgccttcctccttgctggcccagctgctgtttatttatgctttttggtctgtttgtttgatcttttgcttttttaaaattgttttttgcagttaagaggcagctcatttgtccaaatttctgggctcagcgcttgggagggcaggagccctggcactaatgctgtacaggtttttttcctgttaggagagctgaggccagctgcccactgagtctcctgtccctgagaagggagtatggcagggctgggatgcggctactgagagtgggagagtgggagacagaggaaggaa

SEQ ID NO: 90655 - DNA, 539 bp, Homo sapiens
gtgctgtaatttcactcttgcttagcctgtgtagctcaaggatgtatttattgccctaggcgtaagaatgtgctcacgtttcttaagtaatgtaggtgtgcctcacccatggggcttcactttctctctgtttattgccagtagtggtctctgttctgttttcttcagtttctcccccttgcattgttgtctaagatggctgtcctgtcttttgtccacttcccctccactccccgtaccttcctttaatcagcttccgccactgcctgaggccactcagctctggtcccactggaggccctgtctcccccaggggtccttctgcttcctgttcacctctgatcccccagccctgccatggccaagctgatgaggatgggggagggggaggcagggggaatcttaatttcctgcaccgaagctttgctgtccacagcactgggcagcagctgcctccctggagtgttgtgtgagaccttgatgctgtctttcttcccaaggcctttggcaaggtagaagtcatctccttgactctccat

SEQ ID NO: 90656 - DNA, 24 bp, Homo sapiens
attgactccgtctcaaaaaaaaaa

SEQ ID NO: 90657 - DNA, 437 bp, Homo sapiens
ggtcgtctactctcgcgtgaagcagtttgttatcttcattgctttggggtgagctatgaggagattattgggtctttttgatggtgttatgtctctttggcttttcacatttcttattaccttgcatttatatctgtgcatttaaggaagtaaggacttatttcagcctctgtagattggctttgtctgggaaagcctttcaccctacttagaaattctaggaattacatcttgcatagaccaaagaaaggcttgctgctgaaggtgcctaggataatcagtgggcaggtctatgctggggcaggccttgagccagagtctgcagggatctacaccactggtgcagccatcttcaggcacttcagtgagcctgaagaccagtgcatgagaggcagcttggtactgggatgagactgaaagccagagccactggtagt

SEQ ID NO: 90658 - DNA, 409 bp, Homo sapiens
tagtccagtctggtggaattcctcattccaaggcttctaacatgaggatactgtttcctcgtattaccaccattccagtattgttctgttgcccactagtcgccatctccacacattcatctatcacaagattcataaagggatcaagtccctgcaatattccttggacgtgtctgccaccatttaatttcaatgataacttcttgtccataaatcccttctagccatctggttagaacatgatgctattcgagatgttcaacaaaaggtggcattcgagatcttcaaggaacgaagaagggacagcatgggggtgaccaggggcccgaccgcaggaccgggaggcgagtcggccagaaagaggtgcagtggctgctggtggtaactacgccgacgtgcgagctctgct

SEQ ID NO: 90659 - DNA, 480 bp, Homo sapiens
ttcgagtgtggcggaattcgatcaattaagataaggaattttaggagaatgctttgtgactatgttttatttattcagatattttcacagtgtgtcctaacaaaattagtagccacatatctgatttttaatatagtaagaaaattggtgattagttttagcatctaattagtttcagacaactaattggcattcatcataaagacaacattgtatagacatttacagtttgcactgatgttgacgtactcatcttcccagcccttctcagaaagttaatgaacatctgaaattcatttttactattcatagtctttactattttgtcatggatgtgtagtattttattcaacatacagtatatatttaaaattaagtttgacacagtttattttttaagatattatgttaaatttcctttttctcagaacttgaaatgagtttatacattaccaaacggtgcttcactgtacaagttat

SEQ ID NO: 90660 - DNA, 412 bp, Homo sapiens
  misc_feature (1)...(412): n = a,t,c or g
ctgcagtatccataacttttgctgatttccttcagatcatgatacttcagggctctctgcatgacctctactgaggagccctacccatcatatgcgccttgttgcccaaagaatggaaccgggatcgttgagatttcagcaccccagcattttttagtgactgaaataatgaaaattctgatcaggctcctgcttgcttgcacattttaaccactcgctttttgcccaatattctccttgtttccacaatataattataaactgctgaggtactgcttcctcgtcaagaacaaagaggttaacttcagggtcacaaaaatgtttgcagaagggatgaatacctccaagggctttgcaaccagctgcggatgcctggacgtctaattgctcanaggtgttatctgagactgaa

SEQ ID NO: 90661 - DNA, 405 bp, Homo sapiens
ggagaggatttgcggaatcacaatcacagccagtgtgttttcagtatttagtaggagccaggcattatgcaagcatccattaatggctctcaaattactttcacatactcgttggtgtttaagagcagagagattataatctgttgccgcccaaacactctgcatgtttcagctttagaaagtcaaattgagcccaagaatgatgtgcatagttttgtcacccacagatttatgtctggttgagggcccagaactccctagagctggtcagagagttgccttttctggccacatcactagctcaaatctcatgatggcagtggctggaaccctttattgcagaaaaataagatgcctgctgactcctaatcacattcatgtgggggtacctcaagacttaatgct

SEQ ID NO: 90662 - DNA, 671 bp, Homo sapiens
ctcacctctgaacagaaacccaccctccacccctgacaccatgacccactgttgctccccttgctgtcagcctacctgctgcaggaccacctgctgcaggaccacctgctggaagcccaccactgtgaccacctgcagcagcacaccctgctgccagccctcctgctgtgtgtctagctgctgccagccttgctgccgcccagcttgctgtcaaaacacctgctgcaggaccacctgctgccagcccacctgtctgaccagctgctgccagccttcctgctgcagcacaacctgctgccagcccatctgctgtgggtccagctgctgtggccaaaccagctgtgggtccagctgtggccagagcagctcctgtgcacctgtgtactgcagaagaacctgctactacccgacgactgtctgcctgcctggttgcctcaaccagagctgtggatccagctgctgccagccctgctgccgccccgcctgctgtgagaccacctgctgcaggaccacttgcttccagcccacctgtgtgtccagctgctgccagccttcttgctgctgatcaagtcccaagagaacaaccatcttcacacaacaaccttctgctcaactgacttatcttttggaggactaatttaccttactgctgacagcaaccatgttctcac

SEQ ID NO: 90663 - DNA, 638 bp, Homo sapiens
attaactacacatttccaaagcaataataggattgtagtcatctgtagggtacaggagatgattacttacaaatatgcactttttccaaggccaccggaaggcctggtggggctgctctccgaaagctccagcactagcacaggaaagtggctgctccttacaggctgtaagctgattctagcttaaggaggcagaagagttcccccaagaaggtacaggggttttgctcagtgcagaggtgggtgaacacgaatgtatgatagattataagtaaggttatagggaaaaggaaacattactaacaggttttcttgtaaaggttcttttttgagggttctgagagatcatctctttcttatatcttttttaaaagaatttatgtttctacttagtccccaaaagcatctttctcttaacctattattttatgaccatctaaccccagctgaggtgttgtagctaataggttccacctcaactgtgccctcatgtccttgcacagtgcaaggtgcacaatcctggcagaccctgcatgtcatttgggagagaaggacagttcctagaaaagtgacaagccaaggaatagagttatcattgagctgcagtgacttctcacccatgtgtgggaacaaatttt

SEQ ID NO: 90664 - DNA, 474 bp, Homo sapiens
agcggcaccccgccgcaaatttcccggcgacacacacgcgcgccaatggcattcatttgctgacatctactttaggtaaagatttatttaatatcatttattagtgatattttcataataacactttctaggtaaggcaaaatatctaaatcatattattttgaccttgtttctcatgtatagacattacgttatggtcattaattaatggattagaggatgtataaatgattttggataatgtcaacatacaagtttatttttgctcctataaaattataaagtggatatccaatgtatgctcatggaataccatagcatgtagtttggggttacttgtcttttagttttctctgtcaatttttaaggaaacagaagttggatactttgggtactggttgtaattcaaatatctgtttatacattgttgatactatacttgtactattgttagacatgaaaatatgtaacctg

SEQ ID NO: 90665 - DNA, 402 bp, Homo sapiens
aaaataaagtcatgactttgaagttagttgggttctttcattgttgtaaggttaggagccctattccatcccagctctccaaaacccagaattttttgggggttgaaattttaggctttctctttgaattgtagttttatcttatttcagttacaatttgcattttcataatgattaatgagactaagctttttttgtgtagttgactgtacctttggattttttccccaaatcccttttcatttcttattttctttatgggtttagaaaatgtagtttacgtaattgcagcttgactttttcctcagttaatggcatgcttattggagagaaaaaagattaactatatttccctttttaattactgtgcttttttcttttttaaggtaatatttcattact

SEQ ID NO: 90666 - DNA, 396 bp, Homo sapiens
gagcaggagggcatggggtgctgtggtcgggcttgaggaccattccggctctgcgtgtggccttccagggcgagggcctcactcagagcccaggccgaccaggccagagggccagcgcaaatcacagtggacacacacacacccgatacacaggcagacacactcaggtagaaagcacagatagacagacacagaagtcaccaagatgggcatgcaggcacagacacagactcagaagcactggcagaccctctggggacactccagggcagagtcatgcacatacagggagacactctcaggccaacacacagatgtgcaaaaccgacgcccagaaaagtgtgtatatgcccgcgcgctcaagctcaggcatcagattcactttcctggtttccc

SEQ ID NO: 90667 - DNA, 449 bp, Homo sapiens
cggtccggaattcccgggactggcagagattgctagaaaaagtttgattttagggggaagaatttaacaatttcactttatgaaaaagcacaggagagattttgggaattagaatgcgtaggttaaggtcctagttcaataagttaatgccattgatgtttgtaagtcttttataatttcttagcctcaatctttctttgtcttctttaatgtaagctgtaatatgtatgtgtgtaatatatttaaatgcagaaaactaattttcaatctgacaaataagtataaagatctatgaaaccactaacaaggtcaacaaataaatgtcaaaacaccccagaagaacttgctctcatttgtcccttccagacaatcatctactcccccaccattccaccaggagtgaccactgtcctgacttttatcataatccctttctgacttttctttgt

SEQ ID NO: 90668 - DNA, 2959 bp, Homo sapiens
ggatccagagcccggagccctgtgcgctgttccggcagctgaggctcggctgggtcctcctctccctggccctgggcggggcgctcacgctagggctctgaccttgttccagaaggcgggaggcggcaggagagcgctgggtgcgcctgcgaggaggccgcccccgcgggggtgctgcctgagctgcctacggaggcgccccctggggacgcccttgccgatcccccgtcgggcaccactgaggaggaggaagagcagcctgggaaggccccggacccgcaggacccccaggacgcggagtccgactctgccaccggatcgcagaggcagtccgtcatccagcagcctgccccggacaggggcacggcgaaactgggaaccaagaggccgcaccccgaggatggggacgggcagagcctcgagggcgtctctagctccggcgacagcgcagggctggaggccgggcagggccctggggctgacgagccgggcttgtcccgcgggaagccctatgcctgcggcgagtgcggggaggccttcgcgtggctctcgcacctgatggagcaccacagcagccatggcggccggaagcgctacgcctgtcagggctgctggaagaccttccacttcagcctggccctagccgagcaccagaagacccacgagaaggagaaaagctacgcgctggggggcgcccggggcccccaaccgtccacccgcgaagcccaggcgggggctagggcgggcggtcccccagagagcgtggagggcgaggctccccccgcacccccagaggcgcagagcagacgttcccgagctcagaaggaaaaaaaggacgaggaaggggctgcttatgagtgtgtcggtgttgatttagtagttgtggaatgtgagccctggggaaataagtggaagaggcatggaccgtgtggctccactggggcgttcgcgaatgcctcctggaggaggagaccaaccagaaagaagaggcagcgtccagcaactggacaaaggccagagggcctttctggcaagaggactgggtttgggatatgagattgaaaatgacgactcggaattttcctgagagagaagtaccctgtgatgtagaagtggaaagattcacaagggaagttccctgcttgtccagtttaggtgatggttgggactgtgagaaccaggagggacacttgaggcaatcagctttaactctggagaaaccagggactcaggaagcaatttgtgaatatcctggttttggggagcatttgattgcaagctcagaccttccaccgtctcagagagttctggcaacaaatggtttccatgcacctgactcaaatgttagtggtctggattgtgaccccgccttacccagctatcctaaaagttatgcagataagagaactggtgacagtgatgcctgtggaaaaggcttcaaccattccatggaagttattcatggaagaaatccagtgagagagaagccctacaaataccctgaaagtgttaagtcttttaatcattttacctctcttggtcatcagaaaataatgaaaagaggcaagaaatcgtatgaaggtaagaattttgagaacatctttactctgagctcatcgcttaatgaaaaccagagaaatctccctggagagaaacaatatagatgtactgaatgtggcaaatgcttcaaacggaactcttctcttgttttgcatcaccgaactcacaccggagagaagccttatacttgtaatgagtgtggaaagtccttctccaagaactacaacctgattgtgcatcaaagaatccacacaggagagaagccctatgaatgcagtaaatgtgggaaagctttcagtgatggctcagctctgacacagcaccagagaattcacacaggcgagaaaccttatgaatgcctagagtgtggaaaaaccttcaaccgaaattcatccttaattttgcaccaaagaactcatacaggggaaaaaccatatagatgtaacgaatgtgggaaacccttcactgacatctcccaccttacagtgcatctcagaatccacaccggtgagaagccctatgagtgtagcaaatgtggaaaggctttccgggacggctcgtacctcacccagcatgagaggactcacactggagaaaagccctttgagtgtgcagagtgcgggaaatccttcaacagaaactctcacctcattgtgcatcaaaagatccattctggggagaaaccctatgaatgtaaagaatgtggcaagactttcatcgagagtgcgtacctcatcaggcatcagaggattcatactggcgagaagccctatggctgcaaccagtgtcagaaacttttcaggaatatcgctggcctcattaggcaccagaggactcatactggtgagaagccctatgagtgtaatcagtgtggcaaagccttcagggacagctcctgtctgaccaagcaccagagaattcacactaaggagaccccatatcagtgtccagaatgtgggaagtccttcaagcagaactctcacctggcagtacatcagagactccatagcagggagggtcccagccggtgtcctcagtgtggaaaaatgttccaaaagagctcatcccttgttcgacatcaaagagcacacctgggagagcaacccatggaaacataatggttgggggccacatgagtcttccagttcactctcactcctgtgtttaggaggcgtgtcttagatctgactcctctctggtcagtagaaaagaatcctttaagctatccagtgaattgatgaatgtgagacattgctgagccacactgttaagtctgctcattggggaactccagagacaacttaggcatgagggcagaaaagtctttggggatgattcagtctgtaccagacatgacaacacacacactggaatgaaatgtgcaaacatgggggtgact

SEQ ID NO: 90669 - DNA, 624 bp, Homo sapiens
cttgctgtttatctgaaattcaaagttaacggggcatcatgtatttaatttgccagatctggcaaccctatttaaatgttatacttgagtttaaagagctcagctcagggcccggctctgtagctcttgctgttattatcagctcacccgatctgttcagaggcctcggcaattcttgtcaaccatgtgcacaggcacttgggtcccccacctggcgctgatctatagaacagcagaaggcggcttcgcagtacagagagcctctgtctccttttatcccccgcccaggtacagctgcctaagaatctgggtttgtgtggtatgggcctgtctgcttgcttgtttcctccacaaaggtgccattccatttggaaacatcctatgtccccttatttgctttgattcacaatgaatagttgtgactaaacaagcacgggattattttaatagttaattaacttgctgatgttaaactgcaggttttactggtactcaagggagcacaatgggtttgtgctgtgctctaggtccagacagctcttcaggatagggctgaaggatgggagaagatcagatgtcacaggataaagccctaaagcccttactgtgtgtgaccacaggcca

SEQ ID NO: 90670 - DNA, 600 bp, Homo sapiens
gtgcaaatcgcaaatggtttttagttgcaagagaatttccagaatcttctttttgcctttaaattcatttcataacaggaaaattctgtattttgagttgaaacgttgatgggagatgcttataagctgacgaattttttttgtaatgactgttatttatgtaaaaatttaaaagcctcatttaaaaatgaccttccattaatttggtcctcgatagcaataatctttgcaatagtttgaaccagtgtcattttacaggttagaacccggcatgcaaatttaaagtcttgattacatccttgtaaggagttggatacaaagctgactaaaagccaggtctcttagctgtcactgctggtccctttctttaaaacgctaatacctgatagatattggtgctgtatatttacatacgcctctgtctaatttgctgtcttactgctaaagggccgggcggcagtttatctaatcttgcatggattttctccgcacaatttaattaaccggggcttaacggtaccttactggcctggcggcacattgggaaaagaaccctggacacggagacacgcaagaccaacttgaaaggagtcgtcttat

SEQ ID NO: 90671 - DNA, 763 bp, Homo sapiens
ttttttttttttactttttaagcatctgttttatgaaatcaaaccacaccatagccacactgtgatttctgcaaaaaggtggatccctgtacgagagtaactggagttcagcccaccctctactctctaagctgtccccgcaggcatggctctgcatgtgcctagagtgagtacttttttcaaattcgtacaagggtgccatatggggtagcagtgaaactacatcttgggatgcagacttcagttggaaacataagaaagaataagccagtgttttgaaatgatctaaaagacacctgataggtttctatatcggagaaagccacacataaggctcatagatgtaatggacaattcctcaaggggaaaataacatgaagagctatcctggactcctccaatgacaattcagtgactccttttggtactgtttcccagagatgttttcttcttggagctggttcttggtagtagattgtcctgtggatatgacatcaggatggggcatatggcatgaatacctcataagagatctagtgatggaacactaatagacattttttagaccaggcacgatggctcacgcctgtattcccagcactttgagaggccaaggtgggtggctcacctgaggtcaggagttcgagaccagactggccaacatggtgaaacccccgtttttactagagaataccagaaattagtttgggagtggatggtggaccccctgggatctccaaattcttcagggacctttagagct

SEQ ID NO: 90672 - DNA, 366 bp, Homo sapiens
ctatgacaaaaatttaatattcttattctcagaggagggttatgcataaagacctgagcattcttgttcaggaagggagcagagaaaaactaatgcccactaatcatatgaaaagactataagcctctattaatcaaaatgatacacattgaaataggatttatgattattctagcagacagccaaatatttgaaaggtcaacatgcactgatagctgggatatggagaaatgggtacatccacacagctgcaggagtatttctgcctttctagaagttctccttattctgggcgagcatttcccactctaataactatttctaactcagaatagatgtgcgaagaatgataattgcaccatcatt

SEQ ID NO: 90673 - DNA, 336 bp, Homo sapiens
aaccatgaacggaagttttgactcttttattaaaggctttggaaagcatactaaagtctgaagtattttctgtatcaaaaacgctggtaagaataatacccgtatgaaggactttaaaaaccattttctgaaggtaaattctatatggaccatatttgcacatttctaatttgggaagacttttttatatcttgcattcatcaggaggttagtcctattgcaataagcgccattctattaactgtagagtcatttgaaacctttttaatagtgactataacaactttcttaagggggttcaacgtgagaagaaaattgtatctctcatacaaagag

SEQ ID NO: 90674 - DNA, 591 bp, Homo sapiens
gtttttgaaaattattgggttttcaaggtactagggtaatttggcatctaaaggaataccaatgaatttctgaaatgaataattatttccctaatatatcttttgagtaactcctgcttttcctgatttgggtttgtttgaagcaaggcacgtctatcatatgacagattcacacacacatattttctctgctgttagtggccacagcacatactgagaagcaaagcctgtgctttcaacctctgcttccctggaagcacttccatgatttcctgatacttaagaatcagcatgagatcacaagcatgcatgtcagagctagacagcctggcttgaatcccatctcctctatgcatttgttgtgtgacttacagcacactgttggacctttccgtgcctttgtttcttcatctgtaaaatggggatgtatgagggttaatgagttaatacaagaactaatatatatcaaatactccgaccaaggcctgttgacaggaaggacgcgatcaaactattggcattataacctctgttttaggatagggcgcggacactcaccttgacatggagagacaggacacgccagactca

SEQ ID NO: 90675 - DNA, 631 bp, Homo sapiens
tggggatttactataaaatatacagttgagggtggcagggagtggggatatggataaaacaggagtatttgcaagctgatgattgtagtggctggtaatgagtacattaaggttcactgtgttactccgccttcttttaccctgtcttcttcagtatatgtgtaaaatttcccatcatatatattggaggaaaaaacttccgagtaattttaacatgtaaccagggctgacaaacactgctctgaagtcttgaaaatgtgctataatgagaagctctgtctggtacttccagctacaaaacactttccccagctctctgatatagagctagtcagttaatctctccgtaccacactttactaaactgcaaaacaacagatatggattagaggtttttgttgctgcttttcccttctcttttttttctttccgcacaacaaacctgccattttaggcaccggttgtttgagcgacccacaaccaccgacagcggaaccctgttgacgcccccacccacacgcgagtactgggccacactcccctggccccccctagccacaccagcgagaaacgtggccacatcacaagatgtgtgactcaccatcccacacccgggaatgattttatccca

SEQ ID NO: 90676 - DNA, 765 bp, Homo sapiens
attatttcagcatatatttcaatatgtatctctaaaagaaaatgactcattttagaaacaatcacaatactgtgattgtacttttaaaatgtaatttcctatcatgtatccaactagtgttcaaaatttttagttgtctcataatgtcatatattttttaagactgaatagaatctgctaaggtctatcacaagtacagtgaggtgactgtgggcagtggctgggcacagcccatctgggaggcctcccatcagatgaaagttaaggttcttttcaactctaaaagccagctgccaactttttgcctggtattcgtctcaacaccaaaagttaggcactgttagggagagaaagtcacactagagagggctggcctctctttgcaaaggtttaattcagatggaagatacttcagtaatgggtagaaacaaattacttagaggctgtctgtatatcaaggttcttcattttatccttttcatcccattactgagtagctgcattataacttattggtgaaacacttgggttcagaggtcagacagaatggaattctagtccaggtgccactgcttgctgtgtgtgtgtctgggcaagtcatttagcttctctgggcggccccaccccagtgtatagaaagtgagaattataagtttcgacctagaccgggtgtggtggctaatgcttataatcccaggtactttgagaggccagggtggggcggtcactttagcaagacctctttacaaaatattaaaaaaaaaa

SEQ ID NO: 90677 - DNA, 509 bp, Homo sapiens
gaatgttccagataatccctttcccagtcctgcctgacatctgggtagggggtttgtccctggaattctgggacactggctggggtttgaggagagaagccagtacctacctggctgcaggatgaagctggccagtggcttcttggttttgtggctcagccttgggggtggcctggctcagagcgacacgagccctgacacggaggagtcctattcagactggggccttcggcacctccggggaagctttgaatccgtcaatagctacttcgattcttttctggagctgctgggagggaagaatggagtctgtcagtacaggtgccgatatggaaaggcaccaatgcccagacctggctacaagccccaagagcccaatggctgcggctcctatttcctgggtctcaaggtaccagaaagtatggactttggggcattccaagcaatgacaaagttgctgcaaccaactggatgtctgttatgacactttgcggtgccaacaaatatgg

SEQ ID NO: 90678 - DNA, 340 bp, Homo sapiens
gttgttataaataaggaccagggtctctaggacacaccttactgtgtataactgaatggcagattttgtcccttacttcttaaaaattaaatggcagaggagctggccatgtaaaagccctgtgtgtgtttaccaaaaagtacttgaattttgtttgggttttgtgttctggtgcatatgaagtgaattttggtaggagtatgtgcattcagagaatatgtcatcacacttttttctttatttgagtgccacttggctcttatttgattaaggtaatttcagtgacatattttgaagcaattcaccttgaaaggcagaggcaccacccaggtgcagaaat

SEQ ID NO: 90679 - DNA, 356 bp, Homo sapiens
ggaacatgcacagtcaaggagagcttgatgataaatttactagtacttacagggcctattatgtttagccagcaccttttattgcctaaaggttgactgaattaagggaagaagtatatggctcaagaaagatcttccctggtacttgttaaggaaaatctagggacgcttgaagtcctcactctgcctccagcctgcaaaatctactgaataatggctcattccactagattccatctcacctctcaactggtagatatggtgctggttttggagatctttggctggtttttttggcacggtgttgacttacaggttcaaaccctctgagacggagtctccctctttcatccaag

SEQ ID NO: 90680 - DNA, 379 bp, Homo sapiens
aatgggatgctgagagcttatttcagggatctcagttggtcacaataaggccttatccctatgcacagagcagagtacatgagatgaaaatgaattataggggaaagaactcatttctaagcacttttaagcaatactgcatttttggcaaggtttatctcaatcttgctggtttttatttaatccttgcaaattgaattaataactaaaatgtgaattgatccagtactggacaatgtgaattttgctgtcagcagctttttaaattttggggctgcattccttacagatggtccgacatgcacttgaattaaggctcatgacctgggggcctgtgagtggacagtcctgtccagtgggttaccaatagttaaggact

SEQ ID NO: 90681 - DNA, 693 bp, Homo sapiens
aggaaaattaagtccgcccataatcctactacctagagatagttaaggtttaagtgaatttccttctgtgccttctctggataaatggatagacgagtgaatgatactataaatagttctctttctttttcagggcattttatattttattttaaattccttataaaattattttaatggctatataatatttccttatatgcatatatcatactttgttatttactttgacccagtaatttctcttaaggtattttcagaaaatgattaaaaatttgggcaaaaatgatgtgaaaagatgttcattatagtaattctagtcttctttgttctattttaatggcttggaggttaatattattgggagttaatttactaaaatttttacatagacctttactgattgcattttaataatttttcttttttgtatcttaattacaaattagcgcatatttgtgtttttaaaataagcaatacaaaagtgtctaaagtaaaaatgggaggcctttttctaaccattcttcccccacccccacccttaacgggcagctactgtaaacagtttctttctttggagcttccatatctttttgcgctaactcatactggaaataggtgaatatttaaagttggtgtatacataaagttattaacattgcatttctttggaaatattctacagcacatttt

SEQ ID NO: 90682 - DNA, 362 bp, Homo sapiens
aatgaaggctagaagcctgtgctttcctgtggttcttcttgcaaatttctcatgaaaacaaactattcctaaatcgctccaaatactaattcacatttttcaaaaatgccttctcccaggcagggcaaatctaatcaaaccccaatgcccagagaggttctcttggggcagccttgcatcttcaccccacccttgactcatacctttagttaactgtccctacccaattaaaatgagatgaagaacatgatgatcacttgcttacacacctggcttgctttttcgccggagtaaagcccacaccctgtctaataaacgtaaacaactttaatcactttgactgctttttatgtgctgaaatt

SEQ ID NO: 90683 - DNA, 372 bp, Homo sapiens
attaagaaaggttataaataataaataattgtggtttgtttttctttatttccaaagaaatagtcatttttgatttatagtatcatgatttataatgactcatacatggaattcaggtggacactaaatttctcctgcggagagattgcctctggaagaacatggcagtatatggggaagtcaaataatgagttttctctgctgttaataataccaactctcatttctcagtgtttctagaaatgttctatttgcttattcattctgtaagaagaggaagacagtattctcatttgaaaacatatcagtataggtttttattactggatgttgaatataataaagatataaaatgttcatgaggacagcatt

SEQ ID NO: 90684 - DNA, 391 bp, Homo sapiens
gctgtatacatttagcggatttttaaatccatgcatgttttgtaacttcatgaattattcatttcgaaaatactggctcactgagttacgtatatctaccaaacgcccgacattttggttatacagcatcagaaaattacatttgctaataccactgcaaagtttattataaaaatctaagctctggaacgctatcatggcggggtagatacaggttttccaaaatctcaatccttacttgaaaggccttattttatcattgcacaaagttactatcatttgctttccttaaagtgacaagctcattttgttaatcttcaagaaaatgtctgctaaatacgtacgaccagctagctatagttttctgtcagacgctctttcacgcttaatg

SEQ ID NO: 90685 - DNA, 715 bp, Homo sapiens
ctgcctatttatttttccctctgaaccttctggaattttcaataatgacctcaggaatacttttactaactcaatccttctgcattttgaattcacgacatagtatttgatattctgcgtttcaaactctcactgtccgtagtttaaaacacttgtggtcatatgctatcagtcactagttctttagtagacagtctgctttcttcatatattatctctgactaggaattccagagagatgcttttcacagtttcatgttccttccactctgaaggattctatcttaaggagtgttttcctgtccgatttataccggagccaccaattctaacaacattagctttccttctgtctgcctggctctttatgtccacaggcccaacagctctcattctcatccggctctggtttaaaactggcataaaaataaaaagatagctcactgttctctataggctttaggatattttatattccctattcttaattcaggaaatggggttatgcgacaccacttatttcaaaatctttttttcttttaccaatgagtttgcacattggagtccttctcatctaactctatctttctagtgggagtatatatactccccgctcctgggggagggggcgctttttttgcccctaaaaaaggggccgccctggccatgaaaagtgaaaaatttttgggggaggaaggggtggcccctccccact

SEQ ID NO: 90686 - DNA, 420 bp, Homo sapiens
catatatttcttactccttcaagtaagtttcacaagggcaggcccctatgtttttattgtgtactactgaattctttgcgcttagaatagtgctggccacccagcagacaatcagtaaatatttgttgaataaatagttggcccatttgatttggtccatcaaatcaagatggaatcaaatcaaaggaagatcctatcatttccagaaaagttttcttcaaggatatctttaaaaatcttctcctccatgtgttttgttttctttttcaggaataatcggttggcatatattagatctcctgtgtcttccaaatgtatcattttctttatattcatctttagaagttttattttttgcacttaattctacttttatctccttaagcctattcaccattggaaacatcctaaatgggttgg

SEQ ID NO: 90687 - DNA, 367 bp, Homo sapiens
gctgcatggtgtggggtgtaagtactgaagaaatctgagtgtacgtcacataacgaggggagttgactgggtgaccccagggtctctttagctctaaaaattcttagattgtgtgactgtggtactctgaagggcaggttttggtaatagcatcaggaccgagtgtgtgtgctcacacatgcacacagacacccccactcatgatccaaagcacagctggtggcctttatcggccttgacgagtgtccttttcaaatggagactttatcaaacagtgacatggcatgtgctgtgaaaatggtgactgttttgatgtcttccagttggctggctcccatctttccagagggagcactggacttctggg

SEQ ID NO: 90688 - DNA, 380 bp, Homo sapiens
catttgatattaaaggaaaaatgtcctttagcccccttctaaagaacctatcccaaagcagaccttatgtcctggagactgtgaaccaagcttcttggccaatagcaatgatttctaagacttcccttctttcatcagttctgctttcttcagttatcaccagccttaagtattaatttggttttctttctgcctccacccactcccatttcttctttctctgaaactatccccaattgccactagctgtatggttctcattatttcagtagttttttatggtttggagtttttttaattattattttgagatggaatcgcttgagcccagaaggtcgaggctgcagtgagctgtcatcactccagcctgggtgatagtg

SEQ ID NO: 90689 - DNA, 784 bp, Homo sapiens
tacgttgtgcttggcactgtgtgtaatgatctcatccattatcacactggtttctcatgagacatgtcctattgaggcatgccgagcttttgcccttttactaaatagcttcatttatgctgcttcttaaattcttatggctgcattttgtgattttttctgtctcccttcttattgtctggaaagctcttactcagcttctaattttctgcttttaatcttctaggtattaggaatcctgaaaaccatacttcagaggattatgtatcaagaaagttggggtctaggtgagagtcttgtgatttggttgaattaaaattaatgcagcacttccagccctgcagtcattcaggagtccccaacttactaccagtgggagccaggttgagaacacacagacctcccagccagctgtctctgtatctacagagttgaactggacttagtttttgtatgatatctcttgaatgaacaaacttggatattatggggaaaaactatgttttgattttataaatgttgctattgataggtgacagggaggaaataactgcttattaccatttaacgcgcctgaccatcccattaatcttgtacaaattactcttagactttcaacaccatgtaactataagcacatatcatttggttcaattcaataccgtggctcgaaaggatatctaacaactgttgtccctctggcatatcttaccgagagactcccatacattggttaaacctcagaaactgcattagcctggacgcgctgattgcccttgtatcc

SEQ ID NO: 90690 - DNA, 400 bp, Homo sapiens
aataccccaagataatatcaaataagataaagatgttttatttatagagaactcagaaggtttgattgccatagctttcctgccattcccaggtcagtgagtataatgtattccatattttgttgctgttttccagcactaaacacgtcagcattttgcatcggagtcattaaagtttgtgagatagttctgatgaatagcaataaggccagaaaaaaagaataatgcataacatgaattctttaggaaatcaattaatttttttatgagcagtagtaaaaataggatctagggttagcagagtgaggctagactagtatttggtaccaaaatacattctctgctgcgttctatctatgtaaaaatattctgtgctgagtcaaaactgaaatctcagttc

SEQ ID NO: 90691 - DNA, 366 bp, Homo sapiens
gcgtttttgaatttaaagttactatggcaggtgagaagtgaaacgcttcataagatgtgattgacatttttctttcatacgctttgggagacatttatatgaaacatttactttgatgtttaaaaaacactgattgtttaaaaataatctattttaataatcccaattgctttcatttaaaaatattcgcttatttggccatgataatcatttacaatagttaatgcgaaagttcaccgtagacatagatggttatcctttgatttcttcagctctgaaatggttaatttcatggtttctcacttaatataaagaagtaagaaaaataaacttacaggcttcttggccagagggtagagccctaac

SEQ ID NO: 90692 - DNA, 382 bp, Homo sapiens
gtggaaatagatcatcatagaggtcttcatccttatcttcaccttgagcagactgacgaggaagaagagggattagtcttgctgtcttgggtggcacagttagaagaaaatccacatataagtggactttcatccagttcaaactcatgttgttcaagggttgactgtatttacttttctgaggcaagttcaaaactttgatcagattctcagtcacccctgaaaaagttagaatcattgtttcagaatggatagcagggaggccatgggaatctggtttctggactttaccacttagttacatttccaacaaacttatttattgatttattttttagagacagtgtcttattctgtcatgcaggctgagcacagtgacacc

SEQ ID NO: 90693 - DNA, 490 bp, Homo sapiens
  misc_feature (1)...(490): n = a,t,c or g
ttcttttataattttttatgttactcaaaagagaaggaataatatctcctcaaactttgtttcacaaatggcctgttgatattgggagttgagtgggatttatgtgctggcttctgagggggtcaagggagcctggtggggcaggtgtgggatggcggtgggtgctgctccaaatattcccttctaaactgttcaaaatatttctgaaagttcaggttcagtaaatgctggtaccggttgttggttctactctcctccgagtccaccccagtggttgacacctccatgaaggtgggctgggaaaccttcccaggaatggtacaggaggaaaagtgtgagatcggccaggctgggtgaaaccctccccactccggcccccaccctgcangatgaaggagcagagtgggctggnggaagcagctgccantaaactttatatcatcaaccaccagaaggggaggttttccaggagactttatagctgatggtg

SEQ ID NO: 90694 - DNA, 840 bp, Homo sapiens
ggctaatgtaagtgttctgaacacatttaaggtaggctggactatgctatgatgttcagtagggtagatgtattaaatgcttttttgacttacgatattttcgatttacaatgggtttattggtatgcaattccatcataggtcgagaaacacctgtatttattatacaggctgtcccctggtctttggccaaggctcaaaaatgatcatgtttatctgggcatctacatttagtatagcatttatatgacagatactatcattatgaatatgcctaacatttggaggagccagtgtaggttacagatagatttaaagaaataactaattcatcctttaatgtttgcatatattttcatatttttgcacaaatttgattacctcacccctcttctttatctaccttgtggtaaacttgtgcagcactatttgtcatagaaattagttaatgattagctaaatttagttcctcctcaggcaagtcatgttccattagtattcattctaaggaggcttcaattcaatttccaatacatatgaccaatattataaccttaccaacaatgccaatattataccatgtcacaggatggcagtaaatgaaacctgaaaaataagagccaaagatactggcacattcatagagtgccagtcagtcattaacaattatcccagttcatcatcatatatgaccaaaatatctcccagagagaagtcactcaagtttacagacttctgtttagccttattaagttctaaaagcaggagtggcctcacaaacacttgacttttactctttcaggcatctagtataattgagctaatagtatcatctcttgc

SEQ ID NO: 90695 - DNA, 390 bp, Homo sapiens
gaaacttcgatgttgagagtcttgagtaacgctgtaaggtttcgtgctatgaggctatgaggctggtgggctttgtttttggattgcagatcaagtatgcattggggggaggtagatgactatactcttaagcagaaggatcaaatatgttgctgtgtaagtcccagaatctataaaccacctgttctattatatttgggtcagttttcattatcttcgtgaataggtatttcccatcttaatgcaacagtatttgcatatgatgaaccaaccagctccaacatggcttcttttgaggattctgaatttccattcaaatgatccgaagtcattcttatttgagatcacactgggccaaatatggtaactgtaaattcatttgaactataa

SEQ ID NO: 90696 - DNA, 378 bp, Homo sapiens
  misc_feature (1)...(378): n = a,t,c or g
ccctgcttacattctccactgtcattcaccccacacagaaaagtatctgtcctttctgttactatctctaacagagagagatggatgactaggagagccttcccacttctatctgagaagtgacttcctttccttctacctctatcgaatttctctataagaaatatatcatctggaaatacataagagacccaggaggataagaccaatgacattcatacttctattaatacattgttcttccatttcatcccttcaacagttctgtgatgtaagtattgttcgtaccactttaccaacaaagaatataaagctcaaaaagatcacgtaactagcataaattcatatgcctagctagccatgagacagttcagaatn

SEQ ID NO: 90697 - DNA, 384 bp, Homo sapiens
  misc_feature (1)...(384): n = a,t,c or g
agactgcatatggctcggcgtggggggggaactaaagtaaagctatgccactttctggatagatggcaaacttatctgtaatttccaagagactggctgccaacttaaaagtggtaatctcttcattcaccattcatcaatttgttcaatcattcagccaatatttattgagttctactgagtgggagggcagtttttggccctggacttacaaccacgggagatagaaacagagaacatgcctaccttcatggaatttacaggcttattttggtttatcaatgttgtgtctagtactcaaaaggggaaaaacagatttgtcttgaaagctgacaaagagaaatggaagaatcaattacccctgtattactgtgtggagaaatn

SEQ ID NO: 90698 - DNA, 852 bp, Homo sapiens
ctagcgtcccagcccgtgagaaaatgaatttctggaggtgaagcttcccaggctgtagtactttattatggcaggcgctagcaaacgaattcattcacagacccccagttaagaagaagcaggaggaggaggcaaaaaacaaattactcttttaagtgaattcatctcatgttaaaatataaaatatgtgagaatgtgtgcatttcattagatatggggagcttaattgaatcatcttttaaaagaaataatcggaatttagttctataataagagtaaaatcaagaaagcaggaaaagtctgaatttatattgatgtagtacccttgaagtagtatcatagaccggaaacagcagcttcattaaggccaaagtgtgtttgttaattagctgtggtcctctccagtgagccgaccaatagatgccatcaatgatgagagagcatggacttattgacgaaaagatgaagtcagttgggcattagacacacatgtttcctccgagggcggcagtactttcattaataatgaattctggctttccttatgtcttctgagcttcccactaatgctggaattattagtgtgaaacatgaggccttccggtaattataggcaattcagagaagctaaaaagtgggatcatgtattccagggaaaaacaatgtccagcatttttttttaataaatttcaactcgggtgtttaacacctttcaatgcaaggggggaaatgctggctctgggagctcactgggattaagaaccctaacggctattgggccgggggccctagaatgccggcgagtggaccttcgagatatgctttcaacatcagcaaccggcacaccccgcc

SEQ ID NO: 90699 - DNA, 847 bp, Homo sapiens
ccttgagtgatggctaggaagtcagcatttcttcatgagtagtttccattttcttcatgttcgtcttaggaaaaaaatcatttttaagcttacccaggagctgcatgtttaatttactatggcatctccctgaagctcaaaacctgcaaattgttttagctaaataccataattataggtttagcagtgaaaccaaggacttggtgggaatttttcatttgcttttgtttaaaagaactaaaaccagattgttcagggtaagaagaaacacaacaggaattttatttttactctcataaaaatgccagccatagtttgctgggggtaggagtctcggagacgagagggaaggaggagtcctgctgatttttctcccttttctaacccctttccatcccatctctccccttcctgtcccatctctccccttcctattccttttctccccttcccgttcacgggaatgccactttctcacagggcctcccccaccagaatcctcccatgttagtgagcacaggcggtgtagacggcctgcagcaggtggtgtggacggcctgcaggtacactcgttgcccagggtatctggtgtctctctggcttagctgtcgcgcctgtgctgcccatgactgaccaggctttcccagttcacagcggatccatgctactttgccttctcttgaaggaggaaaaagaacttgaataagaagttttccgtcagcgtaccaggaggaagggccctcaacatctccctccaagaatagaagcccggggccttgtgccctttgttccccgagcgacacaaactttggtcagaccatcgggctacctccctgaaccccattct

SEQ ID NO: 90700 - DNA, 1242 bp, Homo sapiens
ggcacgaggacttgccttcctacataggttgtcttcatacatatgcactgggaatcaataaaagcccatggtgagaatgaacatccccttaatgttccttactatccccaacccctgaggcctcacctactgccctgccatgtggagctacttgccctggggctgccagtcacacattcctcggtcctacttctctgaccccgtttgactctgcacctgagccctaatgcttacttcagtgacctgaactttgacaagtggcttttgtcctgcacctcaggtttgacctctgctctcccttgaccttgactgtgacatttgacctttggctttaatcattacagcctcagataaaggtaccttcagcccgggcacagtggctcacgcctgtaatcctagcactttgggaggctgaggcaggcggattccctgagctcaggagttcaagaccagcctgggcaacacggtgaaaccctgtctctactaaaatacaaataattagctgggcatggtggcatgtgcctatagtcccagctacttgggaggctaaggcaggagaatcacttgaatctataaggcagaggtggcagtgagccgagatcacaccactgcactccagcctgggcaacagagcaagactctgtctccaaaaaaaaaagaaagataccctcagggggccaggcctttaaaagctcacctgccaggcttcctccttgctccactgtcccatgtaattccatatatgaagctaccactgtacatctctcttttccggtgcctgttgagttgcatagaagcacagttgtgtttattttgtttttagggttgccatgggcaatttccgtgccacttttaagcagtgttgcactgtgaagagaatgtaggcaagtttatttctggaatggtttcttcttacaatcagaatagttaggatgtaatatatttttgagtgggcatttaaagtgaaaaggtacatatttacatagacacaggtgataatgtatctatgtaaatgccttttgattctgcaactgcaggatactctcatcaaagacacagataaaaagcctctgtgtttccaaggccttgccctatacctaacacataatatgtccaaatggatgaagaggaggcaaggacaaggatgtgatgacaaaacattctgttatgcacttgtagcatttatgtttcttcctgggggattttataatactaaaagaatcataatataaagagatgatt

SEQ ID NO: 90701 - DNA, 826 bp, Homo sapiens
tttattttgtatgagttaatcttaacactatttctcatctggaacacctacagcgagatgaaaggaatcacactgtcttattatttcaaaaacacatgatctggcattttctggactggtttaggtattctacaaccagaaaacatgtttggaattcttttactggtgtctcacctttttatagtattggtccatcaattaaatataaaaacttaattttgatgaatcttctttacttccttatgacccctgaaatgtagacaacccaagggtcacctcatgataagtgatttcatcaccttgtagcagtaaactgacactgtggtttagaaagtcatactaaccctagaccatttttcagttataagactatgttctatgaaaggtcaggtttgtttatttgtttgcttgttttgctgattgattggttggttggtgtttttgttattataagacttatttttctaagcgcagttttagatttacagcaaattggatagaagaaggctcagaaatttcccatatactccttgctcccttcccgtcccatgcatctgtactcctcctgtgccacaaacacattacattattaaatggttctcaaacatggagtttaaaaagccaaccgttccgtacgccaaaaaacgcacccacgggcctagcccgccccgcgtgcttcggtgccgcgccctaacaaccccctttctcagcctgggggggggattaattttttttgggggcctataccttccccccccccctttaacgacgcgaaagaaaaacgcggggcgcctcgactcttcgtacaaacgccctgccaggcgct

SEQ ID NO: 90702 - DNA, 455 bp, Homo sapiens
aataatttttaattgaactctcaaaataatttttaccccaaaggcatgacactgggaaaggataagaagtgtaaggagacagatgtacgtaaaacttcatatggaggcatttccccgctttactgcagaggtattaagatctataaagaccctggtgttcggcattttgccactcggcttgacctgggttaaataactgctgacaggtcattgtgaaagtcaagggcacagctgggacaaggcatctgaactcttggccttctgacccagcagcagagaatcacacatttttgccagcaccactggccccagggaaccagcagccaacactagcgtctcacccagtatcaccactttctccagcatctgagaggggatggcttgcatttggagccctatcataaggcctgaatgcctccagacgaaatcgtcggcccgggaatcacggaccggtc

SEQ ID NO: 90703 - DNA, 484 bp, Homo sapiens
ttttttttagctgtatcttgttcttttttattgaacaataataaacatgtccttttaaaacaaaacctaacagcttatgcagctttacattcaaaggccttcccacacacattcacaactctgttggccaacttcaagaataaaatacaggtaaatactcgaaataattcttaaataagttcttcacttcaaataaaatacttctgagatatttcctaagaacatctagtacaacagtcctgtttgtgctaagattctttcaaatatactcctaattccacttatcaaccaagtttaaaagaaaaaaatatgaaaataaactatattttaaagttgacatgttttctgctgaaaattgattcttcttttacaaacctcctaaaaacttattttctaccttaaattgaaaattcacctaagtcacagcacttatgtttaaataaggaccctctgttgctcattttttgatatttttgaaatccag

SEQ ID NO: 90704 - DNA, 447 bp, Homo sapiens
tttcgtagaacacttaatttggtctatcacttttccttttttttctgagcaaaagtatcttcaaagaactaaaaaaaaatgtaattctaacatgaggacggcctgctatcttatcttctgttttccaattatatctgccatctcagttttaagatcaacaaagaaggtggataaagcacttgtgaaattatcagccacactgagacaacagtattctcagaagtaggagttaaggggtctctgaaataagagattaatttatttttaatctctgtcttttttaaggattggatttttgaccaatccatttcaacaggaatgatctcagagatagaatgtgaggtgtgcagctctctcaaatgttgatcattatattttatatcattttgttaattaatttatatcgctttttcttaccgagttttagcaccttcatgtcctacaaag

SEQ ID NO: 90705 - DNA, 434 bp, Homo sapiens
  misc_feature (1)...(434): n = a,t,c or g
tttcgtggaatctttataggcttatctgcaagttgcctttgccacagtgaaacgaatccatgtacagaaagactgacaatgcacccaaaagtgatttgataatttacagtaagaaatattgtaaacttatcttcaaaataatactaatgcattacttttctttatagctcccgaaggcttttaaattcattatctcattttggaacctcttggctattgaacaggatgactgaatttattttaaactgattctctatttatcagatgaaaatacctgaaaggtgaagcaggacaggagactatatcctagttgtgaaaaataacatactgttagcagttcttcatatctccttcctgtcttttgtatgcatgcttatactattgagattatatcggatgagccatttaaatgcttacgttctcattatttctgn

SEQ ID NO: 90706 - DNA, 760 bp, Homo sapiens
tttcgtgcttccgggagggcggctcgcaggcaccatgactcctgtgaggatgcagcactccctggcaggtcagacctatgccgtgcccctcatccagccagacctgcggcgagaggaggccgtccagcagatggcggatgccctgcagtacctgcagaaggtctctggagacatcttcagcagcaggtagagcagagccggagccaggtgcaggccattggagagaaggtctccttggcccaggccaagattgagaagatcaagggcagcaagaaggccatcaaggtgttctccagtgccaagtaccctgctccagggcgcctgcaggaatatggctccatcttcacgggcgcccaggaccctggcctgcagagacgcccccgccacaggatccagagcaagcaccgccccctggacgagcgggccctgcaggagaagctgaaggactttcctgtgtgcgtgagcaccaagccggaggccgaggacgatgcagaagagggacttgggggtcttcccagcaacatcagctctgtcagctccttgctgctcttcaacaccaccgagaacctgtcccagagaactacttctatgtgccagacctgggccaggtgcctgagattgatgttccatcctacctgcctgacctggcccggcattgccaacgacctcatgtacattgccgacctgggccccggcattgccccctctgcccctggcaccattccagaactgcccacctttcacactgaggtagccgagg

SEQ ID NO: 90707 - DNA, 1142 bp, Homo sapiens
accgctccgttatttccgggtcgacgatttcgtcccactgccaatcccaggtgatcatggaccttgatgtaggcaggaggagaaggcagtttgcgtggagttttagcacggtgggtgctgtatctccttttcagcaggcatggggcggtggcccagtgccttggctgcagacgtctccctgtcagtgcagaagactcaggtggacaaccaaagtcatggaagtttgggcccttcgcctggcagagagtgggaatgggcagtagagatggatgtttcccagccttctgccccactcttccacgagcacccaggcctccagctattccccagtgtcagggcatcatttttttgtaggtgggaaacattgttgtaacaagtgaaaactccagcaaggaaattcagttgtctagttaggtgtctccaaagtctaattagaggggctacaacgtatacctgtgacctgtttcttcagaagccactttggaggaaaacatcctctcaggaggactgtccaaaagaatattctgcaattctggaaatattctgtgtctgcactaacccataggggagccccccagccggatgtggcaattggacatttgaaatatacctgaataactaattttttttttttttcttgaaaaagggtttttttttgtcccccagcttgaatggcagggggtaaccccaactcattggagcttaaacctcttgtgtttaagcaatcttccaccttcaccctcccaagccgttgggaactacggcccaccccactacccccatttattttttttttttttgtacaacggacttaattgggcccttttaaagaatcagctttagtacgcgcgttgcaaagtataacttttaatgggcccccagctccatacgggcggggttataacgtccaccgggaaacccccgcgtcgaagcacctcactgaaaaatccgcgtcggcgcgggcggggctaaaagtcccgctcccccggccgccgctggtgcgcgacaggaaccacttatttacctgcttgcgcgggctggccgagtcaacatcagattctgatctgcccaccggctgttgcggcaaaaagggccaacgccttctcctggatagggggggcggcgccggcccgccaagtccc

SEQ ID NO: 90708 - DNA, 435 bp, Homo sapiens
cacgaggaaaaatagctcaagctgccatatctgaatgtgattacacatagtgggggaacttgtctacaataagagttctgagacaatgaagctggtgacacagataaacttgttttccagagtggtggtggaagaggagggtatccttagtggtgaaagagttgcttatctcactgtgttgctttcagtgttattcatgcttgaaagcaaacttttgtttgaaagatttctcaaaactctaaagcgtcttttctgtcatgagaaggtccctaagccacagcaatcttgaacaagtctctaagccttagtttcactggctgtaaaatgatgataatactggaattgcaggattgttgtgaatcttacagatgatgcctataaagggcctagcataataggctattttaacataagaatgttaatttttgtaattcc

SEQ ID NO: 90709 - DNA, 866 bp, Homo sapiens
ctgcgctgcaggaattcggcacgagtagagctggagggttctatttaattccgtttttccaatagaatatgtatatatgaaacaataaggagacaactacgcattttgttccattatagtcaggactcatgcgacttctccattacactcagtttcacagggtggggaaaagtagtcatcagaaacccatcaaaatttggactatgtgtccctaaatcatttagatagttgtctctgatgttagcaaatccagctgaataatatgaacatcagtgtctcctccatcccaaccctctggatttctcctagctctgtcttcattcaagaactctactcctcatccttgcttccagccctctgtttttatcttctgtccttaatcaagcccacggtgaccatcaccagaggcagtctcttttactgcatagtcaaagccctgtcttgtcttccctcccaaggatgcttctatgcttttgagaacatgctgacattttctggttgtgtccaaagcaacacattctgtgtgtgctcaggacaggggacaatagtctggaggggtgaatacagaaatgtccagatgccaatagctgcagaatatgcagcaatggaaagtatcagtatccatacaaagatttttcaagaaaacgaatgggctgagccaagtagctgagattgagaatgagttcatagactgtccaagatctttatcccaaaaacatttggattgggtaatttcagtatttatcctcttttcctactacctggatactcccaattggcatatacttggaatattaaaaacagttcctttggcaaaatttaattggtggcttctaaaaaaaccccaccttaatggagttaaaaat

SEQ ID NO: 90710 - DNA, 432 bp, Homo sapiens
cgttctgaggaattcggcacgaggctgtccttggtcctgtcctcagttgccctggagccaccataaataagacagtcttgagcgtggccaagtcatcattctcacccaacgttgaaacccttctctggaggcacatgtaaatgatggtgaagatgtatgccctggagagcataggaaggcatttcagagggtgaagagaggatcagaggtcaggcagcagggctgaatgcagagtattcatgggtaatgataggcccaaaggaaggtggagctgctggttactccactgtcctctgtgcaaattgtaggggcttcaccactttagttagtgttgttcatattggcttaggccacaggcgaatccctcattcattcagcaaatgtgcgtgggtcctactatgtgccaggcactgttctgggcacttaggatac

SEQ ID NO: 90711 - DNA, 427 bp, Homo sapiens
  misc_feature (1)...(427): n = a,t,c or g
gctcagcaattcggcacgagagagcttttacttactgaatcgataacttgctttgctctctgccttgacttggatcctctactctggtgcttgattgagcagcagaaccatgtggggtagaaagggagtgggggagaggtgcctttaaaaatgcatattcctagacctcacccgagacctgccaagatctgtggaggacctgggagtttgtgtattttaaagctatcccccttgccctggaatgatggtatgcagtggcagtgggcatttggagtggtaggcaccttagtcagtattggatgaatgttgactgaccttatttaataaatgaatagcctcttacctgcagcctcaccagccctgtgccccttcatccacaggtacacaccccgggacacacaatccttactttaagaaaccttccttn

SEQ ID NO: 90712 - DNA, 1296 bp, Homo sapiens
agagagacccttccagctccccttgttagcccaggaagcccagggaccagtgggtccccccgaaagcccctgtgcttgcagcagtgtccaccccagtgtctaacagtcctcccgggctgccagccctgactgtcgggcccccaagtggtcacctccccgtgtatgaaaaggccttcagccctgactgcttcctgacactccctccttggcctccctgtggtgccaatcccagcatgtgctgattctacagcaggcagaaatgctggtccccggtgccccggaggaatcttaccaagtgccatcatccttcacctcagcagccccaaagggctacatcctacagcacagctcccctgacaaagtgagggagggcacgtgtccctgtgacagccaggataaaacatccctcaaggctgggtgtggaggctcacgcctgtaatctcagcattttgggaggccaagtgcggacatcacttgagaccaggagttccaaaccagccctggcaacattgtgagacccatctctataaaaacaaaaaacagtccactaaatcagccacattaattgggaatcatatgtcacaggtcatttgtggggcaaacatcactgcttttccatcaagggagcaaagaataagtgggagttttggaagagtttggatgagagacgccaaggtgcccagcgttcgtaaggcaacatgcagcctggcgtgaagcagtattttgaaactgcaaatggttcccttcttgtgtcctttcaatgctgaatattttagtgtcattctgcctgtgctcagagctccagcagcagaagtgtgtgtggttaattaggacacttctgtgagaggacccctgcacacattacgacaggtccctaaatgagcatttcccaaactaggttccccgaggcactctacggaaacaagatttttttttttgagacggagtctcggtctgtcacccaggctggagtgcaggggtgcaatcttggggcaatcttggctcagggcaatccgcctcccaggttcaagcgattctcccgcctcagtagctgggattacaggggcccaccactgcgcccagctaaattttgtatttttagtagagagggggcttcaccatgttggccaggctggtctggaactcctgaccttcaggtgatccacctgcctctgcctcccaaagtgctgggattacaggcgtgagccaccgtgcccggcccaaactactttttaaaacagctacagggtaaaatcctgcagcacccactctggaaaatactgctcttaattttct

SEQ ID NO: 90713 - DNA, 1344 bp, Homo sapiens
cagtctgttggaattccgggaggggcggggaggtggacgcgggtaccggcggtcgtcgggtcggcagcctttggtcagttggcagcggcaagcgcgctgcggttccggtggcgccatgtcgttctgcagcttcttcgggggcgaggttttccagaatcactttgaacctggcgtttacgtgtgtgccaagtgtggctatgagctgttctccagccgctcgaagtatgcacactcgtctccatggccggcgttcaccgagaccattcacgccgacagcgtggccaagcgtccggagcacaatagatctgaagccttgaaggtgtcctgtggcaagtgtggcaatgggttgggccacgagttcctgaacgacggccccaagccggggcagtcccgattctgaatattcagcagctcgctgaagtttgtccctaaaggcaaagaaacttctgcctcccagggtcactaggcgggcagcccacacccaccccagacggccaccacactgaggccacacgttggccattccaccttggagttggaaccctgggcgtcgagacaggaaggcagggcgcagtggttgaaacatcaggacactcccaaggccccggctctgaacaagaccttttcgtttcttggaaaagagactcatttgctgatggttcatgccttctgctgggacaggcctgggctgtgcagccacactgtcggctgacttagccccctgctcactctaggtgcctccaggaggtgagccctgggtgcagctggtctctgaatgacgttacaccctcaccttcttttcctggccctgtctctggactctcccctgtgaggcccaattccaagacagactctcgtcctcaccgaagcttaggcccacatctcccaggctgcttaggagacagaatggaaacggaggccgcccctgccagccgccctggccctggtcactgcatgatccgctctggtcaaacccttccaggccagccagagtggggatggtctgtgacctgctgggaaggcaggctgatggggcacacccttggcctctcgtccacgaggggagaaacctaaaccctgtttcacaatctgtgcggaagtagcttgcctcacttctgcttaggaaagcggctgttgctccataactctaaccagcacagggctgaggcctgcagtgcacacctgcagggaggcccttcccaaggtgtggtgactgtgccttactgtacatgctcggaggcctggccatataggagggtgggtgatgctgaaatcaccccccatcttaagtaattactttctggagtaatcaggtggaaatccatagacaaatgaaaaaaaaaa

SEQ ID NO: 90714 - DNA, 908 bp, Homo sapiens
tacgcctagcttggcacgagggaaggtgttccatgttttatgttggttaaaaagtctgtacgcttattaaggaaaaaaattagtggcagtgctatttatattgaaatgtacatatacatttatttacttagtctactacagctttttttatgtggcatctaagtgctagatgtaaatataaagatatttggggagaaagacagacacagaggtgtctacttccttaaacaaacagcagccatatctgtggttgtttctaatgcacagaagggctgaggagaccaggttgggatgacagcaaagctttgcttagtacaagtatttctgtgtaatgagaccatgatctcctgagcagtgactgacaaagtgggaagaaaacaccatgagtgatgtggaattaacttcagctcccagaaatatggatatcttgggaacacttccctgctgaagagaagaacgtttcaacctggttctctttggtattttttttttcctattttaaactttcacagaaaggaatgatcagacagagcaggaaaaaagaagagaattcagcccaaaattgaccagaaaggcaggaattcgtaaagaattaattgagtacaaaagtcttgaatgggaggtacatgcctcaggcaagcccttgacaagatttcacaggccatagaaaattttttttgaaaaaaatcgggggtaaaatttttggaaccacccccggaactttcttcagggaaactttcctggaagttagacttatagactacccctaccctggtggggttgcggaaaaacagtaggattcccccccccccaggtggctattctttgtcccaacctttaccttggcgggagggcggcacccaggaggaacaaccttgccttcccttcttttggagggcagaggaacg

SEQ ID NO: 90715 - DNA, 439 bp, Homo sapiens
ggagaggatagcctacgaggagaccgaagcattagccggatacatgaccggacaggctgagtcgagaaattttctgcttttcagccttaaagaagcacaagaacggaaaatgatcactgtagtacctcacatgtaacccatttcacttctcttaggcttagcagttttaagctgggcatgcttcctaaataaagacaaacaccaaaggacttctgcttgcagatcaatggggtaatttcttggaaattttttcccacctttatgtctgaagccaggacagaatttcttagactaaatttaaatttactttatgataagattggaaagttgcttactgtccaacacagacacatatgccctcttttgtttgcatttttaaaaagtacgctattttagatactatggttaaaatgataagcatttgtcttagaaatatctc

SEQ ID NO: 90716 - DNA, 451 bp, Homo sapiens
  misc_feature (1)...(451): n = a,t,c or g
aaggcagcgtaanacctntgnaaagagaaagggacgaagcctagatacagcatgctgacgcttaggtttaaaaaatacacatatgcccacatgcataagcttgtatatgcagagggtggtctttggaagggaagcctataaactgccaatagtggttacctatgaaaaaggaaatgagggcccaaagggagggggacttcttctattggatttcctttttattatttcactttcttattagctttatgtattactagttatatgtattatgtttcccaaaagggtaattaaattccttttatgcagctttccttaggggatgagtgtcccatctgaatggaatagccagctttcaaggaataggaaggggcaagaggggtataacatggagaatcacaatggaccaattaccgaagattttcctgattccctggaatctcctccagcacag

SEQ ID NO: 90717 - DNA, 757 bp, Homo sapiens
cggggaggggaatgctgaataataagattactcagagctactaacgatcttgattcagtaattttctgcttaaaaaggcacttcgaccttttccaagcccagatgtatgcgtcttaatggaaggtcattcccatgcacagcaaatgcagcctagatttataagagaaactgatagattcctcagccgagtgagagggatgacacttctcctatttattgggtaaatgatctattttatatggcactatatgtacatgcacaaatgcataaattacgcaaaacagtctcggcatagttaatgaacatgcctgaaggctaataaaaaagtgcttaactagttcttttattttctcctttatgcataacagcattttacttaatagcataaatcaaactgaaggaccatctgtattaaaacttaaataactttttggggctgtgtgtaggcataaaataaagtgtctagggtagaaagcatgttcagatcgccctgagatgaaaggcttacctgcaatctgtatttctttttcaggattccttcttacttaagatgagtgtaatattaaagaatattcaattatcttaacggttttgcttttttcttcaagggcaataggcctgggtggtttaatccacgctgtaaaacaacccattcaccccttgaaaaaaaatagtgggcgtttaaccacccccggggggaaatacaggcggggggccccgaaaacttaagggggggttttttttacccaaagccctg

SEQ ID NO: 90718 - DNA, 515 bp, Homo sapiens
aaaattttagtgtttaacactataaaggaaacattgaattttaatctctttcttgtcattttctcgcttttgactaaaaggagacccccaaagtgcccctagtcccacctgatcgcaaccgctttaagccgtggctctcaaatgaacccatccatccctatcccgtcatttcttggctcgaaatggaccccaactgctcctgcgccactgggggctcctgctcctgtgccagctcctgcaagtgcaaagagtgcaaatgaacctcctgcaagaagagctgctgctcctgctgccccatgggctgtgccaagtgtgcccagggctgcgtctgcaaaggggcgtcggagaagtgcagctgctgtgcctgatgtggggacagccctgctcccagatgtaaacagagcaacctgcacaaacctggatttttttttcatacaaccctgagcatttgctacattcctttttctattaaatatgtaaacgacaataaaacagttttgacttgaaaaaaaaaa

SEQ ID NO: 90719 - DNA, 374 bp, Homo sapiens
ggttaatacactcaaggtctatcattctcttggttgtaaagcggcacagaaattactagctatttaatattattattatattagttcactttaatttacactaattttatagagaaataaatacttttaaaaagatgttttccagcagcctgagaatgactacaggatttagcagtagtgtcttgttttgaatggcatttaaacacttcagtcatagttttaatttgagaaatcaggattcagatttcctaagcaggcagtgtatcagctcttgtttttttctcagattaattattttgcagtgagattgttgtctgtacttttggccaaccgtggcctcaaattatttgagaattaggtgttgtatttaaaaa

SEQ ID NO: 90720 - DNA, 525 bp, Homo sapiens
ggcacgagttgctatgtcattgaaagtgagttttgttattagctaaatcataagatgcttctaatatttctttgttcttactataaatcctctattagtaatgcataaaagcatgcaactccaaatgtatactaaaacaaagctttgttcatgttcactccctcagggcagaatttgggttttcctgctttggggtcccgtagggctttgtccataactctgtctgcctgttgtatttaagagccagtttatataggtctgttctctcgcctagtctgtgagctgttccagggcagagaccatcttacacacttctgaatgtcagccacttagcccagtaccagatatgggatggaatcagagtcattttttggtggaactcattttaatctatcagcttcagcaattcactgtccaacagtgccgtttgtagaccccccaaaaagtggggaaaaataaacacacccactaaaagaccgattgtggtgaccagctggagcaacctgcagggatattttaggaggg

SEQ ID NO: 90721 - DNA, 371 bp, Homo sapiens
  misc_feature (1)...(371): n = a,t,c or g
catgtaggtgcttcatagtcacacatgactggtggctatcatattggacagggaagctggagaacatgggtgcctggtcaatgtcctaaagctcttcattaaagtgtgaaggacaatgcaaagagagagattcttaattatttgggggtgatttgagagagattttgaaaatgtcctacctcagtatccttaccaacctgctctggctgcgataggcattagacgtctgaagagaaatacataaatttgagcccttaaccaggcagcatgaggcctttcattgtggcatgcctgctaggccttgcaatcatcactatcagggctgcttctcctcctgatgggactntagaaagcgccaggnttcacttgag

SEQ ID NO: 90722 - DNA, 404 bp, Homo sapiens
ttttttttatgctaactctgatacttctagatttttcctatcatctttagttatgaaatgaaagtgataaatattagaaaattaccactattatagtaatgaaataatgagtgaaatcaatactttacaaagtcctttcttgggcatgacgtcttctgattctgacaattttgtaaggtaggtacggcaggggataaagcttccattttcctcagatgaggaaattgaagccccaggaggttgtcactttccaaagcatatatagccagaaagtgccaaagactgtatcggaaactaggacttctgacaccaaaacttatatacttttatttttaaaaacactaggctgtctacttatgtctatgaaataatcttagtggatcttagtgtgtctttttaacttt

SEQ ID NO: 90723 - DNA, 794 bp, Homo sapiens
taccaatgcatctgtgatttgtgccacattactgggctaaatttgaagaggaaagctcggtcaaacattcttccagcttgtcatcttggataggctgaatgggaggtattttcaaggtgcatggtttgttgccatgtgttttttaagtagatctgccacctctagcttgactttaggttaccataaagctgcagaggtcacttttctgatttgtcagggccgaacacctgaagcatatatttcagttttcataacaggacctctgatctttgtcctgttatattgactggtttcataggagaatatatttttggattgagttttaattcttcagtagcagctgaataataaaataacgttgttacatttatgattcagcttaatgaatgattacattattagtattcctgcctgtgttttttgtttaaacatataacgtctttcaagaatagtgtacatatctgtctgggcactgtggtgcatgcttataatcccaacattttgggaggccagggtgggtggattgcttgaggccaggagttcaagaccagcctgggcaacacggtgagaccttgtctctacaaataattttttaaaaatcagctgcgcatggtggcatgcacttgtaatcctactacttaggaggtggaggcgcgaggatcactctaccccacgacgtagaacgtcgccggcgctatgaatgccccagtgccttcattctggggaacaccaacaacctgcccatacaaacaaaacaacagcactctcattacccgcccccactcttatccctc

SEQ ID NO: 90724 - DNA, 1627 bp, Homo sapiens
tctgtattatataagaaaagaactgataaatatttataaaatgacaaacttggaccacaggctttcttgaccttgtacagtatagtaaaaataccctttacttctgacattaaggtcacgtcctatagtttgggggctcttttacttcaaaggtgtgtttctgccctcttttggttgtatcaaatttatttgaaaattgttttgtgctgtactttatgacttgtttccctatggtggtaaagaatgatgccatagtcagttttattgacattgttagatgaaagaaaagtagctgtcaacaaggggaaagtgaaattgagcaattcactgtttcaggatacttgaggatctttagtgtactgctgactctttttcttgttttgtctgccattcttgaaagtgcatcttgagagcccccatttgttgtgtagagatatagcagctgaagcaggacttcattccagatagctgtgtgcatttatgtcatgccaattactataacatttccaaagtatgaaaggtctttcaggcttatgcatgatattgtgggtgacttcatgccccagcctttctccccagcatacagtgagctgccttttggggagcaatgccatgataaggagcatacgtgcatgttttccgtactttcagaatagagtgccttagctaggccagaggctcgtattgtgtttctgctgaccaaagttgcatacacctgtaaggaagtgtctttttaggttatggtattaaaaaaagtcgtttcaggcttatcagataataattctcccaaaatttgaggggggcctgggattaaaagatttaatactacctggatagagaatggcttatgcggccgtttgcgctcctttaatattatccatgcttttataaagtgcagtacacattttgacattgccacagtttacagtgtcattcttccacgaataggtaattgatagagtttatgggtcttagtcttaagggtaacagagtgaataccttccaaataaaaagctaaatattcctccttgtcattttaatgtcattattgaaatacttttaattctaattttcaaaagaaagctaaatgctgattgtggtttaggatgttacagtactaataccatcatgttatttattctaatatagaggcattgagaggaggggagtgtatgtctagagttaccccaattctaaataggtaccaaaagagtattgattatgacctggagcctgagctttgggagaatatacaaaggaaaaagcaggcatagtttccactttaaagggaagaagggactttaacatcctatgaatttgaaacatcctatgaatttgaaagtttcctaagtgttgttttcaaagaactggtttattttatagtcagtcaaaatgcatttggaatgtaccttgcttccataacagactttgactctatgacctatgaagaataaaaagataatctgaaggtgtttgagtcagaggctacttttcccctttatattttatatagaagcctatttgtaattcttcctcttcgttcttcacctgggtttcctcttatctacccaccacctaggacagaggctgcccactcaggtcttgccttgttgcccctagatgttgc

SEQ ID NO: 90725 - DNA, 359 bp, Homo sapiens
agtacttggaaaaaaaaatgtcaggagggaaagagagaatttcataactttgcacagtgtactcaacagtgcatatttaacacattgcctgttgccctgaaagaattcccaatcaccgcatgagtcgattgtgatgaccgagacttgttctcagactagtgatgtagggtttaaccaaaaaatgccattgtccttactgaggaggatttatcccatcaaaacggcatttgagaacctgacagtgggatactgttgtttgcatttactcttttttttaaatcatattttgatttattggaaacttatatttcaataaaaaaaacctgctcatctttcagtatcaattatacaactctccc

SEQ ID NO: 90726 - DNA, 796 bp, Homo sapiens
gtgggtttagacaaatgtataatgacatgtccaccatggtagtgccacacagtcatgtcactgccccaaaaatcctccaagctctacctactcatccccttcctcccctctgcccgctggcatccaccgatgctcttactgtctccatagttttgtttttctccagcgtgttctgtagttggaactgtgcagtgtgcagcctttctagactggctgatttagtcgtatgcttttaaggccccttcatgtctttgcatggtttcctagctcatttcttgttatatcctgttgtctggatgtgacatggtttatttatccattcatctactgaaggacatcttgtttgcttctgagtttaggcaatgacaaataaagctgctgtaattagtatttttcatgtggacgcacgtttccagtgcctctgggcaaataccaaggcgtgcaattattgcattggatggtgagagtatgttagtttagattttcaggaatctgacgacgccgcaccattttgcatgttcaccggcagggaatgaggttcctgatgacgcatgtcctcaccagcccttgacgctgactgcctcgaggtcctccaacccaagaagtcctctggaacccacaaccgaggggcttcccacgctgctcaccctccagggaatggaaaaccccatccacctcacccccaagaaccccatcactggcacctcccatgcacctccaggcacgctccactccccttcagccacgccaccgactacccgccggccgacctgtcgtcgacccccacacccacacc

SEQ ID NO: 90727 - DNA, 682 bp, Homo sapiens
agtgtggtggaattcgtaatacctgctaatacttgttgtaatctattaacattgagaaatgtaaaaatttttattaattcacttaaaatatcaataaacccattatttgctaatataaattgcactttttaatgaaaaataactttagtttctactgtgtgcttctgcattttgaaaatatgtctaggatacggtatgtatttaggagatattttctaaataaatgcatattcattttttaaaatgggacaaatgtagcatagacatatttttgctaacaatatccatatagttgcaaatttcacttttagaatttgctttcaaaaacaggttgtttattcttctttgttatgccttagttagtaaatcatatattataaaacttcttcaatgcaattggtctttggtcagccattgacataggaagagttagaaagagtccagggctccttggtactggctgtgactggataagtaggttgtggcttagtttgtgtttaggtgtcataactaggctaggtttgggtcccagaaagtgctagccttactgtaggagaggaagtggtcttgctgggcgtgccctcttgtcagggaagcgggacccatgcacaatggaaaccccaacggggtcctttcgacccggcagaaaagcgacagctcccccgcaccggacccgccaacc

SEQ ID NO: 90728 - DNA, 366 bp, Homo sapiens
gacagttcatatgcatggaatcatataaagttttttccatgtctgcttttttcttaagttgacatataataattgtatccatgtccgcttttaaaatgcaatttgactttcacagtttagctgaatgctttcactttcgttattttaatgagagttagtgtaaggaaaatgagaatttaccaaatttttaaatcatgtcacctggtattttatctttacactcatgctttcaagtgaaaattccagtgcattattttcctcaagagaaagcagtggcagataagtactttctaatttttttatatgtcactcaagccgttggaagcttcataggtaaagcataacttaaatataagtttattctag

SEQ ID NO: 90729 - DNA, 332 bp, Homo sapiens
  misc_feature (1)...(332): n = a,t,c or g
annnntngnngggtgacatgcttagcgcatggccaatgcatgtttgctatcgatcgtcaatagaggacaattatttaagaggacttaggaactcactgttctttttatatcatggtcttacgctctggctgggaacataggtggagagactgacctaaggaaagagcttcacagtatttaagcatcagcttgcgacaaaaacgcaattgcactctgttcatctgagctgaggaagcactgaagtacgtaaggatcacctattggagtgccagggccgggtaaggttcacctaagggagtgccagggccgggtaagggtcacctaaagtactg

SEQ ID NO: 90730 - DNA, 335 bp, Homo sapiens
  misc_feature (1)...(335): n = a,t,c or g
agnnccannnnngccaggctcgggttgttatcaaagactgtgcctctcacacctgttgttaactgcacattgacactgagacagcggcctttattttaatgaacattcccccaacacagctacaaggactgaagtttctgacctagctttttaattttcaaattgttttccagtgggaagagctgatggcgagaattctcttagtaaagcctctgatcattttaaatacagaacctgaaaaaataccctttaagggtatgatattaattggggcttttcagagaaacagaattaatggaacatgggggggatggatggacagacgatagagatag

SEQ ID NO: 90731 - DNA, 315 bp, Homo sapiens
ggaggggggttcagaggcttccaattgatgttcctaattcagtggttctgacttcacagtcatgcccagcctacacttggccattccattttgagttatgagtagaatgagtttcctgtaaaatgttcctattgtgggtgttttaccagaccagggccaacaccttacatggagagatgaaatggatgtgtaaagttaacttgctgggacagaaatctttccacacgattgatggtgcgggacatggacagagtggggtctgtgtaactgactccttaactccctctgccctcctagagaagagagacttccaga

SEQ ID NO: 90732 - DNA, 370 bp, Homo sapiens
tctgcgaatcttccaggaaggcaggatggattcactaatttggtacaaaaggggaggggggttcagaggcttccaattgatgttcctaattcagtggttctgacttcacagtcatgcccagcctacacttggccattccattttgagttatgagtagaatgagtttcctgtcaaatgttcctattgtgggtgttttaccagaccagggccaacaccttacatggagagatgaaatggatgtgtaaaggtaacttgctgggacagaaatctttccacacgattgatggtgcgggacatggacagagtgaggaccgtgtaactgactgcttaactacctctgccctcctagagaagagagacttccagagat

SEQ ID NO: 90733 - DNA, 407 bp, Homo sapiens
gcacttcagtgctctagcaagcatttattgtgtgtgcgcaatgtaaatagaatacaatgagctgaaaaattctttacatccccagtttggttttgacagctgtgatggaatttaaagtagtttgatatttctctaatccaatatcctgaacgtgctcttcccatttggccccgaggcgtcatgtttcccgctcaccagcagatggcggtgttggatgcggtactggccttcgacctgcggttcctggttacgcggaaattttggagaccctggagccgcggtctgaatcacatcacctccgagcaggaggcccgtgttgagaactgtgttctaccgtcttcttttacggtgagaacccagacccagaaacggcctcctgtcactcggcccctctgagaacagctccc

SEQ ID NO: 90734 - DNA, 672 bp, Homo sapiens
  misc_feature (1)...(672): n = a,t,c or g
aaacgaattcgatctaggacccggcgatctgtgccttggttactccctctgttcttctgctgttttgttcttttggtactttgcgcattttgttcaggtcttcgttcaacacgccaagaaactggacaactctatccagtaacattctgttctgaagccacaaagataataagatgcctgtactgataagaccagggggcattttcttacccccatcttgacactgccggtttctgtttcgaaccccagtccaccccacagctccaaaccaccctccctgcctccacctacagctggcacctgctgccgcgtcgacgtggggctgccgctgtgatctgagcccgggagcaggaaggtcaggccttggtgcaccggctggccagtccagacaggagtgcctgcctcactccaggactatggacagcacctgtgatttgcagggcctttcttaaattaacaaccacaaggcttatttcctaaagaaccttggaccttctctagctccctgaatttccaggcctagccttgcaaatgattggggtgctcactaagacgangacctgcatttgttttttaaaaaaagacaagggaccgggcgcagtgctcatgcctgaatcccacactttgcgaggcaaggtggtggatcattgagggcagagtcatgacagcctg

SEQ ID NO: 90735 - DNA, 460 bp, Homo sapiens
  misc_feature (1)...(460): n = a,t,c or g
gttttgcccttcttactgccgccgaatgccagtccttggtacatgcccgcagatcgattggcggcctgaccaggcgtctccccgcccagagaggacttgatggagttgagtttggcccgcgatctgccgatctgtgagctctccaccatcagcaccgcggccagtaggagcaggcagcaggacgaatccttgctccgcatcaacgcggccatctcccggcgagggggtccccaggaagacgcaaagcccggaggggtgggaatgcaaagggagggaggaccccaacacggggcccctcacttgggtcgcgggggcttgcagattgtgttccctcaacccttcctggttcggggacccaggaccctatgaactcagtctcacgcatcaggacagaaattagcggaacccaagcgagacccgcacgagatcgtcgatnnnnnaaaacggnacgtggatcatc

SEQ ID NO: 90736 - DNA, 534 bp, Homo sapiens
atccatggtgtcacatccgaagcctttgcagttcctttcttcatgattatttgcctcatcatgttttacttcattgccttagctggagcacacaaacgggtggtcatccagctccgagagcagctatccctggaaagtcgtgacaagtgctacctaatccagaaactaacagaagcccaaagggacatgaggaactaactagactgagcgtgaagatggtgctgcctgttgcttctaagctgacctagtgattctgctgagcctacagagtctacctgggttttgagtggacatttaaaaatatatttttcttgagtttaggcttttccatatgtgcagctgtgtttacctaacccagcccttaattagggcttcagtgacttagaaaagcaggggaaacccaaggctttgcctgcagaccggccactctgtgacaactctaccaaaaaccaacaagccattcaagcttttacaagaatgaaagagcggagacggtagtttagtatttgagccacgagtttatgtgcacaagtg

SEQ ID NO: 90737 - DNA, 420 bp, Homo sapiens
aatcccaagtcaagggatgggaaaattgatggcatatcctctcccatcgcaagggctgtggatttaaggaggggtgaagaccggggcccattagtgtactcttctctgtcaccatggccgcaatcattacttatgtctctcctctgtgcaaaatgtgttcagtcccatcccaggatcccccaaagtctcatccaatcatggcatcgggcttgaagtcccagatcttacgccacattaagtctatatgggccttttcttgatccagaaacctaggatctagaaagatgagtcttcttcccttcccacactcagcatgcaatggtaaaaagtaagatgaggtaaccaaaattaatgctctcatttcaaaaacgaggaagcaaggcaggcacagtgcagtcactaatctataacaattctgaa

SEQ ID NO: 90738 - DNA, 418 bp, Homo sapiens
  misc_feature (1)...(418): n = a,t,c or g
aatacatgtcggctatgacgcccaggatcacttttccaaagatgtggactattgctataattgacgtcagagggaaaacgtcgttttgctccgataagttatacaaattgacgatttctgggaggtgaatgaaggggatgacaaagctgctgtatgcaaacaaagcccagaaaataaaggctacaaacattcgatttgtaaatagagaggctgtcccaaagtagcccgaataccagtcctcgaagcccttcctgactctcatggtgagccagctgacagtcttcagaatccggagggcacacatgttcttcctgtgcccggcctgatcggggcactcctgggcttgcaggtcgcagagggtctcctcgttcccgagcccaccatccttctcttctgttcttccctgctgtccagntga

SEQ ID NO: 90739 - DNA, 909 bp, Homo sapiens
gcggccgccggcgccggtagccgcgtccccctgcgccgccccgggcctgccggccggaggagccaccatacaccccgggtcgccgagcgcctggccgccccgcgcccgcgccgcgctccgcctgtggctgggctgcgtctgcttcgcgctggtgcaggcggacagtttttttttcccagtgaacgtcaccgtcaggcacctcaaggccaactctgcagtggtgagctgggatgttctggaggatgaggttgtcatcggatttgccatctcccagcagaagaaggatgtgcggatgctgcgcttcatccaggaggtgaacaccaccacccgctcatgtgccctctgggacctggaggaggatacggagtacatagtccacgtgcaggccatctccattcagggccagagcccagccagcgagcctgtgctcttcaagaccccgcgtgaggctgagaagatggcctccaagaacaaagatgaggtaaccatgaaagagatggggaggaaccaacagctgcggacaggcgaggtgctgatcatcgtcgtggtcctgttcatgtgggcaggtgtcattgccctcttctgccgccagtatgacatcatcaaggacaatgaacccaataacaacaaggaaaaaaccaagagtgcatcagaaaccagcacaccagagcaccagggcggggggcttctccgcagcaaggtgagggcaagacctgggcctgggtgggccaccctgtgcctcatgctctggtaatccctggactgcagagggggtcagctcggggactggcatggcgacagctgggcagagccagacttggctgctgcctgtgtgacacagggacactgcaagttgattttggatcctctccttttgcagggtgccaggggccagtggtgatttgaaaa

SEQ ID NO: 90740 - DNA, 471 bp, Homo sapiens
  misc_feature (1)...(471): n = a,t,c or g
gtagcctacagttatgaccatcattacgccttgcttggcacgaggaggaacaccacgatgccccggggcttcacctggctgcgctatcttgggatcttccttggcgtggccttggggaatgagcctttggagatgtggcccttgacgcanaatgaggagtgcactgtcacgggttttctgcgggacaagctgcagtacaggagccgacttcagtacatgaaacactacttccccatcaactacaagatcagtgtgccttacgagggggtgttcagaatcgccaacgtcaccaggctgcagagggcccaggtgagcgagcgggagctgcggtatctgtgggtcttggtgagcctcagtgccactgagtcggtgcaggacgtgctgctcgagggccacccatcctggaagtacctgcaggaggtgcagacgctgctgctgaatgtccagcagggcctcacggatgtggaggtg

SEQ ID NO: 90741 - DNA, 333 bp, Homo sapiens
ttgatacttgtccttcggaaagctatgtttgccaaccagcttgatgcccgaaaatctgcagttgctgggtttttgctgctcctgaagaactttaaagttttaggcagcctgtcatcctctcagtgcagtcagtctctcagtgtcagtcaggttcatgtggatgttcacagccattacaattctgtcgccaatgaaactttttgccttgagatcatggatagtttgaggagatgcttaagccagcaagctgatgttcgactcatgctttatgaggggttttatgatgttcttcgaaggaactctcagctggctaattcagtcatgcaaactctg

SEQ ID NO: 90742 - DNA, 681 bp, Homo sapiens
acgcaattcccgggtcgacgatttcgtggcggggccgccgtcgaggctggcgccagatttcgattggctgtgggtcctgcagcttcagagaaaggaggccttctgtcactcgtcactagctcgctcgctcactgggggaggagcccgcctgaggaatccgtgtgcctgggatgccaagagccagagaatggatcttctccgagtggggacattgctgacaatcccggcttcccgaggcggctaagaacaggcagtttgtgtcggctggctgcagatacccagaggcacaaagagaccgaagccacccggagggacccacggacggacagatggtaggcgcgaacccgagaggaccggcggaggctgagcaccgagagccgccaaggaagagaaactaaccacagccaagttaccccgccggctttccttcgctgcgctaaggaatgaaacccttccagctcgatctgctcttcgtctgcttcttcctcttcagtcaagagctgggcctccagaagagaggatgctgtctggtgctgggctacatggccaaggacaagtttcggagaatgaatgaaggccaagtctattccttcagccagcagccccaggaccaggtggtggtgttcggggacagccagtgacgctcctttgcgcgattccccgaaaactaccgcttcgctc

SEQ ID NO: 90743 - DNA, 1653 bp, Homo sapiens; identical to SEQ ID NO: 60471

SEQ ID NO: 90744 - DNA, 431 bp, Homo sapiens
cggcacgaggggaacttcggctcagcacagggaactagcgcaaatactgatatcctggctgttgctcttcctgtgaatagcaaactatttttcaacgcttacccagaagtcttgtgtcatccatcagcatacatgaaactgcagcaggctaacttgttagcttgcaagcagagtaaagtcagactcttcatggctcttgacactcacgcatgatagtagtgccgcaaagcaatgcaccaacagaaacactcatatttctaaatgctcagctgggaggtgctgctctttgaaaactccattgccttatgtgatctgacccctcattacctcaataatctcaccttctacaacttttcctctagctcacttcatcccgtaattctgaccttcctagcctttgaagcacctcaattttgtttccactccagggc

SEQ ID NO: 90745 - DNA, 1869 bp, Homo sapiens
gggctgcgcgcccgacacgcgcttcttcgtgcccgagcccggcggccgaggggccgcgccctgggtcgccctggtggctcgtgggggctgcaccttcaaggacaaggtgctggtggcggcgcggaggaacgcctcggccgtcgtcctctacaatgaggagcgctacgggaacatcaccttgcccatgtctcacgcgggaacaggaaatatagtggtcattatgattagctatccaaaaggaagagaaattttggagctggtgcaaaaaggaattccagtaacgatgaccataggggttggcacccggcatgtacaggagttcatcagcggtcagtctgtggtgtttgtggccattgccttcatcaccatgatgattatctcgttagcctggctaatattttactatatacagcgtttcctatatactggctctcagattggaagtcagagccatagaaaagaaactaagaaagttattggccagcttctacttcatactgtaaagcatggagaaaagggaattgatgttgatgctgaaaattgtgcagtgtgtattgaaaatttcaaagtaaaggatattattagaattctgccatgcaagcatatttttcatagaatatgcattgacccatggcttttggatcaccgaacatgtccaatgtgtaaacttgatgtcatcaaagccctaggatattggggagagcctggggatgtacaggagatgcctgctccagaatctcctcctggaagggatccagctgcaaatttgagtctagctttaccagatgatgacggaagtgatgagagcagtccaccatcagcctcccctgctgaatctgagccacagtgtgatcccagctttaaaggagatgcaggagaaaatacggcattgctagaagccggcaggagtgactctcggcatggaggacccatctcctagcacacgtgcccactgaagtggcaccaacagaagtttggcttgaactaaaggacattttattttttttactttagcacataatttgtatatttgaaaataatgtatattattttacctattagattctgatttgatatacaaaggactaagatattttcttcttgaagagacttttcgattagtcctcatatatttatctactaaaatagagtgtttaccatgaacagtgtgttgcttcagactattacaaagacaactggggcaggtactctaatataaaggacaggtggtgtttctaaataattggctgctatggttctgtaaaaaccagttaattctatttttcaaggtttttggcaaagcacatcaatgttagactagttgaagtggaattgtataattcaattcgataattgatctcatgggctttccctggaggaaaggttttttttgttgttttttttttaagaacttgaaacttgtaaactgagatgtctgtagcttttttgcccatctgtagtgtatgtgaagatttcaaaacctgagagcactttttctttgtttagaattatgagaaaggcactagatgactttaggatttgcatttttccctttattgcctcatttcttgtgacgccttgttggggagggaaatctgtttattttttcctacaaataaaaagctaagattctatatcgcacatgagcattaagttcttcattgccttgttaaggaaaatgagtaggcagactcagaatctgttatattgatttcagttacaatttaatctttacaattaaaagggcgaaagatgtagaattttagtttttgttgttgactcgaaataaccagttttcttgattagagtttaagcagatttaataccatgaccttgcttaaccgcttcttcttttttacttgcttgctg

SEQ ID NO: 90746 - DNA, 445 bp, Homo sapiens
cctcccaaggtaaaattatcttggccccttgagggaacaaaattaccatctcaagccaggtgaggtggtactcagttgaaaactatggacctaaacatgaatggccagtaaaaccagatcgagaccagtgggtgtataggtcctgggtgttgagctgggttttgaagactggataggatttggccacggagatagcaaggagaaagttcagaagggacagcatatgcaaagacctggaggtgaaatagctcatgcattccagagactacagggggttctgtgtcaccagagaaccaaggggccaggagtgttggaagaggggaagtggaggcgctcgaagctggagagctcagccaaggccttggactccaggtggagatccccacagggcttggcaggcacttagtaaattgcggtttgtcccagggtattgaacatggttctc

SEQ ID NO: 90747 - DNA, 375 bp, Homo sapiens
cttggtgtcctggagaggacaataaaaatgaatattatagacttttaaaagtaatataatcttaaaactttgccactaattgcaaatgggatgaggaaaattaaatgctcgaagttgatgtcaagatttatggcttacatggcataagtttatcaacagagaaaggaaacaagctaacaagcacacttgtggtaaggtcattggctaattttgcagatatgttgagtttgatgattttgagctggacctgatgaatatttagaaatctgggaattcgaaggtacgagttatttttgaaattgcttcttgctaagcctgagaactatattttcaagaattccttgccatgatagtttacaaattttaactgattcg

SEQ ID NO: 90748 - DNA, 654 bp, Homo sapiens
  misc_feature (1)...(654): n = a,t,c or g
agaatttctagaaggaggaggtgcagttttggatatgttaattttgaggtacctatgaatgccttgtccaggaagagataatccaggaagcaggtgggtatacaggccagaagcttaagggaggtgtccaggctgagaacttgcagtccccagatgtgccatgctgttttaaggttctttgtttatgcacatcctgccccactgcctctaaatctccctcaaacacttctagtcatacccattttacatattaccaaaagtcagagttgatcaccctctcctctatgttgccaatctacctatttttgccttcttctctgtaatatagatattgtttacttaaccatattaattaggtgtctactatgtattataccactgttccaagcactaaggataagatgatgcaaaattctgatccttatggtaggaggcgcagacaataagcagataacattcagggataagtgccataaaagaatgtaaaacagtacgttggggtagaggttgcatactgagcactactttagcaagcctggccaggaatggtctctctgcttangtgggatatgggagagagacttgaatgcggcgaaagaatgagccggcctaagatctgggaggagcaataattacgggcgaaaaggacagccc

SEQ ID NO: 90749 - DNA, 324 bp, Homo sapiens
gacatctgaagggctctaaatggtcatcaggcttctgtttctagagggacaagtaaggaggccatgatcttttaggcatcttttagtagcatagcagatttatagacgtctgaggggcatctaggtgcttggtttgtccacttgaaatgtgtactatcttattaatctttataataaaattctgtcctacatcttgtgattaaaagcaggaaggaaatgatgaatttaatgcacagcatagttgttaagatagacttgtatgtgttagggccagtggggaaatacagggtgattttcttttcaattttgcattgctggggccag

SEQ ID NO: 90750 - DNA, 356 bp, Homo sapiens
agcccgttcagagggcttaacatgtaagaggtaatggattaccaagagcaagtggatataggacaagatgaatgttgagatggagttacttgttaggaagagtggatcagggaaggcttcctggaagacaaaaatagtgggtgtgggttgccccttgcaagcagttgcagctattttcattatgtactccttgataacacattcctgaaggtgatggcttagcactcctttactggttgatgaacagatctccttctaagtgggctctgcctccctcgttcgcatgtgggaactgcagcttgtctggcctttgagccatgatgcaggatcatgatatcagggactggcagggttgt

SEQ ID NO: 90751 - DNA, 379 bp, Homo sapiens
cagcccggtggtactgactttggacttctggcctccagaactgtgagagaatatgtttctgttgtgttaagcccccaagtttgtggtatgtcattacagcaatctcagggaaccaatacatgaggtaaaaaggtaacatctatgaagagcatggcatagggacacagcaaatgggagttccttttccctttgcattcagttacttacaggcttcctgttttcttcataaccatttctctccctgtgcgactgctgactcctcagcaaaactgcaaactcctacaggacagtggatcctccaaagaaggtatacgatgaggcatccagggaccctagcagtgtcaggcccctcaaatcccactctgttgagacctccccc

SEQ ID NO: 90752 - DNA, 361 bp, Homo sapiens
cagactttgtaacttttctgatgaaagggtatccaggtggataattacgggttttatgctcttaaacaagttaagaactggagttgtattttttgctattgattttaaaagtcaatatgttgtggctgttaaaaagcattattttgtgtatgtatcactaataacttatgttagcacataatgagtatgaccatcaatatcagtaacactctcttctttcattgtaccaaacataatgtatcctgcctggaatctttttgtgtatgagaaagaacaaaatagcatcttccattggaagttctggttaagagtagccttattatctacacctccttccatgaaactctgcttctgatttccg

SEQ ID NO: 90753 - DNA, 590 bp, Homo sapiens; identical to SEQ ID NO: 58802

SEQ ID NO: 90754 - DNA, 2173 bp, Homo sapiens
cggacgcgtgggggagcacggagatctcgccggctttacgttcacctcggtgtctgcagcaccctccgcttcctctcctaggcgacgagacccagtggctagaagttcaccatgtctattctcaagatccatgccagggagatctttgactctcgcgggaatcccactgttgaggttgatctcttcacctcaaaaggtctcttcagagctgctgtgcccagtggtgcttcaactggtatctatgaggccctagagctccgggacaatgataagactcgctatatggggaagggtgtctcaaaggctgttgagcacatcaataaaactattgcgcctgccctggttagcaagaaactgaacgtcacagaacaagagaagattgacaaactgatgatcgagatggatggaacagaaaataaatctaagtttggtgcgaacgccattctgggggtgtcccttgccgtctgcaaagctggtgccgttgagaagggggtccccctgtaccgccacatcgctgacttggctggcaactctgaagtcatcctgccagtcccggcgttcaatgtcatcaatggcggttctcatgctggcaacaagctggccatgcaggagttcatgatcctcccagtcggtgcagcaaacttcagggaagccatgcgcattggagcagaggtttaccacaacctgaagaatgtcatcaaggagaaatatgggaaagatgccaccaatgtgggggatgaaggcgggtttgctcccaacatcctggagaataaagaaggcctggagctgctgaagactgctattgggaaagctggctacactgataaggtggtcatcggcatggacgtagcggcctccgagttcttcaggtctgggaagtatgacctggacttcaagtctcccgatgaccccagcaggtacatctcgcctgaccagctggctgacctgtacaagtccttcatcaaggactacccagtggtgtctatcgaagatccctttgaccaggatgactggggagcttggcagaagttcacagccagtgcaggaatccaggtagtgggggatgatctcacagtgaccaacccaaagaggatcgccaaggccgtgaacgagaagtcctgcaactgcctcctgctcaaagtcaaccagattggctccgtgaccgagtctcttcaggcgtgcaagctggcccaggccaatggttggggcgtcatggtgtctcatcgttcgggggagactgaagataccttcatcgctgacctggttgtggggctgtgcactgggcagatcaagactggtgccccttgccgatctgagcgcttggccaagtacaaccagctcctcagaattgaagaggagctgggcagcaaggctaagtttgccggcaggaacttcagaaaccccttggccaagtaagctgtgggcaggcaagcccttcggtcacctgttggctacacagacccctcccctcgtgtcagctcaggcagctcgaggcccccgaccaacacttgcaggggtccctgctagttagcgccccaccgccgtggagttcgtaccgcttccttagaacttctacagaagccaagctccctggagccctgttggcagctctagctttgcagtcgtgtaattggcccaagtcattgtttttctcgcctcactttccaccaagtgtctagagtcatgtgagcctcgtgtcatctccggggtggccacaggctagatccccggtggttttgtgctcaaaataaaaagcctcagtgacccatgagacggagatctcgccggctttacgttcacctcggtgtctgcagcaccctccgcttcctctcctaggcgacgagacccagtggctagaagttcaccatgtctattctcaagatccatgccagggagatctttgactctcgcgggaatcccactgttgaggttgatctcttcacctcaaaaggtctcttcagagctgctgtgcccagtggtgcttcaactggtatctatgaggccctagagctccgggacaatgataagactcgctatatggggaagggcgtctccagacccattaagtatattaatgagttcctggcaccagccctgtgcactcagaaactgaacgtcacagaacaagagaagattgacaaactgatgatcgagatggatggaacagaaaatt

SEQ ID NO: 90755 - DNA, 412 bp, Homo sapiens
ctgataccgatttccaatttgtacttaaaattcaggtaaacacagcaaatgcagagacagacgaaccaattctcaaactgattttacacagaaaatcatttcaagcactaaacaataaataaacctacatgaaatcaacatagtgatacttgctaaaactttaaagtacttgtcaacagaaagaacacaaaaaagtcctggagaaatatggaatttaccacaaaagttccaaaaaacattcaaataattccatgattgatatggtgcatcatatttacaataaatcaaatccttatgccagcactattctaaaagcaagtttgaggaacatgaaaaaactgttttcagttagattattttttagaccttggggaatggttacatgagatttacataagcaataaaaaacaaa

SEQ ID NO: 90756 - DNA, 365 bp, Homo sapiens
gaataaacaaaattctttaaattgaatgcattttgttctacaaggagccattgactttatttgcaatttaccatggacgagcactggccctcacaccgctactgcaagtgtactgatctattatacttcctgtctgtctctccagtaatgctgatctaaaccatttttggcccaatatgattgcacatgaaatgctttatagtgagagatgcagaatcaactcaagggcaatgggagtgaggaagagagttgccatctacatccggctagcctctttatgtgtgtgctttgatttggggacagtccttttccttttcttggtccctgtctagggttccagtgtcaatatcttccctgtctattat

SEQ ID NO: 90757 - DNA, 909 bp, Homo sapiens
ttttttttttttctgattgacaatgagaatatttattgagggtttattgagtgcagggagaagggcttgatgccttggggtgggaggagagacccctcccctgggatcctgcagctctagtctcccgtggtggggggtgagggatgagaacctatgaacattctgtaggggccactgtcttctccacggtgctcccttcatgcgtgacctggcagctgtagcttttgtgggacttccactgctcaggcgtcaggctcaggtagctgctggccgcgtacttgttgttgctttgtttggagggtgtggtggtctccactcccgccttgacggggctgctatctgccttccaggccactgtcacggctcccgggtagaagtcacttatgagacacaccagtgtggccttgttggcttgaagctcctcagaggagggtgggaacagagtgaccgagggggcagccttgggctgacctaggacggtcagcttggtccctccgccgaacagggtcttagagttgctgtgccatgtaccacagtaatagtcagcctcatcctcaggctggagcccagagatggtcagggaggccgtgttgccagacttggagccagagaagcgattggaaacccctgagggccgattagcgacatcataaatcatgatttggggggctttgcctgggtgttgttggtaccaggagacataatcataaacaccaacgtcactactggttccagtgcaggagatggtgatcgactgtccaggagacccagacacggaggcaggctgagtcagggcagactgggcccaggaccctgtgccctgagtgaggagggtgaggaatagcagagcccaggccatggtggagacgtcccgagagcgctgcctcctggaattccacacggcggtca

SEQ ID NO: 90758 - DNA, 2890 bp, Homo sapiens
cccgggtcgacgatttcgttcgatgatgggccgtttcaccatcgccagagacaacgccaagaactcagtctatccgcagatgaacagcctgagagccgaggacacggctgtatactattgtgcgagagatccatcttatgatagtagttcttattactttgactcctggggccagggaaccctggtcaccgtctcctcagcttccaccaagggcccatccgtcttccccctggcgccctgctccaggagcacctccgagagcacagccgccctgggctgcctggtcaaggactacttccccgaaccggtgacggtgtcgtggaactcaggcgccctgaccagcggcgtgcacaccttcccggctgtcctacagtcctcaggactctactccctcagcagcgtggtgaccgtgccctccagcagcttgggcacgaagacctacacctgcaacgtagatcacaagcccagcaacaccaaggtggacaagagagttgagtccaaatatggtcccccatgcccatcatgcccagcacctgagttcctggggggaccatcagtcttcctgttccccccaaaacccaaggacactctcatgatctcccggacccctgaggtcacgtgcgtggtggtggacgtgagccaggaagaccccgaggtccagttcaactggtacgtggatggcgtggaggtgcataatgccaagacaaagccgcgggaggagcagttcaacagcacgtaccgtgtggtcagcgtcctcaccgtcctgcaccaggactggctgaacggcaaggagtacaagtgcaaggtctccaacaaaggcctcccgtcctccatcgagaaaaccatctccaaagccaaagggcagccccgagagccacaggtgtacaccctgcccccatcccaggaggagatgaccaagaaccaggtcagcctgacctgcctggtcaaaggcttctaccccagcgacatcgccgtggagtgggagagcaatgggcagccggagaacaactacaagaccacgcctcccgtgctggactccgacggctccttcttcctctacagcaggctaaccgtggacaagagcaggtggcaggaggggaatgtcttctcatgctccgtgatgcatgaggctctgcacaaccactacacacagaagagcctctccctgtctctgggtaaatgagtgccagggccggcaagcccccgctccccgggctctcggggtcgcgcgaggatgcttggcacgtaccccgtgtacatacttcccgggcgcccagcatggaaataaagcacccagcgctgccctgggaagtatgtagacggggtacgtgccaagcatcctcgtgcgaccgcgagagcccggggagcgggggcttgccggccgtcgcactcatttacccggggacagggagaggctcttctgcgtgtagtggttgtgcagagcctcatgcatcacggagcatgagaagacgttcccctgctgccacctgctcttgtccacggtgagcttgctatagaggaagaaggagccgtcggagtccagcatgggaggcgtggtcttgtagttgttctccggctgcccattgctctcccactccacggcgatgtcgctgggatagaagcctttgaccaggcaggtcaggctgacctggttcttggtcatctcctcccgggatgggggcagggtgtacacctgtggttctcggggctgccctttggctttggagatggttttctcgatgggggctgggagggctttgttggagaccttgcacttgtactccttgccgttcagccagtcctggtgcacaacggtgaggacgctgaccacacggtacgtgctgttgaactgctcctcccgcggctttgtcttggcattatgcacctccacgccgtccacgtaccagttgaacttgacctcggggtcttcgtggctcacgtccaccaccacgcatgtgacctcaggggtccgggagatcatgagggtgtccttgggttttggggggaagaggaagactgacggtccccccaggagttcaggtgctgggcacggtgggcatgtgtgagttttgtcacaagatttgggctcaactttcttgtccaccttggtgttgctgggcttgtgattcacgttgcagatgtaggtctgggtgcccaagctgctggagggcacggtcaccacgctgctgagggagtagagtcctgaggactgtaggacagccgggaaggtgtgcacgccgctggtcagggcgcctgagttccacgacaccgtcaccggttcggggaagtagtccttgaccaggcagcccagggccgctgtgcccccagaggtgctcttggaggagggcgccagggggaagaccgatgggcccttggtggaggctgaggagacggtgaccagggttccctggccccagagatcgaaataccagccgtgggacagtttttctaaccactccacaaatcgtaacactcccgcacagtaatagaaagccgtgtcctcggctctcaggctgttcatttgcagatacagcgtgttcttggaattgtctctggagatggtgaatcggcccttcacggagtctgcatagtatttattacttccatcatatgatataactgccacccactccagccccttgcctggagcctggcggacccagtgcatgccatagctactgaaggtgaatccagaggctgcacaggagagtctcagggacctcccaggctggaccacgcctcccccagactccaccagctgcacctgacactggacacctcttaaaagagcaacgaggaaaacccagctcagcccaaactccatggtgagtcctctgtgttcagtgctgatcaccgaatggaaacaccgccgacttccagtgctgggctc

SEQ ID NO: 90759 - DNA, 374 bp, Homo sapiens
gccgcgtcgacgcagtattagaacataaaaaaattctataagtaactagaatactggtagtcctagacgtttcttgcattctgaaagccatagaactgaagttgttatgtatggttatttctactttttaaaaaaagcaaattcttgctggtctatataatagaatgacttattttcttacgtggtaagaacagaaatcctacaaggaactgggagctaggctggcagggaaaattgaaggtgatgtgtttaataggaatgtaatgcaaatacttctgttttcaaagagagaaattattgcttatgaacattactggagcctgggctttttgtttttttacttaagtaaataggtaaggaaaaaatttcccatt

SEQ ID NO: 90760 - DNA, 357 bp, Homo sapiens
ccactggctgctctccttccctcaatgccgtctgctcagtctcctggagggtcagtgatgagggaaggagccccaacttccttgtttctccctgcgtcctaaataagtccggaacccaaagagactgagtgtgtccctggggcatgcgtgtgcctgtgtgagtatatcagagcaagacaccacactgccgtgagcaccaggctggctgactcattgttccctacatgcctgatgtctgctcctgctctagggcttttactcattctctcctaccaggctgaaagggccaacacatctcataaacaaccccaaagccaacccaccccaggcctggctgcagcatcagcctcctgccta

SEQ ID NO: 90761 - DNA, 353 bp, Homo sapiens
  misc_feature (1)...(353): n = a,t,c or g
ttagaatttggggtgaaagtataatgaaattattttcagattactacaatctgtattcactgtaactgtgatggctttgtaatttagacacttaattttttaacccagctgaccaactaggtgaagtaacctctgagggcttgtttgaacaaacttgtgataatgaaagttaccttttttatgggaccttttgataaatgattgttaatgctagttgtatgttttaccagaaaagtagactgggtttttgacttgatgttttctgcagtaatcatcataagaattattcttcaaaatttagcaaagttctagaaactataactagcatgggactatttaaaggtgtaaaatgn

SEQ ID NO: 90762 - DNA, 401 bp, Homo sapiens; identical to SEQ ID NO: 37392

SEQ ID NO: 90763 - DNA, 408 bp, Homo sapiens
agcactccttcaagcttaaccaaatgagatcatgtctgacatgcgcctcacgcctgacagggacttcatgtgtgaagattcccccttaactcaccagatcatctacatggcaacagcttgcaacctgctcttggagtgctttgttatggcagctactctgctagtatgcgtatggagtgaatggaggaggtaaatccacagattactaatatgctgtcaggagtcaggcatgcatggtcataagccagctctggttctcaatggtaatgtgcttgacttctacatctcaattttcacccactttgcacttttttcctaaattaaatgagtataatagtagtacctacttgatacgacttttgcgaagattaactgatataatgcacctaaaaacagtactgttacaac

SEQ ID NO: 90764 - DNA, 613 bp, Homo sapiens
gcccttgacgcctcggaacttgaggccttcggaatcgacccacgcgttcggggaaacaatcctccaacatctcttgaaataactagagatatctggggaggttaccaaacctgaatgaagagtctcaaatcccaggaaagcattgtgtacattttgcttatgaatattggtagttctgtattgtataataaatcttactccttgacttggttatatgtaactctgtgtctccttttttatattatatatggaacagattaaaagggccaataaactgtttaccaatgattgtatatttctgaagaaaactttgaacatcccagttatatcagagaagcctttgttgtttaatggacttaactccattgattctccagaaaatgaaactgctgataacagtttttctcaggaagaggagccagtggtggccggggaagacctccctcctcccagtcctcaagaatctgatgttcagcctgtgcagcctgaggaagtgtcagccagagatttcctgcagagacttgacttgcagattaagttatcaacacaggcagccaagaagctaaaagaagagagcagagatgaagaaagtccctatgcaacttccctctat

SEQ ID NO: 90765 - DNA, 2439 bp, Homo sapiens
ttctgtcttcctctctttcctcctctactgctccctccctctcttgcctcttaagtttcctgcaccgtgaatccaactgtgccaagccttggctcccgcgaaccaatcctgagcgcgacccgggcactgggacggcgactccgccaaagctggacgaggcagccggacccgtctgcgctcgagcatggagacggagcgcctgggagggcacgtccggggcgctggagacgccaggcccgagtagcttctccatggagcctgcccagagcggtcccttctcgcaggattcgccccaagtcctgtgcggctgctgagagcgctccttgctctgtaaagtggatgtcaggtggatctatgtttctgaaggaacaaagactcaaagaaggcaccgccaaggaagtttgagacgcgggagaatgcaggctgcgtgctggtacgtgcttttcctcctgcagcccaccgtctacttggtcacatgtgccaatttaacgaacggtggaaagtcagaacttctgaaatcaggaagcagcaaatccacactaaagcacatatggacagaaagcagcaaagacttgtctatcagccgactcctgtcacagacttttcgtggcaaagagaatgatacagatttggacctgagatatgacaccccagaaccttattctgagcaagacctctgggactggctgaggaactccacagaccttcaagagcctcggcccagggccaagagaaggcccattgttaaaacgggcaagtttaagaaaatgtttggatggggcgattttcattccaacatcaaaacagtgaagctgaacctgttgataactgggaaaattgtagatcatggcaatgggacatttagtgtttatttcaggcataattcaactggtcaagggaatgtatctgtcagcttggtaccccctacaaaaatcgtggaatttgacttggcacaacaaaccgtgattgatgccaaagattccaagtcttttaattgtcgcattgaatatgaaaaggttgacaaggctaccaagaacacactctgcaactatgacccttcaaaaacctgttaccaggagcaaacccaaagtcatgtatcctggctctgctccaagccctttaaggtgatctgtatttacatttccttttatagtacagattataaactggtacagaaagtgtgccctgactacaactaccacagtgacacaccttactttccctcgggatgaaggtgaacatgggggtgagactgaagcctgaggaattaaaggtcatatgacagggctgttacctcaaagaagaaggtcacatctgttgcctggaatgtgtctacactgctgctcttgtcaactggctgcaaaatacactagtggaaaacactctgatgtaatttctgcccagtcagcttcatccctcagtataattgtaaatcatcacagattttgaagtcacacctgaagacatgctctcacatatagaggtacacaaacacaccgtcatgcacatttcagcttgcgtctatcatgattcctgttgagagggctttcattgtctgactcataatggttcaggatcaactatcatcaaacggaaggattaactagacagagaatgtttctaacagttgctgttatggaaatctcttttaaagtcttgagtacatgctaatcaataatctccactcatgcattcctactgcttggagtagctgtactggtaaatactactgtaggagtatctgcttgttaaaatggaaaaatgtgtctttagagctcagtattctttattttacaaacacaacaaaatgtagtaacttttttccagcatacagtaggcacattcaaagtggtccaagatggctcttttttctttgaaaggggcctgttctcagtaaagatgagccaaaccatttggaatttaccatgtgggcagacattgggataccaactttcatcaccaatcattggacttttgtgaagtcgacaccagctaaggctgcttaaaataagttctgatcattatataagaagggaaatgcctggcagacaccatgtaagttataagtgtctgtcttatctttactacacatattgtaacaaattcaatatcctagtcttcatttgtatgaatggtttgtattgtacatagtttaaccaagtgttatttgagctgcttaattaatatttaacttgtaccttggtctctctgcttggttattggttaagaaaaaaggatatgaggaattcattttatcaatgtagctgtgaaggccattaaaaagacaaacttaatgtacagagcatttattcagatcaagtattgttgaaagctatacatatacaacattacagtctgtctgtatttagatattttatttctggaaaaaatgaaatgtacataaaaataaaacacttaaagttgagtttcaataaaaaa

SEQ ID NO: 90766 - DNA, 2618 bp, Homo sapiens
caacactgtcctgacctatcttagtcgcatccgactaccattatccagaagctgataaaaaagctttgggaaacatgaacaaaacattgatgaaatgttggaaaccagttgaaacacagtaaaaccaactgggtaaaataggaccacttctcttcatctacactgggatttgtcaagaagtgaactatgacaatacatcaatttttgctactgtttctattctgggtatgcctgccacatttctgctctccagaaataatgttcagaaggacgcctgtgccacagcaaagaattttaagttcacgtgtaccaaggagtgatggcaaaattctccatcgtcaaaaacgtggttggatgtggaatcaatttttcttacttgaagaatatacaggatctgattatcagtacgtaggcaagctacattcagaccaagataaaggagatggatcactcaaatatatcttatctggagatggagctggtactctttttattattgatgaaaaaacaggtgatattcatgccacaaggcgaattgatagggaggaaaaggccttttatactctacgcgcacaagctattaacagaagaactctgaggccagtagagccagagtcagagtttgtgatcaaaattcatgatatcaatgacaatgagccaacgttcccagaagaaatctatacagctagtgttcccgaaatgtctgttgtaggtacttctgtggtgcaagtcacagctacagatgccgatgacccttcatatgggaacagcgccagagtcatttacagcatacttcaagggcagccctatttctctgtggagcctgaaacaggtatcatcaggactgctttaccgaacatgaacagagaaaacagagagcaataccaagtggtcatccaggccaaagacatgggcggccagatgggaggcttatcggggacaaccactgtgaacatcacgctgacagatgtcaatgacaacccaccacgtttcccccagaacactattcatcttcgagttcttgaatcctccccagttggcacagccattggaagtgtcaaagcaactgatgctgacactgggaaaaatgctgaagtagaataccgaattattgatggtgacggtactgatatgtttgacatcgtgactgagaaggacacacaggaaggcatcatcactgtgaaaaagccactcgactatgagagccgaagactttatactctgaaagtcgaagcagaaaacacccatgtagatccccgtttttattacctaggaccatttaaagatactaccatagtgaaaatctctatagaagatgtggatgaacctcctgtttttagtaggtcctcctatctgtttgaagttcatgaagatattgaagtgggcacaatcattggtactgtaatggcaagggacccagattctatttccagccccattagattttccttggatcgccatactgaccttgacagaatctttaacattcattcaggaaatggatctctttatacatcaaaacctcttgaccgtgaactatctcagtggcataatcttactgttattgctgctgaaatcaacaatcccaaagagacaacacgcgtggctgtttttgtgagaattttggatgctaatgacaatgccccacagtttgctgtgttctatgacacttttgtatgtgaaaatgccagaccagggcagctaatacagactataagtgcagtagacaaagatgaccctttaggtggacagaaattttttttcagtttagctgctgtcaatccaaacttcacagtacaggataatgaagataatactgccagaatcttaaccagaaaaaatggattcaatagacatgaaatcagtacctatctcttgcctgtggtgatatcagacaatgattacccaattcagagcagcacaggcacactgaccattcgagtgtgtgcttgtgacagccaaggcaacatgcaatcctgcagtgctgaagccctgctcctccctgccggcctcagcactggggccttgatcgccatcctcctctgcatcatcattctactggttatagtagtactgtttgcagctctgaaaagacagcgaaaaaaagagcctctgatcttgtcaaaagaagatatcagagacaacattgtgagctataacgatgagggtggtggagaggaggacacccaggcctttgatatcggcaccctgaggaatcctgcagccattgaggaaaaaaagctccggcgagatattattccagaaacgttatttattcctcggaggactcctacagctccagataacacggacgtccgggatttcattaatgaaaggctaaaagagcatgatcttgaccccaccgcacccccctacgactcacttgcaacctatgcctatgaaggaaatgattccattgctgaatctctgagttcattagaatcaggtactactgaaggagaccaaaactacgattacctccgagaatggggccctcggtttaataagctaccacaaaagtatggcggtggtgaaagtgacaaagactcttaacgtaggatatatgttctgttcaaacaagagaaagtaactctaccgatgctgtgtgcacttcacaa

SEQ ID NO: 90767 - DNA, 787 bp, Homo sapiens
tactttgttagacgcagcctgtgctgactcacacgctgccttatttgattttcattcacagctttgagaagcagatcggcttgaatgagcatggaatgtatctatttaaaaagcagctggaagtctgtcaagtgcattctggaaatggattcaggctaacagagtgttctgaatagagacgcctaaaacaagagccaaagacatagcaatggagaacgtgggtggtacagccctccaccctggcgagcagcacattataatcacgtaggagcttaaaaagtactgactggcctggtctttttcggtgtgaaggtgggatgcaggcttcctggggttatcctctcgtacagccagagttgagaaccatctgagtagcgcttgtcacacttctggccacatcagaatcgtctgagggacttgttcactgcaggttgctgggtcccatctctagcctctgatccagtagcctggggtggggcacaggatgtcctgctgctggggtctgggcagcgctatgagaactgctgacgttggagctcgatcaggtggtccctcactccctgacccagggcatttgctgcttcctgtctctgccattcttttctcaacctggggcacttgcttttctcgctatgctgccctgccctttgctgaggcctgggctatccctggcagggtgcagaaaaaaaatttttaagttacttttctcagcccaaaggagactggaatgcttcacaagggattctacttgacaggcaattggaccacccaaagggcaaactaaaag

SEQ ID NO: 90768 - DNA, 406 bp, Homo sapiens
cggacgcgtgggtttttatatccacccccaccactatactgagatttatcgaagtttgagagggtaactagtatcaaggcactggtatgggagtgaggtggggggaggtgtgtatgacaggcctaattgaacttgcttttttactcttacgactacacaccctgatgtctgtttagatgtcctttatcctatgtctccttctactattcttcctattgtttacctcagagtcatgctatcgctactatccttctgatccgattataactcctgatgctctggaaccttccttgattgtcatgcttttgtgaccattattcattagaatgtggttacgataatctggaactttgatatctctactatatgttattggctattatatatagattctctccattgagct

SEQ ID NO: 90769 - DNA, 416 bp, Homo sapiens; identical to SEQ ID NO: 58694

SEQ ID NO: 90770 - DNA, 645 bp, Homo sapiens
cggccgcgtcgacaagacctggtggggcaagtccgtgggcatcatgttgaccgagctggagaaagccttgaactctatcatcgacgtctaccacaagtactccctgataaaggggaatttccatgccgtctacagggatgacctgaagaaattgctagagaccgagtgtcctcagtatatcaggaaaaagggtgcagacgtctggttcaaagagttggatatcaacactgatggtgcagttaacttccaggagttcctcattctggtgataaagatgggcgtggcagccttgaactctatcatcgacgtctaccacaagtactccctgataaaggggaatttccatgccgtctacagggatgacctgcagaaattgctagagaccgagtgtcctcagtatatcaggaaaaagggtgcagacgtctggttcaaagagttggatatcaacactgatggtgcagttaacttccaggagttcctcattctggtgataaagatgggcgtgggcagcccacaaaaaaaggttgcttcttatttttgaatttgctgtagtttggatgagacattttttattttttaattcttttttcccttgaggatatgactgtggtatatgttgtgtatgattgtttggctttgtttctg

SEQ ID NO: 90771 - DNA, 629 bp, Homo sapiens
ttttttttttttgttagttcatgtccttttaataaactcaataacagttaacttgtccttctggtttggttgaaacaggtaagtccagacaaacatttggccacaataaatgtctgtcaaaagtgacttgcccataaacaaccccagcaccacattcatcagaagggcactctcgacgaaggcgactaattttgccattctcatccaccttataatatttcaggacagccagcttaaccttctttctcttgtgcttattcttcttgggagtggtgtaagacttcttcttccttttcttagcaccaccacgaagtctcaacacaagatgaagagtagactccttttgaatattgtagtcagacaaagtacgtccatcttccagctgcttgccagcaaagatcagtctctgctgatcaggaggaattccttccttatcctggatcttggcctttacattttctatcgtatccgagggttcaacctcgagggtgatggtcttccccgtaagggttttcacgaaaatctgcattttggtggcggctccacctgaggttgaggaaaaggaagagacaggttaggtcagggatcacaagagaaggcaccatagggtgctaacccgagagcagcct

SEQ ID NO: 90772 - DNA, 358 bp, Homo sapiens
caataaccagaaaaacccaagcacatttcacattcaaaaaatcacttttgccttggtctaaaaacatcatcatctctaatgtctacccgaaaccagctgacagtattccatttgctaccggataaatctaaaatcttgagcacgccccagaagcactcacaattggaccccagacttcgatggtatcatctcttgctattgctccctcactgcattctcagcatcctttcatcttgctatacctttcatttcttggggactttgtgtatcagttctcactgcctagagagctgttctcccattttcctccagccaagcccccactcattctgcaagactcagtttaactggaactcat

SEQ ID NO: 90773 - DNA, 374 bp, Homo sapiens
  misc_feature (1)...(374): n = a,t,c or g
gtgattatctcagagatttcaaggagtgtgtcttacagaggaggcgtagtgattgaggttcagtagtttatcacgacattccaaaccacctgacctccatctcgcataactctaactgctcttagttccctggggacaccaggctgtttgcctagatatttctttgcttgggctgtttctaatgcctagaatattccgcgggctatntncatnccttgtgatgattcgactctaatctataatggagtatgtcgtcaaatctacttcgtcgcgtagtcacggcatctcgtcgactgatgttgtcgtgtgatatctcgtgtcggttcacattgtcgggcgatgtcggttgtgtgacagtgcgtcgtcatgaggcg

SEQ ID NO: 90774 - DNA, 338 bp, Homo sapiens
tttaatgtttcttcctgtcatccatcttgtacagccaggtccatgtactttcttttgttcagtacctagtatagctctagagacaatgaagtgctcaatacatttttgttgtgtactgtaattatacttttttgacatacaaatatgtaagtttatggtagcaggaaatctcttgttctttgtatcctccaaaggtcctaacatagttccttgtatacaagggacactattcaacgactgaatgaattgttgacggttttaaaataaactttgcctgatatatcgataatacaattggccctccatatctacaggttccgcatctgcagaatcaaccg

SEQ ID NO: 90775 - DNA, 4368 bp, Homo sapiens
gaattccccgatgtacttctgcattaaattccttgctttcagaatcataaccagggaatcgtttggtactgtgagggatagacaagccctcatttctgtaatccctgctaagtgaggtcaaggctgacatctaagatgttctgtggcggaacctggcccccatcaggggcaacctttaatttggattctggaagactaaaactttgagatctctcccccgccccccaggctcccccggtagctctcctccggcggtggcccgcgctcggtggatgtggctggcagctgccgccccctccctcgctcgccgcctgcttttcctcggccctccgcctcctcccctcctccttctcgtcttcagccgctcctctcgccgccgcctccacagcctgggcctcgccgcgatgccggagaagaggcccttcgagcggctgcctgccgatgtctcccccatcaactacagcctttgcctcaagcccgacttgctggacttcaccttcgagggcaagctggaggccgccgcccaggtgaggcaggcgactaatcagattgtgatgaattgtgctgatattgatattattacagcttcatatgcaccagaaggagatgaagaaatacatgctacaggatttaactatcagaatgaagatgaaaaagtcaccttgtctttccctagtactctgcaaacaggtacgggaaccttaaagatagattttgttggagagctgaatgacaaaatgaaaggtttctatagaagtaagtatactaccccttctggagaggtgcgctatgctgctgtaacacagtttgaggctactgatgcccgaagggcttttccttgctgggatgagcctgctatcaaagcaacttttgatatctcattggttgttcctaaagacagagtagctttatcaaacatgaatgtaattgaccggaaaccataccctgatgatgaaaatttagtggaagtgaagtttgcccgcacacctgttacatctacatatctggtggcatttgttgtgggtgaatatgactttgtagaaacaaggtcaaaagatggtgtgtgtgtccgtgtttacactcctgttggcaaagcagagcaaggaaaatttgcgttagaggttgctgctaaaaccttgcctttttataaggactacttcaatgttccttatcctctacctaaaattgatctcattgctattgcagactttgcagctggtgccatggagaactggggccttgttacttatagggagactgcattgcttattgatccaaaaaattcctgttcttcatcccgccagtgggttgctctggttgtgggacatgaactcgcccatcaatggtttggaaatcttgttactatggaatggtggactcatctttggttaaatgaaggttttgcatcctggattgaatatctgtgtgtagaccactgcttcccagagtatgatatttggactcagtttgtttctgctgattacacccgtgcccaggagcttgacgccttagataacagccatcctattgaagtcagtgtgggccatccatctgaggttgatgagatatttgatgctatatcatatagcaaaggtgcatctgtcatccgaatgctgcatgactacattggggataaggactttaagaaaggaatgaacatgtatttaaccaagttccaacaaaagaatgctgccacagaggatctctgggaaagtttagaaaatgctagtggtaaacctatagcagctgtgatgaatacctggaccaaacaaatgggatttcccctcatttatgtggaagctgaacaggtagaagatgacagattattgaggttgtcccaaaagaagttctgtgctggtgggtcatatgttggtgaagattgtccccagtggatggtccctatcacaatctctactagtgaagaccccaaccaggccaaactaaaaattctaatggacaagccagagatgaatgtggttttgaaaaatgtcaaaccagaccaatgggtgaagttaaacttaggaacagttgggttttatcggacccagtacagctctgccatgctggaaagtttattaccaggcattcgtgacctttctctgccccctgtggatcgacttggattacagaatgacctcttctccttggctcgagctggaatcattagcactgtagaggttctaaaagtcatggaggcttttgtgaatgagcccaattatactgtatggagcgacctgagctgtaacctggggattctctcaactctcttgtcccacacagacttctatgaggaaatccaggagtttgtgaaagatgtcttttcacctataggggagagactgggctgggaccccaaacctggagaaggtcatctcgatgcactcctgaggggcttggttctgggaaaactaggaaaagcaggacataaggcaacgttagaagaagcccgtcgtcggtttaaggaccacgtggaaggaaaacagattctctccgctgatctgaggagtcctgtctatctgactgttttgaagcatggtgatggcactactttagatattatgttaaaacttcataaacaagcagatatgcaagaagagaaaaaccgaatcgaaagagtccttggcgctactcttttgcctgacctgattcaaaaagtcctcacgtttgcactttcagaagaggtacgtccacaggacactgtatcggtaattggtggagtagctggaggcagcaagcatggtaggaaagctgcttggaaattcataaaggacaactgggaagaactttataaccgataccagggaggattcttaatatccagactaataaagctatcagttgagggatttgcagttgataaaatggctggagaggttaaggctttcttcgagagtcacccagctccttcagctgagcgtaccatccagcagtgttgtgaaaatattctgctgaatgctgcctggctaaagcgagatgctgagagcatccaccagtacctccttcagcggaaggcctcaccacccacagtgtgaatcctgaggtgccgccattggcggttctgctgcttcgctgcagggataaggtggagctaccgaacagctgattcatatgccaagaatttggagtcttctttcaaaccagtgggggttggacaatgaatgtagttaactggttcctgctcacactccagaattaaattctattgaaaaaggaaaatcagcaattcagcaaaaaaataaataaaaaataaaaatgtaaatatgatagtaataaaatagagcataacgaaactgtgaaactttctgaagccttgtcagtggttaaaagtatttaacactctactgttaatgacagatgttctgtttttataacctaccaaaaggaaactagaggcttcttggtgaagagcatttttgtgaagtgggttctgcaaggagcctataaagccaagggtggtgtccatttctgggaatggttaaacacaaaaggctgatagctggtatcacatagttggagtcagtgcataattccaagtggctttttttttttttggcacggggactgatcaggaagatatattcctgcataactcaatctgaaccaaggattgtagtttagttttcctccttgccttcccttctgtgtgaccgaccccttggccaaaaaaaaaacaaaaagcaaaaaacaaaaacctaccctgttctggtttttttcctccctttagttccacccccaacccccattccctggtgtccttcttagagatgaagaaataataaggaaacatctttcatagccacattaaataagagaaactgatatacattatttttttctttttaaagatgacttataagaaccctgaaatttatataggtgagacaatagaaataaaaagatcttcagccaggcctttctgaaggagttattctgctaaaaatggtcttagttgtctgaaaagccagctcttgaacctcttcacaacagtatcaacactggcttctcccggttcattttatgcgtgcgagaagtcagtggtaactgctgcagggcttaatacattagtggtaactggtttaaaaaacaaagactgtaagcctgtgtgtgccactgtttgcttcaacagtatatcctactaataagcctcacctatttaatccaatgagttttaaatctaaatctcattcccttcttctttccctaccttttttttctttttttcttaaaaaaatattttgtgttattaacagaaattcatatttggtgtggcttaacggtatttcagaaggtcatcagattgtgagactgcttccttgaaacatttttgtgctattgttttaaaaaaataattaaaaaacagttggcgtt

SEQ ID NO: 90776 - DNA, 1658 bp, Homo sapiens
ttttttttttttattaaagaatcataatgactatcatttattgaagaaagaaagcaaaaaaaactaacaattgtgatggggggaggagagacagcttggcaacattccttttaaagttaagttagcataaagaaaacaatatttagtaaatgaaatagattttcaaggtaggaaaagtagtactcaagaatgtatttttggatacaaaaattcagttacacaatcagtagcattcaaaattagttatgagtatttatacaattacaaaaatggattcatgttttaacaaagtattttaaaagctcaaacattttaaaacaggcacaatattctaaaggcatatgcattcaccatgggcttttgaatgtcctcactcccaacttcacaatcaaaatttacagaagcggcaaaagatcagagttcagagggctattttttttttccctttccttacttaaggttgcaaacacattgacagaggcaaaataaacacgtttcatagcagaaagaccaaaaaattgaatgtaaaccatagctctcccttgggagattacacaaatacaaggttcatctgtacttagaacaaggctcataacttcttgtagcatggacattcaacaggcacagagcaacaacattcacccaaataccagctgcaatttgtcctttaaggatgcctcacaaggatattatgtccaggtagctagtccatttatatcggggaccagttgtccttttgttgtttgtggctgtttattaaatgtagtggcacaactttgttgtgaatatgtaccatcatttgctacaatctagacagatcatcctgtctacaaaaaatcattttctacatttctaagaccattatcagtttatctgctcctgctagaaaaggacatactttttgtcaatttacattaacaaaggctctgctactccccatttactcgctgcaatgaaaactggtaagccaagggtaaagcttaagtatcagggactatgaatttagggtagaagtgaaaataaccaaagtggaactaaatcccctattcttgagtgcaactgagatcaagtaaacttcgctggactttcttcttaactataaaactattaaccagaaggtaaagtcacacaattttacctcccaacaaacttttaaaataaaaatttccaaaaaatttagatgtctaggttttgttatatcttaccaagagttacacagacataaatttgtatttaacttcagttaaacatctattcactttttaaaaatgctgtctgcaaataaactactggacattttaagcttactaaaaaaaacttaagatttttaaattaaaaaaaaaaaactaggacaaaaatctagcaaatggtttcacgtacctttaaacactgattcttaaaaatttatatgctgaaaatgaggtttgagaatacgtattttaaaccatttataatcctaccgtcgactctagtcagaagttatctgagcaaagagaaaataaagcctggcgtagacagtcccatagaaaatagaatccatagccactgggctgcccttcaatttcccaattcattccactaagtctcatgatgcaaatctgtcactttcatagagctatcaaaaacagaagccaagccagatcctccacactttaaga

SEQ ID NO: 90777 - DNA, 2171 bp, Homo sapiens
aactttctcaaatgacttagatttaatcatcggaagcaaactaaatggaaaccttacaatagagaagaattacatgtcagtgtcttttggaaaactgagctgggacagaaagggactgggggctgccccccaacctgatcccttctgaacaaagacgtccacagtgttcctggcactctggctcaggaaaaggggagactctgctggttctgtgcattgaagtagccttgcctagcactcactcctggccagcatcaggagccccgccttgccggctctggtcatcgcctttctttttgtggcctgaaacgatgtcatcaattcgcagtagcagaactgccgtctccactgctgtcttataagtctgcagcttcacagccaatggctcccatatgcccagttccttcatgtccaccaaagtacccgtctcaccatttacaccccaggtctcacagttctcctgggtgtgcttggcccgaagggaggtaagtagacggatggtgctggccccacagttctggatcagggtacgaggaatgacctctagggcctgggcaacagccctgtatggccattgttccacaccagtcatggccttggatttttctgtcaaggcatgggccacagccatctcggaggccccaccccctggcaccagctgagggtccaggagaacattgcgacacacttgcatggcatcctgaaagttgcgttctacttccgagagaatctctttgctagccccccggaggagaatggtgcaggccttggggtctttgcagtcagtgatgaaagtaaagtattcatctccaattttcttgatttccaacaggcctgctcctgttccaacatcatcttctctcagttcctctggtcggctgactatccgggccccacaggctctagcaatgcgattattgtctgtcttccggactctgcggatggctgtgatattggcccgcataaggtagtgctgagctaaatctgagatgcccttttcagtgatgaccacatcgggcttcagttggataatgtcctcacagagctgctggatgtactcttcctccatctggagaattcgggtgaagtcctcctctcgtgtaatctcaatgtcagtctggctttctcctttcttgtattccagagaagaatccagcagcacaatgcgagggttcttgatatagcgccgcatacgtggatgggtcacatccttgttaatcatgactccacgcaagacacaggagtcttcaatgatgcctccaggtatcttttccactcttgcatatttttttatgtcaatctctttccgaccattctcctcaaactgtaccatcttgacagcatccagggcaatgttgcaagccaaagatgaccaccgactgatggctttggtagtaatagagctgttgatgatgttcagcatcatatcactgtcactgatgtcgactgggatacttattttctttagggtgctgatcatatcatccaatgccttgcggtaagcactgatcaccactgttgggtgcatctgctgctccaggaagtgctcagctacagacagcatttcccctgcaagaataattactgatgtggtcccatctccaacctcttcatcctgggtccggctaatttcgatcatggacttggccgctggatgctggacttgaatctctcgaagaatggcattgccatcattggtcatcacaatgcctcccattgggtccaaaagcatcttcatcatggacttgggtcccaaacatgttcggatgatatctgcaatagtcttggcagcattgatgtttccagattgaacttttcttccggattcacgctttgtgttctggctgagcacgagcactggacttggccgctggatgctggacttgaatctctcgaagaatggcattgccatcattggtcatcacaatgcctcccattgggtccaaaagcatcttcatcatggacttgggtcccaaacatgttcggatgatatcttggcagcattgatgtttccagattgaacttttcttccggattcacgctttgtgttctggctgagcacgagcactggacgatggcccatcatggcgacgcgatgcagagccgggtacccagagctgggggaaccggcagaaccttctggagagagaaccagacagaagcccagaaaa

SEQ ID NO: 90778 - DNA, 825 bp, Homo sapiens
  misc_feature (1)...(825): n = a,t,c or g
gcgcccacgcgtgcggcccctgccactgggccatggagactgtggcacagtagactgtagtgtgaggctcgcgggggcagtggccatggaggccgtgctgaacgagctggtgtctgtggaggacctgctgaagtttgaaaagaaatttcagtctgagaaggcagcaggctcggtgtccaagagcacgcagtttgagtacgcctggtgcctggtgcggagcaagtacaatgatgacatccgtaaaggcatcgtgctgctcgaggagctgctgcccaaagggagcaaggaggaacagcgggattacgtcttctacctggccgtggggaactaccggctcaaggaatacgagaaggccttaaagtacgtccgcgggttgctgcagacagagccccagaacaaccaggccaaggaactggagcggctcattgacaaggccatgaagaaagatggactcgtgggcatggccatcgtgggaggcatggccctgggtgtggcgggactggccggactcatcggacttgctgtgtccaagtccaaatcctgaaggagacgcgggagcccacggagaacgctccaggagggcctgtccatcctcgctgtcctttccctgttctccccctgttctccccctgccccccgtctctatcctctgtggccttcagctaatttctgctcccctgagattcgtccttcagccccatcatgtgctttgggatgagtgtaaataaaacggggctgtggcttgggaacccccgtgtctgcgttgaggggagggggggttctgaacgctgggcacagggggcgnagacgtcactcctggtcctc

SEQ ID NO: 90779 - DNA, 4850 bp, Homo sapiens
atgtatgaaggcatcagatgcctgctgaaggcccttctggggtttgtatctctagcgataggaactctctactgcccaaggcagtaccgcccttttccaggcagtcttggaattgaggcaataaatgtcccggagcccattcccgactcctactacagagacatggccacgtggcctacacatgctccaagcgtggaggaaggaggccaggggcgctttgggaaccaggccgatcacttcttgggctctctggcatttgcaaagctgctgaaccgttccttggctgtcccttcttggattgagtaccagcatcacaagcctcctttcaccaacctccatgtgtcctaccagaagtacttcaagctggagcccctccaggcttaccatcgggtcatcagcttggaggatttcatggagaagctggcacccacccactggccccctgagaagcgggtggcatactgctttgaggtggcagcccagcgaagcccagataagaagacgtgccccatgaaggaaggaaacccctttggcccattctgggatcagtttcatgtgagtttcaacaagtcggagctttttacaggcatttccttcagtgcttcctacagagaacaatggagccagagattttctccaaaggaacatccggtgcttgccctgccaggagccccagcccagttccccgtcctagaggaacacaggccactacagaagtacatggtatggtcagacgaaatggtgaagacgggagaggcccagattcatgcccaccttgtccggccctatgtgggcattcatctgcgcattggctctgactggaagaacgcctgtgccatgctgaaggacgggactgcaggctcgcacttcatggcctctccgcagtgtgtgggctacagccgcagcacagcggcccccctcacgatgactatgtgcctgcctgacctgaaggagatccagagggctgtgaagctctgggtgaggtcgctggatgcccagtcggtctacgttgctactgattccgagagttatgtgcctgagctccaacagctcttcaaagggaaggtgaaggtggtgagcctgaagcctgaggtggcccaggtcgacctgtacatcctcggccaagccgaccactttattggcaactgtgtctcctccttcactgcctttgtgaagcgggagcgggacctccaggggaggccgtcttctttcttcggcatggacaggccccctaagctgcgggacgagttctgattctggccggagcaccagaccctctgatcctggagggaccagagtctgagctggtccttccagccaggcctggcagccagaggtgctccgggattgcaaactcctcttctcacctgccaaagatggagaagagtgccagggacccctcaaggagggagacgctccatatcccagggcataggacttgcaggttcctaggagcaggagcatctcccatcgcacgtgctttctgctcttctgggaatttctcacactggcaaagcagtccagcctccgtcttctggtccactctgctctgagcagcctgggatgctgaactcttcagagagatttttttatagagagatttctataattttgatacaaggtcatgactatcctagaactctctgtggtttttgaaaatcattgaattctattaatgtaggtacctaaagtgaccttaactgaatgtggatgaggctggggctggtgtgggtcttttggctgcttttcaaggtgtcccccaatgtggccctcaagagccatccccactgcctggccagagccattgttgtcccctacttcctaggccatttctggggcttgggggatgaatgctgtcctgtgctgtaaacactatgcaaatggaagttatcggttgtggtgctgtgcagcgctctgtgggcgactaagtgccactcacgcagcatgttcctggcaaggagcacataccatcaagccacactatcatggtattgttctcacagtcttttggtggttgatggccactgcaaacctggcaccatcagatctcttctgatctcttgccccagtggggcctggttggtagaatgttggcattcggttgatatccaaagcctgttctcccagccgtcctcctgcagctggagccttcaggccgtattctcacgagggaacgtttgccaaggctctgacctcacagaagatgcccagggcccagaagccatcagaattatcagtggagaagcaccttttgactcttcccttccaatgtaatctctgccaacaccatgaggcttaaggtgctctaagtcatgagtgttttggtctcaaatgctgcagttttaataatctgtgactcctgagagcccatggttttttgaccttgtggttctaaaattccttgtctgacccctgtagatcttttccttgccatgtcacctcccttggcctttgatcctggaaaggtggcagagcctccactgagccaggcccagagctccttgcagtgccttcttccttgtttacctgtgggaggaaacactttttttgtcaggggcagcctggttcagagctcagaggtcacactgtatcaaagatctcaaacagcaaagtcagcatttgctgtatagagctgccacccaactctaagcaggagaaactgtacagaaagggctttgctatttttcccttttgggaaaacaatgaagtgttttaagtcctgggtggactgagagatggtttgcctgtccagacttgctctcaagcctcatccagagaaggagctgcagatgagggagcccgtacactccctgccaccactaggttgtaagcctgtagctggctggctgatttcattttggaattcatttgccatccacagccttacactaggcacacactttagagtctggggctccagtggggcccgcctaattttttttccccccaagacagggccttgctctgtcctcccaggctggagtgccagtggccatggatccatggccttactgccagcccttgatcctcccccaggctcaagcgatcccttcctgccctcagccctctctggtagcctgagacctgcatgccccagctcccaaatcacccttgattcatatccagcagtaataatcacttgtgttcctgaaagaaagggcaccagaagttctagcaaaattcagttgtgttctgtgagctagcactttttcctctgacccaattttcttacctataaaatggtgataaaaaccgacaggttgttcaaaggcccagatcagctaaagcatgtatataagagcacgttgtaaacttgaaagagacaaaggcacaaatgtggctgttgattaatttgactgcttctcgttgctcgtcacctccatgccaggcactgtgcttgctaattgctttatgggggcattctcttatttattccccagccctgggaaataggagctgtcattatccttctctttctgcacaaggaaaaattaatgccctgagaattgtcataattttcccaaggctgcccagctggtggtgttaagccagaatttgacctcccagagccagtttccattagctgccatgctctgctgcctctaattcacagaatgcactttctaccctgtgtgccatggagacctcctatggaaaaatgatcagccaccttaccttctactgggtacctgctgtgagtctgcctatgccagaaggattaaggaggggaggttacccaagaaacaaagcctacatgccgcttacagcccccgttggatggttgctcagtacaacagtcttgcattcagcaggtgtttgttcatcacctactatgtgtcaggctctatgctaggtactggggatacaggagagaatcaagcgtaaagtctttgttctcaaggaatttgcattctagaaagtagaagatgtaataaatgtactgtgggacatgttaataagtgctataaagaaatataaagggtttgggagcaaaaagagggagtggatctattttagatgagcccaggtaagacctctctgaagagctgtcatgaaggagggagggagcacattcctggcagagaaaacagcacgtgcaaaggccccgagactggagtgtgttcctgaagagcagccaggaggccagcatggctggagaggcaggcataggcagggaaccgagcagcaggtcagagcaggcgagctgacattctgcagcctggacggccatggcaggaagcttttagttggagagatacaggaagcctcctagggttctgagcagaagaggggcatgagctgattcacattctgaaggacctctctagctggccagtgctgaggaggttggagagagaaagggtgaaagcagagagaccagtgcagggctgttaacagggttgcaggcgagagactggggtgctgggctcccctagactaggactccagtgccctcctctcccaagagacaaaggccattgcattgaaggaggtgggaaatgattagattctgaacatatgtaattatttttcagtctttttcaaagatacaaatatttacatagttttaatcatgtaatatatacaatttaatgtcctagtgttttacttaatagtgtatcatgttttccctgttggtatgtagcctggataaatgctcttaattataaaaaattctgtcgaggagtgttccatagtttattgttttcctattatgagaatttaggccaagtgtggtggctcatgcctgtaatcccagcactttgcgaggccgaggtgggcagatcacttgaggtgaggagttcaagaccagcctggccaacatggtgaattatctctactaaaaatac

SEQ ID NO: 90780 - DNA, 406 bp, Homo sapiens
ggcacgagctctcagggctgtttgaagtctcttggttgtaggccctcgccactgagtggcccaggtgtgagaggtagtctagagccctctgcggcctttgtggaggtccgatctcagcgtgtggtctggtgttgtttcctattccagatgccttcttctatcactgatcgatgcctatcttgtgtaaccctgacttatgcttagttgaatccatcattgggtacgaccactcgctggcatgtgtagcacgttgattagcattaattcgtccatcatctttagtttttgcgtatgtttatagtattcgtatcttttgatcgtttttgttccttgtgtaatccttgtagctgctcgcttgtagtatgctgtttcttagcgtgtttgttcgtatatttatctcttatcg

SEQ ID NO: 90781 - DNA, 669 bp, Homo sapiens
ggcacgagcacgagagtgtctgttcctgtctctcacaagacactgcataaggtagcaatgaaaagcaggagctctggaggtagacagcccaagcttttacccaaactccattacttccaagcaatgtcacctggcgcaagttccctaacctgcctgtgcctctgcttcctcatctgtgagatgataatattattagtgcctagcttataggagcactatgaggattaatttaattattgtaaagtgcttagagcagtattttgcacataacaagtggcatataataatttgttgaatgaataaacttgtcagagggggaactctcctcccctactcccaactctcccttctgtgtggagggatatcaattagtgtaacgtactgtctggaggagatggaatcattcatttgattggagagtatataggttagaataggacccagccttaagggacaggaaactccaaataatagtgacttaaacaagataaaggtcttctctagccaggcacagtggctcacacttgtaatcccagcactttgggaggccaaggtggatcacttgagatgaggagttcaagaacaacctggccaacactatgaaaccccatctctactgaaaatacaaaaattagccaggggtgggggcgaacatctggtatcccgggt

SEQ ID NO: 90782 - DNA, 538 bp, Homo sapiens
ctttgtaaagctgtgtggaccagccaaagaaggtaaaagccattaaaatgatggaattataagaatggttatgttcaatttttattattttgggaaatggtcttttaatgagaactgaatgttctcaagcttcctcatatcaaaagaggaacgccgtgtgaaggaagctgtgacttcaaggaaggtatgctctgtggctactgctgatacctctgagaggagtaccatgagactggttcttggaatactaagctggaggctggaatcagtgctgctgctttcagatatagcaagctgacaagtctttggtctctcctcctgccttcttcttctagtaccctataggcactggagaacaagatcttaacaggaagacagctggaaatgaaaaatgtagattgcatggtcccagcctcagcatcacaacggaaggctggttttggagatgagagataatcccagaataagtggcaaagtctcactgccccccccaccccttacatctgtcaaaaatctgttcttaagtccatatgagtta

SEQ ID NO: 90783 - DNA, 3327 bp, Homo sapiens
ttttccagaagataatttagaaatttattacaaaacttttaataaaaaatacaatgatattacaaatttggttttccaaagctttcaaatttttcttaacattatctttcgttttaagaacacttttgaagtcggcagttatttaaaatccttactagaaaaaaaccaaagcccaaggattttgcatttagtcatcatctaggtatacagcgtgttttccgaaagcatcctttaagagtttggagatttgatgaaattgctcatgtaataagcagttagtgaatactattgaatcctaaacccagataagtcatcttgggctggctgtgtttttcatgtgaagaaactcatttatagcacaggcaccccaggccaatagagatgattacagatctctggtttcagaagttctgaccccttattcagctaccaaatacttaattgctaaaggaattactcccagcaggcacagaacggtttctgaatatgacagaaaaggtacacaaagaatcatttaagacatcctggttacaacatactttatctttaaaagggtgtgagagtagttggggaacttagaaattctgtgacttaggtgtgggtggatcttatttaggaagactaaagctatggacacaacacgtgaaagaaccactcagaagcagccctaggaagcccaggtgcccacatcgaaagcactcccaggtgaaagcagccaggcaggcgtgggcattgtacaaccagcctcaggcctcagttcttgattgtggttgacggggcgtcaccatgaaggagcccatttagtataaagcttccaaccttttctcttaatcgtttctttaatcttttaaaccatcttcaagtgcataggggagtttccgatgccagaggatgaaagcaagtgctttctccaccctctcctcccagagtgaaaacaaatccttttgctgatacttgtttcaaaagcatccattgtaaagcttctcagtgacacaaaatactgagaggtaactttttatcaatcaaaccacataccccaatttaacacctttcagtgctctgaattcaactgacagactaaagggtgtttcctgtaacagtctgaaatattaagtgttttttttgttttgtttttaaatcttatttcagaaaacttcctcttggggtaggaaagtacacatgaagcagcaaagtaacgaagaaaaacttaaatagggccttcagagatcccacacactacaaagattctgccaagccataagataagtgtgaagcccagtatatgtccagcttttctcctcaggacatcttcagtgtttcttctcttttaaacaccacatcaggttctagccacagacttgtgttttgggtgtgcctgctttgaggggtccatgcccagtgtgtctgctggtgacccaggactcagcagtaatgactaacggccgcccttcaggatcacagatgtgcttggtggtggtggcaaagcatggcacttgtgtgcagtgatgagaagcagcacacggcaaggctgagccctttatcagcaggcctccgtagagcgtgtctgcgttgtcagctgccaatgggctgagtggctggccgtacccactcagtccaagagaggaaggaaacagcaggagaagctgtcagcttgccattcatgagctgctgctgcccaccaaagctgcttactggcaagaagagatgtggggaagacatgagctggtgaacaccaacctggtgcacatgctgccaagtctggcccctgaagaggagagggggtgcagagtccaaaattgaccggggctcctgctctggcatggagctgggtcagaggtgagagaggacctggatcctagggctcacgcaggtgtcgggcgggtgccagggtcttttcactccaactttttggctggcacccgtgtccgagcaacaaggatgggcacaagggccaggccggcaatgaggagggcccacaggggtcggtagaagagccagccagccgccacggtcagcagggtcagcgaggtggccacacagaaggcaaaggctttcaggccaatgttgaccaggtctcggaaaacaggaaaccagtccaccaaggtgtagaggatccgtgtcataaggttgaggcccatgaacatggccatccagccagctgcccgcaggccccaggtcttcatggagttgctccttagttctctatgaaacacctcctctgctgagaagtccccgtggtgcaggagcagtaaggtatccccagacttggtggagaatgggactagctggtcaccccgctgccgggcaatcacagtgaccacgtgagctgggcccaggtcagggtcatcgccgctcagtccagcataggaaaaggagacacgcaagtctcccacctctggatacttgggattttcgctgtggtagaaaaagtctccacggcgaatgatgtccacatgagggtcctccagcttggataggctcagggacttgaagttgtcgactttgtcgatgaggcctgacgagaggaaaaacctgccaatttggacaaagggggctgttgccatgaatgactcccctgccatggccctggggtttttgtggccaatctctcggtcgaagtttttgctgttgatgatttctgacctccattcagtgttgtaggaatacctcgtctccttcttcacctgcccatcctcggtgtactccctggactcctcagtttctacccattggtacatctccacgtgcctccgcagtttcacagccggaagatggaccccatagtttggatcagacaaaagcttggatgtccgtaaggcgccaatgatgtgcaccagccttccttcattctccggagccacactgtggatgctgtcgggagacaccacaagcgagagcccctcagccaatgaggttgccgtcttcaatgcgcggccctcattggtgaaaattaggtagaaggagagcaggaaggccatgagccccacaaacatcccacccgaggtctcgctcagccgttccaggaagcctggctgggagctggttttaactttgacatgttctctccgggtactggtactggaataattcgcggccatggtgggacccggctcgctgccgccgcctcgcgctgttcagctaggaagtgggctgacgactggagcgtggtgtccagcggcctcttgccagccccagcttcgaaaatccgcgtggactccagggccaagcgggacttactgcagttacctccccctgtgcccagtgtttctgcgcatgcgcgcgacgagaaatcctggaaactatacggtccgggacattgcaacgaaa

SEQ ID NO: 90784 - DNA, 641 bp, Homo sapiens
ttttttttttttggattgcaaaaatttattaaaattggagacactgttttaatcttcttgtgccatgagactccatcaggcagtctacaaagaccactgggaggctgaggatcacttgagcccagaagtttgaggctgtagtaagcttcaaaggccactgcactctagcttgggtgaggcaagaccctttcaagcagtaagctgcatgcttgcttgttgtggtcattaaaaaccctagtttaggataacaggtctgcctgcatttcttcaatcatgaattctgagtcctttgcttctttaaaacttgctccacacagtgtagtcaagccgactctccatacctttaaaaggtatgacaggaactgtcttcatgtccttacccaagcaagtcatccatggataaaaacgttaccaggagcagaaccattaagctggtccaggcaagttggactccaccatttcaacttccagctttctgtctaatgcctgtgtgccaatggcttgagttaggcttgctctttaggacttcagtagctattctcatccttccttggggacacaactgtccataaggtgctatccagagccacactgcatctgcacccagcaccatacctcacaggagtcgactcgtgccgaat

SEQ ID NO: 90785 - DNA, 657 bp, Homo sapiens
ggcacgagcgttggtttcagtttgtaatctatgagtgcacataaaatactgctagaaggcaatggccacagagttgtgctcaggacatgtgcaattctgaagttaaaattactgtgaataatttgcctatggtcaataaaagctaataaatgctagttttctttttacaaattaaattcatagaactattgctctcaaactttgatatattgtattatttttccactgtattatttcagagatgtgttcccatagaaaaggagtaactatatcaccaattttaaacatctctacttaaattttaattttaatatgtacttcagggtgcattcattcattaagcagatattgatggaatgtctattctgtgccagtcactgtttttcatgctggggatataatagggaaccaaataaattagattaaatccctgcccttgaggagcttatattttagtgggtgagacagacaataaacaagataaataggtaaaatatatgacatgttagataacagtaaatgttagaagacaaataaaacagggaagggtaatatgaaatgttaccaacaggatagaaattttagattaggtggcttttgaataaagacctgaaggaagtgggggagctttttgcctttatagggaagacaagactt

SEQ ID NO: 90786 - DNA, 394 bp, Homo sapiens
ggcacgagacagcttttataattcttcaggcgaagtaaatgagcaagcactgaagaaaatattatcaaatgtcaaaaaggtattctctaatttatcttccctttttttggtattatttgcattgtttttggttcttaaaaacacacagtactttgacagaatttttaagcagtgtttgacatcatagtatcctgtaaagtaagtaagaaaaggtttgttcttcccagaaattgaaagtggttgctctgaaaataaaactagtaattaaaaatattaattttgttctaatcctttctttgactaaataacatttatctctttctcttatatttccaccacacctcttcccactaccatttattctgtgacctaatcagttctgttattttacttg

SEQ ID NO: 90787 - DNA, 3157 bp, Homo sapiens
acgaggagacatggcggcggcgccggtaggcggctgtggtgtggagccggccgagggagacggtcggcagccacagtggcggcttggggcggatggggcggccggccgcggcctggtaacattctgctgcagctgcggcagggccagctgaccggccggggcctggtccgggcggtgcagttcactgagacttttttgacggagagggacaaacaatccaagtggagtggaattcctcagctgctcctcaagctgcacaccaccagccacctccacagtgactttgttgagtgtcaaaacatcctcaaggaaatttctcctcttctctccatggaggctatggcatttgttactgaagagaggaaacttacccaagaaaccacttatccaaatacttatatttttgacttgtttggaggtgttgatcttcttgtagaaattcttatgaggcctacgatctctatccggggacagaaactgaaaataagtgatgaaatgtccaaggactgcttgagtatcctgtataatacctgtgtctgtacagagggagttacaaagcgtttggcagaaaagaatgactttgtgatcttcctgtttacattgatgacaagtaagaagacattcttacaaacagcaaccctcattgaagatattttgggtgttaaaaaggaaatgatccgactagatgaagtccccaatctgagttccttagtatccaatttcgatcagcagcagctcgctaatttctgccggattctggctgtcaccatttcagagatggatacagggaatgatgacaagcacacgcttcttgccaaaaatgctcaacagaagaagagcttgagtttggggccttctgcagctgaaatcaatcaagcggcccttctcagcattcctggctttgttgagcggctttgcaaactggcgactcgaaaggtgtcagagtcaacgggcacagccagcttccttcaggagttggaagagtggtacacatggctagacaatgctttggtgctagatgccctgatgcgagtggccaatgaggagtcagagcacaatcaagcctccattgtgttccctcctccaggggcttctgaggagaatggcctgcctcacacgtcagccagaacccagctgccccagtcaatgaagattatgcatgagatcatgtacaaactggaagtgctctatgtcctctgcgtgctgctgatggggcgtcagcgaaaccaggttcacagaatgattgcagagttcaagctgatccctggacttaataatttgtttgacaaactgatttggaggaagcattcagcatctgcccttgtcctccatggtcacaaccagaactgtgactgtagcccggacatcaccttgaagatacagtttttgaggcttcttcagagcttcagtgaccaccacgagaacaagtacttgttactcaacaaccaggagctgaatgaactcagtgccatctctctcaaggccaacatccctgaggtggaagctgtcctcaacaccgacaggagtttggtgtgtgatgggaagaggggcttattaactcgtctgctgcaggtcatgaagaaggagccagcagagtcgtctttcaggttttggcaagctcgggctgtggagagtttcctccgagggaccacctcctatgcagaccagatgttcctgctgaagcgaggcctcttggagcacatcctttactgcattgtggacagcgagtgtaagtcaagggatgtgctccagagttactttgacctcctgggggagctgatgaagttcaacgttgatgcattcaagagattcaataaatatatcaacaccgatgcaaagttccaggtattcctgaagcagatcaacagctccctggtggactccaacatgctggtgcgctgtgtcactctgtccctggaccgatttgaaaaccaggtggatatgaaagttgccgaggtactgtctgaatgccgcctgctcgcctacatatcccaggtgcccacgcagatgtccttcctcttccgcctcatcaacatcatccacgtgcagacgctgacccaggagaacgtcagctgcctcaacaccagcctggtgatcctgatgctggcccgacggaaagagcggctgcccctgtacctgcggctgctgcagcggatggagcacagcaagaagtaccccggcttcctgctcaacaacttccacaacctgctgcgcttctggcagcagcactacctgcacaaggacaaggacagcacctgcctagagaacagctcctgcatcagcttctcatactggaaggagacagtgtccatcctgttgaacccggaccggcagtcaccctctgctctcgttagctacattgaggagccctacatggacatagacagggacttcactgaggagtgaccttgggccaggcctcgggaggctgctgggccagtgtgggtgagcgtgggtacgatgccacacgccctgccctgttcccgttcctccctgctgctctctgcctgccccaggtctttgggtacaggcttggtgggagggaagtcctagaagcccttggtccccctgggtctgagggccctaggtcatggagagcctcagtccccataatgaggacagggtaccatgcccacctttccttcagaaccctggggcccagggccacccagaggtaagaggacatttagcattagctctgtgtgagctcctgccggtttcttggctgtcagtcagtcccagagtggggaggaagatatgggtgacccccaccccccatctgtgagccaagcctcccttgtccctggcctttggacccaggcaaaggcttctgagccctgggcaggggtggtgggtaccagagaatgctgccttcccccaagcctgcccctctgcctcattttcctgtagctcctctggttctgtttgctcattggctgctgtgttcatccaagggggttctcccagaagtgaggggcctttccctccatcccttgaggcacggggcagctgtgcctgccctgcctctgcctgaggcagccgctcctgcctgagcctggacatggggcccttccttgtgttgccaatttattaacagcaaataaaccaattaaatggagactattaaataactttattttaaaaatgaaaaaaaaaa

SEQ ID NO: 90788 - DNA, 655 bp, Homo sapiens
ggcacgagacttcacacaaactggagacaaggttgcaaaacgaatgctaatatatttggcacactttctcacacttgtccttctgtgaacttttcttgttgctaatttgttatgtcagcccatgttagtaggtttcaaaagtccaaactggcaagtgtggtgacccaaagagaaccagcctttggaagatctttaaattgaaacataggagatgggcagtttattagctgtacctatagtcctataaatgtgactatgttaacttggaggaggtgccaagtttcaggagtaatcttcagagtctttcaaaatccacttcgtaatgtgacatttttatttaggaaataaatggttgccggtcagttaacaacattcattgcctgcaaataatatatttacctatcttggggtgataaagcccaaaattccaacatgattgcatgatacagggatttccctcaatgaacttacattgttaatagcaaaacaaggaaacatacatgaaaaggatacaaaaacacttggaaaatacatacataattaggagaagatcaagagtgaactgggaagggaaatggataatgatgttggtagggacccgatacaactgaatgtagaatgcgagggctttttcaaaacaaccgtttaacctgag

SEQ ID NO: 90789 - DNA, 717 bp, Homo sapiens
ggcacgagggaagaacttatagattgaaacagccatatgaaaagtggagtcaaaaactgagccttaaattattagtatgaaagacatcacagtctgtgaccaattcatcaaattatctcctgcgtatagcaacaattctaataccaagaaaaacaaaaactgcatagattttctccacttgtttccgtgtaggtgggctatatgtggtgatgtgaactgctctctcatatcctgagatcatttctacttttaatttttgcagtgtctaaatcttattttatagatttctcatcgacatgtcttactttaggtttctcaattgaattctgttataaatcctcttaggttactttagtagtaaaatcttattagcttacccttttagataaggagaagtctgttttgttgagtaccctttgaaaatcacatttctgtctgcgtagtgcttgaacaggtgctttctaagagacactgtgttttatatgctacctgattttcatatacatttgccctgcagtatccatgggggattgattccaggactccacttggatacaaaaatccaaggatcctcaagtcccttatataaaattgtgccatatttgcacttaacctttgtaaatcctctcatatactttaaatcacctctaaattacttataacatgtaatacaatgtaaatgctatgtaaatacttggtatactgtattagctaggg

SEQ ID NO: 90790 - DNA, 646 bp, Homo sapiens
ggcacgagcggcacgaggtgggccctgacattttcattagcaatggttcccttgatttcccttcagacgaatccttcctgaacccaggtgccctttatcctgcacattagcccctagtcagctcttacaagccataatgtgccgtgaagttctccagatttttccctggttggccactctgagtgtttttcactgctcaccacctctaatcaaatcagcttggtttccctgtgtctccttccctctgttttgctcctggaaactgtgataaccagatgcattaacatttccgagagtccaccacatgccaggctctgtcccatgtacattacagtgcacttgaggctcatttagcctccctttcaattgagcaggtagactattattcctgttttccagatatgcaaactgaggcacagagctgtgaagtaattagttcagatagaagacacatagtgggaccaggattgaagctcaggtgtggtttactctaaagccacaacaggtacctaacctcagcacctctagagggcaaacttttttatcttggggaatcctgtttttgcctggaaacatttccagcatctcagttcctcagcagacttccgttttacagttacgatccgggccccaggaagggggtggg

SEQ ID NO: 90791 - DNA, 1032 bp, Homo sapiens
ggcacgaggcatttgcagagtgagacaaagcggagaacgctggtgggcctgttgtggagtacgctttggactgagaagcatcgaggctataggacgcagctgttgccatgacggcccaggggggcctggtggctaaccgaggccggcgcttcaagtgggccattgagctaagcgggcctggaggaggcagcaggggtcgaagtgaccggggcagtggccagggagactcgctctacccagtcggttacttggacaagcaagtgcctgataccagcgtgcaagagacagaccggatcctggtggagaagcgctgctgggacatcgccttgggtcccctcaaacagattcccatgaatctcttcatcatgtacatggcaggcaatactatctccatcttccctactatgatggtgtgtatgatggcctggcgacccattcaggcacttatggccatttcagccactttcaagatgttagaaagttcaagccagaagtttcttcagggtttggtctatctcattgggaacctgatgggtttggcattggctgtttacaagtgccagtccatgggactgttacctacacatgcatcggattggttagccttcattgagccccctgagagaatggagttcagtggtggaggactgcttttgtgaacatgagaaagcagcgcctggtccctatgtatttgggtcttatttacatccttctttaagcccagtggctcctcagcatactcttaaactaatcacttatgttaaaaagaaccaaaagactcttttctccatggtggggtgacaggtcctagaaggacaatgtgcatattacgacaaacacaaagaaactataccataacccaaggctgaaaataatgtagaaaactttatttttgtttccagtacagagcaaaacaacaacaaaaaaacataactatgtaaacaagagaataactgctgctaaatcaagaactgttgcagcatctcctttcaataaattaaatggttgagaacaatgcataaaaaaaaaaaa

SEQ ID NO: 90792 - DNA, 1340 bp, Homo sapiens
acttattgacagtgccaaagctcggtactggacacaacgagggacctgggtctacgataacgcgcttttgctcctcctgaagtgtctttggtccaacgttgttccagagtgtaccatggcttccagtaacactgtgttgatgcggttggtagcctccgcatattctattgctcaaaaggcaggaatgatagtcagacgtgttattgctgaaggagacctgggtattgtggagaagacctgtgcaacagacctgcagaccaaagctgaccgattggcacagatgagcatatgttcttcattggcccggaaattccccaaactcacaattataggggaagaggatctgccttctgaggaagtggatcaagagctgattgaagacagtcagtgggaagaaatactgaagcaaccatgcccatcgcagtacagtgctattaaagaagaagatctcgtggtctgggttgatcctctggatggaaccaaggaatataccgaaggtcttcttgacaatgtaacagttcttattggaattgcttatgaaggaaaagccatagcaggagttattaaccagccatattacaactatgaggcaggaccagatgctgtgttggggaggacaatctggggagttttaggtttaggcgcctttgggtttcagctgaaagaagtccctgctgggaaacacattatcacaactactcgatcccatagcaacaagttggttactgactgtgttgctgctatgaaccccgatgctgtgctgcgagtaggaggagcaggaaataagattattcagctgattgaaggcaaagcctctgcttatgtatttgcaagtcctggttgtaagaagtgggatacttgtgctccagaagttattttacatgctgtgggaggcaagttaaccgatatccatgggaatgttcttcagtaccacaaggatgtgaagcatatgaactctgcaggagtcctggccacactgaggaattatgactactatgcaagccgagttccagaatctattaaaaatgcacttgttccttaaaggaaagtttcatttggccgggcgcggtggctcatgcctgtaatcccagcactttgggaggccgaggcaggtggatcacttgagctcaggagtttgagaccagcctgggcaatatcgtgagaccccatctctgcaaaaatacaaattaactgggcatcctgtcatgcgcctgtcatcccagctacttgagaggctgaagcagaagaatctcttgagcccggaaggcagaggttgcagtgagctgagactgtgccactgcactccagcctgagtgacaggagttaagccctgtctcaga

SEQ ID NO: 90793 - DNA, 359 bp, Homo sapiens
gccatggcgggacaggaggatccggtgcagcgggagattcaccaggactgggctaaccgggagtacattgggataatcaccagcagcatcaagaaaatcgcagactttctcaactcgttcgatatgtcttgtcgttcaagacttgctacactaaacgagaaattgacagcccttgaacggagaatacagtacattgaggcttgcctgacataccgtgcgatgctcaccttgacctgtgttttgcatctgttccccgtcttgaaaacaccactccctgttaatatatcacatctatgtatcatatttccaccctcggttgtatcaaaccatcccggtttctctccaaccctcgctgttcg

SEQ ID NO: 90794 - DNA, 1966 bp, Homo sapiens
accctggagctagcgtcatcgcgaaggaactcccacgaccggatggaagagcccagctgacacaaccaagacgagtctcagtgtctagggaagcttggggttctgctccttttacttcaggcgaacctgaactcagttaatgcaattttgaagcatgccctgaatagattcagtcattatcaagtcaaactaaaaacggtgaaaggttgcgactattaccaaataggaaaaacctgaagacataagaactacacatgaggaatatgtcatttagcactttcactttttgatctccacagaagacaatgagaagtcataccataacaatgacgacaacttcagtcagcagctggccttactcctcccacagaatgcgctttataaccaatcatagcgaccaaccgccacaaaacttctcagcaacaccaaatgttactacctgtcccatggatgaaaaattgctatctactgtgttaaccacatcctactctgttattttcatcgtgggactggttgggaacataatcgccctctatgtatttctgggtattcaccgtaaaagaaattccattcaaatttatctacttaacgtagccattgcagacctcctactcatcttctgcctccctttccgaataatgtatcatattaaccaaaacaagtggacactaggtgtgattctgtgcaaggttgtgggaacactgttttatatgaacatgtacattagcattattttgcttggattcatcagtttggatcgctatataaaaattaatcggtctatacagcaacggaaggcaataacaaccaaacaaagtatttatgtctgttgtatagtatggatgcttgctcttggtggattcctaactatgattattttaacacttaagaaaggagggcataattccacaatgtgtttccattacagagataagcataacgcaaaaggagaagccatttttaacttcattcttgtggtaatgttctggctaattttcttactaataatcctttcatatattaagattgggaagaatctattgaggatttctaaaaggaggtcaaaatttcctaattctggtaaatatgccactacagctcgtaactcctttattgtacttatcatttttactatatgttttgttccctatcatgcctttcgattcatctacatttcttcacagctaaatgtatcatcttgctactggaaagaaattgttcacaaaaccaatgagatcatgctggttctctcatctttcaatagttgcttagatccagtcatgtatttcctgatgtccagtaacattcgcaaaataatgtgccaacttctttttagacgatttcaaggtgaaccaagtaggagtgaaagcacttcagaatttaaaccaggatactccctgcatgatacatctgtggcagtgaaaatacagtctagttctaaaagtacttgaggtaaacatactaaaatgaattatataatgcagcctcttatttctttgaagaactaaaaaattaggaaacaaagttctagccatttaccaaaactcagatcttcaaggcttctgcttggtattttgtggatatttccatttgccttaactgtaaacccatttcaaggtacctatccttttaaatcctgtatgtaaaatcttttcaaaatacatttttaagcctaatactcttaacatagattatgaagttaagtgaaatttatgggctctaacaggcaaaataattaaagtgccatagtttctcaagtgactaaagtaggttatttaaaatcaaggcacttggtactaatttgaagtgtgtttaaaagtaaatgatttgggaactgacaatgtgtcagaaaatatatgttcatttatcattttaaaatcttgtataatttgcccctgtattcatttatgcctaaatctctataacagatgaaaagataattaataaaatcctaattaaaaaatgg

SEQ ID NO: 90795 - DNA, 1464 bp, Homo sapiens; identical to SEQ ID NO: 58749

SEQ ID NO: 90796 - DNA, 499 bp, Homo sapiens
ggcacgaggagagattcacgcaccctcaagagtgtgggtgagacatatacagcctgttagacctgaaggcagatggctcttcttaaggccaataaggatctcatttccgcaggattgaaggagttcagcgttctgctgaatcagcaggtcttcaatgatcctctcgtctctgaagaagacatggtgactgtggtggaggactggatgaacttctacatcaactattacaggcagcaggtgacaggggagccccaagagcgagacaaggctctgcaggagcttcggcaagagctgaacactctggccaaccctttcctggccaagtacagggacttcctgaagtctcatgagctcccgagtcacccaccgccctcctcctagctcagggacccagcccctcctctctgagaaactctgaccttcatgtccttaggctgtgctcctgccactctaccctgacacctcaataaagaccagtgctggtttttgttgggaaaaa

SEQ ID NO: 90797 - DNA, 3058 bp, Homo sapiens
gtaacacctcagggggcctcagctcctttttcagccattccctcaagtacttggaattccagccagtcccaggtaaaccaccacagtgctgctagtaatgaaacctaccaggaacgcttggcacgtctagaaggggataaggagtccctcatattgcaggtgagtgtcctcacagaccaagtagaagcccagggagaaaagattcgagacctggaagtgtgtctggaaggacaccaggtgaaactcaatgctgctgaagagatgcttcaacaggagctgctaagccgcacatctcttgagacccagaagctcgatctgatgactgaagtgtctgagctgaagctcaagctggttggcatggagaaggagcagagagagcaggaggagaagcagagaaaagcagaggagttactgcaagagctcaggcacctcaaaatcaaagtggaagagttggaaaatgaaaggaatcagtatgaatggaagctaaaggccactaaggctgaagtcgcccagctgcaagaacaggtggccctgaaagatgcagaaattgagcgtctgcacagccagctctcccggacagcagctctccacagtgagagtcacacagagagagaccaagaaattcaacgtctgaaaatggggatggaaactttgctgcttgccaatgaagataaggaccgtcggatagaggagcttacggggctgttaaaccagtaccggaaggtaaaggagattgtgatggtcactcaagggccttcggagagaactctctcaatcaatgaagaagaaccggagggaggtttcagcaagtggaacgctacaaataaggaccctgaagaattatttaaacaagagatgcctccaagatgtagctctcctacagtggggccacctccattgccacagaaatcactggaaaccagggctcagaaaaagctctcttgtagtctagaagacttgagaagtgaatctgtggataagtgtatggatgggaaccagcccttcccggtgttagaacccaaggacagccctttcttggcggagcacaaatatcccactttacctgggaagctttcaggagccacgcccaatggagaggctgccaaatctcctcccaccatctgccagcctgacgccacggggagcagcctgctgaggctgagagacacagaaagtggctgggatgacactgctgtggtcaatgacctctcatccacatcatcgggcactgaatcaggtcctcagtctcctctgacaccagatggtaaacggaatcccaaaggcattaagaagttctggggaaaaatccgaagaactcagtcaggaaatttctacactgacacgctggggatggcagagtttcgacgaggtgggctccgggcaaccgcagggccaagactctctaggaccagggactccaagggacagaaaagtgacgccaatgccccctttgcccagtggagcacagagcgtgtgtgtgcatggctggaggactttggcctggctcagtatgtgatctttgccaggcagtgggtatcttctggccacaccttattgacagccacccctcaggacatggaaaaggagctaggaattaagcacccactccacaggaagaagcttgttttagcagtgaaagccatcaacaccaaacaggaggagaagtctgcactgctagaccacatttgggtgacaaggtggcttgatgatattggcttaccccagtacaaagaccagtttcatgaatctagagttgacggacgaatgctgcaatacctaactgtgaacgatttactcttcttaaaagtcaccagccaactacatcatctcagcatcaaatgtgccattcacgtgctgcatgtcaacaagttcaacccccactgcctgcaccggcggccagctgatgagagtaacctttctccttcagaagttgtacagtggtccaaccacagggtgatggagtggttacgatctgtggacctggcagagtatgcacccaatcttcgagggagtggagtccatggaggcctcattatcctggagccacgcttcactggggacaccctggctatgcttctcaacatccccccacaaaagacgctcctcaggcgccacctgaccaccaagttcaatgccttgattggtccggaggctgaacaggaaaagcgagagaaaacggcctcaccagcttacacagcactgaccaccacagccaaagtccggccaaggaaactaggattttcacacttcggaaacataagaaaaaagaagttcgatgaatcgacggactacatttgcccaatggagcccagtgacggtgtcagtgatagtcacagggtctacagtggctaccggggcctcagcccccttgatgcccctgaactggatgggctggaccaggtgggacagattagctgatgcccttgtcacctgccctctgtgcaccctgagagctcacagtaacactgtgtgtgtcaccatataactgcacctcacccccgcacgtgtgcatgactcgcagagaatattccagcaattgtgtacccctgggccagtctctttgaaccctgagggtggccaggatctggagctgcatctctaaggggccaggctttggggaccattgccaaaggtggactcaggaggaaagacacttaaagacacttttacatgtctagtaattcttgatgttcatcttcagcaccagtggaaacacatgaacttcgatgcaggtccagagaccatggacactcccacgaggctcagctctcaggcaccccctacacttcagttgagggaaaagctcaagtgccttaggcccgtggaccacagtcttggctgagatcaaagggatgagcaacagggacttctgccacagtgacaatggaattgtgttgtgccttacttcagaggtggtctcttctttcttgtaataaaagcaatatttatgcggaaaaaaaaaaaaaaggggcggccgttttaaaggatccaagttatacgccgcgggctggcaaggtaatagtttttttatggggcccccaaaattcaatccacgggg

SEQ ID NO: 90798 - DNA, 1603 bp, Homo sapiens; identical to SEQ ID NO: 58826

SEQ ID NO: 90799 - DNA, 368 bp, Homo sapiens
ggcacgagggcagcgggcagcacagggccattttccccccagataacagagtctagcttctgactggctaaatgacttgccagaggaaaaggatgttggagactggatggtgtcccagatctttccactgccccatctaaagagcaggccttggctgtgcctggctggccttcacagcagcggcccctgtctcctccacagtcaggacaaggagccaaaggatgtaagggacaagtgtctgctctgccagacttgttcgacccatgtcatagccatcttcaactttagagactgtattgcaggtcgtcggaggtgtatctgtctcctcccactagtttgagagttccctgaggacaggaacagttccg

SEQ ID NO: 90800 - DNA, 938 bp, Homo sapiens
ggcacgagtagcagcttcaataccctgagacaacttcacatgcagggaaagcctactgtggccttgaccacaacagtgggcatggactgagtatctccatgtgccagaaactgggctctgtcccttaggtttaccatcatctcatttaatccttaaaaagtaggtactattgttgggggagaggggctattctggtgtctacttttcacatgaaaagaatgaacacagagaggtgaatttgcccaaggttacaccttggtggagtgcagactcaaacccaggcagttggtgtggggacctaagttcacagccaccacaaaggactggtgccttgtcctctgacagtacaagtcttatgcttctcaccagcagggcttctaccacctttctgctgggccctcatcagcattctcttgccttgaaaccccaacttaggacttcccaggtgcttcctctagagccacacaatcaaccacagccagcagcagatagaaagcaggatagccgtggtctacaaatgaagaatctgggattccacaaagtgaagtggctccctcaaagtcacaatgttaagaagtggcaacactgggacaaagagccaagacttgactacaagtgcagtctagcaccccctttcaacacactagtcactccaatatgagctagatttatatctggcacccaagccccacgacaaagctaatggacccttcacaaaaccggatagaaataccaacctccccatccaatcttagggagcaataacaccttttaacatgggaaccgaagaaggccactgagacctaaccttgccttggacttaaggccctggagtcctaataccccaaaaaggttaacttgcccacagaaccccctcgaaggccttaacttccagggaaccttggctgggaaactttttaaggaccaaattcataact

SEQ ID NO: 90801 - DNA, 933 bp, Homo sapiens
ggcacgagaagaatacaacaattagacaatatttaagtaaattaaactatactataaataacatagctatttataaaaagttatgaagtacaggtattcatggagatacgctcaatgtaatatcaaatagaagcattgggtatgattattgcgtgtatagagtccatcatgctggtgtgtcatggtggtttactttttttctgcaataatttctatgaagaaagatgcttaccttttttatagaactggaagaagacatggcttgcaccaacagcaacagagatgggccccacagttgccactgccttcgccaggtccttctcccgtgaagggatgtccacaaaaccagtgtcattagcagcagaatacttgggattgtacctacaggttttaaccttttaaaggtgaagagggaggtgacttgattactaccatccttctcctggggaatgtgagtcagaaccacaacactcagcagtttgcagcatagaatttccaagtcaacactgttacaaatcatccaaggaagtgaaatgctattattaatagctaatttgaaactgaaaattaactcagttctcttcagtgagacccccaggtttactttccgtaagacattttttacaatggagacatttggattatatgtagaatggtctgtatattctccatggtacatagaagcaagaaacagtgcatggtaaccatggcatcacagaactggtccaagggctttaatttaataaggccaacactggaacttttgcaaatgaagattccccatctaacaccgggaatctgaaaaagggccgggaattttgaaagggtcccaattaacccatccggaattggcactcagaaaaaggagctccatttaccttttctctataagggataggagcctccaaaaccaagccctccgttctcctgaac

SEQ ID NO: 90802 - DNA, 373 bp, Homo sapiens
ggcacgagctggagtaccttgcgtgcagttatgtcggcgtcggtagtgtctgtcgtttcgcgggtcttagaagagtacttgagctccactccgcagcgtctgaagttgctggacgcgtacctgctgtatatactgctgaccggggcgctgcagttcggatactgtctttttgtgttgacctttcactttaactctcttctcttgttcttcttcttttgtgtgggtagttttcattctaacgtttattttttattgtttacattatcttttttatgttttctttttattgcttattttttcttaattcgttttttctctttatttatttggttttttcatgttttcttcattgagttgtctttattttattttt

SEQ ID NO: 90803 - DNA, 1759 bp, Homo sapiens; identical to SEQ ID NO: 59314

SEQ ID NO: 90804 - DNA, 1554 bp, Homo sapiens
agcggccgctgaggggaccgccccatccccgggccgcgtctctccgccgaccccggcgcgcggcgagccggaagtcacggtggagatcggagaaacgtacctgtgccggcgaccggatagcacctggcattctgctgaagtgatccagtctcgagtgaacgaccaggagggccgagaggaattctatgtacactacgtgggctttaaccggcggctggacgagtgggtagacaagaaccggctggcgctgaccaagacagtgaaggatgctgtacagaagaactcagagaagtacctgagcgagctcgcagagcagcctgagcgcaagatcactcgcaaccaaaagcgcaagcatgatgagatcaaccatgtgcagaagacttatgcagagatggaccccaccacagcagccttggagaaggagcatgaggcgatcaccaaggtgaagtatgtggacaagatccacatcgggaactacgaaattgatgcctggtatttctcaccattccccgaagactatgggaaacagcccaagctctggctctgcgagtactgcctcaagtacatgaaatatgagaagagctaccgcttccacttgggtcagtgccagtggcggcagccccccgggaaagagatctaccgcaagagcaacatctccgtgtacgaagttgatggcaaagaccataagatttactgtcagaacctgtgtctgctggccaagcttttcctggaccataagacactgtactttgacgtggagccgttcgtcttttacatcctgactgaggtggaccggcagggggcccacattgttggctacttctccaaggagaaggagtccccggatggaaacaatgtggcctgcatcctgaccttgcccccctaccaacgccgcggctacgggaagttcctcatcgctttcagttatgagctctccaagctggagagcacagtcggctccccggagaagccgctgtctgacctgggcaagctcagctaccgcagctactggtcctgggtgctgctggagatcctgcgggacttccggggcacactgtccatcaaggacctcagccagatgaccagtatcacccaaaatgacatcatcagtaccctgcaatccctcaatatggtcaagtactggaagggccagcacgtgatctgtgtcacacccaagctggtggaggagcacctcaaaagtgcccagtataagaaaccacccatcacaggtgggtggggggctgctgtgtgtcgggggcggtgggggagtgtcagtatatggactggtaggagtcaaggcctccttattgctgtcacatgatcccaaaccagtcagaccagctcccaggatggagcccggggcaggcctctcattcctgggcttccctgcccctccccagcacagcctgcccttttgttctcacctggaggaggtgaaactggcctgagcccagaggagggcagccaggtgtgagctggcctggcccaggcccagccctgcctcccgccccttctccccacagtggactccgtctgcctcaagtgggcaccccc

SEQ ID NO: 90805 - DNA, 2009 bp, Homo sapiens
cgacccacgcgtccgcccacgcgtccggctcgcaagcgaggcagccatgtcttatcccgctgatgattatgagtctgaggcggcttatgacccctacgcttatcccagcgactatgatatgcacacaggagatccaaagcaggaccttgcttatgaacgtcagtatgaacagcaaacctatcaggtgatccctgaggtgatcaaaaacttcatccagtatttccacaaaactgtctcagatttgattgaccagaaagtgtatgagctacaggccagtcgtgtctccagtgatgtcattgaccagaaggtgtatgagatccaggacatctatgagaacagctggaccaagctgactgaaagattcttcaagaatacaccttggcccgaggctgaagccattgctccacaggttggcaatgatgctgtcttcctgattttatacaaagaattatactacaggcacatatatgccaaagtcagtgggggaccttccttggagcagaggtttgaatcctattacaactactgcaatctcttcaactacattcttaatgccgatggtcctgctccccttgaactacccaaccagtggctctgggatattatcgatgagttcatctaccagtttcagtcattcagtcagtaccgctgtaagactgccaagaagtcagaggaggagattgactttcttcgttccaatcccaaaatctggaatgttcatagtgtcctcaatgtccttcattccctggtagacaaatccaacatcaaccgacagttggaggtatacacaagcggaggtgaccctgagagtgtggctggggagtatgggcggcactccctctacaaaatgcttggttacttcagcctggtcgggcttctccgcctgcactccctgttaggagattactaccaggccatcaaggtgctggagaacatcgaactgaacaagaagagtatgtattcccgtgtgccagagtgccaggtcaccacatactattatgttgggtttgcatatttgatgatgcgtcgttaccaggatgccatccgggtcttcgccaacatcctcctctacatccagaggaccaggagcatgttccagaggaccacgtacaagtatgagatgattaacaagcagaatgagcagatgcatgcgctgctggccattgccctcacgatgtaccccatgcgtattgatgagagcattcacctccagctgcgggagaaatatggggacaagatgttgcgcatgcagaaaggtgacccacaagtctatgaagaacttttcagttactcctgccccaagttcctgtcgcctgtagtgcccaactatgataatgtgcaccccaactaccacaaagagcccttcctgcagcagctgaaggtgttttctgatgaagtacagcagcaggcccagctttcaaccatccgcagcttcctgaagctctacaccaccatgcctgtggccaagctggctggcttcctggacctcacagagcaggagttccggatccagcttcttgtcttcaaacacaagatgaagaacctcgtgtggaccagcggtatctcagccctggatggtgaatttcagtcagcctcagaggttgacttctacattgataaggacatgatccacatcgcggacaccaaggtcgccaggcgttatggggatttcttcatccgtcagatccacaaatttgaggagcttaatcgaaccctgaagaagatgggacagagaccttgatgatattcacacacattcaggaacctgttttgatgtattataggcaggaagtgtttttgctaccgtgaaacctttacctagatcagccatcagcctgtcaactcagttaacaagttaaggaccgaagtgtttcaagtggatctcagtaaaggatctttggagccagatttgtcgtctcattattgtaggagagaatttgtgggttgtggcagtaatacatttcccatgtgtcctgatgctttcaggatacatcagttgttagtgttta

SEQ ID NO: 90806 - DNA, 1943 bp, Homo sapiens
ttctcactggacaaaagcgtggtctctggcgcggggatctcagagtttcccgggcactcaccgtgtgtagttggcatctccgcgcgtccggacacccgatcccagcatccctgcctgcaggactgttcgtgttcagctcgcgtcctgcagctgtccgaggtgctccagttggaggctgaggttcccgggctctgtagctgagtgggcggcggcaccggcggagatgcctgggaagaaggcgcgcaagaacgctcaaccgagccccgcgcgggctccagcagagctggaagtcgagtgtgctactcaactcaggagatttggagacaaactgaacttccggcagaaacttctgaatctgatatccaaactcttctgctcaggaacctgactgcatcaaaaacttgcatgaggggactccttcaaaagagttttctcaggaggtgcacgtttcatcaatttgaagaaagactgcattgtaattgagaggaatgtgaaggtgcattcatgggtgcccttggaaacggaagatggaatacatcaaagtgaatttctgttcaagttttcccagattatcattctttgggatgagagaacattataaaaccactttgtttattttaaagcaagaatggaagacccttgaaaataaagaagtaattattgacacatttcttttttacttagagaatcgttctagtgtttttgccgaagattaccgctggcctactgtgaagggagatgacctgtgattagactgggcggctggggagaaacagttcagtgcattgttgttgttgctgtttttggtgttttgcttttcagtgccaactcagcacattgtatatgattcggtttatacatattaccttgttataatgaaaaaactcattctgagaacactgaaatgttatactcagtgttgatttcttcggtcactacacaacgtaaaatcatttgtttcttttgactcaaattgtattgcttctgttcagatgatctttcattcaatgtgttcctgttgggcgttactagaaactatggaaaactggaaaataactttgaaaaaattggataaagtataggagggttacttggggccagtaaatcagtagactgaacattcaatataataaaagaacatggggattttgtataaccagggataataaaaagaaaaaagaagttaatttttaattgatgtttttgaaacttagtagaacaaatattcagaagtaacttgataagatatgaatgtttctaaagaagtttctaaaggttcggaaaatgctccttgtcacattagtgtgcatcctacaaaaagtgatctcttaatgtaaattaagaatattttcataattggaatatacttttcttaaaaaaaaggaacagttagttctcatctagaatgaaagttccatatatgcattggtgaatatatatgtatacacatacttacatacttatatgggtatctgtatagataatctgtattagagtattatatagcttcttagtagggtctcaagtaagtttcattttttttatctgggctatatacagtcctcaaataaataatgtcttgattttaatttcagcagggaataattttatttattttgcctatttataattaaagtatttttctttagtttgaaaatgtgtattaaagttacatttttgagttacaagagtcttataactacttgaatttttagttaaaatgtcttaatgtaggttgtagtcactttagatggaaaattacctcacatctgttttcttcagtattacttaagattgtttatttagtggtagagagattttttttttcagcctagaggcagctattttaccatctggtatttatggtctaatttgtatttaaacatatgcacacatataaaagttgatactgtggcagtaaactattaaaagttttcactgtt

SEQ ID NO: 90807 - DNA, 2694 bp, Homo sapiens; identical to SEQ ID NO: 59697

SEQ ID NO: 90808 - DNA, 2916 bp, Homo sapiens
gcggccgccatggacgagcaggcgggtcccggcgtcttcttcagcaacaaccacccgggcgccggcggtgccaaggggctcgggcctctggcggaggctgccgcggccggcgacggggcggctgcggcgggggcggcccgagcccagtacagtctcccggggatcctgcacttcctgcagcacgagtgggcccgcttcgaggtggagagagcccagtgggagggggagcgggcggagctgcaggcccagattgccttcctgcagggagaaaggaagggccaagaaaatttgaagaaggatcttgtgaggaggatcaaaatgttggagtatgctcttaaacaggaaagagccaaataccacaagttgaaatacgggacagaattgaatcagggagatatgaagcctccaagctatgattctgatgaaggtaatgaaacagaagtgcagccacaacaaaacagccagttaatgtggaaacaaggtcgacaactactcagacagtatctacaggaggtgggttatacagatactattctagatgtgaaatctaaacgagtccgagctttgttgcctttttcaattgatgtcacggacagggaagatgacaaaaatcaggactcagttgtaaatggcacagaggctgaagttaaagagacagcaatgattgcaaaatctgagttaacagattctgcctccgtgctggataatttcaaattccttgaaagtgcagctgcagatttcagtgatgaagatgaagatgatgatgttgatggaagagagaaaagcgtcattgatacttcaacaattgttaggaaaaaagcattgcctgacagcggtgaagatcgagatacaaaagaagctctaaaggagtttgacttcttggttacatcagaggaaggagacaatgaatctagaagtgcaggcgatggaacagactgggaaaaggaagaccagtgtctcatgcctgaagcctggaatgtggaccagggagtaattaccaaactcaaggaacaatacaaaaaggagagaaaggggaaaaagggggtgaagaggcccaataggtcaaaactacaagatatgcttgctaatttgagagatgttgatgaacttccttcattgcagccatctgtgggttcaccttccagacccagcagctccaggcttcctgaacatgaaattaatagggcagatgaagtggaagcattgacatttcctccttcttctggaaagtcattcatcatgggagcagatgaagcccttgaaagtgaactgggacttggagaactagcaggccttacggcggccaatgaagcagactcactaacttatgatatagcaaacaataaagatgcattgaggaagacatggaaccctaagtttacattgagaagtcactttgatggcatccgagcccttgctttccatcccattgagcctgttttgataacagcatcagaggatcacacattaaaaatgtggaatttacagaaaacagccccagccaaaaagagcacttctcttgatgtagaacctatctatacattcagagcccataaaggtccagtgctttgtgtggtaatgagcagcaatggtgagcagtgttacagtggtggtactgatggactgatccagggctggaataccactaatcccaacatcgacccctatgattcttatgatccttctgttttacgaggccctctgctaggccacacggatgcagtctggggtttggcttatagtgcagcacatcagcgtttgttgtcctgttcagcagatggcactctgcgtttatggaatacaactgaggttgctccagcactaagtgtatttaatgatattaaagaactgggaatccctgcctctgtggatctagtgagcagtgacccgagccatatggtagcatcattcagcaagggatatacaagcatttttaacatggaaacacaacaacgcattctcactttagaatccaatgtagatacaacagccaactcttcctgccaaataaatagagtcatcagtcatcctactctttcgatcagcatcactgctcatgaagacaggcacatcaaattctatgataacaatacaggcaaactgatccactcgatggtagcccacctagaagctgttacaagtttagcagttgatcccaatggcctttacttgatgtctggcagtcatgactgttcaatacgtttatggaatctagaaagtaagacgtgtatccaagaattcacagctcatcgaaaaaagtttgaagaatcgattcatgatgtagctttccacccatccaaatgctatatagccagtgctggagctgacgcactggctaaagtctttgtatgacgcaatgcatcatcttcaccttctagctgtttataagtaatcaactgcacacaagagatacagaagacgagggcaagaatcatctcgtcctgcccttttgttctgctgaaggagcacagagaacatttgttgaagtatagttttgcaattcatatactgttttctaaaactaaggtttgttcaggttgctgcaagctcagctgaatctgtgagcctgaggtctgtttcaaatttctccccaataggcgcctttatttctgaggtggttctaattcgctaggcaggcctgagcgaatacaagtttagcttgtccctgttgagtaagtagggcatgctacaatggataatttaaaagcttgatagctgggactgaatagaagaaaacgggaaacttagaccaagttctcccctgagaaatcttgttaaaacacattaagtagtcaaaatagtaatctttatcatatctgccatattaacccctttgtgtataatgaccaggcagtgttaaactgagtttttaatttgactctcctttcagctgtcacataaagacctggcaagcat

SEQ ID NO: 90809 - DNA, 1534 bp, Homo sapiens
ccaccgctccgaattcccgggtcgacgatttcgttgagaggcgcacccgggcggccagctgggctcggagcggaacggggtcaggatggacgaggacgtgctaaccaccctgaagatcctcatcatcggcgagagtggggtgggcaagtccagcctgctcttgaggttcacagatgatacgtttgatccagaacttgcagcaacaataggtgttgactttaaggtgaaaacaatttcagtggatggaaataaggctaaacttgcaatatgggatactgctggtcaagagaggtttagaacattaactcccagctattatagaggtgcacagggtgttatattagtttatgatgtcacaagaagagatacatttgttaaactggataattggttaaatgaattggaaacatactgtacaagaaatgacatagtaaacatgctagttggaaataaaatcgataaggaaaatcgtgaagtcgatagaaatgaaggcctgaaatttgcacgaaagcattccatgttatttatagaggcaagtgcaaaaacctgtgatggtgtacaatgtgcctttgaagaacttgttgaaaagatcattcagacccctggactgtgggaaagtgagaaccagaataaaggagtcaaactgtcacacagggaagaaggccaaggaggaggagcctgtggtggttattgctctgtgttataaactctgggaaattccatctcttgcatatttgatcagatagtgacatctttctgtatataaactctttaactgctattttagggaccttgcagtttgcacataattgttttatatcatagcagtaaatatttgcaagaaatcccactcatcgaccccgggtaaaatgttatggtaagcatgcacagtttgcagtctacagtttttttatgtagcacaaaataggtgtacctttataagtacattcaattttatgatttacatttatcatgtaatttttaaaaaaatccatctatctaggatatgttgatacaaagtctgcttttgctattctttttgcttaaatactcctatcattttctgaattacttggtatttagaactcctagcaccacggggaagaatagaggtatcatcaaacgtggcaaattttctttcaggaataataaagagcatgattccacagcttttctgggatgtttgagattcttttttagtactaagcaaaattctcatcacagaatgtagcccaggccaatttataactaaatctctatttgttcggatgatgcttctaaaacagcattgataggttaaagaagcttggtatttttaatttacttcaatgattagctcagttgcttaactggagttttaatcctgtgatatgtacattggattcatgactgtgcagcatttttagttatgtggtgtttggcagaatgacaataaggttttcccccattttggtttcaggaggacatgaatagtgtgtttattgtaactcctcatacacttttaaaaccaacatcttttttcataaatgttggg

SEQ ID NO: 90810 - DNA, 1177 bp, Homo sapiens
gcaggggagggggacagcgagccattgagcgatctttgtcaagcatcccagaaggtataaaaacgcccttgggaccaggcagcctcaaaccccagctgttggggccaggacacccagtgagcccatacttgctctttttgtcttcttcagactgcgccatggggctcagcgacggggaatggcagttggtgctgaacgtctgggggaaggtggaggctgacatcccaggccatgggcaggaagtcctcatcaggctctttaagggtcacccagagactctggagaagtttgacaagttcaagcacctgaagtcagaggacgagatgaaggcatctgaggacttaaagaagcatggtgccactgtgctcaccgccctgggtggcatccttaagaagaaggggcatcatgaggcagagattaagcccctggcacagtcgcatgccaccaagcacaagatccccgtgaagtacctggagttcatctcggaatgcatcatccaggttctgcagagcaagcatcccggggactttggtgctgatgcccagggggccatgaacaaggccctggagctgttccggaaggacatggcctccaactacaaggagctgggcttccagggctaggcccctgccgctcccacccccacccatctgggccccgggttcaagagagagcggggtctgatctcgtgtagccatatagagtttgcttctgagtgtctgctttgtttagtagaggtgggcaggaggagctgaggggctggggctggggtgttgaagttggcttttgcatgcccccagcgaatgcgcccttccctgtggggatgtccatcaccccttgggaacccggggagtgccccttgggctcaactgtgttcttgcatggttttggattttgaattaattgtcctttcttctaaatcccaaccgaacttcttccaacctccaaactggctgtaaccccaaatccaagccattaactacacctgacagtagcaattgtctgattaatcactggccccttgaagacagcagaatgtccctttgcaatgaggaggagatctgggctgggcgggccagctggggaagcatttgactatctggaacttgtgtgtgcctcctcaggtatggcagtgactcacctggttttaataaaacaacctgcaacaaaaaaaaaa

SEQ ID NO: 90811 - DNA, 7752 bp, Homo sapiens; identical to SEQ ID NO: 58845

SEQ ID NO: 90812 - DNA, 1561 bp, Homo sapiens
gggattgtgggaaaagatggcggctgccgcacaatcccgggttgtccgggtcctgtcaatgtcacgttctgccattactgcaatagccacatctgtgtgtcacggcccaccctgtcgccagcttcatcatgccctcatgcctcatgggaaaggtggacgttcctcagtcagtgggattgtggccactgtgtttggagcaacaggattcctggggcgatatgttgtcaaccaccttggacgcatggggtcacaggtaatcataccctatcggtgtgataaatatgacatcatgcaccttcgtcccatgggtgacctgggccagcttctgtttctggaatgggacgcgagagataaagattctatccgacgagtagtacaacacagcaatgtggtcatcaatcttattggacgagactgggaaaccaaaaactttgattttgaggatgtttttgtgaagattccccaagcaattgctcaactgtccaaggaagctggagttgaaaaattcattcatgtttcacatctgaatgcgaatattaaaagctcttctagatatttgagaaataaggctgttggagagaaagtagtgagagatgcatttccggaagccattatcgtaaagccgtcggacatctttggaagagaggatagattccttaattcttttgcaagtatgcatcggtttggtcctataccccttggttccttgggctggaagacagttaaacaaccagtatatgtcgtagatgtatccaaaggaattgttaatgcagttaaggatcctgatgccaatgggaaatcctttgctttcgttggtcccagtcggtacctccttttccacctggtgaagtacatctttgctgtggctcacagattgttcctcccattccccttgccgctttttgcctatcgatgggtagcaagagtctttgaaataagcccatttgagccctggataacaagggataaagtggagcggatgcacatcacagacatgaaattgcctcacctgcctggcttagaagaccttggtattcaggcaacaccactggaactcaaggccattgaggtgctgcggcgtcatcgcacttaccgctggctgtctgctgaaattgaggatgtgaagccggccaagaccgtcaacatttagtgcctcctgagcagctcttggttttggcgtcttttgggtcggcccatgtggtttgagcacccagccaggcggtctctttagaggatcctgtacacagttccactattaaaacatttcaggttgaattctgcagtattttcttccttgatttacaaaatgagaaatgtagtcacttagaacttgagcatgatttttgttaaacatatttaataatgatatatatactatttattttttgaaaagccagagagtttgaattttcctatgacaaaccacttttagcatacgttttaaaagacaagggccctttttaaaggcaaaggattgtaaagaccccaagtgaaatgggattgttttttaatttcccttaaatgagagagcaaacaggatcccctaacctgaaaaaaaaaa

SEQ ID NO: 90813 - DNA, 991 bp, Homo sapiens; identical to SEQ ID NO: 58849

SEQ ID NO: 90814 - DNA, 2156 bp, Homo sapiens; identical to SEQ ID NO: 59512

SEQ ID NO: 90815 - DNA, 690 bp, Homo sapiens
cgttatagtatttgtcagaagttggggtctccgtgggcattgtgatccgtcccaggcagtggattaggaggccagaaggagatcccttccacggtgctaggctgagatggatcctctcagggcccaacagctggctgcggagctggaggtggagatgatggccgatatgtacaacagaatgaccagtgcctgccaccggaagtgtgtgcctcctcactacaaggaagcagagctctccaagggcgagtctgtgtgcctggaccgatgtgtctctaagtacctggacatccatgagcggatgggcaaaaagttgacagagttgtctatgcaggatgaagagctgatgaagagggtgcagcagagctctgggcctgcatgaggtccctgtcagtatacaccctggggtgtaccccaccccttcccactttaataaacgtgctccctgttgggtgtcatctgtgaagactgcccaggcctaggctctctgtagagagtcttcaagatcccggagtggtagcgctgtctcctggtgaaggagtatttgtcacactggaatgtgactgtgtgtgtatgtatgtgtatatatatatatatatatatatatatatatataaacaagtttgttgacacctactatgtgcaaagcagtgtgcttggcatttgagagtaaagaaaacagacacagcccct

SEQ ID NO: 90816 - DNA, 721 bp, Homo sapiens
aagttgctctcagaggcagcgtgcgggtgtgctctttgtgaaattccaccatggcgtaccgtggccagggtcagaaagtgcagaaggttatggtgcagcccatcaacctcatcttcagatacttacaaaatagatcgcggattcaggtgtggctctatgagcaagtgaatatgcggatagaaggctgtatcattggttttgatgagtatatgaaccttgtattagatgatgcagaagagattcattctaaaacaaagtcaagaaaacaactgggtcggatcatgctaaaaggagataatattactctgctacaaagtgtctccaactagaaatgatcaatgaagtgagaaattgttgagaaggatacagtttgtttttagatgtcctttgtccaatgtgaacatttattcatattgttttgattaccctcgtgttactacaagatggcaataaatactatgggattgtttgtattaaaaaatttacattgcttcttactattcagcagtagaaactttttacacagtaacaccattcgttgttggtatttagttttctgaagggtcgcagttgccttgagcacttggtattcgcagagcttggacctgtagattttgaggcagattaggaattctgcctgatgggtaagcttccagtattgggaggtggagaaggggagggttcagaaaaataaataagagttattgcactaaaaaaaaaa

SEQ ID NO: 90817 - DNA, 3378 bp, Homo sapiens
  misc_feature (1)...(3378): n = a,t,c or g
caggcatgagtgacggtgcccagccattcgtgacatgtttatacaaatataactttagcaaatatttagcataactatcaaaattacaaatcatattaaatttgtataaatgtatgcaatttttggaacacgcatatcaacaacatacccataaatataactgagatgagatctaatgtcacctcacttgacagtgccctcccatgcagtatcgccacatttgacaatgcctgcccatttaatctaccaaataaatcgaatcacttaatacctctacaagatgagagatacattctttagactccccaagggatgcagctgaaaaaaatcccaaagttagttttaagccaaaaagacttgatttaggattttgacactggagaaacccatcaaagatgtcaagtttgaaaacacttgatcaaaacagaatcacaggtcactattaaaagagtattaatttaaccagagacttccaaagcaatacagaaacttacatggatataaaaaccctaacccttttaaaggtcagatttgctaagtgatcaaaaggggtacttgaattgaatcgacacaggaagagtgtgtacagggttatgagtgtaggcaggtggttactttggtcatatctccatttgccacctgattacacatgagaatggcatctttactcaccagaaagccagtattataggaggtgtaggaggcattcttggacttgagacaagaacattgttgtgtagaaatttcattgactgtgttaaaattattctccatgggctggagaacacataacatggcctttataatgagacgggcattgattggatgcaaggtctccannnnnnnnnnnnnnnnnnnnnnnnacagagtgcttcatcattccgagactcagtttttaaaggaaaaacaactaactaccttgcaagcttgctagcaggtttaagtgtaataatgtgtgggaatgactgcaccgtgactaacatgcagtgacagcttaattaatgttaacccttatcattatcatataagaatgtgagttacataagagaggagtcctgtcagttcgttctctgctgtgtccccaagaccatgaatcatggctggcatgtagtaggcatttaataatatatgttcaacaagtatttggcagtcttggagggcagaaaaggaggtggggaagatttttaaataacattttttaaaaagtcacattgtcctacaatactgatttttcttgcatatttaggaaattgagggtttttttctaaaacatgcggacatatgggaaataggatgcaacatttgcactaatgtttcagacacagttagaggtttccaagagattttgcgctggggaggctgcttgctacaagctcccaaagctctgggaggacatagtattcattcctccctcagcagaagcggtgaggcaagaagctctggggagcacccagcgttggacttttagcatagtgtgtcaggtcttcatagtttgggcccagggcacagagaagtcacagctctctggcatcctgtgccctttaccctctttgccaagggaaaatgtggcccaccaaagcaagaaacttgagggcatgggtcaccccagccctggcatctgcccagagcccgagaaggaaggaacaatgatcctccagctacctcacagggctggcacaggtgaccactgccctggcatcacccatctgtgtccggcagcctgaaccccatctgtggggatgcgaggaggaaaatacaaaagtccttaggtgaacactgagaaggcagatgcagcagaaacctccaggccagaactacccagtcttggacctatggtggagatagagcatagctggcgatcatgtgtacttacactctaaggtcacctggttgcactatggcctcatctgtggctctgaaaatgaagatttggaaggagatcatcacagctaatgtttaacaagcccctcctgtgtgccaaatcattcacccctcaccacaaccgaatgagctaaggattctcattatatatagtttatggagagggaagtgcagacataaagaggtgaattatcttacccagatcacacagctgataagtggtggaggcagaatagaatctaaacagtgtggctccggagcccacatgcattgattcgacaagtgtttattgagcacctgccacggacaaggccttgtgtgattaaatagggttataattagtaatataaaaatgagaaatcactaatgctttttagacttaacattttgtttttttgtaggtttcaggcacagaactgtatatccaataatagtgaaatggatcccactaattatgacagaaatgatgatacatttaaatgacttggatgttttataggtatgatctcgtgaaatcttgagagaaactgaatgacgaatgaaactattgttcctgtttcacacagaagaaaactgaggttaaaaggggtaaagtaattttgcatggcatgaagtagaaattcaaagtacaggaatttgaacttggttctgtccttttctgaagcccttgaccactatagactcaaacatcaccttgtttttccactcattcaacactttttttttaaaattatctaataggttggcactcatcatgagcccctgttctcattctgcaaatggtgaagctctctattgtcctgaccccacagttcctgtcccatgaccagggccagctcaccaaggagctgcagcagcatgtaaagtcagtgacatgcccatgcgagtacctgaggaaggtgagtgagtgcagacagatggggcctggtgcccttgagcagttcccgggtctcagctgccacacatctcatagcgggtgatgctgggggaagcttacgcagtcacagtactggcttcttcctctttttctttccatacaagtggcttagggatggggtagagtagttgacttatttggatgaaaaccactatcttctgtcagaaactcaaaaggaatcattgctggcatggtaacctaaagaaaaacaaccagacaagtgcccaacgacacttaaaaaggtgatttattatcttgccaagtttaggctgggcatggtgactcatgccctctaatccccagcattttggggggctgaggctggtggatcacctgaggcccaggacttcgagaccagcctgaccaatatggcaaaacctcgtccctgcttgaaaatacaaaaattagccgggcatggtggtgtgagcctgtagtcccagctactcaggaggctgaggacagggagatttgctttggattcagggaggttggaggttttagtgggccgagatcacgccattgcactccacactgtgcgacagagcgagactctgtcaaaa

SEQ ID NO: 90818 - DNA, 2362 bp, Homo sapiens
tttttttttttgtaaatatttttcaaggttttattgcaaaccaaaatcagtttatcacacacaaaaaaagttgtgtgatgggatgagggaaggattgtacgtattataaccatgttaattacagtacattaaaatggtggtttacattacaaataagcctgtaagtttaaatatactagtgttataacccaatgtacagacgttctttatacaatacatacaattatcaggaatgcaaaaaaaaaaaacataaataatgcccattttacaggtgacattttaaacaatgaaaaacaccaacggctctgactgacaactggggcattggtccataaaaaccctttctaaaaatagaaatatttgtagcagcaatgctttctttaagcatctgaatacgagtcattgcaagaccatttcaataaattttagttattaaccgtatcttacaaaaaagtctacacataaatttatcttccaaatatggaagaaacaaacaatgtcccacgttgtagtgtcctgcaagtgtcacattgatgcttataacaaaatccatctgtgatcaggcataccacactcacacgacggttcacacagcatatccacaagggaaaataaagaactgaaacactgcgataggaaaagctttggagctaacacaatctcttcagaaaaggcacatttcataatattcgtcatcacagcccagacagatctgcaggagaccttttttagaacagcgtccgctttctaacgaaactcctgcctccgtctaaggcggcactctaacgctcgtttcagagatagcaccacgttggaaggaagaataaaaatgaaaacctcatgagctcactgaggagaatgtgctcttcaaaaagcttccagcgaacagtgtgcaataagattgctaagcttccagagatgtgcaaattctcttgtaagatgtcctgtcagctggcggctccaccaaaaggctaactaaaacattcggaaacacacataaaatcctttaaaaccaagccctaacagggttcagaggaaagagtccgtgggaggcgcataggaaaagcctaggaaagcctcggcagcttccttgacgctggctgtgacgaggacgctgtcaggggacttgccaatggagttggggacaggctcttcggtaaactcggggtcaaagtgccgtaggtcgttgggcccactcacatttgggttaaaagggggagtaatcttcttattaatgagatcatcccagttaattaaggagaagaagacatgactcttaatctccatgaagtcatccttggccccgagccgctttgtcctgtccttctgcaggaggccctccaggaggtgtcttgcggaatttgtaatatttggtttcagctggagaggcttgttcagaatgttgtcgtacatttcagctgtgtttcggctataaaaaggcggcaggccatacagcatctcatacaagacagctcccaggcaccaccagtccacagtcctgtcataaggctgcttatgaagcacctcaggtgcgagatactccggcgtgccacagaaggtggatgttgtgctgttgtgttcaatgttctccttgcagagtccgaagtcagtaaggacaatgtgtccctgtgaatctagcaaaatattctctggttttaagtctctataaacgatgttcagtgaatgcaggtagcccaaggcactggctatttcagcagcatagaaacgagcccgtggttccaggaagcagcgttccctctggagatggtagaacaactctccaccattaatgtagtctaggacaaagtacaatttgtcagcagtctggaaagagaagtgaaggcccaccaggaaagggtgcttcacattcttcaacagaacattccgctccgacataatatgcttctcctctttctttttcaggattgctttcttctgtaaaactttgactgcatagaacacttcttctgccttgtgtcttgctagaagaacctttccaaaactgccctttccgatcactttcaagaagtgaaagtcagatggtttagcatgaggattggacgacgggccaaggttgatttgctgagaaggacttggtggaggagaagggttggcattcataagctcaggctcctgaggttgggagatcttcaagatggactgaacttcagggtgtttgcatgcataggagttattggcaatcttctgaataaagtcgttcagacccatcctcctctgcttcatgaaagcgatgagaattgccaccatgcccctcatcctggagtaagtgagggtgcccttagcagcctcagttttcaccgtcatcaccaccgcggggagacagaaagacgttagcgctcaa

SEQ ID NO: 90819 - DNA, 1443 bp, Homo sapiens
taaaccccaggtcccggggaaaaaatttttataaaacaaaccccggaaagaaaactttccaacagccaggatatggaggttgttttaccccctttaccccttaaaaattttttttttccctaaagcctttaaattttggaggggggttgggccaatatgtcccccccccaaaaaaaaggttctttccaaaaattcccaggtaggttttaaaacggccccccataaggaaaaaaatttttccttgcaagcccgggtaaaatttgggccccccaagggttctttaaaacggcccccccttttttttttttttcaaaacagatatagctggtttattttggaaacaagtctcatccagaaatgttatttactgcatttaaaaaccatggaaggcgatttgcatggttcctccccacgccctcactcccaccaagtacagctttaccacccaaggtcctttcaggaccccaggcctggcggctgtaggagagagcagtgaatcctaagggcaagagaatggcgtccacttgccagagtttctcagagcagagccagctgctcctccagacaggccggtgaggctactcgacaccctcacaaaggggaaaccctgaaggaagtacttcagggggtgcctgcccgatgcgggaggttttgggctagccctccccagatccccggcctgaggggcctcctccagctgcagaagtcaagctgccaaactgccaaagtactcctgcagctccagcagggcccggaagcgatgggagacagcgttcttctccgccttaggcatctctgcgtacgtctgctcatatccatcaggctgaaagcaggggtcccagccaaagtcctggcagcctctgggtgccacgatccggcccgaggtccggcccctgaacaggcgcacgggctggcttgggtccccggtgctgagtgcaaacgtgcagagcgcataggctgacttgtcctcgaacccggccaggagctggtggagaccttcaggctttaacttctccagaaaccactttatgtaggggccggggagccctccaagggcattgaagcacagacaagtgtcctcaaccagcacgggcccctgtacctggcgaactgcctcctgacatttctgtatggaaatctcatccggctccccttggtactccggcaggtcaattttctgtgccaccaaagtgcatggaaacttatctcctagaatctgaacgacctcctccagcttcttggcgttccccgttacaaacacgatcttcttccccaccaatgaggccgccatggtgatccccggttacccagctgagccaccgaaaactccttggcgtccagtgacagaaaacttccggctggtggcggaagtgaacggctcagtttccggccaggtcccggggaaagcgacccggaccccaaggcgcgtagtcggcggagtcg

SEQ ID NO: 90820 - DNA, 956 bp, Homo sapiens
cccaccccaagtgccatatatctttttcattgttcaggaaattatatttttcttttacaagagcgcaacaggagtcaaagtaaaagagtaattgtttcagctttcagtttttttttttttttttttaattataattaaaattttttttccgcactccaagtgccatatatctattttattcttcaggaaattatatttttcttttacaagagcacaacaggaaccaaagtaaaagagtaatagatacagcactcaggataaatcatatctttaaaataataataaaaaaatttacaccttgtcctatatcctgttagtattttcataatatggccatgattgaaaaaacaaaaagcaagcatctacaattttttttgataaagactttttatgccaggaatggattaattaccaacaaaatttatactaatcaggctgatgtcaatctatttttgtaatgtatcattaacaaatttattttggaaaagataaaaatattgccccttgataataaatctttttttcctttgatgcaaacagctagaacacctttttctttttctttttgatattctaagacaaaaaaatggttaatcttcagattaataaattaggtcattataataataaattaattttttttaaagttcagcaacctctgtccaagtatttacaacaatacttgaaagttcctttacaaaacagaacacattttcttttcacgttaagcatactgggtatctgtgtctttcacaacaagcatttttaaaagaaaactcaatgcacaaatgggttaattagtataaaagtgctaagggctgtttgaaaagttaccactatagtatacagtcagttatatttgagggggcatacctaccacccaaccttcccggccttattgtggggggacaatattccagtagttggtttccaaaccattggtttgaaaaaaaaaa

SEQ ID NO: 90821 - DNA, 654 bp, Homo sapiens
tacggctgcgagaagacgacagaagggtacggctgcgagaagacgacagaagggtacggctgcgagaagacgacagaagggtacggctgcgagaagacgacagaagggtacggctgcgagaagacgacagaagggtacggctgcgagaagacgacagaagggggtcgacgtgttcttccggtggcggagcggcggattagccttcgcggggcaaaatggagctcgaggccatgagcagatataccagcccagtgaacccagctgtcttcccccatctgaccgtggtgcttttggccattggcatgttcttcaccgcctggttcttcgtttacgaggtcacctctaccaagtacactcgtgatatctataaagagctcctcatctccttagtggcctcactcttcatgggctttggagtcctcttcctgctgctctgggttggcatctacgtgtgagcacccaagggtaacaaccagatggcttcactgaaacctgcttttgtaaattacttttttttactgttgctggaagtgtcccacctgctgctcataataaatgcagatgtatagcaaaaaaaaaaaaaagggggggccgttttaaagaacccttggggggccccaaggtttacgcgggctggcaaggttatagttttcc

SEQ ID NO: 90822 - DNA, 1004 bp, Homo sapiens
ttttttttttttaaactgaacatagtatttattaaggtcaggatgcatgaatagactcttctcaacagaaagataattcaacagcaatcaatttacagaatttagaacagcactacatttcagcaaaatgcaactagagaacatcagataaattatagtaatttgtttttaaaaatccattaaactatctcttacctctgcaataatgtatcatacatgcagttacagaagttagtagggaaaagcatgatcttccttccctattctctgcccatccatcttccaggaaaccacaggctgctgctgcccagagttggcatgaggcttcgaggctgctgcttttccccctacatcataaccgatttcaaatggtgctagacaaaaacagactctgaacaccaggagaaatcggtcagcctgtgtaagagatgggccagtggtgctcccagggtctgcacctcgacagtccaggtggcaagtctgatttcgggtgccccgcaatcaacgccgaatactccagggcatcctctaagagcagactgatggtgtcgatgtggacaaaatggtcctccaggtgtactgccctctcccctgccccatgacaatcgacacccaatacattgttatccaacagaatatgacaatcgccacactcaaaggccctacgaacacattcatgctggtgatggctgctaggagtcaacagaaatagcatcacaacctctgcccctgctcaagccactgtgtttattttaaacacaacccccttctctactgtcacctctcccaaaacccaacaaactcaagagtgtattttgctcttcaagttcttccctggacttctcgaacagactcaagtggcaagaggagaggagccagttccatgagcagcagttcctctgcagtccacccttggctgtgctgcaattcttactcctaaaacactgatttcaaatggtgctagatacaaagatggaaaaatctaagccaccatgtgaaaccag

SEQ ID NO: 90823 - DNA, 1714 bp, Homo sapiens
aattcccgggtcgacgatttcgtcgcgcacctgcagcgcccgctgctcggccctgcatcctgcctgggcatcctgcgcccggccatgacggcgcactcattcgccctcccgggcatcatcttcaccacgttctggggcctcgtcggcatcgccgggccctggttcgtgccgaagggacccaaccgcggagtgatcatcaccatgctggtcgccaccgccgtctgctgttacctcttctggctcatcgccatcctggcgcagctgaaccccctgttcgggccccagctgaagaatgagaccatctggtacgtgcgcttcctgtgggagtgacccgccgcccccgacccaggtgcccagctctcggaatgactgtggctccactgtccctgacaaccccttcgtccggaccctcccccacacaactatgtctggtcaccagctccctcctgctggcacccagagacccggacccgcagggcctgcctggttcctggaagtcttcccagtcttcccagccagcccgggccctggggagccctgggcacagcagcggccgaggggatgtcctgctccaatacccgcactgctctggagtttgccctctttcccaaggagatgctgctggggagctggtatgggtggggtctttccctttacagacggggcagatgccaggactcagcccatcctgaggaggacacgtgtcctcatggagagggtgctccggcccaggcgggggagtcggtgcccagtcagcagctctgccaccatcctgctgggaactgggggggcctctattgggttataggcaaggccttttctctggcatggaattgttaattttctgacacgtctagatgtgaaatttctgaaaatgttgaagcagagaaacattcacacacaaaaagcaacatagtcatgtgggtccagatggcctcagtcctagatgttggcaccctttgctgtgtctcctcagagtatcctgttccgcctcctgccacctggacctccctcagtggatgtcttccctcccccgaccccagcctgtcagtccgagcacagtgcaggtttggctctgacttgggcctttggctgcagtgggggtggatttcagagcctctcatggcagcatctaagtgaccagagctgggatgagagaggggaaggggcaatgtgagtggcgctatgggacgggccagccctgctcctgagccagccccgccctctgccccctggccctgggctctgtgctagggatggtgaagaatgggggcgtgccagcctggcaggagtgggaagcaacacgcaggggtcccggacctctccagccttgccctcacgcttacccgagctcccagtgtggttagcacagagctcacccaccttgcctggctcccagctggggcctgtcctcactggtgctccaggggaagaaacgacagcctcacttctgtatggactgctgatgtggcctgccatcctgttcagcgggcattgtctttggagcagcaggagaataggatgcctctcactcacatgccagttcctggctggccagctgctcagggctcaggctggggcctcccattgacatcctccccctacactccctctctgagcctccgtcgcccctcctgttgggtaagggtgttgagtgtgacttgtgctgaaaacctggttcatatataataaataatggtgatgaaaaaaaaaa

SEQ ID NO: 90824 - DNA, 4562 bp, Homo sapiens; identical to SEQ ID NO: 58696

SEQ ID NO: 90825 - DNA, 807 bp, Homo sapiens
tgctcccttgggctctagagaggaggcccctcttagccctcagcccctccttcctctctatcttaaagtaatttgatcctcaggaatttgttccgccctcatctggcccggccaaatcccgatttgacaaatgccaggaaaaggaaactgttgagaaaccgaaactactggggaaagggagggctcactgagaaccatcccagtaacccgaccgccgctggtcttcgctggacaccatgaatcacactgtccaaaccttcttctctcctgtcaacagtggccagccccccaactatgagatgctcaaggaggagcacgaggtggctgtgctgggggcgccccacaaccctgctcccccgacgtccaccgtgatccacatccgcagcgagacctccgtgcccgaccatgtcgtctggtccctgttcaacaccctcttcatgaacccctgctgcctgggcttcatagcattcgcctactccgtgaagtctagggacaggaagatggttggcgacgtgaccggggcccaggcctatgcctccaccgccaagtgcctgaacatctgggccctgattctgggcatcctcatgaccattctgctcatcgtcatcccagtgctgatcttccaggcctatggatagatcaggaggcatcactgaggccaggagctctgcccatgacctgtatcccacgtactccaacttccattcctcgccctgcccccggagccgagtcctgtatcagccctttatccccacacgcttttctacaatggcattcaataaagtgcacgtgtttctggtgctgctg

SEQ ID NO: 90826 - DNA, 597 bp, Homo sapiens
cggtagctggcaggaatccccgggacgacccacgcgtccgcccacgcgttcgcccacgcgttcggtgggatactgcgagtatggcggcgtcaaaggtgaagcaggacatgcctccgccggggggctatgggcccatcgactacaaacggaacttgccgcgtcgaggactgtcgggctacagcatgctggccatagggattggaaccctgatctacgggcactggagcataatgaagtggaaccgtgagcgcaggcgcctacaaatcgaggacttcgaggctcgcatcgcgctgttgccactgttacaggcagaaaccgaccggaggaccttgcagatgcttcgggagaacctggaggaggaggccatcatcatgaaggacgtgcccgactggaaggtgggggagtctgtgttccacacaacccgctgggtgccccccttgatcggggagctgtacgggctgcgcaccacagaggaggctctccatgccagccacggcttcatgtggtacacgtaggccctgtgccctccggccacctggatccctgcccctccccactgggacggaataaatgctctgcagacctggaaaaaaaaaa

SEQ ID NO: 90827 - DNA, 2145 bp, Homo sapiens
gtttgtgacggacttcccggcgcggtctatggctgcgacttctctaatgtctgctttggctgcccggctgctgcagcccgcgcacagctgctcccttcgccttcgccctttccacctcgcggcagttcgaaatgaagctgttgtcatttctggaaggaaactggcccagcagatcaagcaggaagtgcggcaggaggtagaagagtgggtggcctcaggcaacaaacggccacacctgagtgtgatcctggttggcgagaatcctgcaagtcactcctatgtcctcaacaaaaccagggcagctgcagttgtgggaatcaacagtgagacaattatgaaaccagcttcaatttcagaggaagaattgttgaatttaatcaataaactgaataatgatgataatgtagatggcctccttgttcagttgcctcttccagagcatattgatgagagaaggatctgcaatgctgtttctccagacaaggatgttgatggctttcatgtaattaatgtaggacgaatgtgtttggatcagtattccatgttaccggctactccatggggtgtgtgggaaataatcaagcgaactggcattccaaccctagggaagaatgtggttgtggctggaaggtcaaaaaacgttggaatgcccattgcaatgttactgcacacagatggggcgcatgaacgtcccggaggtgatgccactgttacaatatctcatcgatatactcccaaagagcagttgaagaaacatacaattcttgcagatattgtaatatctgctgcaggtattccaaatctgatcacagcagatatgatcaaggaaggagcagcagtcattgatgtgggaataaatagagttcacgatcctgtaactgccaaacccaagttggttggagatgtggattttgaaggagtcagacaaaaagctgggtatatcactccagttcctggaggtgttggccccatgacagtggcaatgctaatgaagaataccattattgctgcaaaaaaggtgctgaggcttgaagagcgagaagtgctgaagtctaaagagcttggggtagccactaattaactactgtgtcttctgtgtcacaaacagcactccaggccagctcaagaagcaaagcaggccaatagaaatgcaatatttttaatttattctactgaaatggtttaaaatgatgccttgtatttattgaaagcttaaatgggtgggtgtttctgcacatacctctgcagtacctcaccagggagcattccagtatcatgcagggtcctgtgatctagccaggagcagccattaacctagtgattaatatgggagacattaccatatggaggatggatgcttcactttgtcaagcacctcagttacacattcgccttttctaggattgcatttcccaagtgctattgcaataacagttgatactcattttaggtaccaaaccttttgagttcaactgatcaaaccaaaggaaaagtgttgctagagaaaattagggaaaaggtgaaaaagaaaaaatggtagtaattgagcagaaaaaaattaatttatatatgtattgattggcaaccagatttatctaagtagaactgaattggctaggaaaaaagaaaaactgcatgttaatcattttcctaagctgtccttttgaggcttagtcagtttattgggaaaatgtttaggattattccttgctattagtactcattttatgtatgttacccttcagtaagttctccccattttagttttctaggactgaaaggattcttttctacattatacatgtgtgttgtcatatttggcttttgctatatactttaacttcattgttaaatttttgtattgtatagtttctttggtgtatcttaaaacctatttttgaaaaacaaacttggcttgataatcatttgggcagcttgggtaagtacgcaacttacttttccaccaaagaactgtcagcagctgcctgcttttctgtgatgtatgtatcctgttgacttttccagaaattttttaagagtttgagttactattgaatttaatcagactttctgattaaagggttttctttcttttttaataaaacacatctgtctggtgtggtatgaatttctgaaaaaaaaaaa

SEQ ID NO: 90828 - DNA, 852 bp, Homo sapiens
ccgggggctgagcgcccccccgggttccggggtggccccggccccggtgcccgcgggcgctccctcgccatggcctaagcccgaggccgctccccagccagattctggcctcaggcactgcagagcccgcggcgctcgccaacaagcccgttagacccacgggacttggcaccctggaacgctcaccatccccgggtcttccctgcgccctggacccgagtaccctgctgcggcgtccccctaccaccgagaggagggcctagagcagacaagcccgccccgccgctcctcccagcagcttctatcccggaagttgatgccgagcgcagatcgcttgcagcttgctagctgtgtgggctgggaggtctggtagggctgagcttgcaagaggatcaacatgcctttggctagagatttactacatccgtccttggaagaggaaaagaaaaaacataaaaagaaacgcctagtacaaagtccaaattcttactttatggatgtaaaatgtccaggttgctacaagatcaccacggttttcagccatgctcagacagtggttctttgtgtaggttgttcaacagtgttgtgccagcctacaggaggaaaggccagactcacagaagggtgttcatttagaagaaagcaacactaatgattcaaacagcttcctgaattttaattttgtgttgtctcacagaaagccttatcataaattccataattctaattaatttaccaagataatgtaattacatttggttttgtaaggtatacagcagtaatctcctattttggtgtcagtttttcaataaagttttgattatgggcaaagaaaaaaaaagaaaaaaaaaa

SEQ ID NO: 90829 - DNA, 1608 bp, Homo sapiens; identical to SEQ ID NO: 59385

SEQ ID NO: 90830 - DNA, 732 bp, Homo sapiens
gtcattcatgacttttcataagaagtttactgtttaggtaagcaaaacaacacttagttcagcttgatactcaagcatcgggttaaaaagcatcagacttctgttaccagacaacttataagtgccaactattggtagaactgtggacatgaagatagtggaaacagcttctctaggatgctatactcatctccaccaaatgcactttgaacaaaaacaacttgtagaaataggtcttaattttttttgtttgtttgtttggtttttttacaacatgctgtactgctctccattggtaagtgctagggaaaatcacttagccactagagggagctataacacaaaattaagcaggaaataatccccattataggatacataggaacaaagtaggaggaccagcttaactgaccttggatcctctgtatgcagctcttaaagttaggatgggtttggggtaagttttctttgccaactttacctttgtctttcccatctttttgtgtaaaaattcttcccccttttccagcttttgcatccatttagggtttcagagtttacccttacaggcccttcattttggaaccaaatctaggggtctgggggactagaaaaattcctcgagaacatagacccggcttggctcttccgccctacccttggaacctcacggcgctcggcttttggaaccccacggctgacacatggaaacgcgccctatcctgctgtttc

SEQ ID NO: 90831 - DNA, 959 bp, Homo sapiens
ttttttttttttggagccacccaagcaggaaggtcggagagcatctttattgtggggaggggcccggcccccaaagttctgacaccaaagacagacaccagacaggcagctgcagacagtgagttgtgtggatgaccacggcctgtgtggcggacaggggaccaggagccatcgcctcagactctgcccttctgtgcaagggctagtgccccgggctcaggcatgcaggaagcggttgaaggcgttgtaggctgactccaggtcgaacagcatctgacgcacctgtgagtcgtccagctcatctgacgccgacatgccgctcagggtctgcagccactggctgaccgtctggcggccctcaaagtcgggtgggaggtggctcatgcggtgcatggtctccatcagctctcgcaggtcgggctggatctcatccatggcgcggatctccaggcgcagcttgtccatgaccgtgatgaagagcgagaccacgtctgcgatgcagcggttgaggttgcccttgtcgtccttgatggtgatgggccggtcctccttgatccgctccatggccagcgggcagtccaggcggaacttgcggcagaattcgtcaatagagctgatttctgagccctggacctgcctgaaggcagctttgtattggaccaggagccgggagcaggctgcagtgtactcgctgggggagacacagtccttgatgtaggccttctccagggcttgcattgtcttcaccaccgcaaacagctctgccatgttgtcgtacttctccctctcccgggcgttcttgtacaacttcacttcctcatacagctccggcttgttcccaggggctcctatgcccggcgtggctgggatcccatgaaacatcctctaggctctggggggggcacagcactgagacctggacggctcgcggtcgggaagatggcgccgggggcggggtg

SEQ ID NO: 90832 - DNA, 747 bp, Homo sapiens; identical to SEQ ID NO: 59435

SEQ ID NO: 90833 - DNA, 1816 bp, Homo sapiens
acccacgcgtccgcgcggtgctgtgaggtctgcgggcgctggcaaatccggcccaggatgtagagctggcagtgcctgacggcgcgtctgacgcggagttgggtggggtagagagtagggggcggtagtcgggggtggtgggagaaggaggaggcggcgaatcacttataaatggcgccgaagcaggacccgaagcctaaattccaggagggtgagcgagtgctgtgctttcatgggcctcttctttatgaagcaaagtgtgtaaaggttgccataaaggacaaacaagtgaaatacttcatacattacagtggttggaataaaaattgggatgaatgggttccggagagcagagtactcaaatacgtggacaccaatttgcagaaacagcgagaacttcaaaaagccaatcaggagcagtatgcagaggggaagatgagaggggctgccccaggaaagaagacatctggtctgcaacagaaaaatgttgaagtgaaaacgaaaaagaacaaacagaaaacacctggaaatggagatggtggcagtaccagtgagacccctcagcctcctcggaagaaaagggcccgggtagatcctactgttgaaaatgaggaaacattcatgaacagagttgaagttaaagtaaagattcctgaagagctaaaaccgtggcttgttgatgactgggacttaattaccaggcaaaaacagctcttttatcttcctgccaagaagaatgtggattccattcttgaggattatgcaaattacaagaaatctcgtggaaacacagataataaggagtatgcggttaatgaagttgtggcagggataaaagaatacttcaacgtaatgttgggtacccagctactctataaatttgagagaccacagtatgctgaaattcttgcagatcatcccgatgcacccatgtcccaggtgtatggagcgccacatctcctgagattatttgtacgaattggagcaatgttggcttatacacctctggatgagaagagccttgctttattactcaattatcttcacgatttcctaaagtacctggcaaagaattctgcaactttgttcagtgccagcgattatgaagtggctcctcctgagtaccatcggaaagctgtgtgagaggcactctcactcacttatgtttggatctccgtaaacacatttttgttcttagtctatctcttgtacaaacgatgtgctttgaagatgttagtgtataacaattgatgtttgttttctgtttgattttaaacagagaaaaaataaaagggggtaatagctccttttttcttctttctttttttttttcatttcaaaattgctgccagtgttttcaatgatggacaacagagggatatgctgtaaagggttttattgcctagttgacaaagctgcttttgaatgctggtggttctattcctttgacactacgcacttttataatacatgttaatgctatatgacaaaatgctctgattcctagtgccaaaggttcaattcagtgtatataactgaacacactcatccatttgtgcttttgtttttttttatggggcttaaagtaaagagcccatcctttgcaagtcatccatgttgttacttaggcattttatcttggctcaaattgttgaagaatggtggcttgtttcatggtttttgtatttgtgtctaatgcacgttttaacatgatagacgcaatgcattgtgtagctagttttctggaaaagtcaatcttttaggaattgtttttcagatcttcaataaattttttctttaaatttcaaaaaaaaaa

SEQ ID NO: 90834 - DNA, 1887 bp, Homo sapiens
ttttttttttttgtttaaaaaaagtttttattaatgtgttaatatttcagcaaagttattgcaacaggttgaaaatgcagacacactattacaggctgtaaagtaacaaatgagttttacacaattaaaatattaacacatacttatgggatttgttgaatgactaacagacccataaaagaaattaaatctgagacgaaatccagtattagcacctacaatatatctgacagtgaaacttttaatggtttctctctcctaatgtatttttaaactctctcccaaatacagcgctctcaaaccccaaggataaacgaaaggcataagcagccccgatcctaggaacgtacagccaaaagcagagctacaaatatggactcagacttgagagttttactgagaagtaacttactgtacttgagccaatcataagatttctgtgcactgaatactgtatatgagaaaattctgtgggtcataaggtttgccttagggatagttaaaaattagtaatatacagtattattcctatcaaatttttttctcataagttatatttataacaaaactataattaaaatattttttatacctgcttattccatatccagggacacagcgggaacatctatgtgtctgatggtttggcatccactttattgtgcttactgatttttgtgatgaacaagcagcacgtatcatatctttccaacattcaaggtaatggaacaatgacataaaattctccaaagaaataactggaaattgcattaaatactgctttaattaggaataattgctataataaaacaaataacattatacatttttttttcaataagcttcagtttgaggaactgaatagtagaaacagatcttaagatttgagtcatggtaaaaccagtaattctttgaaatctgggaggtgcaaaacgacagccacagccaaccctcaccaaaatcctggagaaaaacattttattaatttaggggaacaagatagaacactggtgaagatacggcttgttgaggtctaaagccacctgagaagctggcccaaggaatgaagagaaccaatggtatgtactggtggcagataacaagctttgcactgggctgaccaactgtgttttattaaatggctttgaataaaaaaaagtgaagtgcttcattgtgttttctcagaaactaatcaaaagattacagagtcctacacaatttggagacacaaagtggatgctgagcgactagaggtcactccaggtgtggaattttagaaagtgagtccttggagtaaatggcaccgtggctctggcagcagatagaaaggaatgatgctctggagaggaggtagggacactctgcggtcggccagtggatacatgaggggcccggctggaagtgggatctttaattcttcggtttatcttccactgctcatgcctctgtcttcataaatggtaatttcaataactcgcagtcctcgctcaatagggtctgtcaggaggaggccttgtggagcatagatcttctcattctgctcttgaatgtatttggagactttcttcagaaccttctcataatgagtttccatgcataggaagatggtatatgctgttaaacaagccaaacaaccttcgagatatgactggccgccgagcttctctgcttctgcataaaggttatttagagttcgaactgtttcttcaaactgctgcctatcaatccggttctccagctccgcagggaacttggtctggaactggcagcgtgtgccactgctgtagtctcgctgaatgaacacctttccggacaccggcgcctgctgcggcctcatggcgaggacaggacaccccgcgccgcctcctctgccctccagctgctgtc

SEQ ID NO: 90835 - DNA, 1784 bp, Homo sapiens
tttttttttttacatttgtgtatctatttactaaagcatttttttatgtgcaaggagagagtacaaaccaacatgcaacataagtcttcattcttaaaaaagtacatagtaaaggtatgaaaaacattttgtatttcagagaattctaagacaaaatggtcaaaatattcaaatcggcctcggcactagtgggtaatttcagcagacaaacagcatgagaaaaggccgggagacagtaataaatacggtgcccattggcaatgagttacccaatcaagcccttttacctccttaagatggcagattagaagaccctcttccccaggagagtgggagcgtctgccttcgggctgtcagtaatattaaataagagtgcttgatttataaattttaaaaacataagaaggtttgacattctgcccagagcaacggagggcagcgtggtttaccagcgaaaggactgaacagagtgccaggagcccttagctctagacttactgaacagaaagaccttgggtgaacttttcattgaaacactgaaggctttaggttcatacctgtatacgaaggatagtcctggtgtggggcagcagaaatgccactgagctagaagctggaagacccaggtcctggctttgctaataataatgacatttattatgcactgtgtgctagaggttgttcttaaacgtatgagctcatttagctcccgtgcccacccaatctctgtgaggaaagctctattcttatgagcatttaatggacaaggaaactaagccacagaggtgtgaaatccctttcctaaggccagacagctaactactgacagagctggaattctgcctggttggttgtcggcataacccatgttcttaatccccgtgctgctgcctcccaataaactgggtgagtgatcctgggcaaaagacaagctctctgcatttcagtttcctcttcagtaaaatgaggacatgagtattaataacttgccaaattaccttaaacagtgattgtcaagatctaaataagacattggatatgaaatactttgtgatatagaaagtcctatacatgtgtgaagtcttttcctcagaggaatgatgaaaagatgaaatgagatggctgatgggaaacgctctgggacatgaacataaaagtgcaacctagatgatcagtgccaccaccatcctgggaaaagctaactggcggtgagcaggctcttggactccatgaaaatttaaggatgtggcttctttttcatatctgtatggtatctttactcaacttgattttggcaggtttaaagaggaaaaatgaaggataggaagtttttatcctagaagcctagagaaagtgaagtatattcctttcaagaagagaatccccgggtttctttcctttcttccttccttaaattgagacccaaatgaggtggaagaaaatctctactgagatgagatgcatttttaggacaaacatggagaccatcatcgttgttccggaatctggccatgtgctaagagacagcttctgctccctatctgatattaccaagctggacagcatcttttctatgatccagttcaacttctttgtatggaagaaactgaggtccagggaagtgaagagatcggtccaagatcactggaacccatgactacaaggcagctcttgcgatgccaggcaaatgtgtgttcctccccatttcactgcctttcctttgggtggctttggggggagtgaaatttttatgagaacccacatcataatcctgtgacaatgcc

SEQ ID NO: 90836 - DNA, 5418 bp, Homo sapiens; identical to SEQ ID NO: 76860
  misc_feature (1)...(5418): n = a,t,c or g

SEQ ID NO: 90837 - DNA, 1061 bp, Homo sapiens; identical to SEQ ID NO: 59012

SEQ ID NO: 90838 - DNA, 1977 bp, Homo sapiens; identical to SEQ ID NO: 58708

SEQ ID NO: 90839 - DNA, 1526 bp, Homo sapiens
cggacgcgtgggcggacgcgtgggcggacgcgtgggttagaaattatctaaagatttcatctttttacctcatatttcttaggaatttaatggttatatgttgtctttttttcctatgtcttttggctcaagcaacatgtatatcagtgttgactttttctttcttagatctagtttaaaaaaaaaaaacccccttaccatttttttgaaaaagggaagggattaaataatttttttccctaacactttcttgaaggtcaggggctttatctatgaaaaagtagtaaatagttctttgtaacctgtgtgaagcagcagccagccttaaagtagtccattcttgctaatggttagaacagtgaatactagtggaattgtttgggctgcttttagtttctcttaatcaaaattactagatgatagaattcaagaacttgttacatgtattacttggtgtatcgataatcatttaacaagttcttgaattctatcatctagtaattttgattaagagaaactaaaagcagcccaaacaattcccctagtattccctgttctaaccattagcaagaatggactactttaaggctggctgctgcttcacacaggttacaaagaactatttactactttttcatagataaagcccctgcccttcaagaaagtgttagggaaaaaaattatttaatcccttccttttttcaaagaattgttatgtggttttttttttttttaaactagatctaagaaagaaaaagtcaacactgatatacatgttgcttgagccaaaagacataggaaaaaaagacaacatataaccattaaattcctaagaaatatgaggtaaaaagatgaaatctttagataatttctaagtctgtacaaaaaagctagatttgctactctccaaaaagtggaaggacctattatataatatatggaaataatttaatgccatatcataagaatgtaactagagctgtgctaagcttcatattcgtgagggcatctaaaatgccactccacagcacaggtgcttctctcttctatccatttatgcggtagttttcatggatttctggccgaatgtcacagacaaaagccaagaggttgtccaagacttcatccctgttctgccggaagtatgtctggaggatggtcatcttctcctgggtctccttctccacttcagtgctgcaactgccacgggatcccaatgccgcagcttccttggccttgaattctttctccctctgcaggcggtactgttcaatttcagcctgagcttcttctttggcctgcttcagcctccggttctttcttttgcgggcctcggacaccttctcggctgcccgcttctcggcctgcagcagctgctgaatcccctgagactgactagccatggcggcagcgattctgagagcaaggcaagcggcctaaggcacctcgaaggccccttgggtcagctgacacagccgcccacaatctgcgcttgctccttgcgcctgcgcttcgccctcgtgccg

SEQ ID NO: 90840 - DNA, 3716 bp, Homo sapiens
tttcgtgggtccgtgtggcagctttgtgcagggggtgggatggggtcagtagcctgctgtgaagtgccgtccagacggggtgatctgagtccccagcctgggtgatggcaacggggtggcctggctgtctgccctgagccctcaccaggcctctcctggttttcgtgagccaaagagccgctgccattttactttggggagaggcagaaatgtgcctaatgatttccttctcttgctggccttctagggcaagaaagactcctccccgtggacctgccccttccacccaccactccagctgttttttgttattcgaaacacaagacagctgggggacttccatctggccaagatcaaggttcggaattactggacagctgatggcgatcttgacattggtgccaagaacgtgaagctttacgtcaacagaaacctcatcttcaatggcaagttagacaaaggagatagggaggccccagctgaccacagcatcctggttgaccagaagaacgagaagagcgagcaactagaggaggccatgaacgctcactcggaagaaagcaaaggcacccatgagatggctggtgccagcggggacaaggagcttggtctcggttgctcaccgccagctgaaacattagcggatgcaaagctttcttcacaaggaaatgtgtctggcaaaagaaagaattctactaattgcaggaaagacagtttgtcccagttagaggaatatttgagactgtcggcagtccccacttcgatgggtgacatgcccagtgctcctgccacttccccacctgtgaagtgccctcctgtccatgaggagccctctctcatccaacaactggaaaacctcatgggcagaaaaatctgtgagccacccgggaaaaccccatcctggttacaaccttctcccaccggcaaggacaggaagcagggaggcaggaagccaaaacccctctggcttagtcccgagaagcccctggcctggaagggcaggctcccatcagacgatgtcatcggtgagggtcctggagagaccgaggccagggataaaggcctacggcatgagccagggtgggggaccagccggagtgtcaacaccaaggagagaccccagagggcaaccaccaaagtccacagtgatgactcagacatctttaaccagccccccaacagagagcgccctgctagtgggaggaggggctcaaggaaggatgctggcagcagtagtcatggggacgaccagccagccagcagagaagacacctggtcttccaggacgccgtcacggtcaaggtggcgcagtgagcaggagcacacacttcacgagtcatggagctccctcagtgccttcgaccgctcccaccggggacgcatctccaacacggagctcccgggggacatcctggatgagctcctgcagcaaaagagcagccggcacagcgacttgcccccctccaagaagggggagcagccagggctgtcgagagggcaggatggctactctggagagacagacgctgggggtgactttaaaatccccgtcttgccttatggacagcgcttggtcattgacatcaagtctacctggggggacagacactatgtcggcctcaacggaatagaaatattcagttccaagggtgaaccggtgcagatttcaaacataaaagcagaccctcccgatatcaatattttaccagcctatgggaaagacccccgcgtggtcaccaacctcatcgacggggtgaacaggacccaggatgacatgcatgtctggctggcccccttcacgcggggcagatcccactccatcaccattgacttcacgcacccttgccacgttgccctgatcagaatttggaactacaataaatctcggatacattccttccgaggcgtgaaggacatcacaatgctgttagacacccagtgcatctttgaaggagaaatcgccaaggcctctggaaccctggcgggagccccagagcactttggagacacgatcttattcacaaccgatgatgacattctcgaggccatattctattctgatgagatgtttgacctggatgtggggagcctggacagcctgcaggatgaagaggcaatgaggaggcccagcacggccgacggcgagggggatgagcggcccttcacccaggctggcttgggggctgatgaacggatcccggagctagagctcccatccagttcccctgtcccccaagtcaccacgccagagccaggcatctaccacggaatctgccttcagctgaatttcactgcctcctggggagacttgcactacctggggctcactggcctggaagtggtgggcaaggagggccaggcgctgcccatccacctgcaccagatctctgcttcccccagagacttaaatgagctccccgagtactctgacgactcccggaccctggacaagttaattgatggcaccaacatcaccatggaggatgagcatatgtggctgatccccttctcgccggggctggaccatgtggtcacgatccgcctggacagggccgaaagcatcgcaggcctgcgcttctggaactacaataaatctcccgaggacacctatcgcggggccaagattgtccacgtctccctggatggcctgtgcgtctccccgccagagggctttctcatccggaaggggccaggcaactgccactttgattttgctcaagaaatcctcttcgtggactacctacgggctcagctgctgccccagccggccaggaggctggacatgagaagcctggagtgtgcaagcatggactacgaggcaccgctgatgccctgtggcttcattttccagtttcagcttctcaccagctggggcgacccctactacatcggcctcaccggcctggagctgtatgacgagcgaggagaaaaaatccccttgtcggaaaacaatattgcggccttccccgacagcgtgaactccctggagggtgtgggcggggacgtccgcaccccagacaagctcatcgaccaagtgaacgacaccagtgatggccggcacatgtggctggctcccatcctgccgggcctggtgaaccgggtttatgtgattttcgatctgcctaccaccgtgtcaatgatcaaactgtggaattatgcgaaaacaccccatcgaggggtgaaggagtttggcctcctggtggacgacctgcttgtgtacaatgggatcctggccatggtgagccacctggtggggggcatcctgcccacatgtgagcccaccgtgccctaccacaccatcctcttcaccgaggacagggacatccgccaccaggagaaacacaccaccatcagtaatcaggccgaggatcaagatgtccagatgatgaatgaaaaccaaatcattaccaacgcgaaacggaagcagagcgttgttgacccagccttacgtcccaaaacctgcatcagcgagaaggagacgagacgacggcgctgctgactggtgaaggagggagagctggtcctcccactatggtgggctccgtcagcagccccactcagtgcctgcgtccctcaccctcagtcccaggagctggaagcgaaccacagtgttgaggggagcccgctgggaagaggggactcgggaggacagccctggatactaccagagtgacagatggctgtggctgcagggcaaagagatcccctgcagtttg

SEQ ID NO: 90841 - DNA, 2116 bp, Homo sapiens
  misc_feature (1)...(2116): n = a,t,c or g
cggacgcgtgggctggaacaaacatggccgctctggcgcccgtcggctcccccgcctcccgcggtcctaggctggccgcgggcctccggctgctcccaatgctgggtttgctgcagttgctggccgagcctggcctgggccgcgtccatcacctggcactcaaggatgatgtgaggcataaagttcatctgaacacctttggcttcttcaaggatgggtacatggtggtgaatgtcagtagcctctcactgaatgagcctgaagacaaggatgtgactattggatttagcctagaccgtacaaagaatgatggcttttcttcttacctggatgaagatgtgaattactgtattttaaagaaacagtctgtctctgtcacccttttaatcctagacatctccagaagtgaggtaagagtaaagtctccaccagaagctggtacccagttaccaaagatcatcttcagcagggatgagaaagtccttggtcagagccaggagcctaatgttaaccctgcttcagcaggcaaccagacccagaagacacaagatggtggaaagtctaaaagaagtacagtggattcaaaggccatgggagagaaatccttttctgttcataataatggtggggcagtgtcatttcagtttttctttaacatcagcactgatgaccaagaaggcctttacagtctttattttcataaatgccttggaaaagaattgccaagtgacaagtttacattcagccttgatattgagatcacagagaagaatcctgacagctacctctcagcaggagaaattcctctccccaaattatacatctcaatggcctttttcttctttctttctgggaccatctggattcatatccttcgaaaacgacggaatgatgtatttaaaatccactggctgatggcggcccttcctttcaccaagtctctttccttggtgttccatgcaattgactaccactacatctcctcccagggcttccctatcgaaggctgggctgttgtgtactacataactcaccttttgaaaggggcgctactcttcatcaccattgcactcattggcactggctgggctttcattaagcacatcctttctgataaagacaaaaagatcttcatgattgtcattccactccaggtcctggcaaatgtagcctacatcatcatagagtccaccgaggagggcacgactgaatatggcttgtggaaggactctctatttctggtcgacctgttgtgttgtggtgccatcctcttcccagtggtgtggtcaatcagacatttacaagaagcatcagcaacagatggaaaaggcaagttctctcgtgctcattttgtgttgctcagcttgctctgaacccacgtgctgcggcactgcggaggagtggaggcagcctatggtgtcaagatgctgtcttcctgggaggagagctaggggaggcctggggcccacttcgtgagagcagccaggggtagtttggagaaggaggtgttgagtcagttgtataaggaggaggttgggngtgactgctgcttattaagatgattcatttcatttccactcgtggttgtgattttcaccttctcaaaactgagtcagcaagagaaaatcttgtcttagaagggccagataacacttcgctgtgagaacaggagggataatggattggagatggctatgtgtaaagcagccctgcctgctgatttaacacactttcaaaatagatgtgtcagtattcatttaaagcaagactctgatgacagaaggaaccttgaaaactacctgatattgaaatggttgtgccctttatagcccttttgcatctccttgactttccagtcatgcctcctaaatcagaagaaaagctgcaaagaaaatgttttgtgtggttctgggcttatttgaataatgttcatgaccacaggctgccatagcacaagtgagaatttcagaccacaagggtttaaggagcagtgctctcttctctcaaagctcagaacggtctctggatccatggtatcgtacacccagtgtggatattaacattctttaatgcaggttatgaataataaataaaacaggtttttgctaataaaaaa

SEQ ID NO: 90842 - DNA, 400 bp, Homo sapiens
cataaattaacttggagaatttgaaagacttttatgtgttgtttgtattctctagcattccccttacatttctatttcagaaattgccttttgtttggattggagaagagactttggagacatggtatttgaagagctgccatatggaaggggaattggacttttaaaaaaaaaatgacaaaccaggatcagtgggtggaaattagaaggaaacactctgtttccttattaaaagaggtgggatgggggacagggctttatctagtacttagaattatgcagctgtctgccctgagaagtgggaagttcccactctgttactagaggggtctccctggactggatgaagaatgtgatgtataatatgtgtattcaggtattagaagcacatttggatgag

SEQ ID NO: 90843 - DNA, 3898 bp, Homo sapiens; identical to SEQ ID NO: 58936

SEQ ID NO: 90844 - DNA, 402 bp, Homo sapiens
aattctctcctagggcagtgtttctgaaagtgaggttctgagaccagccacttcagcaacacttgagaacttgttagaaataaaagttctcaggctctaccacaggccaactgagtcaggaactctagcagttgagcccagcaatctgtgttttcgcaaggcttcccagtgattctgatggccttcacatctgagaagcattgtcacagcgaatcatcctccaaacaggactgcagcagtagcttcctctttattctgtaagacatggcttgcagttttcctgaaatggagtaacctcactcaccgcttgagtcttgagtctccttctctctctatgcaggagcctcagaagcgtgagacagatcggttctcgttctcaatgtttcacatcctttcttcatc

SEQ ID NO: 90845 - DNA, 1407 bp, Homo sapiens; identical to SEQ ID NO: 59254

SEQ ID NO: 90846 - DNA, 1207 bp, Homo sapiens
ttttttttttttaccattctatcttgtgccagatcttcacagctgtgacatggtttaaattccataatccatccccaagaggagcccacccaaagcaaaaatcaaatttatccatcatcatcagatgatccatccacagactatatcttaacctgatacagtcatcatattgtagtttttggaagggctcgttctgcccaagagaagttcctccttacagctgattcggctgtctaccatttgcacgttggtgctgttttgagtgctacctcctgctggtgaggcttcatacagcacacagatggagccatcctctccaattctgtaggacacttcataggggtcaacccagagtgtgagttcacttgggagaagcctgaacagctcctgactgctcagtccaatccgctgtgctgcctgtccaatcagaggatccattttatggttgatgcgaatacaacggtaacccgatcccttgcatggcttttctgggaaccagtgatgtttataatgttctgccagcagctcctgcaggctctggctgaaggtctgcagctgtcgctcgctcgtgagccccttggtgcggagaaacttggagatgaaggacacggcggcggcgatctcgcctatcatggtggcggcccgggtgtagaagggatgcatgggggcgccgtgccggggtcggccccggggcggcccggggctcggcgggcgcggccccgacggcggagcagcccaccccgggcttcctcaccgggcggaaggttgagaggaagagcagggcgtgaggggcggacgactacttttgtctttctttctttagactaaaaaagttattttcgagacaggaggcggcaggagagaggaagagacgagcgatggcggcctggtcacatcgctcggacctccccagctgcctccgcctccagctccgcagcattcgaagatctcaatagctgcatttccagctccgagaggcgaagagatgcaagcgccgtgcagcaccctttatagtgccacgaaaaggaagtggcgtacgtggagcgtgatggccgactccagccaatccgaatatcgcaccattgtgacgcaagccggttcggagccgaaaggggcgggaaaagagttcaggaggcgggtccagagatagggaagagagggaggagctgacgtaatccgcttgtaaacaaataaacccggagtggcg

SEQ ID NO: 90847 - DNA, 1224 bp, Homo sapiens
ctctggggctgggtccatggctggcagtggaaatatttgatctgattcagaagggcgccatccaacacagggagaaatgcaaccaatgaagaatccagccactgaggcagggcagaggaagcagcttttattgatgggttatctccagaaaccagaaagactatatgtactcactttcagttacccccgtgcctccagaatcgcatgttgctccacctgggggcggatataaattacctctagattgtccaaagcccagtctttcccttccctgtgcagccttagaaactaagtagcagtactgtttggtgtgtgtttgtttcttccccagcaatgcctactgcagctacttagtaacaactagaggtggagggtgtccggggaagcagttagatgagttaagtgtgatgcacaggaaaatagtatcgtagcctatcaaaggtccctctgccctgcctcagtggcttgattcttcattggttgcatttctctttgtgttggatgacgcccttctgaatcagatcagggatttccactgccagccatggacccagccccagagccatgagatgagctagtccaaatttgggcacattcctggcccacaaaggtttgaaatgatccgtcaggcatattttgccacccctgtacatctttgctgtctttccatccagctcaggaactgcaatttctggggcagtagtaggatatgtgataggaatgtcaaactcgatgtcaaactcatatttcaggaggtcatggatataccagcattttccaaaccaccgagttccttccttgttggactccagtcggaaccaatcgttgtcagcattcttgttgttctccacataccggataagggactgatattcctccttcagtcgctgcacccacaactcacgatctcggggtccggcgttagtcttcagcaccgggatctcagacacaacacgtcgcgtggcttcatccgccatcttggaccagggcgcaagagaaacgcggaagtggtgttgcctgtagcttacctcaaggcgccgtcatctttactatgggaagatgagacgttgggttgctgtaagacctcttttgaataagatctttgttttcttgtcacctagttacccgcttgtgagtgcatcgagaagaacagaatgtaaacagattactccgtcctatatatgacacctatcattaaaatcaccgcataaggcaaaaaaaaaa

SEQ ID NO: 90848 - DNA, 1993 bp, Homo sapiens
gcaattcggagctagaatattcgcctggatatgagaggcaccaggatgagcacagggaggaaccctcagtgctgcgtctagattctgcaggggaggtttgctgggaccttggctccacccagccagcgaaatggcagccacactcgatttgaaatcaaaggaggagaaggatgctgagttggacaagaggatcgaggctcttcggcggaagaatgaggccctcatccggcgctaccaggagattgaggaagaccgtaagaaagctgaacttgagggagtcgcagtcacagctccccgaaagggccgctcagtggagaaggagaacgtggcagtggagtcggagaagaacctgggtccttcccggaggtctcctgggacccctcggcccccaggggccagcaaggggggccggactcctccacagcagggaggccgggccggcatgggccgagcatcgcgcagctgggagggcagccccggggagcagcctcgaggaggaggagctgggggccgtggccggaggggccggggccgaggttcacctcacctctctggagctggagacacctcaatctctgaccgtaaatccaaggagtgggaggagcggcgcaggcagaacattgagaagatgaatgaggagatggagaagatcgccgagtatgagcgcaaccagcgggaaggggttcttgaacccaacccagtgcggaacttcctggacgacccccggcgacgcagcgggcccctggaggagtctgagcgggaccgccgggaggagagccgccggcacggccgcaactgggggggccccgacttcgagcgggtgcgctgtggccttgagcacgagcggcagggccgccgagctggcctgggcagtgctggagacatgacgttgtccatgacgggccgggagcggtcggagtacctgcgctggaagcaggagagggagaagatcgaccaggagcggctgcagaggcaccgcaagcccactggccagtggaggcgcgagtgggatgccgagaagaccgatgggatgttcaaggatggcccagtccctgcccatgaaccatcccaccgctatgatgaccaggcctgggcccggcccccgaagccccctacttttggggagttcctgtcccagcacaaagctgaggccagcagccgcagaaggagaaagagcagtcggccccaggccaaggcagcgcccagggcctacagtgaccatgatgaccgctgggagacaaaagaaggggcagcatccccagcccctgagactccacagcctacttcccccgagacttcccccaaggagacacccatgcagccacccgagatcccagctcctgcccaccggcctcctgaagacgagggggaagagaatgagggggaagaggatgaagaatgggaggacataagtgaggatgaggaagaggaggagatcgaggtggaagaaggtgatgaggaggaaccagcccaagaccaccaagccccagaggctgcccccaccgggatcccctgcagtgagcaggcccacggagtccccttcagtccggaggagcccctgctggagccccaggcccctggcacgccttccagccctttctcaccacccagcggccaccagcctgtgtccgattggggtgaagaggtggagctgaattctccccggaccactcacctggctggcgccctctccccgggtgaggcctggccttttgagagtgtatgaagctggctgcctgtgtgtgtgtgtgtgtgtgtgtgtgtgtgtgtgtgtgtgcgcgcgcgcgcgcgcgcgcgcgcgctagaggggtgtggctggtgggggacccttggggctgggccctgggacccagtgtgccccacagccctgtcagctgagggggtagcgcagcccatgctcttctgtactgtcatgcccgtctctggaatgtccactcccagagcctgccccagcccttcgagccccctccccaataaagaattcacatcctcc

SEQ ID NO: 90849 - DNA, 1458 bp, Homo sapiens
  misc_feature (1)...(1458): n = a,t,c or g
ttttttttttttgaataattcacaaaaatgttttatataagtttttaaaatgaagataatgaatttattttttcaagagaaaagggacttgatagtattatacagaatatccattgacgccagagtagttagtgaagtgaattttgatgggattgaaatgaaagaaccttattattcataacatttcactgtttatattgcttagtgaccgtagactaccagatcggaaactttttctgcgcatgcttcgaaggtaattacggtatagcatgacactaatgactcgagcctgaaattgttttgaaacgatgtagtagagaatcacatccagacacgtgctgaggttcatgaggaaggtggtaaaggctccccagggattgtaactgttctcccccgttcccagcatcaggaaagcgaaacagatgtggaagggcataaagcagacgagcacctgcaccagcagcgtgatgatgatccttatggacttctccttgactttgggtttcagcttagacgtcctgccgtgaaggagattatgaataatgaccaagtagcacccaatcatgatgaacaaaggaatcaagaaaaaaaatgtcagtcgagtgaggttcagcacgttcacagcttttagatagatgatgtcagaaatcttgaggcaggtggcgggagtggagtctttatctgggtctttatagagcagtagcagaggggtggtcgtggtcagggtcattatccagactcccacacacgccagcacggctttgcacgtgtttttaagttctttggcgtacttcggctgtacaatggccatgtatctgtcagcactaataaaggcaagaagccataaagcaatgcttgggtaaaacactgtgagagctccaagaatctggcagaagtactctccaaatggccattcatcttttgcataataaaacattcgaaagggtaaagtcattataaatatcaagtccactaatgccacattcatcatatagatggttaccgtggttctcttcttggtggtacaactgaaaacccataatgcagtgatgttaacaaataatccaattatgaagatacagctatagaagacaagggctgcaattttgtattcatctggatgtgagctgttaaaagggacaggttgatcttgattgttcagggtgatcattttacagcttgttggtaggcatgatacttagaaactcctgtccatcaaaagtctgtgtgagagatgagcatttttcagcacttccacttctgtcgaagggatatctttgagttgcttctgttaaaatagctctttctggaaccagtgtatttaagaaatgttgtattttgttttagactcttttgttgctttaaaaagtagtttccagtgtaacgcgtggcgtcgtagttggtgctggggnngcgcctacggnaatcaaanttccggccggtcccacggctgtctaa

SEQ ID NO: 90850 - DNA, 2061 bp, Homo sapiens; identical to SEQ ID NO: 59209

SEQ ID NO: 90851 - DNA, 1181 bp, Homo sapiens; identical to SEQ ID NO: 59523

SEQ ID NO: 90852 - DNA, 1235 bp, Homo sapiens
cccacgcgtccgcccacgcgttcgcgtagagggacgtgccctctatatgaggttggggagcggctgagtcggccttttccgcccgctcccccctccccccgaggcgccgctccggctgcaccgcgctcgctccgagtttcaggctcgtgctaagctagcgccgtcgtcgtctcccttcagtcgccatcatgattatctaccgggacctcatcagccacgatgagatgttctccgacatctacaagatccgggagatcgcggacgggttgtgcctggaggtggaggggaagatggtcagtaggacagaaggtaacattgatgactcgctcattggtggaaatgcctccgctgaaggccccgagggcgaaggtaccgaaagcacagtaatcactggtgtcgatattgtcatgaaccatcacctgcaggaaacaagtttcacaaaagaagcctacaagaagtacatcaaagattacatgaaatcaatcaaagggaaacttgaagaacagagaccagaaagagtaaaaccttttatgacaggggctgcagaacaaatcaagcacatccttgctaatttcaaaaactaccagttctttattggtgaaaacatgaatccagatggcatggttgctctattggactaccgtgaggatggtgtgaccccatatatgattttctttaaggatggtttagaaatggaaaaatgttaacaaatgtggcaattattttggatctatcacctgtcatcataactggcttctgcttgtcatccacacaacaccaggacttaagacaaatgggactgatgtcatcttgagctcttcatttattttgactgtgatttatttggagtggaggcattgtttttaagaaaaacatgtcatgtaggttgtctaaaaataaaatgcatttaaactcatttgagagaatgccttttagtttaatgcatatttaaactaaattgatcctgtagtgttcctggagaagctagagcctgattgtaggctactactcatcaattaacttctacagtggagactacttctgggactggaatataaaaaagaatcaaaggttctgattttgagttgcaataaagggaaagaccatgctcatagcagtgccaacatctgaagtgtggagccttacccatttcatcacctacaacggaagtagttaactggaagagattaccaagagaataaaaagagactcattcagtggaagcaaaaaaaaaa

SEQ ID NO: 90853 - DNA, 653 bp, Homo sapiens
ttttcaaaatccaagcaaacttcaaactcattcatgagatatttattaaaataacacaggggggtttttaaaatcaatacaatgtatacatcattactcaaaactcgtataccatcatacaaaaaaggattttattttgggaaattgttttctaatttactggcaagttttacttttcagaaaataaaaccacaacaacacaatctaattcaatcttaaaggctggcatgctgagcaaggaatgttcttattctttgtaggagctccttctttacactgtcaggtaccagggctctgccttttggagtgatttcagccaccaagtcatcaacagtaacgtgttctagtcctttttctttaattacctctttacagtgtgccttcaactgatccttccagccacattcaattaatttagctctcagcaactctttgaggcgttctctttctccagtttctatcaacttttggttaatcgctgctctcatctgcgcatctttgttcatcttgctaaccaccatcaccgcgggcgagggccgtcccttcccagcgacgaaatgacccttgcgctgaggaccgttacctaccacactcttcggctgcccggacttagaccctcagtagctcgggcacctaagcacacagaaagctag

SEQ ID NO: 90854 - DNA, 1839 bp, Homo sapiens; identical to SEQ ID NO: 58833

SEQ ID NO: 90855 - DNA, 2075 bp, Homo sapiens; identical to SEQ ID NO: 58929

SEQ ID NO: 90856 - DNA, 792 bp, Homo sapiens
agaccaactattagaaataatacagaagctaaagcatttccttttctgtaaaactgaaaagcaatgaaccagttgaattaaaacatcagaagtcatcaattgtgtccttttccccaacagaaatccagatggagacgtgagcccctggtgctatgtggcagagcacgaggatggtgtctactggaagtactgtgagatacctgcttgccagagtaagactgtaatacccaatgtgatggtttacaggactgtgaacactaagagtgcgtaggaggggaggcccctgccagaggttcaggtagtttagggctggtgggatttcatgggagcatgttgaaaagggagaagccatcctgggcgaggattttcacttctcttgttgaggcttttcaggaataggaatgctgatttccttagcacctcattctaaaggtattcccttgatgggtaagccccatgagaattcctacttttggttaatttctgattctttcaggtatagagaggggcaacccgctcagaagcagccctaggggaaaaaaatatccttgtactttttggaatgaacatctttatacatagtgaaactcagttatggcactacttattacttggatttgaatgggtccccagaagtaatatttgataaatgccttgctaaataccatacaaagctcatgtggtagttcttttacccacattagcctaacatgttctactgtttataataataactcacaacccaatttctccagcctgggcgacagagcgagatccgtctcaaaaaaaaaa

SEQ ID NO: 90857 - DNA, 1098 bp, Homo sapiens; identical to SEQ ID NO: 58722
  misc_feature (1)...(1098): n = a,t,c or g

SEQ ID NO: 90858 - DNA, 1855 bp, Homo sapiens
tttttttttaagtgaaataatagatttattcaaagagaaataaaatgtcctgggtaaagcttctgtaataatactatttctgatactgtatctctgaaaaatggctaactagtcaccttatcaatacatttaaggcatcaataataggtaccactgaggacatacattgtgaagaaagagaagaataagtcaaatactaaaacatacttatcatgacaactcaaggtgacatgaatatttaatgaaaatttagaatataacaacatatgactctcattctgtggacataaaaggaaaaatacagtaattcattttactcattacattttacaaaatcagcccaatgaagcagtattttttaataaaaacagtaatttaatttcaaacaaatatattaccatcctattcctttatcttgtatatatgtatctaattggcaaaacatactttactgaaatcagtaacaatccaatccatgatacttcaattgcttcgatcaataaacatcttaaatttgaaactcatttttcttatgccataagcctgattatcagttctataaaaacgctacaccctattgcttggcccattaagtgtaactagtcttctgcacaaggctaagtggctaaggtacttttgaacaaccacacacaattcatcaagcacacacactcactcctgctcctctcacacacggccaccagagcagctcccctagttctcttgttcctcatagtgagcatagccactagcataggtccttcctaaattcaaattagtaaacaaatctgatgactcagtatctgaatcctttctgccttcatcttcttcctcttcatcatcctctgcttcatactcatcctcctcctcatcgtggtagctggtatcaccatacttatcagatgaaaggttcttccaataagcatcatacccagaagctccatctccctcttcacctccagtctgcctgccaaatttcagggagcgtgttgacatgctaaggtccttagtctcctgagtttcatgcccacatttaggacaaggaggctgttttcctttttcttgcttaaacactttgctccttgtatgatcatcacagaaacaagccttacaacggagacatgagtgctgaccaagccgattgcatgaaacacatttaaatgtttctgcctctaaaacctggcagctggcttgatgctcaaattgatcatcttcacagagaaagttatggcaaaaagaacaactgaatattctgcctccatggtcccacacgcctcgttcacattcaacacactcagcatcggtaagagggcaggcacaagcatgtgtactgagacatttcctaccatggcaaacccaagcttcacagaagtcacatattgcacccaccattgcaaggccagtactgtatacaccagcatgctttatgacacagtctgaagacttcatcatgcactttgttttcccacactgtgcacaaattggtaacttctgtacagaattacaaaagtagcaaaatgctctattcttctgccgcctctgacacttgtcacattccattgaggcattacatggatgtttagctaaatctatagtgcttcttgatgctcttagttgtttttcacgttctcggcggttctcagccttcttcctcgcaccagtcttttttttaggcattttcccctcgtgcgcgctccgggcaaacctcgctcactttcgccgggagaccggactcactcagggggccgagggacagggaatggcgtgaggcccacccgcgacagcagtaaatccaactcgtggaccaggactccgggaaagaaggtactaacagccagggaggctgacagccgat

SEQ ID NO: 90859 - DNA, 2417 bp, Homo sapiens
attcccgggtcgacgatttcgtctcgctggctagtaggagagactggtgcttgccccgcccggtggactaactcgcttaattttaaataaaaagtcgaggacacggcggtcgttttcccgaagacatgggccctcccatgggccatttgctccctggaggccctcgcgtcttgctgagcccggggagttaggatgacgcgagcggtgagggagcccggaacgattccttcgcggaacaattgaggcgaggcctttgggagtactttgtgggacggaccctggcgggccctgccagacgcacagggatggcggcggaggcggccgatttggggctgggggccgccgtccccgtggagctgaggcgggagcgacgcatggtgtgcgtggagtacccgggagtggtgcgtgatgtggctaagatgctgccgactctgggcggcgaggaaggcgtctcccggatctacgcagaccccaccaagaggctggagctgtacttccggcccaaggacccatactgccacccagtgtgcgccaaccgcttcagtaccagcagcctgctgctccgcatcaggaagagaacgaggcggcagaaaggggtgctgggcactgaggcccactccgaggtcacatttgacatggagatccttggcatcatctccaccatttacaaatttcaggggatgtctgacttccagtacttggctgtgcatacggaagcaggcggcaagcatacgtcaatgtatgacaaggtgctcatgctccggcccgagaaggaggcctttttccaccaggagctgccgctctacatccccccacccatcttctcccggctggacgccccggtggactacttctaccgaccagagacccagcaccgggaaggctacaacaatccccccatctcaggtgagaatctgattggcctgagcagagcccggcgcccccacaatgccatctttgtcaactttgaggatgaggaggtgcccaagcagccactggaggctgcagcccagacgtggaggagagtctgcactaaccccgtggaccggaaggtggaggaggagctgaggaagctgtttgacatccgtcccatctggtcccgaaatgctgtcaaggccaacatcagcgtccacccagacaagctcaaggtcttgcttcccttcatagcctattacatgataacaggcccctggcgcagcctatggattcgatttgggtatgacccccgaaaaaacccagatgccaagatttatcaagtcctcgatttccgaatccgttgtggaatgaaacacggttacgcccccagtgacttgccggtcaaagcaaagcgcagcacctacaactacagcctccccatcaccgtcaagaagacatccagccagcttgtcaccatgcatgacctgaagcagggcctgggcccgtcggggacgagtggtgctcggaaaccagcttccagcaagtacaagctcaaggtcagccttcagacactgagggactctgtctacatcttccgggaaggggccttgccaccctatcggcagatgttctaccagttatgcgacttgaatgtggaagagttgcagaagatcattcaccgcaatgacggggcagagaattcctgcacagaacgggatgggtggtgcctccccaagaccagcgacgagctcagggacaccatgtccctcatgatccggcagaccatccgctccaagaggcctgctctcttttccagctcagccaaggctgatggcggaaaagagcagctgacgtacgagtctggggaagacgaggaggatgaggaggaggaggaagaggaggaggaggacttcaagccatccgacggcagtgaaaacgaaatggagacagagattctggactacgtgtgacagggcccaaggctgggcctccctgacccggccagactggtgtctggcctaatgagggagccggggctccccattgccacccacagtgcccggaatggccctaggaggccctctgaggagagctagagtcccagcaaagggtgcagctgaccctagcactggctgtgacatgctgcttggtgctgcctctggtcctgaggggttagggacatccccaaagggtataccctggctctgccacccatgaaccagcccagcatccagccagtgagtgggcacccaatgcctctcaggatgagaccagtaaatgccggaggtggagctgggcagctgtggagccccaggccacaggccagtctcgcttggctctcatgactgtggtggtggagatagcgtggggagcctcgcccatggtctcacgtggcaagaagtgcctttagctctggatcccaaccgtttggcacagctttggccacagccaggcccctctggaattgtccttattaaaccagtttcccgagaaaaaaaaaa

SEQ ID NO: 90860 - DNA, 441 bp, Homo sapiens
atttactgagtgattttatgttcagaaggtctgcgcctgggttttctctatttgaaatgtgagcaaaatcattttgctctagagattcacaatttccagaaatgttgaggccaagaggtgagagtaggggtggtttttatttggaagaaaattgaaatgtggcagtgttcactcctgacgttgttttgctatcctctgttaacttgttttgactccggaacttggattagccacgtagctactctttggacaacaagttcaacagacatttttagagcatccatttagtaccaggttctttgtttgatgctgaggatgcagctatgatcatggagaagcctctgcctacaggaaccatcagtctcgtggggtgaccccttccttgtcctgtccaggaattgcccaaccagcctctggtctttactgtgcacacttcataca

SEQ ID NO: 90861 - DNA, 3108 bp, Homo sapiens
gagccgagattatgccattgcattccagtctgggtaacaagagcaaaactccatctcgaagaaaaaaaagtttctgaatggggagctgttctggagtatgcaggaaggattggggtgggaggagaacaagaagaggaatacgttttagcgatattgcagttatttcaggttaaaagtgatagagtcaggggctgaaccaggatatcggccatagaagcagaaaggaaggggtatgtgtgaaagaaattaagaaagaagatgtcaggtctctgagcccaagctaagccatcatatcccctgtgacctgcacgtatacatccagatggcctgaagcaactgaagaatcacaaaagaagtgaaaatggctgattcctgccttaactgatgacattccaccattgtgatttgttcctgccccaccttaactgagtgattaaccctgtgaatttccttctcctggctcagaagctgccccaccttaactgagtgattaaccctgcgaatttccttctcctggctcagaagctcccccactgagcaccttgtgacccccgcccctgcccaccagagagcaaccctctttgactgtaattttccattaccttcccaaatcctataaaacggccccacccctatctccctttgctgactctcttttccgactcagcccgcctgcacccaggtgaaataaacagccatgttgctcacacaaagcctgtttggtggtctcttcacatggacgcgcatgaaatgtggcgcatgaaatttggtgccgtgactctgatcgggggacctcccttgggagatcaatcccccgtcctcctgctctttgctccgtgagaaagatccacctacgacctcaggtcctcagactgaccagcccaagaaacatctcaccaatttcaaatctggtaagcggcctctttttactctcttctccaacttccctcactatccctcaacctctttcttctttcaatcttggtgccacacttcaatctctcccttctcttaatttcaattcctttcattttctggtagagacaaaggagacacgttttatccgtggacccaaaactccggcgccggtcatggactgggaaggcagccttcccttggtgtttaatcattgcagggacgcctctctgattatacactcacgtttcaagggtgtcagaccacgcagggacgcctgccttggtccttcagccttagcgacaagtcccgctttcctggggcaggggcaagtaccccaaccccttctctccttgtctctaccccttccctgcttttccggggacagggagcttgctacaagtgccagaaatctatctgaccaccaggccaaggaatgcctgcagcccaggattcctcctaagccgtgtcccatctttgcgggaccccactggaaatcggactgttcaactcacctggcagacactcccagagcccctggaactctggcccaaggctttctgaccgactccttcccagatcttctcggcttagtggctgaagactgacactgcccgatcgcctcggttgaagccccctagaccatcacggatgccgagcttcgggtaactctcacagtggaaggttcccacggcgcccctaatcccgcttgaagcagccctgagaaacatcgcccattctctctccatatcaccccccaaaaatttttgccaccccaacacttcaacactattttgttttatttttcttattaatataagacggcaggaatgtcaggcctctgagcccaagccaagccatcgcatcccctgtgacttgcatgtatatgcccagatggcctgaagtaactgaagaatcacaaaagaagtgaaaaggccctgccccgccttatctgatgacattccaccattgtgatttgttcttgccccaccttaactgagtgattaaccctgtgaatttccttttcctggctcagaagctcccccactgagcaccttgtgacccccgcccctgcccaccagagaacaaccccctttgactgtaattttccattaccttcccaaatcctataaaacggccccacccctatctccctttgctgactctcttttcggactcagcccgcctgcacccaggtgaaataaacagccatgttgctcacacaaagcctgtttggtggtctcttcacacggacacgcatgaaatttggtgcagtgactcggatcgggggacctcccttgggagatcaatcccctgtcctcctgctctttgctccgtgaaaaagatccacctacgacctcaggtcctcagaccgacctgcccaaggaacatctcaccaattttaaatccgcccgcctgcacccaggtgaaataaacagccttgttgctcacacaaagcctgtttggtggtctcttcacacagatgcgcaagaaatttggtgccgtgactcggatcaggggacctcccctgggagatcaatcccccgtcctcctgctctttactccatgagaaagacccacctacgacctcaggtcctcagaccaaccagcccaagaaacatctcaccaatttcaaatccggtaagcggcctctttttactctcttctccaacctccctcactatccctcaacctctttctcctttcaatcttggcgccacacttcaatctctcccttctcttaatttcaattcctttcattttctggtagagacaaaggagacatgttttatccgtggacccaaaactccggcgccagtcacggactgggaaggcagccttcccttggtgttaaatcactgcagggacgcctctctgattattcacccatgtttcaagggtgtcagaccacgcagggatgcctgccttggtccttcacccttagcagaaagtcccgcttttcaggggaaggggcaagtaccccaaccccttctctccttgtctctaccccttctctgcttttccagggaaaaggcaagagcttgctacaagtgccagaaatctgaccaccaggccaaggaatgcctgcagcccaggattactcctaagccatgtcgcatctgtgcgggacccactggaaattggactgttcaactcacatggcagccactcgcagagccactggaactctga

SEQ ID NO: 90862 - DNA, 713 bp, Homo sapiens
accctttaaacctttaaaaatcacacatacagtaaataaaccttcggtaacactataaaaacaattactattacttctagcaattacttatcaaggcaaataaacagctactgaatttaccattgaactttctttagtcatagtaacgagagatatctggtactccattgcatttactgaaaaaatgtttacagacttaagacttgtttactcttctaatagtcacctactacacaattctcatcttacaagggaaggtctcttgttgatcttcagagcatgaaatcagagacagctttagtatgtagatccccaagtaaaaatagaacagattccagggactcaaaatgagaaggcggaggaagaacaactcttatttaagaaaacaacctacagttctattcaaaatcataaaatggatgattatatttcatataatttggataccaagtgttgaataattcaagattgcacttttagaattcattttaccttgggattactaataggattctagcatctgctattgatattgcaacaatataggattcagaattgctaaacaacttcctctttataaaaatgactaaccttaaaatacagtctgatttacaaccagtaatctgaagaccaattttaactcatactttctaccttctgaaaggcttttacactaattaaataaacatcaaatgttagtactaaccaacaat

SEQ ID NO: 90863 - DNA, 1533 bp, Homo sapiens
tttttttttttttttttttttttttttttttttttttttttttttttttttttttgacttttaatgctttattgggattgcaagcgttacaaggttaaagacaaaacccaagcatgggattttgccggaaatattagcgttaaaggagctgagttgagtcaaacacgggccgcaaggtggaccgaggcggcaggcacaggtgacattcagtgtttggcgtgggggtcttcaggtgatggcagaggaggggacccaagagggggccccccactgaagacattggggacacggggaggagacaagatggagagccacgactaggcacggaggtcagacaggcagcccgggccaggatggttagtggcccaggggagagctgcaaacctggggacgcaaggggctggtcggcaagtgcccccgggaacacccactccggcgaggcagaatataacactgggtgggtgggtgtcctgacgaatgggcaggtaatttggggtgcctcgaagcgttttggatctcaggccaatgtgggttccacaattgtgacaatttggctctttgggcttctgtccaatgttccgaatggcccactcacagggcgcttgccgagggaccctctgcgactgaggcggactggcatggacgacccccggggtcatgccagccccgtcaccaggacccagaagcctcaggcctctagactgctagtcgggctgcgtgcaggggggctgagctgggggcacaagtgggggcgaggtaaacctcccagaggccgagtccctgccgcagccctaggcgccgcggtggtggctgctatggcatcaccagacccgtgggctccggggcccaagcaacctggtcgatgggcagacctggcagctctcctgctctgtgggctcagacccgcctgacctccctactccccggcctcaccccaccttgcccccaagaggtcccacagagcttcggacctcctggagacaaggcagggtgctgaggggcgggcaagatgtcaccgagggagaggggagggttcctcaagtgtgcggaaggcggccaccctgccccagcctgatggaaccctctgtttacacacctgctagccccttcccctccggccagcctcaggccagccaggagccccctcctgtggcctccgagcaccctcctgacacctgaggagaccctgcccaacccccccctccgccctcaggacttctggggaccagccactgtccccagaagccaggccggacagtggccttctccactcccctctgacttctccaagggggctcagtggccagtgccccccaggaggctccaccctcaactcaacccaagcaacagggacagatgaaaaacaaaatccaatcagggcgataaatggcggggggcaggacgtggtggtctccaggctggcttcgtgcgttcttgcttttgtcactgcccccctgttacatggggggggggtttaatttggtttctgagcgcataaagctaaggaggggtaaaaaaaaaacaaaaaaaaaa

SEQ ID NO: 90864 - DNA, 1807 bp, Homo sapiens; identical to SEQ ID NO: 58902

SEQ ID NO: 90865 - DNA, 2709 bp, Homo sapiens
atgggccgcgtaggccgggcaggcgtccagctgggacgccgccgcaccacgtgggctgcagagcgcacggggcaggcagctgccggtggcccagggcgggcgctgcgcggccagcgtccggatttgcgatcaggcggcgcggcggacagcccggcggcggggcggggggagttatattgcggggtccttcctcgctcaccctggttcctctcggagcggagacggcaaatggcggacttcgacacctacgacgatcgggcctacagcagcttcggcggcggcagagggtcccgcggcagtgctggtggccatggttcccgtagccagaaggagttgcccacagagcccccctacacagcatacgtaggaaatctacctttcaatacggttcagggcgacatagatgctatctttaaggatctcagcataaggagtgtacggctagtcagagacaaagacacagataaatttaaaggattctgctatgtagaattcgatgaagtggattcccttaaggaagccttgacatacgatggtgcactgttgggcgatcggtcacttcgtgtggacattgcagaaggcagaaaacaagataaaggtggctttggattcagaaaaggtggaccagatgacagaggcttcagggatgacttcttagggggcaggggaggtagtcgcccaggcgaccggcgaacaggcccccccatgggcagccgcttcagagatggccctcccctccgtggatccaacatggatttcagagaacccacagaagaggaaagagcacagagaccacgactccagcttaaacctcgaacagtcgcgacgcccctcaatcaagtagccaatcccaactctgctatcttcgggggtgccaggcctagagaggaagtcgttcaaaaggagcaagaatgagcctgcggttgggagggaatggggcgtggggggttagagcaggaccacagcctggtgagtccccgggcagccgtcctgcagccgccactcctgcgcctgccattggcctcctcacagcggaaacacagcttgtgagtgcatgtcagctgttaacaagtggtttttagtacattctgggctttgctgtatctatctagtgcctgtttgtgcgtttttttctttcttccgctgcttccccattttccttctgtcctttttctcctgctccttgttttcccagcagcacatggggttcctcggaggagcagaggtggccgccgtgggggggcgtttgggctgcggtgctgcgtcatttttcctttgctttctctttactttagacactggcccaactccaggcgtttcctttcattccctcagtgcttctcttctgacctgcatgttgagttctgtattgctggggcttccaacaaaaaccagagtcactgacagagggaacagcagagaccttgttggtattcagctgtgatggatatagagaatcagaggcaccttgttttcacaactaggataaaaatatctgcagggtcctttccattcctatttagagggagtcctggctccatgaccccctcccgagtggactgtccaagcagataggctcacacgagaaacagtgaggctgaaagggggggctatggaagagcggtagggagtccacggagaagatgcagtgaatgcttgcatgcattcacacgtgtgtgtgtcccagctagttcactcctttcgccgtgcgtggtggaggctggcctctctggctgggtgcagtgaatggccagcgggtttcttttctgctgggccaaggcgctttgggggtggagggggtggtgctggtgctgcactgggctgactgcggcgctgacgcagcgtttccccccatccctgttgcctgtgtgttgtgtggatctgttcctagtataggcaacataatgagatactgtgcttcccacctccccttcagttcagagccaaaatgggtctagaatctggcactttactcatttcctttgataaattgtactatgcagagctgtcaggaaccttcagatagcagtagaggactgcagctgtctaggtctgcggccacatcttggggacacactggactgttcccatgtgcagggttcagcagttatgtgggagtgctaggggttaggcttttgagcttgaacgcctgcgtgtgaacagatgaaaaatccttcagtacccaagtcccagtctgtcctatggggagcagtttgggggcggccggcagcaggagcctgggaaagaggccctcgccaggtgatggcagggccagggtggcctggggcacccagcggaatgtgcttagtatttggtcaccagccgtcatcctgggcttttcctactgtgtcttgttacaaggcctcagcaatccacagaactctctctccttccttccacctgtcagcttctctgcttctgagataagaaccatttgtgtaacaccaacacttaacttcagaaagacatgcattatgtggtgtaatcaaacccgatgctttcagatgacctacttacatcttcaatgtggataagataaagaacaaaacacatgcatctaaactgctgggcaatccagttgacttttaaatgtaagaatggaattccaaacacttaacacattcagctatatgacagaaagtaaatctatggatatggtattttgtgaatgatcttttaaataaaagaaaaccttacgtaaaaaaaaaa

SEQ ID NO: 90866 - DNA, 369 bp, Homo sapiens
actagttctagattagtcctacttgcccagagaatgccttcagactcattatatgttcctctactttagaagatgatgtggtctattcaacaatgattcccaaacctatcaactcaatttcataaatagggggtccataattaagtgtagaattgtactagaaagtgtgaggaatttaaaaatgataaaagtctttgccctgcttttatgttttagatttagagtgatcactcagccacaggctaaagagaaatactccattcaaaccttctggggtcttggggctcaggcactgaattataagctcaattaagagaaaacttgaggttagctcaatggttcaaaaatgccaaaagcaaacataatctt

SEQ ID NO: 90867 - DNA, 2714 bp, Homo sapiens
atgacagcccaggatagcaacacttccgcgcacgcgcagcgcgacgggccggaacttccggcgtcctcctcgtggcggtcattttggcctctgtcctgtttgtccagcccgccagtttctgcagtggaggtcgcgactgagggacgggacagagaagtcgcgaaagtgggccagaggttctgcgacaccacctcgggtgagctgcgccaggcccgggatagggactgttgtgttcgaatgcccgccccggtcggccgccgctccccgcctagtccacggagctcaatggcggcagtcgcgctgagggactcggctcagggtatgacctttgaggatgtggccatttatttctcccaagaagagtgggagctccttgatgagtctcagaggttcctgtactgcgatgtgatgctggagaactttgcacatgtaacatccctgggttattgccatggaatggagaatgaggcgatagcttctgagcagagtgtatctatacaggtcaggacttctaagggcaatacacccacccagaaaactcacctcagtgagattaagatgtgtgtcccagtcttgaaagacattttgcctgcggctgagcaccaaaccacatcccctgtgcaaaagtcatacttgggtagcacaagcatgagaggcttctgcttcagtgctgaccttcaccagcatcaaaagcattacaatgaagaagagccctggaaaaggaaggtggatgaggctacatttgtgaccggctgcagattccatgtgttgaattatttcacctgtggggaggccttcccagcccccacggacctactccaacacgaagccactcccagtggtgaggagccacacagtagcagcagcaagcatatacaggcatttttcaatgcaaaaagttattacaagtggggtgaatacagaaaagcttcaagccacaaacacacacttgttcagcatcagagtgtctgttctgaaggagggctttatgagtgtagcaaatgtgagaaagccttcacttgcaagaacacacttgttcagcaccagcaaattcacactggacaaaagatgtttgagtgtagtgaatgtgaggaatcctttagcaaaaagtgccacctaatcttacacaagataattcacactggagaaaggccttatgaatgcagtgatcgtgagaaagcctttatccataaatctgaattcattcaccaccagagacgtcacactggaggagtgcgtcatgagtgtggtgaatgtaggaaaacctttagctacaaatctaacctcattgaacaccagagagttcacactggagaaaggccttatgaatgtggcgagtgcgggaaatcctttagacaaagctctagcctttttcgacaccagagagttcactctggagaaaggccttatcagtgctgtgagtgtgggaaatcctttagacaaatcttcaatctcattcgacatagaagagttcacactggagaaatgccttatcagtgcagtgattgtgggaaatcttttagctgcaaatcggaactcattcaacaccagagaattcacagtggagaaagaccttatgaatgcagagaatgtgggaaatcctttagacaattctctaacctcattcgacaccgcagcattcacactggtgataggccttatgagtgcagtgaatgtgagaaatcctttagccgcaaatttatcctgattcaacaccaaagagttcacactggagaaagaccttatgaatgcagtgaatgtggaaaatcctttacccgcaaatctgacctcattcaacaccggagaattcatactggcacaagaccttatgagtgcagtgaatgtggcaaatcttttagacagcgctctggcctcattcagcaccggagacttcatactggagaaaggccttatgaatgtagtgaatgtggaaagtcttttagccaaagtgctagcctcattcaacaccagagagttcacactggagaaaggccttatcagtgctgtgagtgtgggaaatcctttagacaaatcttcaatctcattcgacatagaagagttcacactggagaaatgccttatcagtgcagtgattgtgggaaatcttttagctgcaaatcggaactcattcaacaccggagaattcacagtggagaaagaccttatgaatgcagtgaatgtgggaaatcctttagccgcaaatctaacctcattcgacatcggagagttcacactgaagaaaggccttaaatgtgaagggaatgtgctatttctttattcagtataatagcactggaggagactgtggtagccatcttcgtaaatttaaactttgagcacccacagtggggtattcttcataagtttcaggtatgtgggaagctctgaggaggttcattgtaatttctaatctgccgaggcctatagcctgatttatgtcactgccaatttctgaggctgaagccatttcacatttcacccctaccacctggcaggtgcacaccatgtgcatgagtcacttccccacagtgctcagagaagcaaacctctgtactctcccatttgcttggggaaattattaatagcccaagcatgtagggtcttcatgtcttttctctgactttagagtatacacctgacccagttgtggtccagagaatctgagttgtgctgtcagctttctaaggattacttttttaaggaacattgtcgcc

SEQ ID NO: 90868 - DNA, 775 bp, Homo sapiens
attgtcaataggctgcttgattaaatttaaattatttgaaatgtttgattaatttaatattttaataattgaatagttaatatgtttatttcaaaaccaaaaatataatgaagcctccctcccccatctgctcaattccttactccacctcatcctcaagaaactcctgtttaactgaattcaagctgacttgtgtacataaacaacttcttttatttgtctttttaaatgtgtttcattaagatgttgctgtctaatgagtgtaggagagaaacaagtagtacagaaatagaaaatatcttgtccatttggaaataaaataagtattattttattttcatatctaaaaaaggaacaaatctctataaaaatattatcttcccaatgcaatcacatagttggaaataactggcttaatggcaacaggaaattactaaatattggcagtaaagtctattactataattgattttattgtatgtttgttattataatggttggaaccaatcctaattagaagcatataaaccagtaacctttagctgtatataataagaccaccaaataagaacagctgtagccatttcttctttggtggtttaaaaacccacaatggcaattatattaacccttgtaaggaataggaccatcttttgttttaaggagcggaagactaataaaactgggctaagcctggttttaaacgtatggggcgagcgtggcaccatttgtgctttttctttatcccacaacaattcaggaaaaaaccggcccc

SEQ ID NO: 90869 - DNA, 3193 bp, Homo sapiens
tttttttttgtgttcagaaaagtacagtgttgacattttattttttatgtaaagaagccatatttacataatacattcatatttttaagtatgttacagctcctgtagaaaaccatttccattaagacagcaacaagtgatctggattcaatctttaaaatattaagtcaaattaaaatgttcttatcaagactccaatttaatttcacagcccatctgccacaggggaactgaggagaaacaggaatgaagagtgggcgacaaagagaaagcatcccttcccacacgccaagagtccagtgcaacgatccctgccacacggtcagccgaccccacttggtgccacagggtccagcctcggccactctgggctcaacctttccagcacgtctgggagcccaatgaggctatgggacagtgtgcatttccctcaaggcctccggaaagtcacctgccacccactgtgacctctgaggctgaaaggactaaggactcctttccccatcatttcagctgggccagtggctggctaaaatcagcgcagcattcccattcttctgaaagccacagctgaaataatgcaccagctgaaaccacagtggacagactgagatggcctccctctgggcctctagttggcaactttctcacccgggggctcctctttctccttttcccgctccttgttccagtccttaaggccttctggaagtgaggtgtcctcatccaagctgccagtgccttccacaaattcttcataggtagatttttccgcaaatggtctggggcccaaaagttcaaccatatcattcttatctaatacttctttttctaacaacagaagagcaaccttctccacgtcagctttcttttctgtgagaagagctactgttcttttataagcatcattaataagtattcgtacttcatcatctatcaatcttgcagtggcttcactgtaaggtttctccaataccatgtccccctgacgtgggaggtcaaaggagatttgcccaaccttttcattcatgccaaactgaacaatttgggcatatgcactctgagttacttttctcaagtcatcttgagcaccagttgtaattcttccaaagaagatttcttcagagactcgaccacctaaagtcatacacatcctatccaagagctgctctttggtatagaggtattgttcttttggtaaatactgagcataacctagtcctttgccacgtgggatgatggatacctttaaaagcgggtctgcgtgctccagataccagccggcaaccgcatggcctgcttcgtggtatgccacagtcttcttctcctcaggctgcagaacctgcgttttcttctctaagccaccaatcactcgctcaattgcctgttcaaagtgtttctgatttatggaatctgacagatgccttgcagcaatcaacgcagcttcattacagacattagcaacatcagcacctgaaaaccctggagttaaagatgccagttttcttgccaatttatccttctccagggtactgtccagttttagcggtcggagatgaactttgaaaatagaagctcttccttttatgtctggtggtccaataaagatctgcctgtcgaaacgccccggcctaagtagcgcggggtccaggatatctggtcgattggtgccggccaaaatgacgacatttgttgttgtattaaaaccatccatctccaccagcagctggttgagtgtgttctcctgctcactctgccctccaaagttgcctcttcctctcttccttcccaccgcatcgatttcatcgatgaagaggatgcaaggggcattcttccgagcaagggcaaataagtctcggactctagcagggcccacaccaacgaacatctccaaaaactcagatccactaacggtgatgaaggggacattggcttctccggctgtggccttagctagcagcgtcttcccagtgcctggaggaccagtgagaatggcaccctttgggatttttgctcctaggtcttgatactgctttgggtttttcaagaaattcacaaattccatgatctctagcttggcctcctcacagccagccacatctttgaacttcacatcaatttcatcctttaagaccttggcagtggtttctccgacactgaagagtccgcccatccctcggcctgtccggccaatggcagcaggccctcttctgatggtgtagagcaagaaggcgatgatgagcaccgtaggcagcatgctcagcagaaaagagccatcactttcagcaatgtagacaacaggcacccgattttctccttctatgcccaattcctgctgtaaagtttccagattccgttcaaaggtgtccacactgccaatattaaaccaaacgtattgcccatcaacaggagtttttcctggtgtaaaggtcactcgaacaaaacgcttgttgacgacttccaatctgtctactactccttttgaaagatagttattgacaaagtccttccaagtgatttctctcccggatctcttgagcagcaagtaaaacatgactccaccccagaacagagcagtccagaggaagaacatcctgaaatccttgtcgtcccatggaatgtcacccttctgaaacctggaccaccagtgagaatcatctttcttgccacctcgttttccaccgccaccacctcctcctccagaagagcgtgtggtagcagctggctttgattcttttttctctcccataacttctttaggttcactagctttttttccattttttccattaggaaagtattttccaaatccttttgggggtcgagaacagaatctttgataagcagcaattatatctgtcaaaagagaatttctgctggcccttgcttgagttgtaacaaatcggtaaagcgtccggaggcagggctgctcgcccgggcccacgccgccaggcacgaggagctgctgtaggccgcggggccagcagccgccccggccccacagccgcaaacagcggtgcgccatggccgccgccgtggccctctcggcccgggacgctgcgcaggcgcgggcaggcgacgactggcggcctcgggaagcgggctcggctcggggaaaggccgccaggcagcgaagcgcgccggcggctcacggaggagcccaagctctcaacgcggcgtctcccctcgtgcc

SEQ ID NO: 90870 - DNA, 1160 bp, Homo sapiens
ccgtatgtacgggccgacccacgcgtgcggtggaagcgaaaaccaagttaagaaggcctgttatttgtgtcatggtctacgtgaaacatcaaagaaacctgtaacggaaaacgagttgtttgaaagagccagttctctatccaaatttaccaatcagaatcttgcactgaaaaaataaaccaatcgtgaatctctacggccacttccggaatttagcaaccgatcactaacagggatcgtccacaatccaatcagagtgattctgttcctatatagaggggcaaaccaatcttcctaactcatttactttgcagatgaactatggcgcgtactaagcagacggctcgtaaatccacaggcggtaaagcaccgcgcaaacagctggccactaaggcagctcgcaagagcgctccggccacgggcggcgtgaagaagccccatcgctaccgccctggcaccgtggctctgcgcgagatccgtcgctaccagaagtctaccgagcttataatccggaagctgccgtttcagcgcctggtgcgagaaatagctcaggacttcaagaccgacctgcgcttccagagttccgcggtgatggcgctgcaggaggcctgcgaggcctacttggtggggcttttcgaggacaccaacctgtgcgctattcatgccaaacgcgtgaccatcatgcctaaagacatccagcttgcccgccgcattcgtggggagagggcgtgaattgttttgagtacaaaccttaaatccaaaggctcttctcagagccaaccactttgtccgtgaaaagggctgtaatcctttgagacgcattagaccactaaactgcactgatccaaatagacatttgaaatagtggcattcagttccctcgatgcttcatttaaatttccaaatttaagcgctccctcaggttttcgcctagggctgggcctccctacgctgttctccattggtttagctgggctttgttttgctgttcaggccctctgctgctttcttgtacattgttctcgttttctaaactcctggccacttaattgtaccctgcttaacccatcctcttgttttctggctcaacgctctttcatgtggtggcctgcattttaggtcttaactgcataggctttcaacgccttggttttgccttg

SEQ ID NO: 90871 - DNA, 569 bp, Homo sapiens
  misc_feature (1)...(569): n = a,t,c or g
agaaatgattttccttttacctaggggaatgcaatttcatcacagccccttacaataaangctcctgaaaaccctttcagtagacagcatttcaattcagagaccaaagtgaaactatctttgaaaacagggacgtggctgggaaaccatgcacacctcggcgaacacttttccacccaccacgagcttggactttctgggaaggttgtcggttttctggtcaaaaacattcttgaagtcatcaggaatggaggaatggagactcggcatcccgggaaagtgagttcctggtttcatcgctgggattcaagagccgaacagcacaatcatgcagaacatcatgaagatgttccacagggcgatgaagattcgaaagtatctgaggctcagcaagaattcccggatgttgtcacctgtgctgggctccctggactcctccccaaagccctgcgtgtccttctttttcagcttaaagttcagcaccgccccggcattcatcagcaacgtcccgaacagcaggatgtctccgatcatcgttacggccgaagcgtccgtcagaaccggaagcg

SEQ ID NO: 90872 - DNA, 414 bp, Homo sapiens
tcttataaatacagtgacgctccagcctctggaagcctctgtcagctcagcctccaaagaagccagcctctccccagttcctgaaatcctgggtgttgcctgccagtcgccatgagaacttcctaccttctgctgtttactctctgcttacttttgtctgagatggcctcaggtggtaactttctcacaggccttggccacagatctgatcattacaattgcgtcagcagtggagggcaatgtctctattctgcctgcccgatctttaccaaaattcaaggcacctgttacagagggaaggccaagtgctgcaagtgagctgggagtgaccagaagaaatgacacagaagtgaaatgaactttttataagcattcttttaataaaggaaaattgcttttgaagtaaaaaaaaaa

SEQ ID NO: 90873 - DNA, 449 bp, Homo sapiens; identical to SEQ ID NO: 59023

SEQ ID NO: 90874 - DNA, 1612 bp, Homo sapiens
aattcccgggtcgacgatttcgtggccgtcatggcgccccgaaccctcgtcctgctactctcgggggctctggccctgacccagacctgggcgggctctcactccatgaggtatttcttcacatccgtgtcccggcccggccgcggggagccccgcttcatcgcagtgggctacgtggacgacacgcagttcgtgcggttcgacagcgacgccgcgagccagaggatggagccgcgggcgccgtggatagagcaggagggtccggagtattgggacggggagacacggaaagtgaaggcccactcacagactcaccgagtggacctggggaccctgcgcggctactacaaccagagcgaggccggttctcacaccgtccagaggatgtatggctgcgacgtggggtcggactggcgcttcctccgcgggtaccaccagtacgcctacgacggcaaggattacatcgccctgaaagaggacctgcgctcttggaccgcggcggacatggcagctcagaccaccaagcacaagtgggaggcggcccatgtggcggagcagttgagagcctacctggagggcacgtgcgtggagtggctccgcagatacctggagaacgggaaggagacgctgcagcgcacggacgcccccaaaacgcatatgactcaccacgctgtctctgaccatgaagccaccctgagatgctgggccctgagcttctaccctgcggagatcacactgacctggcagcgggatggggaggaccagacccaggacacggagctcgtggagaccaggcctgcaggggatggaaccttccagaagtgggcggctgtggtggtgccttctggacaggagcagagatacacctgccatgtgcagcatgagggtttgcccaagcccctcaccctgagatgggagccgtcttcccagcccaccatccccatcgtgggcatcattgctggcctggttctctttggagctgtgatcactggagctgtggtcgctgctgtgatgtggaggaggaagagctcagatagaaaaggagggagctactctcaggctgcaagcagtgacagtgcccagggctctgatgtgtctctcacagcttgtaaagtgtgagacagctgccttgtgtgggactgagaggcaagagttgttcctgcccttccctttgtgacttgaagaaccctgactttgtttctgcaaaggcacctgcatgtgtctgtgttcgtgtaggcataatgtgaggaggtggggagaccaccccacccccatgtccaccatgaccctcttcccacgctgacctgtgctccctccccaatcatctttcctgttccagagaggtggggctgaggtgtctccatctctgtctcaacttcatggtgcactgagctgtaacttcttccttccctattaaaattagaacctgagtataaatttactttctcaaattcttgccatgagaggttgatgagttaattaaaggagaagattcctaaaatttgagagacaaaataaatggaacacatgagaaaaaaaaaaaaaagggggggccgttttaaaggaaccaagtttacgtcccccgggcgggcaagggcaatatcttttttaa

SEQ ID NO: 90875 - DNA, 440 bp, Homo sapiens
catttgtcttgaaaaggtgggcaactgcggctgaagatctcaacctactatacatatcaagcaagtcagcgcttttcttttaatgtcatgactttgcttcttgagagcaccttcagcatcactagtgccacttcccatgggtctgtggtggtattcaaggttcatgttactccactaaacataatgaaaaaccttcgagaactgcaagataccattttttactatgatatgcaatttattagagagatgaactgctcatgcagaaatggttaacatcacatggcattttaagtggatactcacactcgagctcactgcaatagcaagagaaggtggctatgaaattattatactagaggtttttgtggttatgattaatacttcatctttaacattgtttatgtttctctctcctgtgaatggcgctatgtatgtttgaa

SEQ ID NO: 90876 - DNA, 1632 bp, Homo sapiens
gccaatcggaaccgcaccggaaggttcgggtagacccacccgtccgcgacagacctccgccacatcctccacctctcttggtccagcgagcgttgccgggccagggtcaagcggagggctccgacggcgcggacggagcgaagcgccgagccatggcgcaccaaacgggcatccacgccacggaagagctgaaggaattctttgccaaggcacgggctggctctgtgcggctcatcaaggttgtgattgaggacgagcagctcgtgctgggtgcctcgcaggagccagtaggccgctgggatcaggactatgacagggccgtgctgccactgctggacgcccagcagccctgctacctgctctaccgcctcgactcacagaatgctcagggcttcgaatggctcttcctcgcctggtcgcctgataactcccccgtgcggctgaagatgctgtacgcggccacgcgggccacagtgaaaaaggagtttggaggtggccacatcaaggatgagctcttcgggactgtgaaggatgacctctcttttgctgggtaccagaaacacctgtcgtcctgtgcggcacctgccccgctgacctcggctgagagagagctccagcagatccgcattaacgaggtgaagacagagatcagtgtggaaagcaagcaccagaccctgcagggcctcgccttccccctgcagcctgaggcccagcgggcactccagcagctcaagcagaaaatggtcaactacatccagatgaagctggacctagagcgggaaaccattgagctggtgcacacagagcccacggatgtggcccagctgccctcccgggtgccccgagatgctgcccgctaccacttcttcctctacaagcacacccatgagggcgacccccttgagtctgtagtgttcatctactccatgccggggtacaagtgcagcatcaaggagcgaatgctctactccagctgcaagagccgcctcctcgactccgtggagcaggacttccatctggagatcgccaagaaaattgagattggcgatggggcagagctgacggcagagttcctctacgacgaggtgcaccccaagcaacacgccttcaagcaggccttcgccaagcccaagggcccagggggcaagcggggccataagcgcctcatccgcggcccgggtgaaaatggggatgacagctaggaggctggagcagggccggccacgtgtggactgtggggctgcccaccttccgctccctgccaccatcctccttcctgggctccaggaaagtgtttctgggaggtcaggagggctggcagctgaacgcacttgcagcgtccgagggccaccgggctggcattttgtgacccttccctgttgctgtccctgcatctcgtctgtgtgcccagggtgtccggggaccctgcctggctggcttaagggggctgggtcaggggcctggcatgaacctggcctcccggggagctgagactagggtcccagcacagcccagaaacctttggccacaagaagtggggtcagtcagggctggggcaggggtcactgcagtttgggatggttgaatgctgtattttctaaagaataaaatatttttaaatcaaaaaaaaaa

SEQ ID NO: 90877 - DNA, 2005 bp, Homo sapiens
aattgatcgccttgaggacctgcaccgaaagtcccggaacgacccacgcgtccgcggacgcgtgggaggcgaagctgctgagctgcgtcctaggcccccggctctacaaaatctaccgggagagggactctgaaagggccccggccagcgtccctgagacgccaacggcagtcactgccccccattccagctcctgggatacgtactatcagccccgtgccctggagaaacatgctgacagcatcctggcactggcttcagtattctggtccatctcttattactcctctcccttcgccttcttctacttgtacaggaaaggttacttgagtttgtccaaagtggtgccgttttctcactatgctgggacattgctgctacttctggcaggtgtggcctgcctccgaggcattggccgctggaccaacccccagtaccggcagttcatcaccatcttggaagcaacacatcggaaccagtcttcagaaaacaagaggcagcttgccaactacaactttgacttccggagctggccagtcgacttccactgggaagaacccagcagccggaaggagtctcgagggggcccttcccgccggggtgtggccctgcttcgcccagagcccctgcaccgggggacagcagacaccctcctcaaccgggttaagaagctgccttgtcagatcaccagctacctggtggcgcacaccctagggcgccggatgctgtatccaggctctgtgtacctgctgcagaaggccctcatgcctgtgctgctgcagggccaggcccgactggtggaagagtgtaatgggcgccgggcaaagctgctggcctgtgatggcaatgagattgacaccatgtttgtggaccggcgggggacagctgagccccagggacagaagctggtgatctgctgtgaggggaatgctgggttttatgaggtgggctgcgtctccacgcccctggaagctggatattcagtcctgggctggaatcatccaggctttgctggaagcacgggggtgccattcccgcagaatgaggctaatgccatggatgtggtggtccagtttgccatccaccgcctgggcttccagccccaggacatcatcatctacgcctggtccatcggcggcttcactgccacgtgggcagccatgtcctacccagatgttagtgccatgatcctggatgcctcctttgatgacctggtgcccttggccttgaaggtcatgccagacagctggaggggcctggtgaccaggaccgtgaggcagcatctcaatctaaacaacgcggagcagctgtgcagataccagggtcctgtactgctgatccggagaaccaaggatgagatcatcaccaccacggttcctgaggacatcatgtccaaccgaggcaatgacctcctgctgaagctcctgcagcatcggtatccccgggtgatggcagaggagggtcttcgagtggtgaggcagtggttggaggcctcctcacagctggaggaagcctcaatttatagccgatgggaggtggaagaggactggtgtctgtctgtcctccgctcctaccaggcagaacacgggcccgacttcccctggagcgtgggggaggacatgagtgcagatggacggcggcagctggctttgtttctggctcggaagcatctgcacaactttgaggccactcactgcaccccactcccagcccagaacttccagatgccctggcacctctagggaccaactgggactcattatggaagaatggggtgagaggagacatgaggaaagaccctcttatttgtgattctctgtgttcatgttgctgtttatagtttgtggaaagtgggggaccatcccccttctcaccactgttcctcttgcacgtttcccctcattcatgtggctgtacttaaccttctccaacatacatcctgcattacatgaatggattattcctaataattaataaaaaggtattttttctactaaaaaaaaaa

SEQ ID NO: 90878 - DNA, 891 bp, Homo sapiens
cactgagaccctcgttggaggcctgaaaatcgaccgaggcttcagcgggtgccgcccgcctagagggagtggagcggtgagcacgttaggggtggggggcgcaggtcaagctttcaccagtttttaattctttgatggggtaaatttgagcaattttctcgacttgaccacattcgttattaactgagcaggaatcaggagaggaacccggtcctctccacacagcccagcagagagcctacgactagatttgcatctttacgtcctgcgcggaggctgctacacacatgcagaagtcatgctggtggcctggacattgaagggagagaagtggatttgggagacatttatgagatggcgccgaaagcgaagaaggaagctcctgcccctcctaaagctgaagccaaagcgaaggctttaaaggccaagaaggcagtgttgaaaggtgtccacagccacaaaaagaagaagatccgcacgtcacccaccttccggcggccgaagacactgcgactccggagacagcccaaatatcctcggaagagcgctcccaggagaaacaagcttgaccactatgctatcatcaagtttccgctgaccactgagtctgccatgaagaagatagaagacaacaacacacttgtgttcattgtggatgttaaagccaacaagcaccagattaaacaggctgtgaagaagctgtatgacattgatgtggccaaggtcaacaccctgattcggcctgatggagagaagaaggcatatgttcgactggctcctgattacgatgctttggatgttgccaacaaaattgggatcatctaaactgagtccagctgcctaattctgaatatatatatatatatatatcttttcaccataaaaaaaaaa

SEQ ID NO: 90879 - DNA, 2655 bp, Homo sapiens
agcgctcctccttccggtgaaagtcgtcgggttcccagccgggagtctgcggagttctcatactctgttacccagcttcctttgtatgagggctgttgcgcacttccggtggaagcgctgaagcgagtgggtggagtttacggagccggtgggcggtaggcggtgctacgggtagctgggtgctgtccaaaggcgacagggcgtcgttaggggagcgagtcgtgaccggttgggccacactcaacgtgggacgaagcttcgcctactgtttgactacgtgcgtgcagcctcccctcgatgtcggccctcgaaaagagcatgcacctcggccgccttccctctcgcccacctctacccggcagcgggggcagtcagagcggagccaagatgcgaatgggccctggaagaaagcgggacttttcccctgttccttggagtcagtattttgagtccatggaagatgtagaagtagagaatgaaactggcaaggatacttttcgagtctacaagagtggttcagagggtccagtcctgctccttctgcatggaggaggtcattctgccctttcttgggctgtgttcacggcagcgattattagtagagttcagtgtaggattgtagctttggatctgcgaagtcatggtgaaacaaaggtcaagaatcctgaagatctgtctgcagaaacaatggcaaaagacgttggcaatgtggttgaagccatgtatggggaccttcctcctccaattatgctgattggacatagcatgggtggtgctattgcagtccacacagcatcatccaacctggtaccaagcctcttgggtctgtgcatgattgatgttgtagaaggtacagctatggatgcacttaatagcatgcagaatttcttacggggtcgtcctaaaaccttcaagtctctggagaatgctattgaatggagtgtgaagagtggccagattcgaaatctggagtctgcccgtgtctcaatggttggccaagtcaaacagtgtgaaggaattacaagtccagaaggctcaaaatctatagtggaaggaatcatagaggaagaagaagaagatgaggaaggaagtgagtctataagcaagaggaaaaaggaagatgacatggagaccaagaaagaccatccatacacctggagaattgaactggcaaaaacagaaaaatactgggacggctggttccgaggcttatccaatctctttcttagttgtcccattcctaaattgctgctcttggctggtgttgatagattggataaagatctgaccattggccagatgcaagggaagttccagatgcaggtcctaccccagtgtggccatgcagtccatgaggatgcccctgacaaggtagctgaagctgttgccactttcctgatccggcacaggtttgcagaacccatcggtggattccagtgtgtgtttcctggctgttagtgacctgctgtccacccctcctcaacatcgagctctgttgtaaatacgtcgcaccagaggccactgtgatgccactgtctcctctccatcccgcccagccatgtgacactggctcccggtagacgggcaccccgagatgtaccaaccttttcatgtattctgccaaaagcattgttttccagggcccttgaccaacatcggcttccccagtccagggctcccctgctcctttcccttccctgtactggggtagctcctgcctgctctccctgcgttgcctagggtaaagcctccagatttgccatactgagcccctcttcctagcatcaggcgatacatctgagttcaaatgtcttcccaggctcagggacctccattccttgagattgtcttggcatggcccagccctgcctcatgggatggacaatgcatggggtggtctttatttttccctttcaaataaaacactagtcaggtaccgttttatcccagtcgtactcttccaggtttggaagacccagagaggccaagatcccatccttagccatagcgagcggtggtggtggatagcatcacaagaaacgagcctgaaaatcaggtccagccggtccaagcacatggcctcccatctgggagagcccactgtcccactcccacatgtctgggcacctgccctgggctgaggccaggctgctccaggggcctcctgcgccctcacctgccacagagcaacccaggttaaatacagcccatgcacaaagccacaggccaaagcctatggaattgtttttaatcatcaaatttaaccattttcataactggttcctggaggtgtgcagtgcccccttgcctcttcaaacctacagcttctctttgccatttgtggatttcacatcactccacacagaaacattacagcctggcatccccagtctttgccttcttccagctgcctcgacacagcactgtggcctgtccctattgcccaggcacgccatttccaagggcaggaaggggcagtgtcctgaagcccatcttttctgtgactgtcttaggtgatgtgtagccccctccacctttccactcaacaacctcccacccctgtcctgctgcatggtccggagtctgggacctactttgttttttgttatttatgaccttgtttaaagaaaataaatatctcccaacctttaaaaa

SEQ ID NO: 90880 - DNA, 571 bp, Homo sapiens
ctttaatcttagttttgttggtattcattctgtaaaatattttatataaccatgcctttctctgattttcactcatgattaagctgttagaaagttatcgcattatagttggaaaagagttttctttggtaatttatcggggtttttgatgtcaagtcgcatgtctgtagactctacaaattcaatgtattctaaattgaattatgaattttcctttagtcttgttcctgcttttatttccttatttttgaatgtcaccactatctacctaatgacatagacaaaaagctgtaaattgtcctatacttttttttctccttgttccctttgtcaaattggttacccagtgttggagagtttcttcccctcaaaaacctttcaaatatttatccttctctgcccctttctttccaccctgtacatactgccttgtttcaaaccctcatcatcttcctgcatatatcctacagatgcataaactcagtggttttcaagtcatctgttatgggagtttttggtaaaaggtgccctgttcccactgcagtgatggtagcccaagtcgacgcggccg

SEQ ID NO: 90881 - DNA, 1298 bp, Homo sapiens
atggacctaacagacatttacagaacattttatccaacagctagagaaggcacattctttccatcagcactctccaggtctgccatgtggaggagtgtcaggaaaggcttttgggagaaagtggtacttacactgagtgtcaaaggaattacaaataatttagcagtgggggagcggggagcgcagctgatggccggcgatgggaacggagtggggccgtcgcctccgcgccgagccgtgagcgccgagccaccgccgccgctacctcagcccttcgcgaagcgccgggcagctcgggaacatggccctggagcggctctgctcggtcctcaaagtgttgttaataacagtactggtagtggaagggattgccgtggcccaaaaaacccaagatggacaaaatattggaatcaagcatattcctgcaacccagtgtggcatttgggttcgaaccagcaatggaggtcattttgcttcgccaaattatcctgactcatatccaccaaacaaggagtgtatctacattttggaagctgctccacgtcaaagaatagagttgacctttgatgaacattattatatagaaccatcatttgagtgtcggtttgatcacttggaagttcgagatgggccatttggtttctctcctcttatagatcgttactgtggcgtgaaaagccctccattaattagatcaacagggagattcatgtggattaagtttagttctgatgaagagcttgaaggactgggatttcgagcaaaatattcatttattccagatccagactttacttacctaggaggtattttaaatcccattccagattgtcagttcgagctctcgggagctgatggaatagtgcgctctagtcaggtagaacaagaggagaaaacaaaaccaggccaagccgttgattgcatctggaccattaaagccactccaaaagctaagatttatttgaggttcctagattatcaaatggagcactcaaatgaatgcaagagaaacttcgttgcagtctatgatggaagcagttctattgaaaacctgaaggccaagttttgcagcactgtggccaatgatgtaatgcttaaaacaggaattggagtgattcgaatgtgggcagatgaaggtagtcggcttaacaggtttcgaatgctctttacttcctttggtggagcctcccctgcacaagcagcactttccttttgccatagcaacatgtgcatcaataattctttagtctgtaatggtgtccaaaattgtgcatacccttgggatgaaaatcattgta

SEQ ID NO: 90882 - DNA, 955 bp, Homo sapiens
tttcgtctttccagacaaagacaagtgacaagaattttaggtttaaaaagcaaccagattcatctcagcagcttttgtagttttaaataagcaaggagtttctccagcgaaacttcctcacacctcttggtcttggtctcttcagacactttccttcctgttctctggagatcttgcagaaaagagcctgcagtgtttcccttgctcagccatgctcctggagcttatcccactgctggggatacattttgtcctgagaactgccagagcccagtcagtgacccagcctgacatccacatcactgtctctgaaggagcctcactggagttgagatgtaactattcctatggggcaacaccttatctcttctggatggaaagaactgttgaagaagcttttatacttcttgtttgcttgaagccttggagggtagcaagtagtctggagaaaaaggagaaggaggatgaatctttccagctgctacttggctcacgctataatgtattaaagggtagcaggggtgagacgagtgaaggtggagcagagtccttcagttcccagtctccaggagagaaccagctctactctgagatgcagtttttctacctctgtgaacaacgtgcagtggttccaacagaatcctgggttggcctcatcaatctgtttttcatggcttcatggatgaagcacagtggaaagttatggtcaaaaagaaactctgaggagctctgtggtaccctacacatcacagccgcccaactgaaagactcaggcacgtacttctgtgcagttgaggcacagttctcccaggaaatctgcagcctggatccgaactgcagctgggcctgcagccccaaccccttccgtgagagaggcatgttgcccccacagtatcacttgcacagcttcgggttttctgattgacgctgcgcttttatctctgctaaaactata

SEQ ID NO: 90883 - DNA, 802 bp, Homo sapiens
tctctccccaagaaatattttggggtggcccccggttttttttcccccccggttttttaaaacccccccccctgtttttttttttggggcccaaaaaaaaaaaaaatcttccccccccccccggggaataattttttttttttttaggggccccccccccttttttttttttttttttttttttttttttttttttttttttttttttttttttttttttatccaaaatgtgtttattgagatggtttcccactcatcttgactcagagtgcttttagtgctgcttcctcctgaaggaacatccttctgtaagccttgcttttcctcctgtaggctggcagaggacagtggagcagccaacacacaaaactaccgtttgtgcatggctaaagaccgtggtgattttatagcatcctgggcatttcacatccatgaagtaggaattggggctctgcaccaggcgtttcttcttgtgtttcctcttctcctctcgcaaaggatctccttcatccctctccagaagaggagaagaggaaacacaagaagaaacgcctggtgcagagccccaattcctacttcatggatgtgaaatgcccaggatgctataaaatcaccacggtctttagccatgcacaaacggtagttttgtgtgttggctgctccactgtcctctgccagcctacaggaggaaaagcaaggcttacagaaggatgttccttcaggaggaagcagcactaaaagcactctgagtcaagatgagtgggaaaccatctcaataaacacattttggataaaaaaaaaa

SEQ ID NO: 90884 - DNA, 632 bp, Homo sapiens
ttttttttttttggagttgcaaaatggccatttattgcctacaggggaaggaaagggagggagagaggggaagtacacaggtgcaaggaaacaagcatatatttagccctatacatcatgtgtgagcagtaaccaatctccaaaatggaaaaaaatattttgttatctgacatagtagttaaggttcttaagcacctcccttctgagctgccacaagatttaaaaggcaggactgcttttttttagtcaatgttcacattaatgaaaaaatactaccaaccgtgtccttttgcacgcacactttgtacagtgtctattgtgaaaaacatctcagctgagcagttttggtcaagattcagacctcatcaactgtttaactgtaataaatagaaaaataaagcagctggtgattttgtcagagagaatgtgttcagtaagagtagaaccactttctccagggatggcagagagtgttaaatggttaaaacacctacagaaccagtctattaaacattaaacactagcaagctactatttaatgaagtgccatgtaattgtagcttgctagtgtttaatgtttaatagactggcaagctacaattacatggcacttcattaaattagactattta

SEQ ID NO: 90885 - DNA, 657 bp, Homo sapiens
tggaaagcgggcggccgaccacgcgtccgaatatgttaagttataaagttctcccaaattccagttgcagtgatcttaccccaaaggaatgttcattttcatcttaaaaaatgctagccataaaaaatagttctccgacagggaggtcttctcatgcagtagtgcaaagtttaaactacataatgtaatatctggtacttaatagtctgcaatggtgtatgaaaaatattccactaggaattaaaaaatccatactctgtaagaaagccctgagggaataataaaactttcctccagagagctggttttccatgtatacactaatcctgcatcacattatggttgtgatattagatcacaaccacagatactttaacattgatattaatatgtatttccagagttgtaaaataattaacttattttctaattgggtacccatgttcttagaattttaagttctgactaaccacatgaatacacataaaaattgccctattctatgaccatgaaggttcacatcctaaaaatcccagaacatcccctactcattgatgcagccttgggataagatttgatttctcaggcttagaagctcttttgaagaaatctgatccagtcacccattcaggggcttcagggcccttttccaggaaa

SEQ ID NO: 90886 - DNA, 4494 bp, Homo sapiens
caataccctgctaatttttgtatttttagtagacaccgggtttcaccatgttggccgggctggtcttgaactcctgacctcaggtgatccgcccgcctcagcctcccaaaatgctgggattacaggtgtgagccaccacgtccagccaagaaaaaaagtttttaatgaaagaaacagaaactgatgccattatataatgaaccctagtacccatcacccagcttcagcagggggtagtattttgggactctttgatttttttggcttgggcctaggtgaaatgacaatggatgctctgttggctcgattgaaacttctgaatccagatgaccttagagaagaaatcgtcaaagccggattgaaatgtggacccattacatcaactacaaggttcatttttgagaaaaaattggctcaggctttactggagcaaggaggaaggctgtcttctttctaccaccatgaggcaggtgtcacagctctcagccaggacccacaaaggattttgaagccagctgaagggaacccaactgatcaggctggtttttctgaagacagagattttggttacagtgtgggcctgaatcctccagaggaggaagctgtgacatccaagacctgctcggtgccccctagtgacaccgacacctacagagctggagcgactgcgtctaaggagccgcccctgtactatggggtgtgtccagtgtatgaggacgtcccagcgagaaatgaaaggatctatgtttatgaaaataaaaaggaagcattgcaagctgtcaagatgatcaaagggtcccgatttaaagctttttctaccagagaagacgctgagaaatttgctagaggaatttgtgattatttcccttctccaagcaaaacgtccttaccactgtctcctgtgaaaacagctccactctttagcaatgacaggttgaaagatggtttgtgcttgtcggaatcagaaacagtcaacaaagagcgagcgaacagttacaaaaatccccgcacgcaggacctcaccgccaagcttcggaaagctgtggagaagggagaggaggacaccttttctgaccttatctggagcaacccccggtatctgataggctcaggagacaaccccactatcgtgcaggaagggtgcaggtacaacgtgatgcatgttgctgccaaagagaaccaggcttccatctgccagctgactctggacgtcctggagaaccctgacttcatgaggctgatgtaccctgatgacgacgaggccatgctgcagaagcgtatccgttacgtggtggacctgtacctcaacacccccgacaagatgggctatgacacaccgttgcattttgcttgtaagtttggaaatgcagatgtagtcaacgtgctttcgtcacaccatttgattgtaaaaaactcaaggaataaatatgataaaacacctgaagatgtaatttgtgaaagaagcaaaaataaatctgtggaactgaaggagcggatcagagagtatttaaagggccactactacgtgcccctcctgagagcggaagagacttcttctccagtcatcggggagctgtggtccccagaccagacggctgaggcctctcacgtcagccgctatggaggcagccccagagacccggtactgaccctgagagccttcgcagggcccctgagtccagccaaggcagaagattttcgcaagctctggaaaactccacctcgagagaaagcaggcttccttcaccacgtcaagaagtcggacccggaaagaggctttgagagagtgggaagggagctagctcatgagctggggtatccctgggttgaatactgggaatttctgggctgttttgttgatctgtcttcccaggaaggcctgcaaagactagaagaatatctcacacagcaggaaataggcaaaaaggctcaacaagaaacaggagaacgggaagcctcctgccgagataaagccaccacgtctggcagcaattccatttccgtgagggcgtttctagatgaagatgacatgagcttggaagaaataaaaaatcggcaaaatgcagctcgaaataacagcccgcccacagtcggtgcttttggacatacgaggtgcagcgccttccccttggagcaggaggcagacctcatagaagccgccgagccgggaggtccacacagcagcagaaatgggctctgccatcctctgaatcacagcaggaccctggcgggcaagagaccaaaggccccccgtggggaggaagcccatctgccacctgtctcggatttgactgttgagtttgataaactgaatttgcaaaatataggacgtagcgtttccaagacaccagatgaaagtacaaaaactaaagatcagatcctgacttcaagaatcaatgcagtagaaagagacttgttagagccttctcccgcagaccaactcgggaatggccacaggaggacagaaagtgaaatgtcagccaggatcgctaaaatgtccttgagtcccagcagccccaggcacgaggatcagctcgaggtcaccagggaaccggccaggcggctcttcctttttggagaggagccatcaaaactcgatcaggatgttttggccgctcttgaatgtgcagacgtcgacccccatcagttcccggccgtgcacagatggaagagtgctgtcctgtgctactcaccctcggacagacagagttggcccagtcccgcggtgaaaggaaggttcaagtctcagctgccagatctcagtggccctcacagctacagtccggggagaaacagcgtggctggaagcaaccccgcaaagccaggcctgggcagtcctgggcgctacagccccgtgcacgggagccagctccgcaggatggcgcgcctggctgagcttgccgccctgtaggcttggcgctgggctctcggtttgttcttcatttttaaagaaggaagggtcatatgtttattgctaaactgtcaaaaaggaatatattctgattaaattattactcctcactttgagggtgtgagaattttagaagatttaaatgttctatataacacttagatttctgatattttggaagaagttagaagttaatgaaagcaaactcagttaccaattttctggaaaatatccatgtggtaatggtagactttttaggtggcaatttctaggtctgaaatatagcagaggaaagggcgctgaggcagttgcaggcaggcagccctgtacttaccctgtactcacctcatccgacagacgctgtggatgaggaggggcttggcggaggcgtgagcaccgatgtccctttgataacctgcactcaccaagatgaactatttgccgccctgtcttttcctgggttggggggtggcatctgatggtggcagagtgcctgttggttcgcccgtgggtctcatggttcagacagagggaggtggacggcagggatcagggagccaggagcgcgcctcagacttgcagcaaccattgtgatttgggttgttcggaatatttaaattactgatcagaagatgaaagtagcttttctcttgggaagtcttgcagcccgtgggagtgataccaggagcaacacagagctcagcagcggcgccaaggtgttccctgtttcctcagcacgtgagccttcaccgcctgcttcattcaggagccagtgcagcagtaatacagtctatacattgttctgttttcaaatttatcctgaggctttgttgagcataaatgattatacgataaaggtatccgttattttggaactcatttcagttgggatctcctgtatgcagagtgttgcatttagaggtttgagtcccatcttggtttcttgccgtgctgactgtagccttcaccttgacttgaatgaaggtctgtggttggaatgtgtgaggagccgctgaggtgttcaggaggtgctgcctggaggtcggtttcttcctgggtgttacgggcaactgctcacacagttgtttctctgtgaacatttccagtgtttaatccaaaatgaaaacccaccaatgcttttgctaacttcagtgccttttataaatcatttttaaatttcctgaacttgctttttgaggatatacagggatattaagtagacgcaggattgtttttgtttgtaaaaattctgaattgaaactttgttttaaaaaaaggcttctttctttcatatgacaagagataggtcaggaatattggaatcaagatttaaatgttaaaattcgattttgttacacagggtgtgttcatttgttttgtagcagacaagatctagatcccagacagaaacaacacatgctattctaaaaagccgcattttaaaaggcaccttggttctcaaaagaaatcagaatatggatattcgtagtgatgatctgttttctctaaaatcttaccatattgtctgtatatggttgtaaattcaaatggaaagtaaaacgttttggccctgaaaaaaaaaa

SEQ ID NO: 90887 - DNA, 502 bp, Homo sapiens
  misc_feature (1)...(502): n = a,t,c or g
cgcccgcgcctttagggctctcagnggcctcnnggannnncncganccangcgtncgnggacgcgtgggcggacgcgtgggatctaaacttaatcattttctataggtaaatagggaacttatttttgattcaaatgtgcttatactaattatagtaattgaaattataatgggaaagggaaaactttatataatttgtgacatgagtatgtctaggaccattctaaaaataacagcagagttggttgcttccatgtatgatgcatataacctagagtagggtaacctcctgcccgtcagtggtgtgccaaagcacaggcttggggtgcacagtccatcagtgagcgaaacttgtaagtgtgttgtccaggcagtatgccaagcagcatattccaacaaattgaagagaaaaaaaatgtaagtctaattatggagacagaggcagaagcacagctcttctcaagtctatgtttgttgaatattattttaagatctctgcctt

SEQ ID NO: 90888 - DNA, 533 bp, Homo sapiens
ctaatctttaagctctgcaattctttcctctgcctgttctagtctattgataaagctttaatttgtattttgaaatttcttaagtgagtttaggaaactctgattttttaattccagaagctcttcttttccattaagatgtttatttcttctgccattttcttaattgctttagaaatctctttgtgttgatttttaaccttttgttggatctctttgtgcttccctgcagcaattctggtggattcccttttttcttttcacagaaatgatctttatgcactatcttgctatttccaagtggctgatgcatgctaaagccctcttattcatcatcttggaataaaaaaattcatttttttccacatagaatttattgcatcatcttagttaatttaacccttaacatttttgtcttgtttcacagctttatatttacactttttaaaattttaaattaatttcttatttaaaaattttactgaataactcacttaagaagtaacttttttttataaagccgggtttacttt

SEQ ID NO: 90889 - DNA, 5374 bp, Homo sapiens
ccggatgtccagttcgacccacgcgtccggcctgttgcctctgtgagaaagtaccactgtaagatgtctttggcatgatcattttcctctttcaccctgtctaggttgccagcaaatcccacgggcctcctgacgctgcccctggggccacaggtccctcgagtgctggaaggatgaaggattcctgcatcactgtgatggccatggcgctgctgtctgggttctttttcttcgcgccggcctcgagctacaacctggacgtgcggggcgcgcggagcttctccccaccgcgcgccgggaggcactttggataccgcgtcctgcaggtcggaaacggggtcatcgtgggagctccaggggaggggaacagcacaggaagcctctatcagtgccagtcgggcacaggacactgcctgccagtcaccctgagaggttccaactatacctccaagtacttgggaatgaccttggcaacagaccccacagatggaagcattttggcctgtgaccctgggctgtctcgaacgtgtgaccagaacacctatctgagtggcctgtgttacctcttccgccagaatctgcagggtcccatgctgcaggggcgccctggttttcaggaatgtatcaagggcaacgtagacctggtatttctgtttgatggttcgatgagcttgcagccagatgaatttcagaaaattctggacttcatgaaggatgtgatgaagaaactcagcaacacttcgtaccagtttgctgctgttcagttttccacaagctacaaaacagaatttgatttctcagattatgttaaacggaaggaccctgatgctctgctgaagcatgtaaagcacatgttgctgttgaccaatacctttggtgccatcaattatgtcgcgacagaggtgttccgggaggagctgggggcccggccagatgccaccaaagtgcttatcatcatcacggatggggaggccactgacagtggcaacatcgatgcggccaaagacatcatccgctacatcatcgggattggaaagcattttcagaccaaggagagtcaggagaccctccacaaatttgcatcaaaacccgcgagcgagtttgtgaaaattctggacacatttgagaagctgaaagatctattcactgagctgcagaagaagatctatgtcattgagggtacaagcaaacaggacctgacttccttcaacatggagctgtcctccagcggcatcagtgctgacctcagcaggggccatgcagtcgtgggggcagtaggagccaaggactgggctgggggctttcttgacctgaaggcagacctgcaggatgacacatttattgggaatgaaccattgacaccagaagtgagagcaggctatttgggttacaccgtgacctggctgccctcccggcaaaagacttcgttgctggcctcgggagcccctcgataccagcacatgggccgagtgctgctgttccaagagccacagggcggaggacactggagccaggtccagacaatccatgggacccagattggctcttatttcggtggggagctgtgtggcgtcgacgtggaccaagatggggagacagagctgctgctgattggtgccccactgttctatggggagcagagaggaggccgggtgtttatctaccagagaagacagttggggtttgaagaagtctcagagctgcagggggaccccggctacccactcgggcggtttggagaagccatcactgctctgacagacatcaacggcgatgggctggtagacgtggctgtgggggcccctctggaggagcagggggctgtgtacatcttcaatgggaggcacggggggcttagtccccagccaagtcagcggatagaagggacccaagtgctctcaggaattcagtggtttggacgctccatccatggggtgaaggaccttgaaggggatggcttggcagatgtggctgtgggggctgagagccagatgatcgtgctgagctcccggcccgtggtggatatggtcaccctgatgtccttctctccagctgagatcccagtgcatgaagtggagtgctcctattcaaccagtaacaagatgaaagaaggagttaatatcacaatctgtttccagatcaagtctctcatcccccagttccaaggtcgcctggttgccaatctcacttacactctgcagctggatggccaccggaccagaagacgggggttgttcccaggagggagacatgaactcagaaggaatatagctgtcaccaccagcatgtcatgcactgacttctcatttcatttcccggtatgtgttcaagacctcatctcccccatcaatgtttccctgaatttctctctttgggaggaggaagggacaccgagggaccaaagggcgcagggcaaggacataccgcccatcctgagaccctccctgcactcggaaacctgggagatcccttttgagaagaactgtggggaggacaagaagtgtgaggcaaacttgagagtgtccttctctcctgcaagatccagagccctgcgtctaactgcttttgccagcctctctgtggagctgagcctgagtaacttggaagaagatgcttactgggtccagctggacctgcacttccccccgggactctccttccgcaaggtggagatgctgaagccccatagccagatacctgtgagctgcgaggagcttcctgaagagtccaggcttctgtccagggcattatcttgcaatgtgagctctcccatcttcaaagcaggccactcggtggctctgcagatgatgtttaatacactggtaaacagctcctggggggactcggttgaattgcacgccaatgtgacctgtaacaatgaggactcagacctcctggaggacaactcagccactaccatcatccccatcctgtaccccatcaacatcctcatccaggaccaagaagactccacactctatgtcagtttcacccccaaaggccccaagatccaccaagtcaagcacatgtaccagggagttcatggtctagtggagatgcagacatccaagcagatcctttgccgtcctgctggggacgcagagcacactgtgggagcccaggagggggagctgccctgtccttggggagtcagcgaagccttcagagataatattagagcaggcccttgcagggtgaggatccagccttccatccacgaccacaacatacccaccctggaggctgaggttggggtgccacagcctcccagcgaggggcccatcacacaccagtggagcgtgcagatggagcctcccgtgccctgccactatgaggatctggagaggctcccggatgcagctgagccttgtctccccggagccctgttccgctgccctgttgtcttcaggcaggagatcctcgtccaagtgatcgggactctggagctggtgggagagatcgaggcctcttccatgttcagcctctgcagctccctctccatctccttcaacagcagcaagcatttccacctctatggcagcaacgcctccctggcccaggttgtcatgaaggttgacgtggtgtatgagaagcagatgctctacctctacgtgctgagcggcatcggggggctgctgctgctgctgctcattttcatagtgctgtacaaggttggtttcttcaaacggaacctgaaggagaagatggaggctggcagaggtgtcccgaatggaatccctgcagaagactctgagcagctggcatctgggcaagaggctggggatcccggctgcctgaagcccctccatgagaaggactctgagagtggtggtggcaaggactgagtccaggcctgtgaggtgcagagtgcccagaactggactcaggatgcccagggccactctgcctctgcctgcattctgccgtgtgccctcgggcgagtcactgcctctccctggccctcagtttccctatctcgaacatggaactcattcctgcctgtctcctttgcaggctcatagggaagacctgctgagggaccagccaagagggctgcaaaagtgagggcttgtcattaccagacggttcaccagcctctcttggtttccttccttggaagagaatgtctgatctaaatgtggagaaactgtagtctcaggacctagggatgttctggccctcacccctgccctgggatgtccacagatgcctccaccccccagaacctgtccttgcacactcccctgcactggagtccagtctcttctgctggcagaaagcaaatgtgacctgtgtcactacgtgactgtggcacacgccttgttcttggccaaagaccaaattccttggcatgccttccagcaccctgcaaaatgagaccctcgtggccttccccagcctcttctagagccgtgatgcctccctgttgaagctctggtgacaccagcctttctcccaggccaggctccttcctgtcttcctgcattcacccagacagctccctctgcctgaaccttccatctcgccacccctccttccttgaccagcagatcccagctcacgtcacacttggttgggtcctcacatctttcacacttccaccagcctgcactactccctcaaagcacacgtcatgtttcttcatccggcagcctggatgttttttccctgtttaatgattgacgtacttagcagctatctctcagtgaactgtgagggtaaaggctatacttgtcttgttcaccttgggatgatgcctcatgatatgtcagggcgtgggacatctagtaggtgcttgacataatttcactgaattaatgacagagccagtgggaagatacagaaaaagaggggctgggctgggcgcggtggttcacgcctgtaatcccagcactttgggaggccaaggagggtggatcacctgaggtcaggagttagaggccagcctggcgaaaccccatctctactaaaaatacaaaatccaggcgtggtggcacacacctgtagtcccagctactcaggaggttgaggtaggagaattgcttgaacctgggaggtggaggttgcagtgagccaagattgcgccattgcactccagcctgggcaacacagcgagactccgtctcaaggaaaaaataaaaataaaaagcgggcacgggcccgtgacatccccacccttggaggctgtcttctcaggctctgccctgccctagctccacaccctctcccaggacccatcacgcctgtgcagtggcccccacagaaagactgagctcaaggtgggaaccacgtctgctaacttggagccccagtgccaagcacagtgcctgcatgtatttatccaataaatgtgaaattctgtccaaaaaaaaaa

SEQ ID NO: 90890 - DNA, 1085 bp, Homo sapiens; identical to SEQ ID NO: 58710

SEQ ID NO: 90891 - DNA, 560 bp, Homo sapiens
ttttttttttttgagaacataattttttattgatatagatagaggagggttaagcaccctcttttagtgcaaaaacacttaatgcaaaaaacaacagagaaaaatccattcagtccaattcactaagactagcctaaagccttaggagcagtgctctgttgcttctctaatcccctgaccatggttcagttatatagaggaggacttagaaaacaaatcgatcacatttttcagtctagtctgatacatagtgtattacaggtccagccttatattgtagcacaactaagataaaggaaccaataatgagagtcacataagaaaacacattttctatgttccatttcaatgggaagtcagatattctaagcaagcaagggattctcagtcaggaaaaccaggttctgtcacaactattaccagttagtctttataagaaatgttattttatgaccatgctgcttatatcaccagctatacaagaaaattagcttgccatccctacatccaaagttttccagaacaaatgactgttctaaacagaaagggttacatcccat

SEQ ID NO: 90892 - DNA, 1056 bp, Homo sapiens
ttttttttttttggagctgcatgggtatttcattgaaagttcacagacacaagggctctgagcggggtcacatcgtggaggaggcagggtcggggagcacagagtgagtcctcccaacctgggacaattttgcataagcccttcctgctaggtgtcaggtccaaggggcccccaaaagcctgggaaggggcacgtgagggcagggacccaaaccctggaacccagggtgcaacagcgaggggagaagcccccaggccccagacacaggcagggcggaggccaggaggcggagggggtggactgagggccaagctcactgcccccttgctgtactcagcttctgatggccttgctgcccagttcacagctcaagggggccccaggacaagaagccctgccctgccccaacctcatgggatcctgcgtttcagggaccatgagaataaacatgtctcagtgcttgtctccgccagcagccgtgcctggcgggccttagtagtcggtgagggggtaccgcaggaagatgaagacgaggatgatgcaggaggctgccagggcagaactggtgatgttgaacagccgggccgtctttgcatcctccacggctccattcaggtcattgagaagcttcttgtctcgccctttgagggagtaggccaaggcgatgaagcccaggcagcagaagttgaggtagacgaagttgaagatggaccacaggtaatagtcgttcacctcggtggtgtccgggtagacctcgatgacggtcgtggggttggtcatcgtcttcttctcggctaggtgcttgcaggcagggggcgcgccggcagcccgcacgctgtcggtcttgctgctcttggactccatggggaacagtgtgggcgccatcgggggagaggccgagggctcaggggcaggggccgccggagcctgcagggcagggggcttggacacgcaagcgaagcagcccttgggcgaacctgccgggggcctcggaatccagaaggccccgtccagggggactcgggcttcctgggcgccgtccgtggtgctggccgg

SEQ ID NO: 90893 - DNA, 1493 bp, Homo sapiens; identical to SEQ ID NO: 58657

SEQ ID NO: 90894 - DNA, 899 bp, Homo sapiens; identical to SEQ ID NO: 59954

SEQ ID NO: 90895 - DNA, 3908 bp, Homo sapiens
acgccagacagcccgatttacgggaacagccgattagaggattcgggagagcggtcggtgaacttctggatgtctttcgggaggggaaggctctatggtcgcgtgcagagcgcccgttccacgtcaggaaaggtttaagggggacagagccctgggaggccgggccgggctcgggggccaccccgggggcccgggccatggatgtgcgccgtctgaaggtgaacgaacttcgcgaggagctgcagcgccgcggcctggacactcgaggcctcaaggccgagcttgctgagcggctgcaggcggcgttggaggccgaggagcctgacgacgagcgggagctcgacgccgacgacgaaccggggcgacccgggcacatcaacgaggaggtcgagaccgaggggggctccgagctggaggggaccgcgcagccaccgccgcccgggctgcagccgcacgcggagcccggcggctactcggggccggacggacattatgccatggacaatattaccaggcagaaccaattctacgatacccaagtcatcaaacaagaaaacgagtcaggctacgagaggagaccactggaaatggagcagcagcaggcctatcgtccagaaatgaagacagagatgaagcaaggagcacccaccagcttcctcccgcctgaagcttctcaactcaagccagacaggcagcaattccagagtcgaaagaggccttatgaagaaaaccggggacgggggtactttgagcaccgagaggataggaggggccgctctcctcagcctcctgctgaagaggatgaagatgactttgatgatacccttgttgctattgacacctataactgcgacctccacttcaaggtggcccgagatcggagtagtggctatccgctcacaattgagggctttgcatacctgtggtcaggagcccgtgccagctatggggtcaggaggggccgtgtatgcttcgagatgaagatcaatgaggaaatctccgtgaagcaccttccgtctacagagcctgacccccacgtggtccgtatcggctggtccctggactcctgcagcacccagctaggcgaagagcctttctcctatggctatggaggcactgggaagaagtccaccaatagccggtttgaaaactacggagacaagtttgcagagaacgatgtgattggctgctttgcggattttgaatgtggaaatgacgtggaactgtcttttaccaagaatggaaagtggatgggcattgctttccgaatccagaaggaagccttggggggtcaggccctctatcctcatgtcctggtgaagaattgcgcagtggagttcaacttcggacagagagcagagccctactgttctgtcctcccggggtttaccttcatccagcaccttccccttagtgagcgtatccggggcaccgttggaccaaagagcaaggcagaatgtgagattctgatgatggtgggcctgcctgctgctggcaagaccacatgggccatcaaacatgcagcctccaacccttccaagaagtacaacatcctgggtaccaatgccatcatggataagatgcgggtgatgggcctacgccggcagcggaactatgctggccgctgggatgtcctgatccagcaggccacccagtgcctcaaccgcctcatccagattgctgcccgcaagaaacgcaactatatcctagatcagacaaatgtttatgggtcagcccagagacgaaaaatgagaccatttgaaggcttccagcgcaaagctattgtaatttgtcccactgacgaggacctaaaagaccgaacaataaagcgaaccgacgaggaagggaaggatgtcccagatcatgcggtcttagaaatgaaagccaacttcacgttgccagatgttggggacttcctggatgaggttctgttcattgagctgcagcgggaggaagcggacaagctagtgaggcagtacaacgaggaaggccgcaaggctgggccaccccctgaaaagcgctttgacaaccgaggtggtggtggcttccggggccgcgggggtggtggtggcttccagcgctatgaaaaccgaggaccccctggaggcaaccgtggcggcttccagaaccgagggggaggcagcggtggaggaggcaactaccgaggaggtttcaaccgcagcggaggtggtggctatagccagaaccgctggggtaacaacaaccgggataacaacaactccaacaacagaggcagctacaaccgggctccccagcaacagccgccaccacagcagcctccgccaccacagccaccaccccagcagccaccgccaccacccagctacagccctgctcggaaccccccaggggccagcacctacaataagaacagcaacatccctggctcaagcgccaataccagcacccccaccgtcagcagctacagccctccacagccgagttacagccagccaccctacaaccagggaggttacagccagggctacacagccccaccgcctccacctccaccaccacctgcctacaactatgggagctacggcggttacaacccggccccctataccccaccgccaccccccaccgcacagacctaccctcagcccagctataaccagtatcagcagtatgcccagcagtggaaccagtactatcagaaccagggccagtggccgccatactacgggaactacgactacgggagctactccgggaacacacagggtggcacaagtacacagtagccagtgtgacccagaggctcccggaggcccctgccggcttcctccaccagcgcctgcctcggcccctcctctgcccccgccagatcccgtggtgctggggatggggtcatcccagggctgcctccctccagcccactgcctcccctctgaggggcttccttcccctccatagggccaggcatttttttctggattcaaacaggcaacaatgaccttttattttctgtttgtccccacctccccagccttccacctcctgttcttcctaccttcttcctttttgactaaataatccccacctcccttgatcatacagtgaggctacagtgactgaggggagaatcccctcctgttcactctcccaaccctgctccagcccctcagcttcccagaccctcatgcagttggttgtaaattctcccaggagctgttttactgtctacttttcaggattaaaaaaaaaatcaaaacttaaaaaaaaaaaagtttaaaaagcaaaatggggagggggaggaagcagtgacttttttttggtaattatgcgcttttttttaatttttagaatttgtctttttactgtgggtgggctgttgatatttcatcaagataagcatttctttcctgagttcaggtgactgaggaagagccacaaaacaaaacacaacaaaaccaaaccacagaatcatctttaacccaactttttatacgatgccccagttccccataactttgcacacaagcttctgtgttcagttgaattgtaactgctttttgtatttggagagagtgactattgaacttgaaaccttttattccgggcgtcttggtagtttctggtgggattcagtgggtgagagggaagaaggggaggttggggggctccttcccttcagaacttgaagtttctcccactgcctcctctccagtggtctcccaggtgccagacccaaaagcttttcctacagtgataccctttatttttacttccccttgactcatatgttttaacatgattttaacaaactgcacttattaagaaatgtgtttgccctgttttgtttggtttcgttttgttttctttgaataaatgacatggcacctcctagcaggaaggaagcagggttgaaaaaaaaaaaaaag

SEQ ID NO: 90896 - DNA, 343 bp, Homo sapiens
ttttttttttttgggagggtttttccttttaaatggagcctggggccaaaattcccacaaaagctatttgcggctttaaaccccgggctaaaagggtttttcccccctaagtttcttgaaaagaagacttgcagggggctcaacccttttaattttaaaatttaaatttttgaagaaaaaaattttttttttgtcgcccggtgggtttagaattccgtgcctaaggaaattttttgggtgtggcccccaaaggaacggggggaacccaccgtcccgtgttaaaatttggggttaaggggaaatattgaacggatttttattggcataacggagggggggaagt

SEQ ID NO: 90897 - DNA, 4986 bp, Homo sapiens
ttttttttttgtaaacatagtttttattcttatcttaccttcaatgaaattttgtcctcatgccaccaaaacatttttgaaactcagtaactgaacaccaaactcagtagcctcatgattacttttctagacaattgctgaattatattgctttaaaaaaatagctcgagatatatttttattactttattccctttttaaagcagcaatatcccctcacatttttttcataaaaatctaaaatatctctagtagtcccaagtgtctcatatttatatttgttctaagcgtttgtttcattaagatttttcagaaataagtgcacttctaaagagaaagtaaatttaaataaacacaacaggaaaataatcatgggttgtagcaaaacagttattttgaatgttctgaattttaacaattcaaaggagaatgtgtttggtagccagggacctctatggactaaattctcaattcatttatttgtagatcagcaaaagacagatagctgctgctcctgtcagtaaagactgactgattgattgtctaaggttttatacaataaaacaccaaaaataaatgtacttaaaatattttaaatttagagatttacataaaaatatgcaggtgtttaaaaaacagaaaaagtatagaaataaatgaaaccctatcttaggccttaccaaccaaagaacatttttaatactccacacttattttccattcactaactagcttattaaatcagctacatattgtattcagaagtggctggtttataagcaattccttattttcagacagcgcaatgcttcaatacatttaaagatttaaagctatgttagtaataaatgcataaaagaaaaataacataacttgctttaatacaaaggtttttaataaaaaagtcaaagtctacattaaatcaggaaattgataaatctgaattatacaagctttctatatacttagaaaaaccaaaaacacacggtttataataaaactcttttaattcaaaatagagtctaatttaaagaaaatgtcattatgcccagttgactagatagggttttgtcatttaaattaaattattcacctgaaatatgggaaatatataatagagaaaattcaatctcaagggtactttgcaaattatctagttaatttgcatcatgaatcaaattcttagcttctaaagggcagacacagtctttaattgcttttagataggcacttaagaaatgcttttgatgaggagaaaaccccaaagattgtgaatcactctattaactccagggaagaatgagactctcaacaaagtagctttccagaactacccttccagtgccaagaaagtaaaactatttgcaagctctttctggtaataagaatgagggaactcaaaacaaaaaatgctctattatgcaattaaaaagtaaacttaggtaaatcagtttctttttatcaatctctgtcaatttgaattaacggtatttttcaataccatttcaagaatagttaccatactagaactagacaatgttgcaattatctcatatcttacctattcattatcacactagcaaaacagtcctttttaaaaaaaggggagcgatgtggggtgagaaaatctcataaacctcagcaaaagttaatattatgttaattaaaggcagttataattagaaaaattagagttagtcacattgagaaatccccagagtttttaatagctctctttcctaaatactcaaaaaatccagactagaaaaatggaagtgaactgttagataaacacgtaagtactcaacaaatatttaaaaagaaacaaaccaaaaatgggggagttgggggaaacaggatggccttatgaaacactgtggagctacccagcagcaacatttataaaagcttgtgtagatttgcataatgctcctatgcaattcttccccattaggaagacattcctacaaataattcatcactttagattttgatcatagatcatttataatggttatcatggttgtatctttaaaaaatttcatccattaacagttatgacaaacattaggccattctttgctagtatattattcctcaactattactaatgaaaccaaaacctcagagttgtttgaattagaattaaaatattaagctagaaaagattatttaattcttagagagatacccaaagaatttgatgctgatattatctcccctatcctctcatcacaaccccctggcctgcatttacttccttaattccatctatattcaccacagtgatgtagctaaacaagaacaatattgccctttaataagctgacctctatcaaagatctgtcaggtctgaacacagcatgcccacaggaaaggaaaattctactcagttgtgaacatccactctgttcaagatctttggtacatttggagcataagaaaataatggcacaataatacaagtactatcaaaggaaaaattttcatcaaaagaaataaaagttaaccaggccatgatatgtaacaactttctagaaaaccaaagtaaatagctttttgttctctataagtccatttacatgatagaagtttgacatttaaaaaaatagtttaataaaaatacactaattctacaagcagccttcatggtcatgtcttaaattcaactcaccataatcaaattaaaataatgccatgtcctcttgttaaaaaaagaagttctcttgtcacaagaaaatcaactttacatgttatataatacagtacatctccctatgagtatacagactacgtatatgaaggtcatcagtatttctgaatgcaacgtaaatatattagtggagtgcttgagtgaaggtgttaaactttgtcttccttattataaacttgtcactccttactgtgaagtttgtgtaataacttgatgataaattctattttgtaaagaaccagtgaatttctttttaaatctcttaaaaccattacagaaattgtcttcatatatattctacagatgtccaaaccaatagggcaatgttctaacaccaactatggaagatggcttttactgattatctagacccataagatttgcagtaaaacatcaatactgcagtgttacctacaggttagcctatgttgctttaaatgatatgtgtttctcctgaattgattagaggtgttacagttcaaagccacagcacacacaggcagaatggaccttaatacgcatgtaggcagtgcagttagaaagggatgtctgttccttttattccagtaccttcatataataaagttaacaaaaataataaaatattaaaaaaaagagccagctggcactgccaaccaattcctatagtagtcttagaaatcctaatcctgtagaatttcctcttgtagtcaataagcaccaccatcttcaggagtatttcagtgtattgttatctacgccaagcaagcctggtgatgcagctacctgagttctcttggttatgggtgaatgttatcttcattcataacttcccagctttcatgtaggtggggatagagccacgttgagtcaacccttcaaaccttttataggtataattgagaaaaacccagtctttggatttgtagtccggttctgtggtatttggcactggttgtaaaatatcagattcagggaagtcatcaaaatttgaagtatcatcaatgcttttgatttctatagggattgctgctggcctttcccttatgtgctcccagtcgacaccttcaaaaaagggatgaccttttatttcttctactccactatttccaattctgttttcagaatcaatacaaaatctgagaattaagtccttggctttctcagatataggtacctctggaggaaataccagagtttctttccagttcatcacttttctgtatgtttcttgaggtgtttcagagcagaaaggtggatatcctattagcatttcatacataatcactcccaaagaccaccagtcacacaatttgttgtaaccagtctgcatgaatacttctggagcaatgtaatctggtgtcccaactgtggaatatgccagttgtctcctgttcttcttccaagtttctgctttcctctttgagttcatgttctgaaatgagaagtcacttggtgggttgtgtgtgagatttctataaaattcagtcctgtgagctttctttaatcccgtacataaaccaaaatcagataattttacatgacccttggcatccaataaaaggttgtctggcttaatatcccgatggatgaaacccaactggtggatcgcatctattgccagaacagtctctgaaatgtagaactgtgtttcctcttctgtcaaggtgtctttcttcattagcaatgtcatcatgtcacctccagggagaaattccatgattagataaagattcctcttatcctgaaaactgtaaaacatcttcaccacccaggcaccatctgcttctaccaaaatatctctttctgctcggatatgggccacctgctctttttcaagcatatcagactttctcaatatcttcattgcatagatatggcctgtatctttcttctggaccaaccgcacctctccaaaagctcctcttcctataactttcagagactcaaagtcatccaagccaagtctggtccttttgagccgtaagaactctgtttctttgcgagcgtgttgtgatcgacgtaactttttctcttcatctgctaatccttcttcttccatggccacttctaatttcttctgcctggtttctctctcttcatgctgtaaaattaggttgctataaaaattctccaatgtgagcttggctacagtcactctttcccgggtatggttgctcataggaaaggttgttgtagtccctgccgtcattgccatagtaacggaaactgcctccggtcgcgcccgcggccggctcagcctccgcacggcccgcagccgaccgggcgcccgt

SEQ ID NO: 90898 - DNA, 1377 bp, Homo sapiens
caaaaatggcggaggcttcggcggccggggcggactcgggcgccgctgtagccgcccaccggtttttctgccacttttgcaagggcgaggtcagccccaaactaccggaatatatatgtcccagatgtgaatcaggctttattgaagaagtgacagatgattccagttttttaggtggtggcggcagtcggatagacaataccacaacaacacattttgcagagctttggggccatttggatcacacgatgttttttcaagattttagaccctttctaagtagcagtccactggaccaagataatagagccaatgaaaggggtcaccagactcacactgacttctggggagcaagacctccacggttgccattgggtcggagatacagatctcgaggaagttctcgtcctgacagatctccagctattgaaggaatactacaacacatctttgcaggattctttgcaaattctgccattcctggatctccacaccctttttcctggagcgggatgctgcactccaaccctggggactatgcctggggtcagacagggcttgatgccattgtaacccagcttttaggacaactggaaaacacaggccctcccccagctgacaaggaaaagatcacatctcttccaacagtgacagtaactcaggaacaagttgatatgggtttagagtgtccagtatgcaaagaagattacacagttgaagaggaagtccggcagttaccttgcaatcacttctttcacagcagttgtattgtgccgtggctagaactgcatgacacatgtcctgtatgtaggaagagcttaaatggtgaggactctactcggcaaagccagagcactgaggcctctgcaagcaacagatttagcaatgacagtcagctacatgaccgatggactttctgaagctaaagaccacacctgaatcagggctgtggtaatcatcttaccatagctgtaaattgtatcaaaacaaaaaattagtagatggatttaggaatatgtaagaaactcaacacataatataaatgcaatgaatgtttttcttctttaaatttaaagttagtatctacagatggaattgtatctacaaccaaatgcctcttatccctgaattcagagtgataattttataagtgtgaaacttaattatgtagggctccccccgtctgaatagaattaattccttaaagtctagttagggtcctgctgtctgtcatgttgccttgtaacggatgtttccacctccttctccaacctctaccccaccattagtgtattttactataaaaacagtggaaccacagccctaaagtcctgctgatataaagtccttttgtcttaattgtatttaaaaaaaaaa

SEQ ID NO: 90899 - DNA, 928 bp, Homo sapiens
atcatgggaccaaacttttccgacttccttccatccgagtagagtgaccctgggccggtcactcagcgggggacacaggaagggctgaggttggcgggaccccgcgcaacacataccaggtgccccacccccacccccaccacctcctggctggcacatcccaccaggaacccgccaacacaacatacctccaggacttttggcaccccccaccaccaattctccagggccgttgggctctgccagcttcagtgtccctggtcccagctgcagcctccagaccccacctcgccccttcgtcccagagccctgccctccgggatggatataggtacaacagagacgctctggcctgcctcagcccttctctgctcccctgcccgagtcatagccttactcatgtgaccaatagcccttagctttccgtcggagggggggggcggacagggttggggggaacccccctgcccttcaccaccccctcctaaggccaggcagccattgtccctgccttcgaattaccagcctcgaatttaaggtcttgtaaccaggattgccaagcgtagcggaagaccctacccggaccggccaagcacccctttaactggagacgaacttgataatgaccttcatacctctacaaagatttttttttttttcccggtctttctgagcaggtacaaagaaaaaaagaagaagaaaaagatggggggaaaaaatcaaaccacaatggatttttgtttcctagttgggagtggggtggggtggggtgtctttgtgagggtgcctctgtacagctgcccaatccgcgacacccacgtcaaagcacagcatcaagttcgtttggacatccggcaaggcctcttaccaaatgaggcgccagataacttaataagctcaaaagaaaaaaacatttaaaaagaaagaa

SEQ ID NO: 90900 - DNA, 1376 bp, Homo sapiens
tgcgcatgcgcgtgagggctgccgcggccaggcccagacatgtccgtccttgtaagttaaaagcttccatgggagccttccttcctaatcaagatgcaaataatacggcactccgaacagacactaaaaacagctctcatctcaaagaacccagtgcttgtatcacagtatgagaaattagatgctggggaacaacgtttaatgaatgaagccttccagccagccagtgatctctttggacccattaccttgcattctccatcagattggatcacctcccaccctgaggctccccaagactttgaacagttcttcagtgatccttacagaaagacaccctctccaaacaaacgcagcatttatatacagtccattggctctctaggaaacaccagaattatcagtgaagaatatattaaatggctcacgggctactgtaaagcatatttctatggcttgagagtaaaactcctagaaccagttcctgtttctgtaacaagatgttcctttagagtcaatgagaacacacacaacctacaaattcatgcaggggacatcctgaagttcttgaaaaagaagaaacctgaagatgccttctgtgttgtgggaataacaatgattgatctttacccaagagactcgtggaattttgtctttggacaggcctctttgacagatggtgtggggatattcagctttgccaggtatggcagtgatttttatagcatgcactataaaggcaaagtgaagaagctcaagaaaacatcttcaagtgactattcaattttcgacaactattatattccagaaataactagtgttttactacttcgatcctgtaagactttaacccatgagatcggacacatatttggactgcgacactgccagtggcttgcatgcctcatgcaaggctccaaccacttggaagaagctgaccggcgccctctaaacctttgccctatctgtttgcacaagttgcagtgtgctgttggcttcagcattgtagaaagatacaaagcactggtgaggtggattgatgatgaatcttctgacacacctggagcaactccagaacacagtcacgaggataatgggaatttaccgaaacccgtggaagcctttaaggaatggaaagagtggataataaaatgcctggctgttctccaaaaatgaggaccttcaaataggagtgattgaaataaataactacttgcatgttatgctttcatttgggtggaatacttcattggaataaactactgatcttgtgctgtgtcaaagtaacagactagaaccttctttcaagtacctgaattgaaatgaaactcattttgaataataaaaactctagaaactctttaaaaaaaaaaaaa

SEQ ID NO: 90901 - DNA, 433 bp, Homo sapiens
cccacgcgtccggacattctgtgccccactgactgatgggactgagtcttcttcatgctcccctccctggctggtttagggacaggttgttgctgccaaactgtgttgagaaggaatctgaagctccacctgggcttagtaggaaaggagaaccatgatgagtttgagatgtctagagcaggagaggccccttatagaacacggctttggggacagtcaggactgatgcctggtttcagcccccacttttcctctctgggttggggtggagtgggaaactgtcagagagagagtctacccctgcgaataggggcattccagagcccccaagacctctaagaatggtaggccgcattaggatttcccaacactattgacatttgagaccagatcattcttcgtggcggggaaccatcctgtgctttggaggggg

SEQ ID NO: 90902 - DNA, 2900 bp, Homo sapiens; identical to SEQ ID NO: 60306

SEQ ID NO: 90903 - DNA, 1825 bp, Homo sapiens
ctccgccggcgcccgccccgccagcctcacctgcgcggcacgtgacccgcaccgcccgtgggcaccttgaaggcggatcccgcgcgcccccgctcctgcaggctgtttttcttcaaataaagaacatggtgaaactgattcacacattagctgatcatggtgacgatgtcaactgctgtgccttctccttttccctcttggctacttgctccttggacaaaacaattcgcctgtactcgttacgtgactttactgaactgccacattctccattgaagtttcatacctatgctgtccactgctgctgtttctccccttcaggacatattttggcatcgtgttcaacagatggtaccactgtcctatggaatactgaaaatggacagatgctggcagtgatggaacagcctagtggcagccctgtgagggtttgccagttttccccagactccacgtgtttggcatcaggggcagctgatggaactgtggttttgtggaatgcacagtcatacaaattatatagatgtggtagtgttaaagatggctccttggcggcatgtgcattttctcctaatggaagcttctttgtcactggctcctcatgtggtgatttaacagtgtgggatgataaaatgaggtgtctgcatagtgaaaaagcacatgatcttggaattacctgctgcgatttttcttcacagccagtttctgatggagaacaaggtcttcagttttttcgactggcatcatgtggtcaggattgccaagtcaaaatttggattgtttcttttacccatatcttaggttttgaattaaaatataaaagtacactgagtgggcactgtgctcctgttctggcttgtgctttttcccatgatgggcagatgctagtctcagggtcagtggataagtctgtcatagtatatgatactaatactgagaatatacttcacacattgactcagcacaccaggtatgtcacaacttgtgcttttgcacctaatacccttttacttgctactggttcaatggacaaaacagtgaacatctggcaatttgacctggaaacactttgccaagcaaggagcacagaacatcagctgaagcaatttaccgaagattggtcagaggaggatgtctcaacatggctttgtgcacaagatttaaaagatcttgttggtattttcaagatgaataacattgatggaaaagaactgttgaatcttacaaaagaaagtctggctgatgatttgaaaattgaatctctaggactgcgtagtaaagtgctgaggaaaattgaagagctcaggaccaaggttaaatccctttcttcaggaattcctgatgaatttatatgtccaataactagagaacttatgaaagatccggtcatcgcatcagatggctattcatatgaaaaggaagcaatggaaaaattgggatccagcaaaaagaaaccgtacaagtcccccatgacaaatccttgttccttcccttccagcggtaccttacacccaaataggactctgaaaatgggccatcaatagatggctggagacacccccaaaagtaaaattgttgatattgtattatttatattttccagtgatcctcatttgaatgatttatagggtaaatactaatcagacattattaaaagcaaaacagggaaaaagggtaaacttcttaaatttagttacctataaaaattgtcaattttcattctttaaaaaacacatggacttactataaaagccttttttgtactagtgaaaagaatcttcagctatatagaaataaagttatactttaaattgcaaaaaaaaaa

SEQ ID NO: 90904 - DNA, 740 bp, Homo sapiens
  misc_feature (1)...(740): n = a,t,c or g
tccccnacacttccttccccacataacatacagtttatgggcccagccccnaggggtgggccccactgccagcccttgtagaaaatgagagtcaaaaacatggcccaataatccatgttaattacaacgcagttggggtacccacttgagcttcactgcgataaaattccctcacagaaggcatccccactcccctctcaagacccttcagagcacgagaaaaagctttgctcatgttgtatgcttctctccatcctgagacctgttcctgagttatacccataataagtgagttaacacagaaaagtacataggtggggaaatcacagagaccctgcagaaaagcccaaactatttgacagaagcttgaaacaaacactgctctgggaaatcatttgtattagctgatgactggattctgttttctaacatggacatgcaacatattcaacactacgctcaccgcagtttgcttggaaaagccttctgtcatacaacaaaatacattctgtctcatgaatgattcctgcatattcaccacaacgcctagactcagaagcatgggaagtgtgcactggaactttctcccacttgcatggatttggacatatgcaaagcaccagaaactgcttcctttctggaactcagttctgttggtgtgcttactgctgagatgatctgctatcttaaactgagaacacacaatagcactgatccacagaaaaaaggagaagtcaccc

SEQ ID NO: 90905 - DNA, 1163 bp, Homo sapiens; identical to SEQ ID NO: 60137

SEQ ID NO: 90906 - DNA, 3148 bp, Homo sapiens; identical to SEQ ID NO: 58904

SEQ ID NO: 90907 - DNA, 2240 bp, Homo sapiens
agcggccgcccttttttttttttttcagtgtggaaaaaaatctttatttcaaagtaaaatgctcatatatgtctcatacagcagataaaatcagtgttactgctctcagatgttaagggttagcaacctttctggcatatgctaattcatcatgaactccccaatagctgaactcgaatcggcttttaagtacagctataaggtctcatggtataattccttttgttgatgccagtgacaggattttaaaagctacattccattaaaaattaaaaatacagcagcttttccaggggaactagatcccaaaattgtacccagaactcttgtctaagatattaagttaaatatcttgcatgtatatatcattatagtaaatcagtattcttgacaaccacagtgtaagaaattaaactttggctaattgttttccccatcatgaaatcagtcttttgctgtcttcataaataaattatgaccaaacattacaaatactttatacatgtttactgatttacagagaatatttaataatcagaactcaccagtttcaatagtattgtacattaaattataagcaatataaccactgctacaaaagttatctaagttaatccaagataaaaactgtgtctagagtttaaatacattgaaatagaaaaaaaaatagaaattagaaaatagtcttcaagttctgaaaatctagaagaattctccaacatctgctctcttatctcgacatttgcttctagctttggttcgagctttgaaggctgcagagttatataaatgcctttcgaaacgagaaatcttcatcgttttaagcgttgcagcatcaagcatcactgggggtccaagttcaaatacatttcgaaggaattcatttgactgcaagtggtactgcatccctgatccaagaacctccttaaaggtgtcataggtgtgtttttttacccagcaatcaatatacatgcgttcaggaccaaatttaatggtttctgttggaaaatcccgttcctccactgccctcaggacatctctgaaaactgaccgctgctttctcttgtccactttggcccggtgtttatttccatctgttgccaaggccctaagcatctgcgtcaaggactccatgtcttcataaaaaaagtcactctctattcctctggccaattcaaagagaagtgccaaagattcaccagcagctattctcatgtttacatcatcacaagagaggaggcttggaagcttatggaaatgcatctcaagctttttcttcacttcattgattgggcatatggtcagcagtagtgtccatgcaagaagagagctgatatgaagcactgtattaggagtgctgcaaataacagtagtgtctttctctttgagataggatttagtgaagatattttccaaacattccagagttgagtatagttcagtaatgtcatctgtggcaataaaacagcaaacaccaaagcaagttgcacaagtttgcctagcctgcatactagctgacccatcacaaatgattttctttaggattggtccaagagttttcaaaatctcttcactttcaattccagggcccagctgaatacaaagaacagatgctaacgctgcagctgcacgttgctcatcactcttaccttttttcaggcagcgttcaatgctatcagttaaagtcattctcctttccagaataaattcatacagcatttttgaagccagtgcatttttaataccttcaagagctgcttgccttgtcttcgcactcttatccagggttaggtcaattaatccctttctcttgtactctaggtcttcttgagttccttcctcatcaaggacttctggtccatcttcagcaaaactggaaggatcgctataaccactgcaatggctcatagtttcaattgatgcatcttcatcactaaaaggctgaacatttcgatgctggccaccttgtgatcggcttctgagaattaaatgggatgtccacgtaaagttcttcgcataatgttggcacctagtgatcaccaataaatgttaattttatgtaacagtgctaccagataaagcagctggcatcagcccaaagcctgaccagttcaggctgttggctcaagtgaaaataagtaataaaggaacatcaaatactgggaggaattacacacatccctttggaacaacctttaactatgtagaccttgaatgaaccaggagccagaaggagtgca

SEQ ID NO: 90908 - DNA, 3620 bp, Homo sapiens
gcaaggattgtcccttctgcccaggggctcaggggccatggtgacaggtctgtgctgtgcccgcccagggcgcagccactgcctccccctgggctccctggtcctagccaggagagctccctatccgcctgtggtcagagctgaagccatatacgagtgggtgtttgtccccctactttggccccaggagtaaaaaaacttctccttttctcacttcctttcctgcctcgggaggtggcagggcagttccctggctgaggccttttgcgccccacctccaggaccaagggccattctagacagggtgtcttctaccaggacccgtccctagccttcctggcctggagggcctggtcttgcactggcagctgtaatacaaagggaactcgccccacttctcccagcctggtgctgtcctctcggcccaccatcggccaggtccagcgcttcctctggggctgacaacaggcccctgactcaccccggtcacctcccagggtccatggccagggcctctgtgtttggggggccacttgcccttcatcctgccaggcgctttgcccgccctgcctcagcctgggccctgtgcccttgagccctccacccctggcccaagacccccccaaactgtctgactctgtgtttcctgccctgaggagagaggggtcagattgcagcgggccgagtgccctcttcgtcccctctcctcccacccacgccacaggccagcctactcttccctccatccatggccacacccccagccattttgtaccattatataaatatatatataaatataaatatataaatacaatatgtgaagacatcttcttggtttttattttgaaacaatttttaggcttgttccgggggtctctgtgctgcctgtactgtattgacctgttttataggtgcctttttattaaaaagaaaattcaaaatccagcctcttgcctctttgcatctgcttcagactcccccatcgattacccagcttgcgaggagatactcagagaaaaaaagggacgtcttagggcttcctcgttgtcctgccgtgaagacactctcacgtgagccacagctgttatttccccagtggggcctcccaaggagcttggctgcttggcttgagtgggacaagggcaggggtccctgactccccacctgatcaaaggctggggaggtggtagggagcacccagaactgccggacgggcctcccacaccccaggtgagcaaacaagcacggagcagcttcctgcggttccatctgagtgacatcctcacgggggcagggcacggcttcctgggcctgggagttcctgcctcagtgtgtttcttacacttccctgcctaaggtgatgccaacggaggggatggttgagatgactcccacgggccccttccagtccacctttctccgttccgactctgagtttcctcgggtctatagcttatgggaagggagtgaggaggggacaagccagcctccttccccatcaatgcccacaacctcccatcccctggacccagccaccctaggagttctccccccaccccatctcgcctgggcggaggggacagccgggtttgattgatccatctccctccttggggttcgggaagaaagctcttttcttccctctgtcgggtttctttcttgcttctcggccttcacgcttcctcaggtcactggctggcctccaagggcacctagagtcagccctgcctgcagaccacccaggatccggtgacatggggtggacccagcgctgtttcggtcagagccaggggcagctacctgaactcaaccagtctgagcttcctgcttggtcaagatgactgcaggcttgggggcctggcagaatgtctgtgtttttagggactgagttgtccgaagccacactctgctgccagctggcctttcctcagccttaacctccactcatcccctggtgctcagcttctggctttgtttgacaggtgggcaggaggagagaggggaagctgtggaggtcagcagcccctaagctgatggagtgtgttctgggaggggcaggcgctctccgttggcaagggcagaagtagaagttgtttcttgagcattggatgattaggatgggaggtgcgtgaggttctctcagcccaggggggtgcagatgggtaaggacagccttcactgtgccttcgagctgctttccgctccctgggctccagcctagccccagggccggcagaagagctggcagggatgttctagaaatggggttggttcctctagctaccccaaatgaggatactcctaggacactcttagccacggtgagcccttaggatcccagctcctgttggaaggagcatccagcatcactgcctgccccaaggaaaagcagcaataaaaggggacactgggacctagaacgtggtgagagaggtggcattctctgactcagagagactgctcctgcgccagctagggaagagctggcacagggaggcagggccggtacagcccagcttggtcaggagccgcgacaggtcactgcggaacttcacgccggcgaaagtgtagagcatggggttgaggcagcagtgggccaggcccaggaactcacacatggtgatggccacggggagagagccattcagcttgcaggtattgtccacggccttcagcctcgccagggtgtccaggaagatgacgatgtggtagggtgaccagcagaggaagaagatgcttgtcaccaggatggccaccctgactgccttctgccgctgagggcgccgctgggcctggcgcaacctgtgcactacccccacgtagcaccagcccatcaccagcatgggcagcaggaatcccgccacatggtagaggaatcgggaggtgaaccaggcatgcgtttctgcttggttctcttgggagaaggtgcaacgtggcagggagttgttgtgatggccttggctgactttggcgaagagaatctctggcaaggcaaggaggaagcccaccagccagatggtcccacaggtgatgtggatggagaggaggcggcggtggcggtaggcatggacggcgtggacaatggccaggtagcggtccacggcgatgcaggccaggagcaggctgctgcagtagaagttgactttgtgcagggcaatcacagttttgcagaggaaggtccccaggacccagcccacagagccctcggccacggcaaagggcaagatgaagaccagcaggaggtcggccacggccaggtggaacaggaaggtctccgtggaactgcgtgtctgccggtgccgctccaggatcaccagcaccaggacgttgccgatcacgcccaggaggaagatgaggctgtaggccacgggcacgaacacggccttgaaggaggccatgaggggaccctctgtggcagggcagagatgattttccaccagggaggtgtcgttatagttgtccaatctgtccagttcccagaacaggtcctccaggttctcgaggtccatttccagcgttagcgggtagttcatggctgtgccggctgtgagtcaccagactggtcactgtcttatgttgagaggctccccgccaggtgcctctagagaggtggcagc

SEQ ID NO: 90909 - DNA, 351 bp, Homo sapiens
gaaactattaaagttgagtcataattgtgacaacataatctgcttcagagggactaaaagtgcactatgtattgatcataaaggctcaagaaagaccattgagttcaaagcagtgatgtttggatcaggcagtagatgaggttaagggttcctgtggtggtttatttggtatgtgaagagcctaactgttggctggcccatggtgttctcctgtggttcattatggaggcttctgggtcacagaacccacatatgagagggcatcgtggttcattatggaggcttctgggtcacagaacccacatatgagagggcatcgggaggatctggatgatggggtgggagatgctt

SEQ ID NO: 90910 - DNA, 1900 bp, Homo sapiens; identical to SEQ ID NO: 58682

SEQ ID NO: 90911 - DNA, 2543 bp, Homo sapiens; identical to SEQ ID NO: 59692

SEQ ID NO: 90912 - DNA, 1869 bp, Homo sapiens
cccacgcgtccgctctggcgcctggttccgcgcgccggagcgcgctagccgcattgcgagccgaacccgggagctggcgccatggtgctgttgcacgtgctgtttgagcacgcggtcggctacgcgctgctggcgctgaaggaagtggaggagatcagtctgctgcagccgcaggtggaggagtccgtgctcaacctgggcaaattccacagcatcgttcgtctggtggccttttgtccctttgcctcatcccaggttgccttggaaaatgccaacgccgtgtctgaaggggttgttcatgaggacctccgcctgctcttggagacccacctgccgtccaaaaagaagaaagtactcttgggagttggggatcccaagattggtgccgcaatacaggaggagttagggtacaactgccagactggaggagtcatagctgagatcctgcgaggagttcgtctgcacttccacaatctggtgaagggtctgaccgatctgtcagcttgtaaagcacagctggggctgggacacagctattcccgtgccaaagttaagtttaatgtgaaccgggtggacaatatgatcatccagtccattagcctcctggaccagctggataaggacatcaataccttctctatgcgtgtcagggagtggtacgggtatcactttccggagctggtgaagatcatcaacgacaatgccacatactgccgtcttgcccagtttattggaaaccgaagggaactgaatgaggacaagctggagaagctggaggagctgacaatggatggggccaaggctaaggctattctggatgcctcacggtcctccatgggcatggacatatctgccattgacttgataaacatcgagagcttctccagtcgtgtggtgtctttatctgaataccgccagagcctacacacttacctgcgctccaagatgagccaagtagcccccagcctgtcagccctaattggggaagcggtaggtgcacgtctcatcgcacatgctggcagcctcaccaacctggccaagtatccagcatccacagtgcagatccttggggctgaaaaggccctgttcagagccctgaagacaaggggtaacaccccaaaatatggactcattttccactccaccttcattggccgagcagctgccaagaacaaaggccgcatctcccgatacctggcaaacaaatgcagtattgcctcacgaatcgattgcttctctgaggtgcccacgagtgtattcggggagaagcttcgagaacaagttgaagagcgactgtccttctatgagactggagagataccacgaaagaatctggatgtcatgaaggaagcaatggttcaggcagaggcagaggaagcggctgctgagattactaggaagctggagaaacaggagaagaaacgcttaaagaaggaaaagaaacggctggctgcacttgccctcgcgtcttcagaaaacagcagtagtactccagaggagtgtgaggagacgagtgaaaaacccaaaaagaagaaaaagcaaaagccccaggaggttcctcaggagaatggaatggaagacccatctatctctttctccaaacccaagaaaaagaaatctttttccaaggaggagttgatgagtagcgatcttgaagagaccgctggcagcaccagtattcccaagaggaagaagtctacacccaaggaggaaacagttaatgaccctgaggaggcaggccacagaagtcggtccaagaaaaagaggaaattctccaaagaggagccggtcagcagtgggcctgaagaggcggttggcaagagcagctccaagaagaagaaaaagttccataaagcatcccaggaagat

SEQ ID NO: 90913 - DNA, 2310 bp, Homo sapiens; identical to SEQ ID NO: 59220

SEQ ID NO: 90914 - DNA, 5407 bp, Homo sapiens
  misc_feature (1)...(5407): n = a,t,c or g
agtttgacaccttaggaaccgctcgataaacctcgggacgacccacgcgtccggtcccgggaggcggcgccagcgaagagctcggccttttgccccaacgctccccccgccctgttcgagctgtgcgggcgggcggggagcgcccatatgggggttctggagagcggggtgtgggccctcccaggcccaatacttcaaagcatcctacctctgctcaatatatattacttggagaggattgaggaaactgccctcaagaaaggcctctcaactcaggccatctggcgccgactctgggatgaactgatgaagacaaggccttccagtttggaaagtgtgacatgttggcgagccaagtttatggaggccttttttttcccatgttctacgtgggaccattgatgtgtcttctgacaggcgtctttgtgatcagcggttctcacctcttctgcacagctcccgccatgtccgacagctcaccatctgtaacatgctgcagggtgcaaccgagctggtggctgagcccaaccgcagggttctggagaccctggccagctccctgcacactctcaagttccgccacctgctgttctctgatgtggctgctcagcagtcacttcggcagctgttgcatcagctcatttcaccatggggctgtcagtcaagtgtcgctatactcctggcctgtgcctgagtcagcccttttcatccttattctcaccatgagtgctggcttctggcaaccagggcctggtggcccaccctgccgcctctgtggagaggcctcccgaggccgggccccatcccgagatgaaggggccctcttattgggctcacgtcggccccgccgggatgctgctgagcgatgtgctgcagccctgatggccagccggcgtaagagtgaagccaagcagatgcccagagctgcacctgccactcgggtaacacgccggagcacacaggagagcctgacagcaggcggaacagaccttaagagggagctgcaccccccagccacctcccatgaggctcctggcaccaagcggtcaccttctgctccagcagccacctcctctgcctcttcttctacatcctcatacaaacgggcaccagctagctcagccccacagcctaagcccctaaagcgtttcaagcgagctgcagggaagaagggtgctcgcacccgtcaggggcctggtgcagagtctgaagacctgtatgacttcgtttttattgtggctggcgagaaggaggatggcgaagagatggagattggggaagtggcttgtggagctttggatggatcacatcccagctgcctggggcttccagcactggaagcttcacaaagattccgcagcatctccaccttggagctattcacagttccactctccacagaggcagccctgacactatgccacctgctgagctcctgggtgtcactggagagcctcacactctcctacaatggcctgggctctaacatcttccgcctgctagacagcctgcgggccctgtcaggccaggctggatgtcgcctccgtgccctgcatctcagtgacctgttctcaccactgcccatcctggagctgacacgtgctatcgtgcgagcactgcccctgctacgggtcctctctattcgtgttgaccacccaagccagcgggacaaccctggtgtgccagggaatgcagggccccctagccacataataggcgatgaggagataccagaaaactgcctggagcagttggagatgggatttccacggggagcccagccagccccactgctgtgctccgttctgaaggcctcgggttctctgcagcagctgtccctggatagtgccacctttgcctctccccaggattttgggcttgttttgcaaacactcaaagagtacaacctagccctgaaaagactgagcttccatgacatgaatctcgctgactgtcagagcgaggtgctctttttgctacagaatctgactctgcaagagattaccttctccttctgccgtctgtttgagaagcgcccagcccaatttctgcctgagatggttgctgctatgaagggcaactccacactgaagggcctccggctgccagggaaccgcctggggaatgctggcctgctggccttggcagatgttttctcagaggattcatcctcctctctctgtcagctggacatcagttccaactgcatcaagccagatgggcttctggagttcgccaagcggctggagcgctggggccgtggagcctttggtcacctgcgcctcttccaaaactggctggaccaggatgcagtcacagccagggaagccatccggcgggctcccgggctaactggcaatgttggttaagcgactcatgggacttcatcccccaggcccttcgcagaattatgttagccacccatgtgaatggggccccgtaccctcacagttctccatgcctcggtacccatcagcttgcaagggggttgaaagcatggggntgccccagaaccccaaaccacccagttcctatctttcctctttctgtcacccttttttctcttttttcccttccttccccttgcaactgaaggtccctggaggccttgaatgaaggccccagcaaaacaggcattctccacagctgggtttaataagtctttgggcccccttactcaagtatccctgggaacccctgggcccagggaggtttacagtggtcatcataattggttgaaagagatcccctccccctggccctggggttcctgccttccctcctcaagcagggcacccagggctttaggagaagtataggggggcttctttccctgctggggctttaccacatggctcttcagggcctcaaaacccttttcatacctttattcttttttttaaccaaaaaagtttttcttataaaataaattttgggcaaacatcatgcacccctttttgatgattttttcccaaaaaacaaaattcaacagggccctgtggagcaaggagccccttttccctatctccttcctctaagagctacacccagaccagctggttatcagcggaggccccgctgctcctcatgagaacgctggtggaagacgaaggtgatggcagtggaggcagcatcccaggcagcctggagtacctcatcccggagcccccacttatcagtgcaggggttccaccctgccaggtctgaagtgcagtcagaaccatcagggggtggccggatctgacggctgttgacacaacgtcggcagtgcaacctgtcatgtgtgtcactgaggctagcttcatccaggataaacagctccttcaactcgcccagagagaagtggcgctctacatcctgctcctcatccaccacacagctgctcagtgccttcttgtggctctgacgctggaagatcttctcctcaatggtccctgcagacagcaggcggtagatatagcaagtcttcctttgaccatctcgccagacccgggccatggcttgttcatcattggctgggttccagtcagggtcaaacatgaccagccggttagccccaatgagattgaggccacagcccccagctttgctgctcagcatgaagacaaagtcagggctcgatggactattgaagcgttctacaaccttggctcgcttcttaatggacatcgtgccatccaggcggacgtataagtaccttcgggcacggcacagcttctcaaagagatccaaagtctgggtgtaattcgacaccagcactactttgtcactgctacggcttcgggtcaccgccagaatataatccaggaccagcatcttacctgacagctggggctccagggccttagagctgtaaccaggagggaagaggtccaaggcacccacaaagccatcctcctcttccacacacttatcatagattagagctggatgattacaaagcttctttagcgaggtgatggaagaaagggaagacacactcatcttgccctcaagcaattcttctgccggtttggcttgtctcagaaacctcttgtataactcagtctgaaggggtgtcagcctacaacaaacgacctgctcaatcttcacaggcagatatttagaaaggatatcagaagtcctccgtatcaggcatctattcacaatgctggtgagctcccgcagccgctcctctcctagctgcctgtctgcctcactagcagcagcgtctcgacccttcaaaattggcaattcaaaatgcttcttgaattcatgggcagtccctaggatgccggaattaacaaaatgtaccaagctgaaatactcaagcagatcattctggatgggagttccggagatgagcacccgccggctggtgttcaagctgtccagggcttggtaagtctgattctcagagttcttgagcctgtgtccctcgtcacatatgaccagaccaacacttcctttctggaggactccaacatgaaggcggaaggtctcataggaaatgatgaggatgggagaagacaccctggctccacgctggttcatgaatccttccagcttttggtctatttcatccttagatcctccatcgatggccagaggttggatcctccctccgagccatttcccaacctcattgtaccagttcttcaccaggctggaaggcgacaccaccactgccttgtcaatttctggcttgcactctggactctggcgtaaaagtgtccacatcaatgtgatgcactgcagcgtctttcctaggcccatctcatcagccatgatgcagccatggctgccagggatgcgccgactggtgacacactcccacaggaatttcactccctctctctgatgaggccgcaaaaccttactgagaatagggtcaacaaccacatggacagggagtttctccttgtcaagcttcagctggtcatgagcgctcagcgggggaggctcatacagaaccaaggcatctttttccagggggtcatggagggcccggcggaccccagcccttttcaggcccaatgctcgagagcccagaggaccttgataatttggaatggggactttgaaaggctttgacaaaatgcttcgaataaatgcttcatgctgactgctgtccagacaaggtggttgattggttagctgactcaaaggtttccgaaaaggagacaggaaacactcctggatctgggtctcactgctggatttccgtttcctaggagtcactaggccaggttgccagtcttcatcatcacaggacctgccttcaggttttctcttggccagctggctgggagccaagctcctcctcatcctgggcctaggagtttaaaacgtcaagtacccatgagccaaaggtcaaaagcaggcagcggctaagagtgtaggaccagggtctaatctgcccgaattc

SEQ ID NO: 90915 - DNA, 3409 bp, Homo sapiens
ttttttttttttacttaaaattatttttccttttagaaagttcaccaggaaaccagctcccctcccaccacgccgggcaggccacagccatctttttaaaatccgcgctgattttccctcacacccccaaacaggaactcctcaggatggcctcagaaggctggagtctctccctgtctggcgggacaccctggtggcggtgaaggcccctctgccacaacggaggtttctgattgtgggacacagtctggtttttgttttcttcctgtcttctaattaaaaaagacattcctgggtgacaggcacagtgcaggagtgtgagctatcgaaacaacctggtgaagtctcgcaaggcccagcaaacttgtttacattcctcagcactagtgacttgcttgtggaagtctgtaagttgtttgtgtgtcactgtgacggctcccacggttgtttcctttggcaaaccttttaaggaattttctaaccatcgacaaaaagtcggtctgtcaacctgcatgatctcccagagcacttcagccacatctggtagggtatagggggggaggcaaaagcagcaggtgtgcagcagctggctgacaagctgctgtccaagctggttcatcacctgtccaatcagttctttccgtaattcaaagtcttcttcatgatcattggctacccctgtatgaatgaggtctcgtagaaacctcatgacactacaattggcatcccggtggtccagggtagtagaggcaatggcccactgtaagatagggatgaccacttggctccgcagcaaggtgacagggctacgctgaataaacctggtggctagccggaacaggtcatctacagtgtcagggtgattctggagaccattctgctgttctaggagctgaaaggtggggatgcacagtgcctggagcatgtctagcagtccctgccgacagccttcttccatgccatattcatccacaaggatactgccaaggtacaggaagcaggaatgctgatgtacgtggtacacattcaccatctgtgtgactagtggctgcagcagtgctgcagatcctttgcctacacagcgaacagcaaagcgcaggcacctgcaacaacgctctacaatccgattatcagctcggtgcttatttagagtctcggataaaactggccatatttcctgtatgactttctgacacggatgagtctgtccattttccacaatgggattggtatgcctaaatatcactgcaaggcgatctaagaacactgtgggatctgaggatatgccattgctgggctcttgagacaacagctttttcaatgccataacctgaacagaacatagttcactaagacattcggtaatcttatccaaaggtaatcgggctaggacaagtgctgtcccttttagcaagcccacagcagcttctggagacaacaggaaggaatcgagggagcgggcaatctccaggagtccattaaagtgctgagccatgtgatctcggcagacagagcaaatgttatgaatggctttggctgcagcagaagccaggggcttttcacacaggcctttcatcaaatagcccaacacagggtcaaggaactgaggatttcgatcaacgacttcactcatctctccaaccaattcaatgctggtgtatcgcacagccgtatgtacggtctccgggaggcggacaactccttctaggacttccacaagtgttggattgttttccggatcaacactctttgctatagcagccatgataaagagaaccgcttctgtcacctcccagggtgggttgccttctttcagagtagaatataactgagcaaaacactccatagaccctatcaagaaaatcaagtcctttaccaggtctgataccctcatgcgaaactccccaaagtcatcagtctcctcaggaaccccctcatggtctggttccagctggcagtgtcgagccaaggcgtgaagcagcctctgaatgtaagctttgaagatgccatgaataacttcatcgttagttttgtacaaatgttcccccagtcggtaccaaaagttaaatgaaatttctactacctcatattgaggatggcctgcacagataagcagcagctccagagttcgaaggtccccaagaccttggcctggagtacaaacaattttttcaagaaaagtttcacatagttcagtgaaaatacggcagtaattcagaactttgtctaaatcttcacgtgccacggccatatgataggcagtctccaatgtcagcactccctgaaaaagttgcatggctaatggcaagttagtctccacattctcaatggcatagagagctgagcatacacagtccgaagcagcttcatgtaggttagacgaggtcttatcctgttgcaaaacctcaaaaaggagtgctagtaatttattgttagccatgaagttactgtccaaaactcccaagttaaaccaacttcccaaacagcgaaaaaccttcataagcattttctcatctgttcctgctttttctacacaggtcatcaatagagatactactgtactagagtagaaggccaaatcttctataatttctgtgcgccgattagctccaattcgtaaggaacgactatgtacttcttcaggtaacactgtaaggatctccagcaaaaaaggcaaagaagtcacatcattgctgtatttttccaccagtgtttgcacacatcccttccaggaaggcatctgtagggcaagatctgctattgctaaagccagctgcgttacaataacaggtgacaagtctttcaagttctggatatgggttagcaatgagtcccgtaaagaggcatgagagtctgtggggagctcataaaatgaggtctgaatcttcattttcatggtctgtgcagcaaaatagcatgactccacatcctgccggatctgtaacaactggtctgagatctcccatgcatgaaccgaacgctgcagctccccaagccaaaaagaggcgcgctcctttccgctgggatctgggtcgtggtaaagcgcctgcactgcctggtacacgagctgcaatgtcggctttgctccttccatggtggtggcggtagtggcggtagcgacggctctgattcttctccggaggattcctcggttgctccgccttcgcgcttcctcactgtctgggccacggccgctccctgactggcgccatctcctcctctttggccgttaccagggcagaaggttctccgtggaagttgccccctcggaaacagctattaggtcgtattcaggttcctggccttttttccggtttttccacttgattctagactcttgagtccgcagattctggcgctcccgtcttcagtcgctgacttgacctcagaagcctatcttgggacgaaa

SEQ ID NO: 90916 - DNA, 822 bp, Homo sapiens
atgcggcccgccgcccggggctgccccccgccccgccgacggcacccgcgccccctggccgagccgctcgcgccccgagacgtcttcatcgctgtcaagaccaccaaaaagttccaccgcgcgcgcctcgacctgctgctggagacctggatctcgcgccacaaggagatgacgttcatcttcactgacggggaagatgaggccctggccaggcacacgggcaacgtggtcatcacaaactgctcggccgcccacagccgccaggcgctgtcctgcaagatggccgtggagtatgaccgcttcatcgagtccggcaggaagtggttctgccacgtggacgatgacaactacgtcaacctgcgggccctgctgcggctgctggccagctacccgcacacgcgggacgtctacgtcggcaagcccagcctggacaggcccatccaggccatggagcgggtcagcgagaacaaggtgcgtcctgtccacttctggtttgccacgggcggcgctggcttctgcatcagccgtgggctggctctgaagatgagcccgtgggccagcgggggtcacttcatgaatacggctgagcggatccggctgcctgatgactgcaccatcggctacatcgtggaggccctgctgggtgtgcccctcatccgcagcggcctcttccactcccacctggagaacctgcagcaggtgcccacctcggagctccacgagcaggtgacgctgagctacggtatgtttgaaaacaagcggaacgccgtccacgtgaaggggcccttctcggtggaggccgacccatccaggtggggaaac

SEQ ID NO: 90917 - DNA, 669 bp, Homo sapiens; identical to SEQ ID NO: 59441

SEQ ID NO: 90918 - DNA, 1148 bp, Homo sapiens; identical to SEQ ID NO: 59891

SEQ ID NO: 90919 - DNA, 893 bp, Homo sapiens
ggcacgagaggaggcagaactctgggtgtctcaccatggcctggatccctctacttctccccctcctcactctctgcacaggctctgaggcctcctatgagctgacacagccaccctcggtgtcagtgtccccaggacagacggccaggatcacctgctctggagatgcattgccaaagcaatatgcttattggtaccagcagaagtcaggccaggcccctgtgctggtgatatataaagacagtgagaggccctcagggatccctgagcgattctctggctccagctcagggacaacagtcacgttgaccatcagtggagtccaggcagaagacgaggctgactattactgtcaatcagtagacagtagtggtacttatccagggtatgtcttcggaactgggaccaaggtcaccgtcctaggtcagcccaaggccaaccccactgtcactctgttcccgccctcctctgaggagctccaagccaacaaggccacactagtgtgtctgatcagtgacttctacccgggagctgtgacagtggcctggaaggcagatggcagccccgtcaaggcgggagtggagaccaccaaaccctccaaacagagcaacaacaagtacgcggccagcagctacctgagcctgacgcccgagcagtggaagtcccacagaagctacagctgccaggtcacgcatgaagggagcaccgtggagaagacagtggcccctacagaatgttcataggttcccaactctaaccccacccacgggagcctggagctgcaggatcccaggggaggggtctctctccccatcccaagtcatccagcccttctccctgcactcatgaaaccccgaataaatatcctcattgacaatgaggtcgacgcggcc

SEQ ID NO: 90920 - DNA, 3543 bp, Homo sapiens
tttcgtgtggaggcggcagctggaaccgcgcagcgcacgggaacgcgtcccgctgcttgggtcaggttcgccggtcgcgggagccccgccgtgcagtcggaggaacacgtggccatcagtaatcatgagcaacccattcgcacaccttgctgagccattggatcctgtacaaccaggaaagaaattcttcaatttgaataaattggaggattcaagatatgggcgcttaccattttcgatcagagttcttctggaagcagccattcggaattgtgatgagtttttggtgaagaaacaggatattgaaaatattctacattggaatgtcacgcagcacaagaacatagaagtgccatttaagcctgctcgtgtcatcctgcaggactttacgggtgtgcccgctgtggttgactttgctgcaatgcgtgatgctgtgaaaaagttaggaggagatccagagaaaataaaccctgtctgccctgctgatcttgtaatagatcattccatccaggttgatttcaacagaagggcagacagtttacagaagaatcaagacctggaatttgaaagaaatagagagcgatttgaatttttaaagtggggttcccaggcttttcacaacatgcggattattccccctggctcaggaatcatccaccaggtgaatttggaatatttggcaagagtggtatttgatcaggatggatattattacccagacagcctcgtgggcacagactcgcacactaccatgattgatggcttgggcattcttggttggggtgtcggtggtattgaagcagaagctgtcatgctgggtcagccaatcagtatggtgcttcctcaggtgattggctacaggctgatggggaagccccaccctctggtaacatccactgacatcgtgctcaccattaccaagcacctccgccaggttggggtagtgggcaaatttgtcgagttcttcgggcctggagtagcccagttgtccattgctgaccgagctacgattgctaacatgtgtccagagtacggagcaactgctgcctttttcccagttgatgaagttagtatcacgtacctggtgcaaacaggtcgtgatgaagaaaaattaaagtatattaaaaaatatcttcaggctgtaggaatgtttcgagatttcaatgacccttctcaagacccagacttcacccaggttgtggaattagatttgaaaacagtagtgccttgctgtagtggacccaaaaggcctcaggacaaagttgctgtgtccgacatgaaaaaggactttgagagctgccttggagccaagcaaggatttaaaggattccaagttgctcctgaacatcataatgaccataagacctttatctatgataacactgaattcacccttgctcatggttctgtggtcattgctgccattactagctgcacaaacaccagtaatccgtctgtgatgttaggggcaggattgttagcaaagaaagctgtggatgctggcctgaacgtgatgccttacatcaaaactagcctgtctcctgggagtggcgtggtcacctactacctacaagaaagcggagtcatgccttatctgtctcagcttgggtttgacgtggtgggctatggctgcatgacctgcattggcaacagtgggcctttacctgaacctgtggtagaagccatcacacagggagaccttgtagctgttggagtactatctggaaacaggaattttgaaggtcgagttcaccccaacacccgggccaactatttagcctctccccccttagtaatagcatatgcaattgctggaaccatcagaatcgactttgagaaagagccattgggagtaaatgcaaagggacagcaggtatttctgaaagatatctggccgactagagacgagatccaggcagtggagcgtcagtatgtcatcccggggatgtttaaggaagtctatcagaaaatagagactgtgaatgaaagctggaatgccttagcaaccccatcagataagctgtttttctggaattccaaatctacgtatatcaaatcaccaccattctttgaaaacctgactttggatcttcagccccctaaatctatagtggatgcctatgtgctgctaaatttgggagattcggtaacaactgaccacatctccccagctggaaatattgcaagaaacagtcctgctgctcgctacttaactaacagaggcctaactccacgagaattcaactcctatggctcccgccgaggtaatgacgccgtcatggcacggggaacatttgccaacattcgcttgttaaacagatttttgaacaagcaggcaccacagactatccatctgccttctggggaaatccttgatgtgtttgatgctgctgagcggtaccagcaggcaggccttcccctgatcgttctggctggcaaagagtacggtgcaggcagctcccgagactgggcagctaagggccctttcctgctgggaatcaaagccgtcctggccgagagctacgagcgcattcaccgcagtaacctggttgggatgggtgtgatcccacttgaatatctccctggtgagaatgcagatgccctggggctcacagggcaagaacgatacactatcattattccagaaaacctcaaaccacaaatgaaagtccaggtcaagctggatactggcaagaccttccaggctgtcatgaggtttgacactgatgtggagctcacttatttcctcaacgggggcatcctcaactacatgatccgcaagatggccaagtaggagacgtgcacttggtgctgcgcccagggaggaagccgcaccaccagccagcgcaggccctggtggagaggcctccctggctgcctctgggaggggtgctgccttgtagatggagcaagtgagcactgagggtctggtgccaatcctgtaggcacaaaaccagaagtttctacattctctatttttgttaatcatcttctctttttccagaatttggaagctagaatggtgggaatgtcagtagtgccagaaagagagaaccaagcttgtctttaaagttactgatcacaggacgttgctttttcactgtttcctattaatcttatcttcagctgaacacaagcaaaccttctcaggaggtgtctcctaccctcttattgttcctcttacgctctgctcaatgaaaccttcctcttgagggtcattttcctttctgtattaattataccagtgttaagtgacatagataagaactttgcacacttcaaatcagagcagtgattctctcttctctccccttttccttcagagtgaatcatccagactcctcatggataggtcgggtgttaaagttgttttgattatgtaccttttgatagatccacataaaaagaaatgtgaagttttcttttactatctatcttttcatttatcaagcagagacctttgttgggaggcggtttgggagaacacatttctaatttgaatgaaatgaaatctattttcagtgaaaacttgcaaaaaaaaaa

SEQ ID NO: 90921 - DNA, 691 bp, Homo sapiens
cgcacttaaaaaaatctacaaggaaacaccaatttaaagaaaagaaaaatcagtaagtatctgtgagaataatggagcaaaagaagtcctgaaagagttctgcatcttggtggtcatatttattggagagcttgagaaaaatgaaaataccatttagcttaagaagttgtgagttatctgcaaatcaactcatttcaggagtggaagaatccccggaattatttcttaatatcaaaatgtatgcaggtttctcttatgaatgttttgtacttttagagaggcccactgtacaaagtctcccgttttccatacaggacaaattctttgtttcagccaactctcagtggaggggcaaccaggacaacgccatctccccggacaaagagcattggaatattccgtttcgttgatttatatatctcttcatatgtttcttcatcaatttctatagtagtcacagtttcttccacatctcccaagatcatatttaaatgttgatcataagcatgtaatctgcctcgaagctctcggtcatttctcattttcacataaattcgctcatctaggctgagcctgataagatccaggggctcctctacagtgttggtagtttgttgctggtctacgtcgtccgccatgtttcaaaccctgcgccctttcccgcctctcgcgagaacacaagagcaacgtc

SEQ ID NO: 90922 - DNA, 6213 bp, Homo sapiens
ctcacgacgggccgagcctgccactgctaactatatgtcagaaagcatcagcttttctcgatggacccattcatctaatgaaatatgcctgtactattttaaaaagctttgtatttcgtcatagaaaagttcatccccccagaatgaaaatgaggacatttgagaaggtgatttaaggtgtggacatttgagaaggtgtcctatcaaattagtaaaccaaaggaaaagtactgaatagattaatccaaaacacttacttttttttaaacgaagaggatttcaccttgacagaaaaacaacttttattcaatatgtatttcctgaaattaaagagacaagtacagactgaaaggaaaatagattcgtaaataagctacgtcaactctatcctgctgaggatagctcagtgatgttaaatcctttacaaatccctggttgtcttcctacagacaagactgctttttgatgggactgatattaagagaaataggacctttggggcattcaactccttgataaaacttaaaagtatcggcatgagtggcttaacagaggaaataaagaagttttcaactaaatccaaaagtgcggtcattttctttactgctgttattttaaaaacctcttcataaccattgaaaaagaatcgacaactattttaaaagattaaagaaaggcagatgtctgcaaataattcccctccatcagcccagaagtctgtattacccacagctattcctgctgtgcttccagctgcttctccgtgttcaagtcctaagacgggactctctgcccgactctctaatggaagcttcagtgcaccatcactcaccaactccagaggctcagtgcatacagtttcatttctactgcaaattggcctcacacgggagagtgttaccattgaagcccaggaactgtctttatctgctgtcaaggatcttgtgtgctccatagtttatcaaaagtttccagagtgtggattctttggcatgtatgacaaaattcttctctttcgccatgacatgaactcagaaaacattttgcagctgattacctcagcagatgaaatacatgaaggagacctagtggaagtggttctttcagctttagccacagtagaagacttccagattcgtccacatactctctatgtacattcttacaaagctcctactttctgtgattactgtggtgagatgctctggggattggtacgtcaaggactgaaatgtgaaggctgtggattaaattaccataaacgatgtgccttcaagattccaaataactgtagtggagtaagaaagagacgtctgtcaaatgtatctttaccaggacccggcctctcagttccaagacccctacagcctgaatatgtagcccttcccagtgaagagtcacatgtccaccaggaaccaagtaagagaattccttcttggagtggtcgcccaatctggatggaaaagatggtaatgtgcagagtgaaagttccacacacatttgctgttcactcttacacccgtcccacgatatgtcagtactgcaagcggttactgaaaggcctctttcgccaaggaatgcagtgtaaagattgcaaattcaactgccataaacgctgtgcatcaaaagtaccaagagactgccttggagaggttactttcaatggagaaccttccagtctgggaacagatacagatataccaatggatattgacaataatgacataaatagtgatagtagtcggggtttggatgacacagaagagccatcacccccagaagataagatgttcttcttggatccatctgatctcgatgtggaaagagatgaagaagccgttaaaacaatcagtccatcaacaagcaataatattccgctaatgagggttgtacaatccatcaagcacacaaagaggaagagcagcacaatggtgaaggaagggtggatggtccattacaccagcagggataacctgagaaagaggcattattggagacttgacagcaaatgtctaacattatttcagaatgaatctggatcaaagtattataaggaaattccactttcagaaattctccgcatatcttcaccacgagatttcacaaacatttcacaaggcagcaatccacactgttttgaaatcattactgatactatggtatacttcgttggtgagaacaatggggacagctctcataatcctgttcttgctgacactggagttggacttgatgtagcacaaagctgggaaaaagcaattcgccaagccctcatgcctgttactcctcaagcaagtgtttgcacttctccagggcaagggaaagatcacaaagatttgtctacaagtatctctgtatctaattgtcagattcaggagaatgtggatatcagtactgtttaccagatctttgcagatgaggtgcttggttcaggccagtttggcatcgtttatggaggaaaacatagaaagactgggagggatgtggctattaaagtaattgataagatgagattccccacaaaacaagaaagtcaactccgtaatgaagtggctattttacagaatttgcaccatcctgggattgtaaacctggaatgtatgtttgaaaccccagaacgagtctttgtagtaatggaaaagctgcatggagatatgttggaaatgattctatccagtgagaaaagtcggcttccagaacgaattactaaattcatggtcacacagatacttgttgctttgaggaatctgcattttaagaatattgtgcactgtgatttaaagccagaaaatgtgctgcttgcatcagcagagccatttcctcaggtgaagctgtgtgactttggatttgcacgcatcattggtgaaaagtcattcaggagatctgtggtaggaactccagcatacttagcccctgaagttctccggagcaaaggttacaaccgttccctagatatgtggtcagtgggagttatcatctatgtgagcctcagtggcacatttccttttaatgaggatgaagatataaatgaccaaatccaaaatgctgcatttatgtacccaccaaatccatggagagaaatttctggtgaagcaattgatctgataaacaatctgcttcaagtgaagatgagaaaacgttacagtgttgacaaatctcttagtcatccctggctacaggactatcagacttggcttgaccttagagaatttgaaactcgcattggagaacgttacattacacatgaaagtgatgatgctcgctgggaaatacatgcatacacacataaccttgtatacccaaagcacttcattatggctcctaatccagatgatatggaagaagatccttaatcactgagctaacctaaataaggaaggatttcattttatggactgatattttgctgtgtaacttgttcttcgtaaattgtcatctgcagtgctgcaaagatatgaagaaatatgataacgaataagtgacaccagtactgtagttcataatgagtaggtacaggcgggaaactgaataataagaagtcataatggaatcaaggtgaagctttttataaacttttttagcctaagcaataactggttttgtattttttcttaatccttcactttaatacaataggctcacttaatttgtcttcccatttctctttatatatatatatatatataaaaaaatataaatatatgtttgtttgtttgtttttttaaggaaaaacaagtcaagctagcatccagttactatatagcttggctaaattatacaagacttacaagattgattactcgacaggcttgtatttaagagataactgtgaggttaccattatgtgatgttactataaggacttttaacattggtttaacaaaccatagaggcattgaagggtttttcttagatgcctagaaaaagcacactgggctgttttacctttcttttttaggtcaatcaagactccaaaatagtgattcctaacctttttggagttgctctgctactctgaatatgttctatacagcataaggattgtcaccttctgtgtgttgcaacagcttctaagataattagggacaaatgatgttacaaaaggaagagtactgctggtctaagtgctgagttgtatgtctttgcatagctccactctgctgctaaatatgcatgttctgactgacaccatcttgatgccagtactggattccagcattcagcaggtgcagatctcggctttacacaatttatctttacctagggttcagtcagtaatttctgctttttagcagggccagtgcagggtcagttaatgctacagttactgtatagcaaacagtatccttttttctccttcccctagcctattgggctttgcagatatctggagtgttttaaagtcaattattttaagcagtttgaggggatgtgtaggagtggagcatgaaacagtttataaggctggggctgtattatcagcacagcaaattaaagaatgaaagaagtacttctttttacatttcagctccagcagccagctatttaaaaaatatttttaaatatcttccccaaagtttaagatgtgggaccatctacttgtaagaaacagtggcttatttcttcatttctcagtaatcattgtaaacctttttttttttcttctccactctaacaaaagtaaaaaaacaaaacttttgctgaggtcttggactccactacttgttagttatgtgggcctggacagatggcaggtctgtcggcagttcctcagtctgtaaaaggaaaataatcattcttgcctctccctttgccacagggttgtcgtgaaaatcaaatatgtatgaaggcggccaaataacctaaaaactaggaaagggttaactatcgttgcccaccgaatttgaggtagcaaaaaaaaaaaaagaatgttctgggtacatgaacagactgagaaggccctttcggacatccctggaagcctagtctcctgtctagactaaaaatatccttgaaagaatagtagcaaacagtatgcagtactcctgtgttctaagttcttttatgttttagtttaccctcacagcagccatagtgttaagtcattatgagcttcatcttaaagataagaaaactgaggcaaggggagattaacttactgccaaatttcaaacagttagtagtatttgagaccagtagtatggctctaatcttacccttagccctcccaaccattatgctgtactatctacccataaatacctccaggaaacattcccctcttggtaatttgtccttctatagaagcttcaaagattaaatcaaattaattttcaaaaaaaatttttttttagaaatgttattttccctgtgatagaggatgacttcccagtttcaccaaagtctgtttatatcaacacacacaaaatggaataattctgagtcactaggcaatcaatctactgtggttttactatgtaaggtgaaaattaactggaacgatgtttgtttgctatacttacatagtcaaaactttacaagcccatgaaattaattgcactctttgtatttggtggttaaatgcctaagaagttttctaaaaaattttgtaaaggcactgtccagagaatctggagttgaatgattattccagatactgtataacctggcttaacttttggtctttaagtcgtgtttgtaaaagaaggtaattgcctagaaacatttggataatgtacaaaggtagtctataatgactgttcagtacattttaatatttttttggggttatatccaactttttgtaaatatactggaagcttgataataaaatgtatttcctatcaccatacttttccatgtgaaaacctgagcctatttctagtataagtatccaaagaaaagtttgacctggttgtgttattttaccagaccttggtaaaagaactattttggaaacagtatttgtaaatggaactaatgctatatttaaaaacactgatttttttttaacctgccaaaaataaaaaaaagctcattttataattttctactaaatttgagttgattatctggaggtctcatttcttgtaaagtataactttttcagaaactaccaccaaattatccaactgttatactaccagaaggctttaaaaagttaaaaacctaatatcaaactttctaggtgttaagatataaggcattgcctga

SEQ ID NO: 90923 - DNA, 5054 bp, Homo sapiens; identical to SEQ ID NO: 58977

SEQ ID NO: 90924 - DNA, 1330 bp, Homo sapiens; identical to SEQ ID NO: 59732

SEQ ID NO: 90925 - DNA, 777 bp, Homo sapiens
tgcttcttgtatcatgatatatgatagtcttgctgttaattactaagtcatttaagagatatgggactggagaaatgagtcatgtcttatgcgaggactcactgtccccaggctgtccttcgtcttcaggagccctattattttacccagttatgtgcatggcttctggctgttcagcagggtgctttgagcttatagaaaaggttaagcaccttcacgttttcctgcaactggcatcagctggcatggtcaaccaattagttaattttatacttatttattgcctcattttggaataaaatccttatatgtgatttaattatagcaaaagccttttactctttatcaaagacaagatttatcacatgtacctggccagacgaaaggccttgcggcgactcgcagctctctggacgggagcactgtttggatgaggatattcaccagaacttttctgttgcatgatttctatacctatcccattgcacattcctttcattaaggttaactgaggggactgtggcaaaccaaatgccatagaccattcctcaagcattatagatattaataccgtcagttaaagaatattgcacacttcactaaagcttactttctctctacagactgccgatgcaatgactgaaaggaaggttggatggggggactggcgtcaaactaattcgcttctgcacagatcaggcatccttcaacatagtagatagacccccaccagaatgggaagtactttgggcttctgtcctcttgaagagagtaaac

SEQ ID NO: 90926 - DNA, 1333 bp, Homo sapiens
tggcaggaaccggaacccgcggttataaagtaaaggaacccgagatctgcgcaggggttccctttgccgatttctctcacctcacctttcaaacctaaactcgagcctactgttcaccggcctagcattgctctcgccatggctctcagcgatgctgacgtgcaaaagcagataaagcatatgatggctttcattgaacaagaagccaatgagaaagcagaagaaatagatgcaaaggcagaagaagagttcaacatagagaaaggtcggcttgtgcaaacccaaagactaaagattatggaatattatgagaagaaagagaaacagattgagcagcagaagaaaattcagatgtccaatttgatgaatcaagcgagactcaaagtcctcagagcaagagatgaccttatcacagacctactaaatgaagcaaaacagagactcagcaaggtggtaaaagatacaaccaggtaccaagtgctgctggatggactggttctccagggtttgtaccagttgctggagccccgaatgattgttcgttgcaggaaacaagatttccctctggtaaaggctgcagtgcagaaggcaattcctatgtacaaaattgccaccaaaaacgatgttgatgtccaaattgaccaggagtcctacctgcctgaagacatagctggtggagttgagatctataatggagatcgtaaaataaaggtttccaacaccctggaaagccggctggatctcatagcccagcagatgatgccagaagtccggggagccttgtttggtgcaaatgccaacaggaagtttttggactaagccttcaggaggtggagctcgtcgtcagctctcctgctgtgatgtggaagcttctgatatttgaagaaacacgaatgtctctgtagcttcctcttcactgccccagtattgctctgtatttatcagcgatgcccctctgtcactcatgccttgcctaattgttcacaatggtggaaagcttcatgtaatatgatcaggacccacctccagttcttctgaaagtgtgacagtgtccagccggttctgcagcactaggggagggggcagatggtggttgcatgggcttcctgggtctccactctccgtctggcctaaaggtgatgtatttggtgtttggccctgcagtccccactcttgaggcttaaggcgcatgtggcacaccactccttccagcagtagtcgctttactgttacctgtttaggcctagaagttttccctcatctgtaaatgtgatttaaaatctaagccatgaatatgctttatttattaaaagagttatgcggaaaaaaaaaa

SEQ ID NO: 90927 - DNA, 356 bp, Homo sapiens
ctgtattctaataacaggtgtattatagcatttccttggaaatataaccttttatctttacattgatgacataggaagctcagatttaaaatctattgaggctaggaagccagatcaaggcatacttcagattttacctatggtttctatcatgaaatggcatttttactcactcactctaaggctgggaacccttgaagccaggcattttaagcacgttctcaaatatgatattccagtcaaagccttggtagtataaccaatgtttccaattgtatcctgttataaagacagagaaaattctttttgaacttatgggaataactgcattgtcataagtcgacgcggccgcgcag

SEQ ID NO: 90928 - DNA, 766 bp, Homo sapiens
ctacatttcccacaatccttcgggggctgataaggctccgcaatggtctgaactacaattcccacaatccagggcgatttccgctttgtcgcgtttcctcaaggctccgccccatttcccatctttcttttcagtccttgcgcaccggggaacaaggtcgtgaaaaaaaaggtcttggtgaggtgccgccatttcatctgtcctcattctctgcgcctttcgcagagcttccagcagcggtatgttgggccagagcatccggaggttcacaacctctgtggtccgtaggagccactatgaggagggccctgggaagaatttgccattttcagtggaaaacaagtggtcgttactagctaagatgtgtttgtactttggatctgcatttgctacacccttccttgtagtaagacaccaactgcttaaaacataaggatgtttcagttcctccatttaacagatatgaagagcattttaagaggtgcagcctctggaagtggatcaaactagaactcatatgccatactagatatgtttgtcaataaacttatgacgtgaatgcttaatgcctcttttttgaaatagggaatgtaataattgggccattttgcctactttattatttgggtaacattccagtattactctctgtgatttagcttatttaatggtgttaaactgaggttatattaaatttttgattcccaggtcaggattttgttggtaatttatataataaaagggaaatacaaatcgaaaaaaaaaa

SEQ ID NO: 90929 - DNA, 2850 bp, Homo sapiens
gtctccctggtgcgcatgctcgcccccgctgcgggctagctgttgtgtttttttttttttcccccgggcggcccggcggctgcgtactggctgtgggatgggaagtgaagccccagcgagcggctgcagcggggccgtgaggagcagccagcgggaggcggcggcgagtcggtgagcagctgggaagagcagaaccggggcggagcacctgcaggcgcgggcggcggccccaccatggcgattcgcaagaaaagcaccaagagccccccagtgctgagccacgaattcgtcctgcagaatcacgcggacatcgtctcctgtgtggcgatggtcttcctgctggggctcatgtttgagataacggcaaaagcttctatcatttttgttactcttcagtacaatgtcaccctcccagcaacagaagaacaagctactgaatcagtgtccctttattactatggcatcaaagatttggctactgttttcttctacatgctagtggcgataattattcatgccgtaattcaagagtatatgttggataaaattaacaggcgaatgcacttctccaaaacaaaacacagcaagtttaatgaatctggtcagcttagtgcgttctacctttttgcctgtgtttggggcacattcattctcatctctgaaaactacatctcagacccaactatcttatggagggcttatccccataacctgatgacatttcaaatgaagtttttctacatatcacagctggcttactggcttcatgcttttcctgaactctacttccagaaaaccaaaaaagaagatattcctcgtcagcttgtctacattggtctttacctcttccacattgctggagcttaccttttgaacttgaatcatctaggacttgttcttctggtgctacattattttgttgaatttcttttccacatttcccgcctgttttattttagcaatgaaaagtatcagaaaggattttctctgtgggcagttctttttgttttgggaagacttctgactttaattctttcagtactgactgttggttttggccttgcaagagcagaaaatcagaagctggatttcagtactggaaacttcaatgtgttagctgttagaatcgctgttctggcatccatttgcgttactcaggcatttatgatgtggaagttcattaattttcagcttcgaaggtggagggaacattctgcttttcaggcaccagctgtgaagaagaaaccaacagtaactaaaggcagatcttctaaaaaaggaacagaaaatggtgtgaatggaacattaacttcaaatgtagcagactctccccggaataaaaaagagaaatcttcataatgaattataaactaattgattaatgtccccaaagaaatctgctttctactatatctttcagcattagagatttttctgttcttgaaaatacagtctgtgctctttgatttttgctattgtacggtttcatgcatttttttaaagggcatttgaggggaggattattgctatgaatgaaaaaaatattttagcttagactaagctacctgccttcaaaatagtttagggaccaccaccatattttattttgtttttatttttgaacatttttctaatgatttggagagaaaactatttacaaaaattccacatatcagtgatacaatttcttgctgtcaccaattttttataatagcagagtggcctgttctaagaaggccatattttttaagttatctttcagggtaacatggaaatactataaagttggatgtcaaactttaatatgttttcagtgttctctaattttttggaatttttgtagactttacacctggaaaaaaagatttgtaaaatcaccggaacaattgtgtgctttattttataggtagtggttattagtattacatccccattttaaaaacaaaaacataataatggttacaacacgtggagttttactaacatacatattaaatcaaagtatattcttaaaagtacttgtgaagtaaaatctttcttgtgcattttcaatacttgtaaactggaaatcagaaaatatttactatgaacaggaaaatctgacatatagccctttttgatatgtttattaataatgattcttaatggggctcataataagtttaatatgcacagcatcttagaaaagtttaacctgcaaacacttttaaaacataatgcctacttgatttatatctataaaaagactgacaggtaattatatttggaaaacatttaatgcactaactttaaagaaattgaaaattcaggtggataaatagtcttacaaaagacaatgtgctttatgttatacctatagctttggtcccatctttaattgagaaacatttatctgtataaaacatatttttggataaatatatatatatatatttgtatcgctacagaaaggctctaaaaagcatttgaggaaaatatttggttcccttttctataatcatcctttaagattcttatagctacatttggtttattcatcatatttacagtatatatattgttcttttcagtgttcacatcttgttccccatttctcacttgtgtcaccagctgtttgtgccatttttagtgtaaaagttgcagacctattagatctgcagtttaagttgccatgctggctagggaaattgtcctttttctttctagctgttaacctacttcctggaaaaagtagtagctctctgtagcattatggagtttcagtggaaccaaatttttgccattaaaaactggcattatactgaacaatacccccagaaatcaatcaaaataaaaattttaactttcaaa

SEQ ID NO: 90930 - DNA, 1615 bp, Homo sapiens; identical to SEQ ID NO: 60051

SEQ ID NO: 90931 - DNA, 422 bp, Homo sapiens
ctctgctcccctgggagctgtgggaagttgaggttaggcgtggctggtggcctggttctcatgaggtggggcaaactgatggacaagagaatagtagagactgagaccacaccgtggggctgctgagctccagttcctgtccagctggaccagggttttcttaaccagatgagcttgcccagcacccctcccacacttcacacttctgccccagcctcttgggctgggtttccaccacaatttatgctcaccatatatttatcgagcctcccttgggcctgatgctctgctgggtgcaatgcaggatacagaatgaccccaaagttccaggagagacagagctaaggccaggtgactgcagatgactgcaaagcagcaatggtttgagcatccctgaattgctgctcacaagtgctttaaac

SEQ ID NO: 90932 - DNA, 355 bp, Homo sapiens
gatgcaggcctggagtactggaggagaggacgctgggcatggcagcctgctggggccggggctcacgcactccctcccatgtcggagcctcagactcagcctgcttctggggcgctgagcaccatatgcccactcccaggtgcactgcttggacaaggtgtgtgggctgctgcccttcctcaaccctgaggtcccagatcagttctacaggctctggctgtctctcttcctacatgctgggaaagaggctcctcactgcccccgaacccgacccctgtgatggccacccagccggacccctggggaaaggttcctgggccagggcatggccggcccaacctgccgaagcctactg

SEQ ID NO: 90933 - DNA, 804 bp, Homo sapiens
agcccagcgtggtggaattcgcagcaaagagtagtcagtcccttcttggctctgctgacactcgagcccacattccatcacctgctcccaatcatgcaggtctccactgctgcccttgccgtcctcctctgcaccatggctctctgcaaccaggtcctctctgcaccacttgctgctgacacgccgaccgcctgctgcttcagctacacctcccgacagattccacagaatttcatagctgactactttgagacgagcagccagtgctccaagcccagtgtcatcttcctaaccaagagaggccggcaggtctgtgctgaccccagtgaggagtgggtccagaaatacgtcagtgacctggagctgagtgcctgaggggtccagaagcttcgaggcccagcgacctcagtgggcccagtggggaggagcaggagcctgagccttgggaacatgcgtgtgacctctacagctacctcttctatggactggttattgccaaacaggccacactgtgggactcttcttaacttaaattttaatttatttatactatttagtttttgtaatttattttcgatttcacagtgtgtttgtgattgtttgctctgagagttccccctgtcccctcccccttccctcacagtgtgtctggtgacaaccgagtggctgtcatcggcctgtgtaggcagtcatggcaccaaagccaccagactgacaaatgtgtatcggatgcttttgttcagggctgtgatcggcctggggaaataataaagatgctcttttaaaaggtaaaaaaaaaaaaaa

SEQ ID NO: 90934 - DNA, 458 bp, Homo sapiens
ggcggaattcctaaaacactaggtcacctaacgaaaaaacttgtttaaacagatggtgtcacacactacatggagatatggcctcgaaacatttctttccaacattccatatttgacaacaatgaacaacgtcccacatcagggtttgaattctgtggtcttgtcagcttcgtggtgataaaggcagtttgtgttccttggcccctgggtatcctcctttctgagtaagaatgccttgtctaccttttgaagcagtggacttgctacagcttagaatcttgaaaatactgttctgcttaatgctgtcactcagtttttggacaagaatgctatccttggcctttcattagttggggtcattttaagttgtcttccaagagcccagagcaaatgtaattataatattattttaatagcctaggaaacaataaataggtttccactgaaacagaaacttt

SEQ ID NO: 90935 - DNA, 2056 bp, Homo sapiens
  misc_feature (1)...(2056): n = a,t,c or g
cggagctccaggtctcctcttcactactctgtgtcctgtgctcctacaggcccagcctctgtggccctgtgacctgcaggtattgggagatccacagctaagacaccaggacccctggaagcctagaaatgggaccattgcaatttagagatgtggccatagaattctctctggaggagtggcattgcctggacactgcacagcggaatctatataggaatgtgatgttagagaactacagtaacctggtcttccttggtattgttgtctctaagccagacctgatcgcccatctggagcaaggaaaaaaacctttgactatgaagagacatgagatggtagccaacccctcagggccagttatatgttctcattttgcccaagatctttggccagagcagaacataaaagattctttccaaaaagtgatactgagaagatatgaaaaacgtggacatggaaatttacagttaataaaaaggtgtgaaagtgtagatgagtgtaaggtgcacacaggaggttataatggacttaaccagtgtagtacaactacccagagcaaagtatttcaatgtgataaatatgggaaagtctttcataaattttcaaattcaaatagacataatataagacatactgaaaaaaaacctttcaaatgcatagaatgtggcaaagcttttaaccagttctcaacccttataacacataagaaaattcatactggagagaaaccctacatttgtgaagaatgtggcaaagcctttaagtactcctctgcccttaatacacataagagaattcatactggagagaaaccatacaagtgtgataaatgtgacaaagcctttattgcatcctcaacccttagtaaacatgagatcattcatactggaaagaaaccctacaagtgtgaagaatgtggcaaagcttttaaccaatcctcgacacttactaaacataagaaaattcatactggagagaaaccctacaaatgtgaagaatgtggcaaagcttttaaccaatcctcaacacttactaaacataagaaaattcatactggagagaagccctacgtttgtgaagaatgtggcaaagcctttaagtactcccgtatccttactacacataagagaattcatactggagagaaaccatacaagtgtaataaatgtggcaaagcctttattgcatcctcaacccttagtagacatgagttcattcatatgggaaagaaacattacaaatgtgaagaatgtggcaaagccttcatttggtcctcagtcctaactagacataagagagttcatactggagagaagccctacaaatgtgaagaatgtggcaaagcctttaagtactcctctacccttagttcacataagagaagtcatactggagagaaaccctacaaatgtgaagaatgtggcaaagcctttgttgcatcctcaacccttagtaaacatgagatcattcatactggaaagaaaccctacaagtgtgaagaatgtggcaaagcttttaaccagtcctcatcccttactaaacataagaaaattcatactggagagaaaccctacaaatgtgaagaatgtggcaaagcttttaaccagtcctcttcccttactaaacataagaaaattcatactggagagaaaccctacaaatgtgaagaatgtggcaaagcttttaaccagtcctcaacccttattaaacataagaaaattcatactagagagaaaccctacaaatgtgaagaatgtggcaaagcttttcacctatccacacaccttactacacataagatacttcatactggagagaaaccttatagatgtagagaatgtggcaaagcttttaaccattctgcaaccctttcttcacataagaaaatccattctggagagaaaccatacgagtgtgataaatgtggcaaagcctttatttcaccctcaagccttagtagacatgagataattcatactggggagaaaccctagaagtgtgaagaatgtngcaaagcttcaagtggtcctcacaccttactatacactgagag

SEQ ID NO: 90936 - DNA, 2374 bp, Homo sapiens
tttcgtcacgtgacctaggaccggctcaccgggtcgcttggtggctccgtctgtctgtccgtccgcccgcgggtgccatcatggcggacgcggccagtcaggtgctcctgggctccggtctcaccatcctgtcccagccgctcatgtacgtgaaagtgctcatccaggtgggatatgagcctcttcctccaacaataggacgaaatatttttgggcggcaagtgtgtcagcttcctggtctctttagttatgctcagcacattgccagtatcgatgggaggcgcgggttgttcacaggcttaactccaagactgtgttcgggagtccttggaactgtggtccatggtaaagttttacagcattaccaggagagtgacaagggtgaggagttaggacctggaaatgtacagaaagaagtctcatcttcctttgaccacgttatcaaggagacaactcgagagatgatcgctcgttctgctgctaccctcatcacacatcccttccatgtgatcactctgagatctatggtacagttcattggcagagaatccaagtactgtggactttgtgattccataataaccatctatcgggaagagggcattctaggatttttcgcgggtcttgttcctcgccttctaggtgacatcctttctttgtggctgtgtaactcactggcctacctcgtcaatacctatgcactggacagtggggtttctaccatgaatgaaatgaagagttattctcaagctgtcacaggattttttgcgagtatgttgacctatccctttgtgcttgtctccaatcttatggctgtcaacaactgtggtcttgctggtggatgccctccttactccccaatatatacgtcttggatagactgttggtgcatgctacaaaaagaggggaatatgagccgaggaaatagcttatttttccggaaggtcccctttgggaagacttattgttgtgacctgaaaatgttaatttgaagatgtggggcagggacagtgacatttctgtagtcccagatgcacagaattatgggagagaatgttgatttctatacagtgtggcgcgcttttttaataatcatttaatcttgggaaaattcaggtgtttggtgtctgccttttttgttcttttttccagcacaacataacttaccactgatactccccctttagttattctgaattaggatatttttgctccaaattcttattttacttaaccagaagggaaaaaaagttgtattttcctgaagctacaggcactttgtcatgtgatttttgagtctcaatttaaggctttgtaaaatgaagagtagaattccaagaaaaatgagaaataattttgtaaaacttaacaaaatcactaaattaaactatatgggaggttatgaattactttttcttgggtagaccctaaaatgtcagtagcatgcaccagaatctgactcccattatgcttctaagcacatttcattgaccttgtctctcatacttcaagaaaaggacagtacattgctacattaccctagaaagtctgtgtgaggatctgccccttcagtctgttattgcaaagtaataaaatgtcacctacagggagcctctgagcctactctagttcaagaggctacctgaaaaaaaataaataagataaagggtcagcaacaacaaagaaaaagacaattacagaaaataagcaagatttggaaaggaagtataatggcacttttttcctcaaaggaagttcttgttttcacataaaatatgaaaagcagatcctgcaggagtaacccccttctttaagagccaagtatttgccagtgcttaaattacaccataccggtctaattatatataatcttttgttcttcagttttttgttttgtttcctttttgttattggtgccgaaggtgagtagttttgcatttctgatgacagccttggaaagtatatttgtaactccatgtctggtaatgccaacccaagtcgacatgggtcttaggacactgaccacctcacatgccataccctcagttaagcatgttaacatttataggaggaaaaaaatcactttgggagaaaataaaattcaactcaagcataaagcttctgtttactcaggccttctaaaaagcaggttaaaatgctctaaaatgagaaagcctgtggtttcacttatttatataactcactgggacattgccaaatgagtaagcacttaattcgctgcttctgagacttctctgtcaaaacagccccactgataatattagacagaacgagaatgcaggggtctcttccctcccctggggtttaggaagctcatgaggagctcggcttaaaatgtctttgatgtctcttc

SEQ ID NO: 90937 - DNA, 1183 bp, Homo sapiens; identical to SEQ ID NO: 59425

SEQ ID NO: 90938 - DNA, 1756 bp, Homo sapiens
tccctcagcgtccggccgaggcgcggtgtatgctgagccgctgccgcagccggctgctccacgtcctgggccttagcttcctgctgcagacccgccggccgattctcctctgctctccacgtctcatgaagccgctggtcgtgttcgtcctcggcggccccggcgccggcaaggggacccagtgcgcccgcatcgtcgagaaatatggctacacacacctttctgcaggagagctgcttcgtgatgaaaggaagaacccagattcacagtatggtgaacttattgaaaagtacattaaagaaggaaagattgtaccagttgagataaccatcagtttattaaagagggaaatggatcagacaatggctgccaatgctcagaagaataaattcttgattgatgggtttccaagaaatcaagacaaccttcaaggatggaacaagaccatggatgggaaggcagatgtatctttcgttctcttttttgactgtaataatgagatttgtattgaacgatgtcttgagaggggaaagagtagtggtaggagtgatgacaacagagagagcttggaaaagagaattcagacctaccttcagtcaacaaagccaattattgacttatatgaagaaatggggaaagtcaagaaaatagatgcttctaaatctgttgatgaagtttttgatgaagttgtgcagatttttgacaaggaaggctaattctaaacctgaaagcatccttgaaatcatgcttgaatattgctttgatagctgctatcatgacccctttttaaggcaattctaatctttcataactacatctcaattagtggctggaaagtacatggtaaaacaaagtaaatttttttatgttcttttttttggtcacaggagtagacagtgaattcaggtttaacttcaccttagttatggtgctcaccaaacgaagggtatcagctatttttttttaaattcaaaaagaatatcccttttatagtttgtgccttctgtgagcaaaactttttagtacgcgtatatatccctctagtaatcacaacattttaggatttagggatacccgcttcctctttttcttgcaagttttaaatttccaaccttaagtgaatttgtggaccaaatttcaaaggaactttttgtgtagtcagttcttgcacaatgtgtttggtaaacaaactcaaaatggattcttaggagcattttagtgtttattaaataactgaccatttgctgtagaaagatgagaaaacttaagctttgttttactacaacttgtacaaagttgtatgacagggcatattctttgcttccaagatttgggttgggggcactaggggttcagagcctggcagaattgtcagctttagtctgacataatctaagggtatggggcaaggatcacatctaatgcttgtgttccttatactctattatatagtgttattcatgattcagctgatcttaacaaaattcgtagcagtggaaccttgaaatgcatgtggctagatttatgctaaaatgattctcagttagcattttagtaacacttcaaaggtttttttttgtttgttttctagacttaaataaaagcttaggattaattagaagaagcaatctagttaaatttcccatttgtagttttattttcttgaatacttttttcatagttatttgtttaaaaagatttaaaaatcattgcactttggtcagaaaaataataaatatatcttataaaaaaaaaa

SEQ ID NO: 90939 - DNA, 357 bp, Homo sapiens
cttcacaggcatatgaacatatgggaaatgaacaacattctgagttctgaaaaaagcttcagagttagccaaatgaatattatttcagagactgaaaaggagaaaggaacttccaaggactaaatgaaacagattcaggatgaagagggagagaaaaaactggagagggaagcaggggctaatgttcccataggtttccttctggcgtgcctaactatgtgggttccaggccctttcatcattagttccgtcggacattgttttcacaagctcacccccaagaactcccatttctgctatacaacactatagagttttattggtacccagaatttatctagaagaaaattttaaata

SEQ ID NO: 90940 - DNA, 1725 bp, Homo sapiens
agaataaactttttatttctacaagattaatttctctatagtgacccagacttaggtgagggtagttaatttagtgtaaaatatatgtataaatgtaaacaaataaacgtatgtacatatatatctgtctataaatcatctcaactcttataacatagtactgtgatatcatccagtaattgtattgtatttcaaagaagtatggtcaccgagtgaaaagaaaaaggttaggagttgttgtcttaaatgtattactaattcccagatattcttttgaacctatgaatactgatgatttttctccatgcaagaatatttttcagttaccatcatatttttgaaaacaatgtaacatttataccagccaaatcaaatgtaataatcaacataacatatacaaactctagtaaaatgtattttatttagttgtaatatccatctctaattgtttcgaaataaaaatttccatggtcttaacttgaactgtatgttactttcttttagaatatcctttttttcattaaaataatttctaaaccactctatgtgttcaaccttctgtttaacactaagatatgggtttttggaaaggccacaagtcaccagctccatgaagtggcgaattggtccttgttttggaaagctctccaggtgtttctccagaaatatatgttcatgaaattctgaaccatcatcatcaaaacctgcttcattgttaattgggaactcccatagtttcccctcttttgtccactggatcagctcttcaaatccattctgaaggggttgttcatttactgtggctaactgcttagcaaattccacatcccaaagtgaaggtgatgtgtctgtttcaggtgcttctttagtaactgccatcatgtcaaaaatattaagtcttttccctgtgaatatatttttcctttttttaagatcatcggtcttctcctggccaggataattgtcatagccttcatcaaactgaatccgaagctctggtcttgaacgaactctagctgtagcagatctggcaactttcatatctgatattatgttactgaaactaattttaggtcgctttgcatctctctgtgcccttgactcttcctcatgctgctggagctggctcagcagctctgacttggttgtttgcttatcaaaagggagagaatctgccacagcagatgcagctgccaccaactcaggactcaggggctcaattctcttctttggagcatattctgtagctcttcgaagcctgccaagtgtagcttccaaacttttaagtggtcttcttttggggggctttgttgttcgtacatttactgtgcttaattcaactttcatgcccttaataatgcctaacaagtcttttttcgtattttccttttcactgtcttggctctctgaagtctccttggaagtctcctcagttcgaacagactgcttatctttcttgctacagatcacactgttagtgccaaaatatctttggatgttattttttgtccgggccaacagcgctgaactgcggtacctgactgttccgtgccgaacagtgagtagcataatcgcagccgctgatgtctccgggcttccagaggacaaagggtggcgggaaagggggcgaagaggtaggaacgtcgagactctaggaaacatcgccgagacacgaaatgaaccaagaacacaactgaaatggtgcgtcccgcgtcgacgcggccg

SEQ ID NO: 90941 - DNA, 2029 bp, Homo sapiens; identical to SEQ ID NO: 58736

SEQ ID NO: 90942 - DNA, 442 bp, Homo sapiens
accgtaccggccggaattcccgggatcagctgctggggttgccaccattctcaggaccctcgccatgaaagcccttatgctgctcaccctgtctgttctgctgtgctgggtctcagctgacattcgctgtcactcctgctacaaggtccctgtgctgggctgtgtggaccggcagtcctgccgcctggagccaggacagcaatgcctgacaacacatgcataccttggtaagatgtgggttttctccaatctgcgctgtggcacaccagaagagccctgtcaggaggccttcaaccaaaccaaccgcaagctgggtctgacatataacaccacctgctgcaacaaggacaactgcaacagcgcaggaccccggcccactccagccctgggccttgtcttccttacctccttggctggccttggcctctggctgctgcactga

SEQ ID NO: 90943 - DNA, 1354 bp, Homo sapiens
tatatgttcatgattttatttaactgattaataaataagagtgccacaggatgttttaacgggttcaaaggagaatacaaagagcagagaatatataggcagacattcatgctgaaatgaatttgcttaataaaggcaaaactagccaatatccatagggtcgatggtcaaatatatctacactggataatttgcattttcatggacaggaattattggcaatttacacagttgtgaaataggtaaaacaaacaaaaagtgaaaggttcagaaaccccatacaatcagctaaactaacatttagttttccattgaaaatatttagcaattttttgagaccatttcaaagtttttcttaatttttctctgctctaaacaaggataaatttgagtttattttaggaaaaaaaagagctttttctttgttgaattagtattttgaaaaatttatggaaggagacagaacataaaagcagttgccaagtttatcaattaagttggtacgattacaaatcccaattaagaaatatttttaagtatattatatgaagatggtatacaaaatacattcatcatgactagaaatataggaccaaaccatgtctgtcttatatctgtagcatatattcttggtttgtataaaagtaactttaaaattccagtttccttaaatagttatgcacaaaacacacatacacccacacacacacacacacacacacacacacatacagttacaccactgtcggccaaagatgcactcctcctttaatcaatttaaatgaggctagcgagtatctgtttgatgtttgcattcttgtgggctaggaaacaaggcacgggtccctaaaattaacatctcggtgtcacttcttggactgacaagacacagacttgcacatggtttcagccccattccacccagactgttccacgtacattatctcagaaactctgaaaggaagtgctcgttctttgttagtgccaaccatttttgtcataaatggcaaatgattggaatattatcagttaattcatgtttcaattttcagtgctattttaatgaacaagcactttgtaactagctcattattacaagtctccatttttctttctacattaagactccagatggaaccattctttgactgatggatggactcatgtatgctacaaacctgagtttgaaggagctgagtaacaattctaatggttttgcttttctcttgaaaaggagtatttattatggtctcttaatgattaagaattaattattgaaatcaagacatgaacagctaaggttttatttgttatcactatttgctgggctattatctgatttggaaaaaaaaaa

SEQ ID NO: 90944 - DNA, 1834 bp, Homo sapiens; identical to SEQ ID NO: 59669

SEQ ID NO: 90945 - DNA, 4697 bp, Homo sapiens
caactgtcaaggcatgtggaatacaccagcattcatattactacattctaacagagtgggggaaagagggaagacagaagataaataataaacatagtagatggcttttcgcactgaaatgggactatattattcctatttcaagactattgtggaagcaccctcatttttgaatggagtatggatgattatgaatgataaactgactgaatacccccttgtcattaatacattaaaaagattcaatctttaccctgaggtaattttggccagttggtaccggatttataccaaaataatggacttgattggtattcaaaccaagatatgttggacggttaccataggagaaggactcagtcctactgaaagctgtgaaggattgggagatcctgcttgcttctatgttgctgtaatttttattttaaatggactaatgatggcattattcttcatatatggcacatatttaagtggcagccgattaggaggcctggttacagtgttgtgcttctttttcagacatggagagtgtacccgtgtaatgtggacaccacctctccgtgaaagcttctcatatccatttcttgttcttcagatgttgctagtgactcatattctcagggctacaaaactttatagaggaagcttgattgcactctgcatttccaatgtatttttcatgcttccttggcagtttgctcagtttgtacttcttactcagattgcatcattatttgcagtatatgttgtcgggtacattgatatatgtaaattacggaagatcatttatatacacatgatttctcttgcactttgttttgttttgatgtttgggaactcaatgttattaacttcttattatgcttcttctttggtaattatttggggtattctggcaatgaaaccacatttcctgaaaataaatgtatctgaacttagtttatgggttattcaaggatgtttttggttatttggaactgtcatacttaaatacttgacatctaaaatttttggtattgcaaatgacgctcatattggcaacttactaacatcaaaattctttagttataaggattttgatactttattgtatacctgtgcagcggagtttgactttatggaaaaagagactccactgagatacacaaagacattattgcttccagttgttcttgtagtgtttgttgctattgttagaaagattattagtgatatgtggggtgtcttagctaaacaacagacacatgtaagaaaacaccagtttgatcatggagagctggtttaccatgcattgcaattgttagcatatacagcccttggtattttaattatgagactaaaactcttcttgacaccacacatgtgtgttatggcatcactgatctgctcaagacagctatttggatggctcttttgcaaagtacatcctggtgctattgtgtttgctatattagcagcaatgtcaatacaaggttcagcaaatctgcaaacccagtggaatattgtaggggagttcagcaatttgccccaagaagaacttatagaatggatcaaatatagtactaaaccagatgcagtgtttgcgggtgccatgcccacgatggcaagtgttaagctctctgcacttcggcccattgtgaatcatccacattatgaagacgcaggcttgagagccagaacaaaaatagtatactcaatgtatagtcggaaagcagccgaagaagtgaagcgagaactgataaagttaaaagtgaactattacattctagaagagtcatggtgtgtaagaagatccaagcctggttgcagtatgcctgaaatttgggatgtagaagatcctgccaatgctgggaaaactcccttatgtaacctcttggtgaaggattccaaacctcacttcaccactgtattccagaacagtgtttacaaagtcctagaagttgtaaaagaatgactgctacatgacctgctgcctacggagaactacatctgtaatggttttaatgttttgctaagtcatgtgttgttcatatcccaaaaacttttataggtaactgttttcaaatagaaaacgttttatttggtcaatttgaatgtccttctaattataaaaatgacttacacctttatcaattggttactatttcaatgcaccctttaaaatttgctatgcaaatgagtatatgcttgtacttgactttaatatttgtgctaaagtgagcaaagctacctgtataaagaaaacacagtgggttgtgacaaggatgacatgaaaatacaggacaattctgacaatgtaggggctgattttatagtgtaagaactattaatgccccttgcttcttttttctgcctcttgctcttgtcttttggacatttcagtgattgtaagttcttcggtcatgtcagcccctgtcatcaacttgagttacagtagatggggcagacatggagtgtttgctatatagaactatctgtttgttttacttccttgtgcgctttttgttctctgttctcttgttaatgaagcttttcctgcccattattaatccaaactcttggaccttgtggttaggaaattcccttaacttccagccatatggcattatcgtgtctctttctctctctctcttgctctctctcttctcctcttccccatattttctgtcaaataagtactgtttactcatttagttgcttatcaagtacttattcttggttttaaaaaaaattaatggtaactgtatttttctcatttttagcattattcaaatgtttatattttaatacctttaaaccactttaaagttttttcatgtttaattatagttttaagaaaaactattttgaacaaccccaaatatagtgcatctagaaactaatgtatatttgattagacatcatttatagtggaacagtagactgtagtacatggtaatttttcttttactattaagatacaataaaacatgactaattttgctgtcaaaaatgtaaagaataatgataaatggagtttttatattttacttttaagattgcctgtctttaataagacaaagccttaagccttatgttataattttggttctaaaaaccatcatttcagtataaggaataagtatatttcgtcctcctctttagtttttttcttcctatttatttttattttgaaaaatttctacaccttctttgaattccttgtatgaatttttgtttcttagaagttaatttgtgtgaaatgagattcttcaaaacgatgaaacctcatagctctgagaaaaggttttagggttttaaattctaagcaaagcgtgactatggctgacagactacacatttaattatacagcttctctttcttaaccacaggcagattaacctcattgtggattgtccttcagaccttagtcctcaggcatggtttctggtgcccactcctggaagccgctgttccctttctaccttcttaccagagcccaagggcaggcctggtcccggggaagcagcagcttgctgacataagtcagctgcaaaggctgaggagtgtgccctcagagaagcaccgccccccagtcttgtgccagcgcctagagccgcagctcccagggatgctccttccctggaggcagcccaggagagggactctggcagcgttcttcagatttgtggccactgtttctcatttgctggttgactgtttttatttcttaggcttttgctagttttagaaaatagggaagcagcccttgatttgtggattaaaagcaacatttgagcgatgatgcacaacagtccaggaaaatgggcggtggacacttgaggctgaggatgggagttgacatgagcagggagagggaggtgcgcgctgcttatctgtgattgttgctcacctgagtgtggctgattgtgtacatccagcagttacaatttttaaaaattatacttttacatttattttatatttttctcacccccagtaatttccttccaaagaagttcacatgtaataagtagaaattctgtataggaaaaaagcattaaaaatactattataactgcttcatttgctgggaaccattaaaagtaatataaattagctttttccagaaggatccttttgtagcagtgtttatgaatgtaacccccagcaaaatatggctatatattaggggagcccagtttggagccagaggcctgaaggtccccccccctatgccagcccgtggcccacagcctccgcagccccaagccactgtgggagcatcccaccaccctttgatgggcaatgcaggattggtagcaggttcccatagggcgtacaaaacagtattaaaggttcagtgtttttgcatattgttagccatttaccaaatatttttgcccttagtatgaggaaaattaaggatggggccaaagaagccgatccaaaatagcctattgcctacaacattttccgaaaacaaagttgggggcctgtatttcctttaaaaagataagccctctaaaaatgcttggcaaaaaaaatatagtgttaaaataggccagtgatattaatgagaaaatgaaagtatgtatcaggaataaagtgatattgcataggagtattgtatttttatgaattttatgccagttgtttacatgtactatatatgttaaattaaaaaaaatcatgagtaatgagaaaaaaaaaa

SEQ ID NO: 90946 - DNA, 386 bp, Homo sapiens
ttcattttaaaatgtgtctacctgttaatggatgcttacttctgttttggccttatttctctgaagatgggaaattaaaacccaagggtttctttctcaagtatttctgggaaaatactaggggttggggaagacagatttaatcttgttccccattattacatatagtaaagcagaaatatctgtacagtaccagatcaagtcttacttattacaactgtaatcattccatttgaattctagtctagtcataacagaaacgaatttaagtacattgtaatggaaaatgtatgtgtaatttaaaagtgctaatctaatttttatgtcatgtgatgcgatgcagtgtgattaaaactctattttaacctgatgaaataattttgggt

SEQ ID NO: 90947 - DNA, 506 bp, Homo sapiens
aggagccttaaccctggactccaaggtctttccacttggtgatcaggactgagcacagaggactcaccatggaattggggctgagctgggtcttccttgttgctattttagaaggtgtccagtgtgacgtgcaggtggtggagtctgggggaaccttggtccagccgggggggtccctgacactcacctgtggagcctctggattcactctcagtttttattggatgagttgggtccgccaggctccagggaaggggctggagtgggtggccaacataaaccaagatggaagtgagaaatactatgtggactctgtgaagggccgattcaccatcttcagagacaacgccaagaactcactgtatctgcaaatgaacagcctgagaggcgaggacacggctgtctattactgtgcgagagatgcggagggtaataatggtagctgctcaagagtctggggccagggaaccctgggcaccggcttcttaaccttcaccaaaggccct

SEQ ID NO: 90948 - DNA, 3773 bp, Homo sapiens
tgaacgcatgcgtgctgtggtcgcctagtaaacggggctgctggtgggccgcgtcgaagacatggaccagggctacggaggctacggggcgtggagtgctggacctgccaacacccagggtgcatatggaactggtgtggccagctggcaaggttatgaaaactacaattactatggcgcccagaacaccagtgtcaccacaggcgcaacctacagctacggcccagcctcgtgggaggccgccaaggccaatgatggcggcctggcggccggggcccctgccatgcacatggcctcttacggcccagagccatgcaccgacaattccgactccctcattgccaagatcaaccagcgtttggacatgatgtccaaggaaggaggcaggggcgggagcggcggcggtggggagggcatacaggaccgggagagctccttccgcttccagccgttcgagtcctatgactccaggccctgcctgccggagcacaacccctaccgccccagctacagctacgactatgagttcgacctggggtccgaccgcaatggcagctttggggggcagtacagtgaatgccgagacccagcccgggagcggggctcccttgatggcttcatgcggggccggggccagggccgcttccaggaccggagcaaccctggcaccttcatgcgcagcgaccccttcgtgccccccgctgcgtcctctgagcccctgtccacgccctggaacgagctgaactacgtgggtggacggggcctgggagggccctcccccagccggccacctccgtccctcttctcccagtccatggctcccgactacggcgtgatgggcatgcagggggcgggcggctatgacagcaccatgccctacggatgtggccgctcgcagcctcggatgcgggatcgggatcggcccaagaggagagggtttgaccgcttcggaccagatggcacgggcaggaaacggaagcagttccaactttacgaggagccagacaccaaactggcccgggttgacagtgaaggagatttctccgaaaatgatgacgcagctggtgacttccgctcaggagatgaagaattcaagggtgaggatgaactctgcgactctgggaggcaaagaggagagaaggaggacgaggacgaggatgtgaagaagagaagggaaaagcaaaggagaagagacaggacgcgggaccgtgcagccgacagaattcagtttgcctgttctgtatgcaagttccgtagctttgatgacgaagagatccagaagcatctgcaaagcaaatttcacaaagagaccctgcggttcataagcaccaagctgcccgacaagaccgtggagttcctccaggaatacattgtaaacagaaataagaaaattgagaagcggcgtcaggaattgatggagaaagaaaccgcaaaaccaaaaccagatcctttcaaagggattggccaggagcacttcttcaagaagatcgaggctgctcactgcctggcctgcgacatgctaattcctgcacagccgcagctcctccagcggcacctgcactccgtggaccacaatcacaaccgcaggttggctgctgaacagttcaagaaaaccagtctccatgtggctaagagtgttttgaacaacagacatatagtgaagatgctggaaaaatacctcaagggtgaggaccctttcaccagtgaaactgttgatccagaaatggaaggagatgacaatttaggaggtgaggataagaaagagacacctgaggaggtggccgcggacgtcttagcagaggtgattacagcagcagtgagggccgtagatggggaaggagcgcccgctccagagagcagcggggagccggctgaggacgaaggccccacggacacagcggaggccggtagtgatcctcaagccgaacagctgctggaagagcaggtgccctgtggaacggcacatgagaagggcgtccccaaggccagaagtgaggctgcagaggctggaaatggcgccgagacaatggcagcagaggcagaaagtgcccaaaccagagttgctcctgccccagctgccgcggatgctgaagtggaacaaactgatgcagagtctaaagacgctgttcccacagaatgatgctcattctcctgttccagggaaggcgttgggatgatggatgcgttggtctttctcccttggtttgtaagcagtacaagggcgtgtgctcccagaatatgctgtaatctaattttggtgaagagacccagcgtttcctcctgagcagtgcctctcacggcttgtctcatgcagtcgtgtggcttcttgcccaggtttcaaagctgaagtacattgtccttagcggctgtaacatgtctcttgacagtagtgcacttggaataataaaggttgggtgattatatcttgatgatacattacttgttcaatacagccactgatggaatgcttccttttttatttttttccttaatttttttttttatttggttgggaacagctgaatactaggaatatatcttgctctatagaggattttttttgtatgtttcaagcttcagcctttaacctatacctttgtagtgcaccatatggtgtcgtcgactttcacaggacttcgcagcacctggttcacatgtggcactgaccgcgtcacatccacgcactcccaaaggccagaagtatctgaccgacctacgccactggaaacacacccaccgcaacctcaaagaaccagactgtgcagaagggcattgcgtcccaaatctttaagtccttgctgaatcagttctctaatattttacctcatttggtgttccacctctaggattacttcagggttttttcctttaaaataggttactaccactcaaatgtatttacaaagagaatttggccaggcacggtgatgcatacctataatcccagcacttggggaggccgtggtgagaggatagcttaagcccaggagttcaagaccaacctggacaacatagcaagaccccatctcttaaaaaaaaaggaaagaaaacttgatgtgattgccataggtggaataatccaacataaattgccatagatagaaggtatctgtaatatatatatatatataaaatgaaatatatgtttcattttagagaaataactattactttagatctttccaaatctgagaaagggaggctagcatgtgttcaaggttagcacgcaacagaatttcctaaaatcagaagaattggaagatcctccccttttgaaatggccctgcctgtgtcagtttccctgtggccttttgaactgtacatctcacatgttgggaaacgctggccactgggaaatcattagaaaggaggctgtagaatatttgccgagcctctactgtataccaggggctaactcaccaagcacattctaggaattgggccctgctcatgaggagccttagtggagattccaggtgaatatttatgaaaaagtcaacattagaactgaaaatggaaataaactgcttgaaaagacaaaaaaaaaaaaagggggggcccgtttaaaagaacccttggggggcccaaatttaacgggggatggaaaggtaaaatttttttccttatggggggccaaataaaacccaacttgggaattttggaaaagaacctttctttggggggggggacaaatgggcccaacccccctacaaaaattaaagccttaagggaaaaaaaaaatttttaagggggaaagggggtaaaccaaccgg

SEQ ID NO: 90949 - DNA, 1171 bp, Homo sapiens
gcttgcggccgcgccatccagatcgccgccgcctcgtcccgcttctcggctgaggcgccgcgcggccagcgcagcgggctccacggccgtcagccgcagcagccctaggggcctaccgtgggctactccgggtcagcatgcccggggtgaaactgaccacccaggcctactgcaagatggtgctgcacggcgccaagtacccgcactgcgccgtcaacgggctcctggtggccgagaagcagaagccgcgtaaggagcacctccccctgggcggccccggcgcccaccacaccctcttcgtggactgcatccccctcttccacggcaccctggccctcgcccccatgctggaggtggctctcaccctgattgattcatggtgcaaagatcatagctacgtgattgctggttattatcaagctaatgagcgagtaaaggatgccagtccaaaccaggttgcagagaaggtggcctccagaatcgccgagggcttcagcgacactgcgctcatcatggtagacaacaccaagtttacgatggactgcgtagcgcctacgatccacgtgtacgagcaccatgagaacagatggcggtgcagagacccacaccatgactactgtgaagactggccagaggcacagaggatctcagcctcgctcctggacagccggtcctacgagacgctcgtggatttcgataaccacctggatgacattcggaatgactggacaaacccagagatcaataaagctgtcctacacttgtgctaggcaggcaccgctgtgactgggctccgggcctttccactacgttgaagaagaaaacctatttttaaatgtaaataaaatatctggtagcctgtgtggaaagctgaccgttttaagaagtggcatgtgccttgaaagggggcagaatgttcagtcggtcgtgtttttaacacagagtctctagaagaggtgcagacatcccgtctgactgtccctgtggactctctcagttgtatgttgctataatcctccaaatcaaagctctttctgcttgtgcaagattgttcctattaaacagttttaactaaccttttataatctggagagaatactttttaaggcttttgaactatcttttttttaaaaaaaaaaaaaagcccacatcttatactccaaaaaaaaaa

SEQ ID NO: 90950 - DNA, 765 bp, Homo sapiens
ggcacgagctgcattcttttggggagtctagagtttttttgttaaaaacctttgacactgagtctctcatgagcttccctggtatagacaacatttcacatgtggtgtcattaattgctgctgggagaattaagtgcctattgtgtgtgtggtttggtggggagtgggggcaggacggccgacttttggaagcttgtgcctggtttcctttgcactttgctccatgagtctttggagatcttgctctgtgtccttttgttgtaatgactcacagctgtgaatacgactatgtgctgaggcctatgagtccttccagggaatcatcaaacctgggagagggcttgagtgtccttgacatactttatttttagccttgccttgcatttgcagctataccgcatatgttagcggttcctacgtgaccctagcttataaaaagaactgcctctatggcgccacgtgccccaaacgcaacctaccccttttttgactggcagagaccacctccccctaccctatcctacgctcttgcgtaggccgtccacgtccaccgtctccccctcgcgcgtctaaccaccgctacgatcggctcagcttctccctccttgcccggggaacccgtgttccagctctcgcacaggcgggaccttcccaaccaactacctcgcggccgcccctccctctcatctccatcgccatcaccaccgccctgcttctagcgccgtctgcgctacccgcgggcagcgctgcaccaacgagccgtcc

SEQ ID NO: 90951 - DNA, 1699 bp, Homo sapiens
ttttttttttttcaaagataaaatgagtatttaattcagtttcagaaaaaaagggtacattacttcgatgagaaagcataaaattaagaggcttttctggaaatccaagaaaaagaaataaccattaatatgttcaatgataattttctagatcttcctcgtgtccaaagctatatattttctcctcaaaagcagctgctccaagaactaactagccctctttatctccctctagctgggacagactaattcccctccacccccacctctcttctttcaataacactgtgtaggtgttaatggcctgggctctcaccaatgaagagaattgtcctttaagccagcaacccacaggcagtggcacccaaagcctcaccaacccaccccccaacccggcccatccccagggcagaagccacagagctggcattgtttccactgtctcaggaagaaggagccaaaagctgaccctcagcacaaatcaaagcccaatatggagagagaataactgcttctaggccgagagtaggcaagctgtgggcaaaaaaggggagtttttgcagccacctcatctttagaaacaaggggaaaactagacccttttccactattatggtctaccaggtactctactgctccaaggagatctgaaaatacaaaaggatctaaacaaataaggagaacttttcccaggctggagataagaatgacaaacagaaagatgggtgaatgtaataatgtgtaggaagatgatgctgggagcctcctttcttcacatggctgccagccccatagaggacaacacagtaagaaccaggacaaccactccagactggtatagctggggaatcttcaggccttttcctaggtcccacatcaagtgtcggatcccattccaggtatgatacatgagagggaagacaagtgcaaacttagctgtgtggatcagtgctggccccagacacagggacttcacaagttccaaataagactcaaagttcccagggagtaacagggccgacatgccaaaaagagagacccctgcactcaaagcaataccagtgccacggtggcagatggacatcgccatgggaagagaccaactgtagatagtaatgtggggagacagaggacggtttgaacctatattcttattccagaaccgctccatctcttctttggccgtggttcccaaaggaacagcatttctgatacagagctgagggctaaagtgggctcggaggcaatgacgaccaacgtgtctcagcaacagcgcagccatcttgggttccctctcatgtatcatacctggaatgggatccgacacttgatgtgggacctaggaaaaggcctgaagattccccagctataccagtctggagtggttgtcctggttcttactgtgttgtcctctatggggctggcagccatgtgaagaaaggaggctcccagcatcatcttcctacacattattacattcacccatctttctgtttgtcattcttatctccagcctgggaaaagttctcctacacattattacattcacccatctttctgtttgtcattcttatctccagcctgggaaaagttctccttatttgtttagatccttttgtattttcagatctccttggagcagtagagtacctggtagaccataataggggaaaactagacccttttcccgaacgcgtgg

SEQ ID NO: 90952 - DNA, 2469 bp, Homo sapiens
tcaagcactgaagacgcaaaactgaaacaacaggcaagggcgagtggaacgtgggatggggagcaaaaggctggaaggaggggggctgggcccacacctggaagaacccacatccttgcagcctccggtggctgcaacatcttggcccctgcagatcttttcagaggtccggcacaatgactccacagagggctgactggttccatgatgcttaagaggttaggaagcttgtaggaggcacgcctgacttgccactccctccacccaggcctgactatctgaggaccaattcacacacctggagccccgagtagcagcctgaaggaatgctaaggaggtaggtgagggagtggggggcaggcccttgcccccatttcttgattgtataacacttcattaaaataaaatcacgcagtgccatcttttattagacattttaataccatatcaaaacaccttgactaatgaagaaagcttttctcccaagctttgaacatttttttaaacattttataagtttttttttgtattttaatatataaatacagaaacctatcttgcatgggctgatgccacgtgtgaacatcaatggctaaaatgttctcaaacatagtgcctgaaaacaggggtagctgtacatatttcttagtaagtctttttttgtttaagttttctgaaaaaaaaaatccacgagggcctaagaataatgttcaggcatttttgcaggacacttgtgattgttaaatcctctgaactgaccggaaccaggaggaaagaagggaaaagagatgggatcagtaggaagaaagttctcaatgggttgttttttggcaatgaagtcaagatattagggtctcaaggggagaaaagagcaaaaaaccagccagaaaaatagagggaaaaaaccaaacaaacccaaagtagagaagttggtggtggagagggccagttggggcaggggaagagaccgtgtgctcgcccgccgtcagaaggctggcagcgaggccttagctgtgttcgtctgtcactgagtgggttatggctgggcagcaaacagcaagctgtaaacatcacgagggaaaacaccagtcgacactagactttttttttatataatttttttttgtaaacactttaaagacagacccacaatgcctttcaaagatgaaaaagaaaatgccctttccctcctgggctgaggggtgaggggaaggatagcagttgattcattcttctctcaaacttgctctcatccaatttggtgtcctcagggaggaagggagaaccatgatctggaagtcagtgcagaaggggtgccctgttcccgctggtgtcccaagctcagctctgccccagggtccggtgagcctcctccctggagcaggggcgctctgtccctttgagaggagtcagcaagcaagcccgcaggtcagtccgcagggtgttccggacaagatctgttcacttcaaaccacgagtctatgcagctgggaggagggggccgcaagggaaaccacgttacctgctgcccaggctgctttgaaggggctctttcagagggccagattcctgagcaggagcttcctaagtctcttctgaaaggaccccagggaaacacagtcatgtccccagatatccctactttctgaagcacgaagaagggtgaacaccaagactagtcttggcccaggtggaggcagcagtaccggctcagggggatctggtgctgcaggaaggggcagagtggctttcagaaggaccaaagctttctgtgcagagcccaggagaatggcagcagccaccagtgagaaggtgagagcggtggacccctcagggcagctagtcagctgtctccaagactcccaagggcagggaagtgggaacaatggcatggcaggagggccgcggctctgggtgccacagtcctgaaagagctccttcctgggtcaaaagaacagctgtgaagctccctcccagtgggtgacctcttaggagagccccaagctctacccggctcagccatgatcagctgatcagcagcatctagtccttcctgcaagaggcgggaggggagccagacagtgaagccctgctctccagtgtttacagagaaaggctctctgcatcaaagagggaacagagattgccccaagacagcttcctgatttgtaaaccaacatctgggcattttcaaagacaggaaccagacagataattggcataattctccccgagggccaaagatttccttttctggttctggttagtgccgccctgggacacaagcaaggctccgtgctgggagctagaccaagaatctctcccaggccagccttaagcctcctctgcaccagccacactgcgtgccatgcccggttgtcaccctgtgcagcagtggccctgagagtcaggctttgaaaggcctgagtgtcaggaagaagctctgggctcgaattccaccgcagttac

SEQ ID NO: 90953 - DNA, 694 bp, Homo sapiens
aggccaagaatattgcgcgaggtgatattcaggccataaattgatgcaatgcaatgctgccagtgacagacaatacagcacattccccaggatggcaacagctactggcttgtgcttaaataccatttcattctgactgaggtcatcatctttgagctcctgcaatgaggagctcaatagggtgggggatgctgtcctttgcctcaggtgctctttgggtgctttcataaaagagggtcagagccgccgatggggtctaggagaccctaagagttctgatggtcaggctgagaattgtgtcctcagggagtgggagctgctgcaggtctgagcaccaagggctccagcaccaggacaggagcctccagccacctccaccttgcagcccctgaaggtagcatatgtggaccctctagatggggtggggagtgacctctgcccagttcctttctgtcccgtggccttcccatctgcaggttgtagaggggaaacagaaggctagaaaggcccttccagctcaggcttttactggttctaaatggattcctgagctggcctccccatccctggacagagcggaagctaccccctgccctgcctctctgacccccatggtatcagcctctgtctcatctgcccccagatcccagccatggccctggagcccaaagaagggcatctgagaaaagttgga

SEQ ID NO: 90954 - DNA, 787 bp, Homo sapiens
ctccactcggtttctctctttgcaggagcaccggcagcaccagtgtgtgaggggagcaggcagcggtcctagccagttccttgatcctgccagaccacccagcccccggcacagagctgctccacaggcaccatgaggatcatgctgctattcacagccatcctggccttcagcctagctcagagctttggggctgtctgtaaggagccacaggaggaggtggttcctggcgggggccgcagcaagagggatccagatctctaccagctgctccagagactcttcaaaagccactcatctctggagggattgctcaaagccctgagccaggctagcacagatcctaaggaatcaacatctcccgagaaacgtgacatgcatgacttctttgtgggacttatgggcaagaggagcgtccagccagactctcctacggatgtgaatcaagagaacgtccccagctttggcatcctcaagtatcccccgagagcagaataggtactccacttccggactcctggactgcattaggaagacctctttccctgtcccaatccccaggtgcgcacgctcctgttaccctttctcttccctgttcttgtaacattcttgtgctttgactccttctccatcttttctacctgaccctggtgtggaaactgcatagtgaatatccccaaccccaatgggcattgactggtagaataccctagagttcctgtagtgtcctacattaaaaatataatgtctctctctattcctcaacaataaaggatttttgcatatg

SEQ ID NO: 90955 - DNA, 3720 bp, Homo sapiens
acccaaagcccccggggataaaatttttataaatcaaaccccggaaacaaaactttccaaccgccaggatatgcaggttgttttaccccttttaccctttaaaatttttttttttccctaaagcctttaatttttgtagggaggttggcccaatatgtcccccccccaaaataagggttctttcccaaaattcccaggtaggtttttattcggccccctataaggaaaaaacttttaccttgccagcccgggtaaactttgggccccccaaggattctttaaaacggcccccccttttttttttttttgaagtaattatttaatgacacaggaaaataacatgttatgaaacaagctggttacaagtagtaggtagatgacttaatttttgataaaaaaattaaaaagcatgaacatgcatataaaaattagattatgtacaaaataccaacagtatttacttctgctcagtaattaaatattcttccctttgtttttggtctttttaaaaaaacattatttcctgaaaaaaaaaaatccagaaaaacatggatcgtgggagaggaattatttaaacacccgggggaattaggggaccccaggaaggctaaggccgggggggctcaggcaggtcaagggttggaagtctcaggaacaggtcccgacccagggtgatggtgggccaagcccaggaattgggaaggattgttcttttcttttcctactgggaatgttctttaccagttttctctatattcgatgttagcacacttatttaatgggatccccatgattaactgggcacaacagcaaaatgatgcctagcaactttggcctttgaactgcctacaaaatgtactatcttgtagttatatactgtaacaaaacacactagaaatcaagtgctcctacaacgaaaaactcatctgactaaatcactgattttgctgtttttttttctaactttgttccattttcaatcttcacagcaaatgtattttttgtttcagggcctggaagaggtatttttttctcagaaagaagctaacattaatgtgtgctgggcaccgtctgacagcttggctctaactccaagtaagttgcccttgtcttctaagtactctacagagtgcaaaggcttaccaaatccaaaccaccttgaattaaacaaatctaaaataacctgagactcttttctgcaccaccaccagctgcccagtacactaggtcaccttttacagcagtgagcacagcaatccatgccacaaaaatcttcacaaaacaagaaggaaagatacaaaaagaattatattaaaatggtaacatacacttgtatgagggagggatatttaaaattaaaatattatcatcacaagaaacaccagatattccttgctctgcccttgggcaaccaagaaacttaaagcctgttttatatcccagaaataaaagagagacgtgatagaagtaacagtgctcagtgcttgcaacccaagtcaatttatactcttgttaggtaagtccaaattctaaagtctacaaaaatcctgttaaatcaaggggaaaaaaaattcattttaggacaaagttattcaagatgaaaggaaggcatgtgttcagtgagagaactgcctgctgtcagatgatttcttgctaatgtgtttaaagattttggatttctcaactttcttggttttctggtagccaaatccaccaccacctcctcgctttttctgcttgccttcattactgttgacgttcagatcaacgaagggaggcaccttgaaaccaaatgacagagcaacctgaggcaaatttaggttattaacattaaagatctgtttcagagaatgggaatcataggctcgtatgtatgacttatatgcttcctgggctgacttatgaagaaagtaattcttttcaatcaatttctcaagctgagactgaatgtcagaaattttagaccaggaaaagtcaaattcacttaatggaaccttggattgtttcaagtaacgaagaaaacccaattcttctgggcgcaaaatgagcaaggcatgccctctcccatttaggcctctggctgttctacccacacgatgaatatattccttagggtcatccggagggtcatactgaacaatccagtcgacttcaggaatgtctagtcctctcgctgccacatccgtacacaatagtgttcccgaatctgcattgcagaactggaagaatgtggttgtacgcttattttgcttttgctttccatgaatggccaagacgggcaaatcaatgtagttcagcaactcatagtggtatttcacagacatacaagatgaaaagaagaccataagcttcttctttcggttcttcttaaggaatgtaaagagcagaaggaatctcttttcagaaggacaaacaacatatccctgttcaagaccatccactgttgcattcgctttatcatcatcaacgccaacatacaatggctcctttttcagagaaatccttgccaggtcttcaacttttcgagtttgggtggcagaaaagagcatagtctgtctacgtgttggcaaaagtttaataatttgctttaattcctcttcaaaccccacatccaagatacgatcagcttcatcaataaccagacactgcaggtttttatacataaatcctggggtattctgcatatggtccagcagacggcctggtgtggccacaatgatgttgatcccattaccaagtttctgtgcttcagcagatctgttactgccacccattatcaagccataggtatgcacgtggtgagtcatcagctccttaagaacaccaaaggtttgcatggctagttctctagtaggtgagagaataaggactcctgttccattcctgggcatgaaccttaacttaacaatgagttcaactgcagggatgagaaaagccagggttttaccactgcctgtttttgcagctgctagaagatccctgccttccagaagtggtctgatacttttatgctgaatttcagtcatgtttgtaaaacccatttcttttattgccttcagagtgttttcattgacaagattacatagagaagcaaacgaagtatcctcaaaagctcctgtcagtcccaggggcagactgggcacctcactctcatcttcatcattatctggcttctccacattattttctgtttctttagtagtctcggcactttcttcttcagatttccctttgttttcagtttttgcttttttcgtatcaggctcagcatcattcaccatttttctctttttcttctttttcttttttgattctgaattggaagactgcattgctgcttctccattggttaatacagtggatttctggggagactttgtaacttttatatttcccactgcttcttgagacatgcctccattttgagtttctgataagcccacattcatgggcttttgttttgattttttaacctttctacttcccattgtttcttcagatacatctccattttgagtttccgatagggtcagatttgaggccccctgaaactttaggttccgctgccgcaatttgaggttccgcttctcgatcttcttacgcaggagtttcatcggcaggtgtgacattctgcccaacaagtgcctagaataaggcgccacacagtacagctactcagttctcaggctgacagttacttcccttccgccgcacgtggtc

SEQ ID NO: 90956 - DNA, 2704 bp, Homo sapiens; identical to SEQ ID NO: 81608

SEQ ID NO: 90957 - DNA, 5573 bp, Homo sapiens
ctcggaaaagcttttcagtaaatgcactcatgctgctccaggagctcttctctgcaacaagccacccatctgccatcaacaagttaagaccaagagaactaacggctgcggaaatgagactgaagctttgattaaccagctgagcagttagaggtggagaaatttaataacttatattcaaaactgatttagggatcagagcaatcacagaaaatgaaaccaatgctttccagagggatatcctaaggaaaaaacaactcgtcctggtggattcaattttacttggaaagcctgggacacagaaaacaggaaactggtcaaaggctcctacatgttagagccttttacagactcactgcgttgagtctaacaaccgcgactgaatgcagcctccaatgtgctcagaagaatgggcttacatttcaagtggccattaggggcccctatgctggcagcaatatatgcaatgagtatggttttaaaaatgctgcctgccctgggtatggcgtgtccacccaaatgccgctgcgagaagctgctcttctactgcgactctcagggcttccactcagtgccaaacgccacagacaagggctctctgggcctgtccctgaggcacaatcacatcacagagctcgaaagagatcaatttgccagcttcagtcaacttacttggctccacttagatcacaatcaaatttcaacagtaaaagaagatgcttttcaaggactatataaacttaaggaattaatcttaagttccaacaaaatattttacttgccaaacacaacttttacccaactgattaacctgcaaaatttggacctgtcttttaatcagctgtcatctctgcacccagagctcttctatggccttcggaagctgcagaccttgcatttacgttccaactccctgcggactatcccagtacgcctgttctgggactgtcgtagtctggagtttctggatttgagcacaaatcgtttgcgaagtttggctcgcaatggatttgcaggattaattaaactgagagagcttcacctagagcacaaccagctgacgaagattaattttgctcatttcctacggctaagcagtctgcacacgctcttcttacaatggaacaaaatcagcaacttgacatgtgggatggagtggacctggggcactttagaaaagctagacctgactggaaatgaaatcaaagccatcgacttgacagtgtttgaaacgatgcccaatcttaaaatactactcatggataacaacaagttaaacagccttgattccaagatcttaaactccctgagatccctcacaaccgttggtctctctggcaatctgtgggaatgcagcgcccgaatatgtgctctggcctcctggctgggcagtttccaaggtcggtgggaacactccatcctatgccacagtcctgaccacacccaaggagaggatattctagatgcagtccatggatttcagctctgctggaatttgtcaaccactgtcactgtcatggctacaacttatagagatccaaccactgaatatacaaaaagaataagctcatcaagttaccatgtgggagacaaagaaatcccaactactgcaggcatagcagttactaccgaggaacactttcctgaaccagacaatgccatcttcactcagcgggtaattacgggaacaatggctttattgttttctttcttttttattatttttatagtgttcatctccaggaagtgctgccctcccactttaagaagaattaggcagtgctcaatggttcagaaccacaggcagctccgatcccaaacacgactccatatgtcaaacatgtcagaccaaggaccgtataatgaatatgaacccacccatgaaggacccttcatcatcattaatggttatggacagtgcaagtgtcagcagctgccatacaaagaatgtgaagtataatatctacccatcatcaaaaatcacatcagataagtaacctattttacatagtagaggctaaatacatatctaatttttaccaatggtgacattaagcctaattttccaaactaagtggagacttagtttttgaagtgttgaagtatttttaatttttttaaatgaaaccatattttaagtgttaaatgaatcaatgctcacattaatttgcactcctgttggaaagtctaaaatgcttacttcaaaataagaaatgtacgtaattatatacaatcgtgtgtaaacctttacactaaggtctccatatactatttttttctactgaaaacaatttagaaagaagctattgggcagaaacagatatagatcaatacctgtttgatcactgctctccatcccatgtaccacaactatcttgctgcttaaaaggagacttagtaaagttctcttgtatgataatttggtatttactcaaatcttcaatttcttgccagggtgggaagtagaatttcatgtatgctgaagactggtaaatattaaacattctccttccagagtttctgcctgggttagtagatattatcaaagtccatatcatgaattcagaaccctttaatgtaattctaataagctgagtgactctttaatatatttacacaatgaatccaagtgactgtgaaaaggtctcattacaatgaaaccaatcctaaataattacaccaacttcttatacatttctcgtttgacttataatggacatgatttttgtggcatttagacaactgttttaaactagcattaaactgtcattgtactaattaatgtactaaatcctatgtttacattaatatgtgaaaaaagatttagaagatattttggagataaacaagacaaactgagtcaatttaacaatcctgacatgctccctccaatttaaaagcacacacacacacacacacacacacacacacactctcgcgctctctctctcaactatcatgatcaaagatgccttgacaaaggggtttaaacctctttcttctgctttttcctgatcttcaaacctcaaagagccaagttaaaaataattggctagcaacaggcttaacactgattcttattgtattacaaaggaaccatgaaaaaaaacactttctaactattatataatacatttcgatctttcaataaagatacgcattcacgctgtaagtgtagttcagtgtaggtgaagaaaacagcaccactgagatgaatctcatggcagaacaactcgacatgcctatgcagccacacagtggtaacttgaaggcagcacagaggtgagggattaaaaggaaaggcagattttgaaatctgactctcaggttagctggagttacaaggcagccaacaatgattatacacaatctgcaccaaacagggaaaggacctgctgctgaaaagggaagaggggtagatcctccaatgtaaatataaacatgccatagttaacaaatgataaggatgccacatttttcatgcagaaaagaaccacaggtattcagtttcttgtattatgatttctaaagaaaacctattaaatatttggaatttagatgcaagctactcattcacacagaacttttccataaacattgttccacatattgaaaaaactgtaaaattatagcactaacttgattttagaaaatgagcattttttacaactgccatttactgtatgtagaaaaaagacataaaaccttagagaaagccactaccatttttcaagttatcttttccccaacatcaacatcaacatgatatccttcattcagggcatattttttcttcccaggatcaaactgaaaacatgttaaggctatagtttagccagtaagatttaatcacaatttttcttctttaatactaagagatgggtaccttagtacccttcacctaacatctctcggtaaaaagcagacaagatcacaaattacagtaaaaatgtgctcttttttaaggtgggcagattagtttgtcaaagtctcagcccagttcaattcagttgatctcgagtggtgagtattttgtctcttgttaaaccagaccctgggcttgtctgggcagagacagaagctgatttaacagcatagagcacagcgccctacttccccacagacaggctgaattagaagcccctattacaaataagagcaccacgagctaaaatttaccaacccatttatcaggatgaccattgccatttgtcaggtgacagacagcttggtcacaacacaactgtgtcctgagcacacaagattccatcagccctgaaggacagcagaggagtattttccatcatttcaaaccacaaacaaaattaagatttaaactgtgggatgggtaagaaatccccttctttggctgggaatctccaccttaatccttaaaggaccataactggcaaaatccttagtgtacggacaaaagcaaattggaaaagccagccatttactaattcagaggaacagcatagccaaggctagcgaggcatactttccagttgaaaaaaatcaaaattttttgccttccatttttctgggtaatgtcctttaagaaaagtgaatgacagtagtaccaaaaaggtattttcctttctcatttaaaagcaaaaacctccctttttaattgcctgtagaaggcaagattttctttcatttttgtccatttgtgtttcagaatcagcacaggtttgaagattagactgttagtcatctgtgctttctttaccaactggctagaacggaacagcatcacagcaacgctgcggatcttggttacacagtgtcagagcttttgttttttgatggggttttatcctcttcaccaccactacccactccattttttttctatttttaagattagaggaaaatgaccattaagaaccagaaaaataattaatctctctggaaaaaggaaagctaaagaagactatgataccatacccatctagaaaccaagaactagtttgaaatcgtttatattcatttctgtagcatgacagggatttcaatcacctttctgaaaagagtgggctgataaacttgtaaatccacacacaactctgagaatacccactgccagcatcaaaaagcaaagatactaattttttaagccaaaaatctgtactaacacatgtaatttcttaatgtgcctaagttaatttctgtatcaattcaataaatggaattgactgaacttcccaacgccactaattattaaaatccatctgcttattctaatgctagtcaccaagagctagactccatctttccaataaaaatgagccctatgtagcactaggtttgaattctaaaattcaaaacagggcatttcatttttcttaaggcacacttcctacacacagctatcaggggaaaaagctataaatgtcctgttctttttctgaagtgtggatatcaatataaaatttgttaaagaatatttttaacagctgacttacatgatcgttttcctaatacaggaatacagcgacagacctatctgaaaagtctgtttgggggcatacttttcatatcttattgactaaagcccttgagccagg

SEQ ID NO: 90958 - DNA, 397 bp, Homo sapiens
taggaaactaataaaatcctgctgcatataataactggaaagaaacacaaagaggatagcagtgtcaaatgaagggtactctaaatgggagacatatgagcatatgtataagccaatatgaaaaaaatcagcagattgaatattattcaagagatgaaggctactctagaaaactgtgacaatgttacagcaatacaaattatcttgccacttcattttttatttaaatatgtgatagtttaagcagtagtgcctaagataatgctctactcagtagacactcatatgtgtgattattggatgaacaacaactctgagcttggaaagcctggttgaagctgccattgcaactggccgtattaagtcctttgtatcctcactgttccatactagctca

SEQ ID NO: 90959 - DNA, 2460 bp, Homo sapiens
gggaaggcgagcagtgccaatctacagcgaagaaagtctcgtttggtaaaagcgagaggggaaagcctgagcatgcagagtgtgcagagcacgagcttttgtctccgaaagcagtgcctttgcctgaccttcctgcttctccatctcctgggacaggtcgctgcgactcagcgctgccctccccagtgcccgggccggtgccctgcgacgccgccgacctgcgcccccggggtgcgcgcggtgctggacggctgctcatgctgtctggtgtgtgcccgccagcgtggcgagagctgctcagatctggagccatgcgacgagagcagtggcctctactgtgatcgcagcgcggaccccagcaaccagactggcatctgcacggcggtagagggagataactgtgtgttcgatggggtcatctaccgcagtggagagaaatttcagccaagctgcaaattccagtgcacctgcagagatgggcagattggctgtgtgccccgctgtcagctggatgtgctactgcctgagcctaactgcccagctccaagaaaagttgaggtgcctggagagtgctgtgaaaagtggatctgtggcccagatgaggaggattcactgggaggccttacccttgcagcttacaggccagaagccaccctaggagtagaagtctctgactcaagtgtcaactgcattgaacagaccacagagtggacagcatgctccaagagctgtggtatggggttctccacccgggtcaccaataggaaccgtcaatgtgagatgctgaaacagactcggctctgcatggtgcggccctgtgaacaagagccagagcagccaacagataagaaaggaaaaaagtgtctccgcaccaagaagtcactcaaagccatccacctgcagttcaagaactgcaccagcctgcacacctacaagcccaggttctgtggggtctgcagtgatggccgctgctgcactccccacaataccaaaaccatccaggcagagtttcagtgctccccagggcaaatagtcaagaagccagtgatggtcattgggacctgcacctgtcacaccaactgtcctaagaacaatgaggccttcctccaggagctggagctgaagactaccagagggaaaatgtaacctgtcactcaagaagcacacctacagagcacctgtagctgctgcgccacccaccatcaaaggaatataagaaaagtaatgaagaatcacgatttcatccttgaatcctatgtattttcctaatgtgatcatatgaggacctttatatctgtcttttatttaacaaaaaatgtaattaactgtaaacttggaatcaaggtaagctcaggatatggcttaggaatgacttactttcctgtggttttattacaaatgcaaatttctataaatttaagaaaacaagtatataatttactttgtagactgtttcacattgcactcatcatattttgttgtgcactagtgcaattccaagaaaatatcactgtaatgagtcagtgaagtctagaatcatacttaacatttcattgtacaagtattacaaccatatattgaggttcattgggaagattctctattggctccctttttgggtaaaccagctctgaacttccaagctccaaatccaaggaaacatgcagctcttcaacatgacatccagagatgactattacttttctgtttagttttacactaggaaacgtgttgtatctacagtaatgaaatgtttactaagtggactggtgtcataaactttctccatttaagacacattgactcctttccaatagaaagaaactaaacagaaaactcccaatacaaagatgactggtccctcatagccctcagacatttatatattggaagctgctgaggcccccaagttttttaattaagcagaaacagcatattagcagggattctctcatctaactgatgagtaaactgaggccccaaagccacttgccttaccatcctcctgatagcctgtttccaaatgtgccattttgtgggaattttgagaaaaatagagcaaaatccaacatgacctggtggtgagagacccacacattttatgagagtttggaattatttgtagacatgccccaaaacttatccttgggccataattatgaaaactcatgatcaagatatattgtatatatacacatatatctggcttgtcaggctacaaggtaggctgcaaaattaaatctagacattcttttaatgccaccacacgtgttctgcttctctcttttaaagtatttataaaaatataaattgtacattttgtaaaatactatgtttgatttctctacttgtcatatcactaaataaacacgattttattgctgcgtgactctgtattactttggtgcataaaagttgaacattgttgtttactgaaaataaaattaaaatttatgaatt

SEQ ID NO: 90960 - DNA, 1221 bp, Homo sapiens; identical to SEQ ID NO: 59449

SEQ ID NO: 90961 - DNA, 2062 bp, Homo sapiens
  misc_feature (1)...(2062): n = a,t,c or g
tagtccgngnnnnnaattccggcctcccaagtgctgggattacaggcgtgagccaccacgcccagccagggatgctgaagtttcataagaaaagtgatcttgctattgggaaagggaagaagattggaaaacagtgtcataggatagtggtagttgagcccaggagtgggaaactactaaaaaaggcctgttatggatcagctttggggataaagcaaaacagcataaccaatacgaataaatgcattgtccacaaccaccagaagatagaagcattgctgacagtcatacgtattgttcgtgttggccttccctgttctttgaagtggaagaagagaaagggtgtctgaaacctaaaccaggtctcagtgaatgatgtcagttctcttaggctggtcctgaaagacacactcctctaccaaagtagcttcaattccacagagaacagaattggagatgacaagggagaaaactagaaagcaggtaaagcatagtcacaacagtagccatagtccagacaatacttctttgagttagatgtcatcagaaagcagaccagactgggaacacagtgcccacacctgggtctctgagcttaggtgtcttacagttctttcctcacttttctgtctttggtctcatcccacccaggtatcgaaggatgatcgcagtgatgtggagagcagctcagaggaagaagatgtgaccacctgcacaaaaagtccctgtgacagtagctccagcaatggtgccaatcgggtgaatggtcacatgggaggcagctactgggctgaagagtaaggtggttgctatagggacttcagcacacatggacttgtagggccactggcaacatactcctcttggcccttcccatatctactcttctgtgattgggagactgcaaggcactgaggagtatcaaagaagcaaatattttcactttgaaagaaaactgccattttgtatttaatagcctccaggttctttcagtaatgttatttgctctgtgtgtttttgtgtgtttgttgatgtgcgtttgtgcatatgcgtgagtttcattgccggggttggggcacaattgtggactggggccatgaggccttccctggtccccactgaacccaccttagttccacatttggctgcatcttgaattatgccaactccagacttctccttcttttttgcccttggctcttgacactctaaacccctggaccatctgaatggagcagccaagttcagtcccacatttctgtactgttcctctttcacagctggaatatgtcacatgatgaagttgtatagaaacagaaccatggatggatggccaggattgccgtggtccctagctagatccccttcctatcaatcacctgatagcaacagggacagctgccaataccctgctctttactcaatggtacccagggagggagcatgggaagagggtgagctgagggctggaggagggcaacagccactgggtgagctgttcacggtcttatactattgtttgtttgtgattaaaagtgcttcaacccacctctactgtctcaacctcttcagtgactctatccgcagtttcctgaatccataagctaattaagagcttttccaggtctgattcagaaggccctggacaccaaatttttcctttctgtgcatggtaggaagagtcagccagggtgcttacattttagagctttatgttttttaagaaaaagaagaatctcttgaaccccggaggtggaggttgcagtgagctgagatcgtgccactgcactccagcgtgggcgacagagtgagactccatctttcccctgatcaaggctttcaaagcaatccgtgcaattaggtaggaccagatgacatgcagaagctgtagggtcagcagcaggccattgaggagccaccatgaagcataaggcccgattatctcccaactctcaaagagggtcgtgttcagaatccagaatggatagattcctagtcgtgtaaccataaaaacagcactgaagatcacaaaaagggtgtcacagagccggaattccacggc

SEQ ID NO: 90962 - DNA, 662 bp, Homo sapiens
gtttcttaaaagacaaatctgactgtgtaggtgcatttgtataaaaaatataactccccattgcctctgggataaagtcttatctcagtttacatatattcttgataacctctccaactttatgtctcaccacccccactcacttcgtaattcgtgccttatcagaatggacctgttatactggcagttcaccatatataccattacattttgtttctcccatctctcaggtagacttacactttcggcccagcacatcagtcatcgcccttgcttgctttcctattcactcctgttctggaaggtgcaccaccttttcttggaaggcttcccttgctctcccaggctagatgagatgtccttccatcagttcccacagcaccctgtgcatgtatctgttgtgcacttaccaatagtatacaagggatctatgacccaagtctctccccactagcttgtaagctcctcacagacaggaaccatgttttgtctttgtactccagtgcctagtatataagagatactcaataaataaatatttgtcaaatcaactaattgattccttgtgacctaattctagagaatgggaagaaggcctgttattttgttggcctttatgggtctttaggaaagctctccaagcttggcatttgtcagggtgg

SEQ ID NO: 90963 - DNA, 1695 bp, Homo sapiens
ttttttttttttaatcagacaaagatgatttattttcatacctaaagcactttataatattctctggaaaatctaaaatcattctgttatcctaacatttttatactatcatcattttagaaaataaaaggcctgcgttatatactagaaaaatttcttcattatatgcaaaatatttatctcctctagtaaaggagattaaagaacaactgcaagaggaaggaaggtcctgaaagtgtttcatttggtatctacctaccccaaccccaagacataaagacagataaaggcactaagatgctagtatgtggctagtcctttcaataacccagtcagtccatacagataacccatgggatatattcaagccactctttgagccatcgatggtcattatttggttagttcacccaaggtaaggccataccagctgttaaaatgatgtagagattaatcaacagggctgccacttgcgaatcccctccaaggatgctgtgcaaagggtctcattggtcctgatgagtaatcttgtgactgtacatattcctgggtgcatgtccacaaatactgaggtatagcctgcatgccactaaaaataacaaaggtttcagggctggagacattgtcaaccacactgtcatgaccatctatagctccaggactcagtggtgggggaacaatatttaacggatgtccctggcagaagaagcctgtgagtacttcagcctcaaacacatagatcagcttatctgcagcagagattttcttggccttctctgccaggtttttgaggttcttggtgaagtatatgccagctccgtattttggatcgcaaggtgtcgagtacattctttgaaagccaactctgcataccacattgcagaactggtatgggacttgctgaaacagcctatggctcacaggttgcctgtgcagtttttcttccatcattttcttctttctttgaaaggcagccataaggacctcattgtctatcttctccacctttagaacctgcaaaccacatttttcaaactgtttcttttgatctagaagctcttgagttggaggcacaggacatttcagaaatatgatattttctttcatttcgtcttgggttttttgttgctgaatagtccactgtcctaacgagcgccaaaggcctcgctcctttttccttgccatttcctcctgtactttacaaagcatatcttcaatgttcataaccacctcaatgaggtcagcccgggctccttcaatctctaactctgtccttcctgggctgataatttctgtgatggagacacttgaagttttctgaagctgagacaaaatgtcatgttcctttctcccaaggtacagaatatgattattctcaatgatgtggtggttctggagactcaggattctttggatccatgcgtgggcctcatacatctcttccacgttgaatcccatcagattgatggcaggagatctagcttcaagcccattttctcttttctcctctctggttgactgggggactttggcttatttattcttcttctcccctccgttagttcagatgatcaagaatagaatgagccaatggtgggcgaccctacttattggcctgtgaatttcttactcaccactgtaattgttcaaactcagcatcaaggacctatttgccatttcagaactgaaagccta

SEQ ID NO: 90964 - DNA, 981 bp, Homo sapiens
atctactgtgtctgggcgccaatcccgacgctgggcggagcgaggcccggtccctgcagcgggcgaaaggagcccgggcctggaggtttgcgtaccggtcgcctggtcccggcaccagcgccgcccagtgtggtttcccataaggaagctcttcttcctgcttggcttccacctttaacccttccacctgggagcgtcctctaacacattcagactacaagtccagacccaggagagcaaggcccagaaagaggtcaaaatggggtttatattttcaaaatctatgaatgaaagcatgaaaaatcaaaaggagttcatgcttatgaatgctcgacttcagctggaaaggcagctcatcatgcagagtgaaatgagggaaagacaaatggccatgcagattgcgtggtctcgggaattcctcaaatattttggaactttttttggccttgcagccatctctttaacagctggagcgattaaaaaaaagaagccagccttcctggtcccgattgttccattaagctttatcctcacctaccagtatgacttgggctatggaacccttttagaaagaatgaaaggtgaagctgaggacatactggaaacagaaaagagtaaattgcagctgccaagaggaatgatcacttttgaaagcattgaaaaagccagaaaggaacagagtagattcttcatagacaaatgaaatcatgcttaccaatcaaatctcaaagcacagaattattgacttgaatcatggtttttacagttttttaaatgctcaagattttgatattatagattttattttaaaatattaaaatgcaagatagttttgagctattttaaaataaaatttataacattcaacacaaaatcatggaggtgctctaaataacttttagatttcctctctctgtgtgcattaccaatatctaagtgtaaaattaataaattgttttgaattcctggaaaaaaaaaaaa

SEQ ID NO: 90965 - DNA, 624 bp, Homo sapiens
gaaattattattttatggcgtatcttagttattttctgggaatcttgttttgcctgaggacattcttgaagttgagtttataaaggactggccacaaagtctgtcatggagtttttcatcttcagtgggctgtagcagagattattcttttatgaagagtttaaggagtgagaagactcatcttccctatcgtagttctttgtttgtaaatacggggtcattgctcttcctcatgcagctgtcactgggcacagctgtgggtgtgcatgtgtcacggagctcagcacgcacagagcaggagatgacggtgactcctggctccacagggtcgatcctgggctgccttcagtttgctgctttgtccatctagttccttgcaagtattcctaaaaatacagacattttttcccattttaaaaataatgtacttagcatcatcttggttacttacagcccagggatttgttaggttatattttcatcaccatggtaaccagggactcatttttgaaacttgtgcatgctgttagttactgattttcccttatatatgaaactgtctctgtcttttcgctgaaggatgaatatcaccttcagaaaatttttttcagaaaaaaaaaaaaa

SEQ ID NO: 90966 - DNA, 402 bp, Homo sapiens
tgcattagataattgcaaactaaatgtaacaatttggtgttaaaccatgttacatgcccacgcataattcaaaaaaagtaggaagaataatttaataaacttaagagtttgaaaccaatataagtaggctcttggcctccgaagaagccagcaaaagtactgtgcttgatagcctttacaaatcaaatgggtcagcatctgagagcatttcaaagccttcgcaaaatagagttgacacatcataatcttttaatggcataaattcccattagcatcaactgctgcatagataatgttcatgatggtgattagaaatgttaatttcttagagcaatcataattttctttaatcttctgtggcagtgtttttttaaactgcaggttatgactcattagtaggtt

SEQ ID NO: 90967 - DNA, 415 bp, Homo sapiens
aaaaaataaagcctttaatacatctagaatagattaacaattatactgactgggctgggggcatgtcagggaaactttggacccaccctaaaaaaaccttgaagggccactccctaaaaaatttacccaccaaattaaagatggggctgctaatttatacccccccgttttaccggaaaataaccttccttgagtttacgtttcttttataaaggcaggggatttgaatattttcatttattgccgccccgggcacataacatttatttattaattcccagtttcctttctttgtaggcacaggggaaaaaaaacatatggcctgaacctaacagttaggggctttaacaaaaaaaatctttcccctttcaaaaataaatgtttttttttgaaaaaaagacatacttgcttttat

SEQ ID NO: 90968 - DNA, 1517 bp, Homo sapiens; identical to SEQ ID NO: 60061

SEQ ID NO: 90969 - DNA, 509 bp, Homo sapiens
cagcgcaactaattgctgttggctcaagaaatgtggacaatacgcaggaagggacgccgtgccttacagcgaccggcagggactcggccgtccgcgagcccagccgcccgccccgctccggccaggatgttggaggcttctctatctgagatgtgcacagaaacccagacaggaccagtcggcactgtgtgctgcgtgctgcctcctgaccagtctgtgtgacaccgtcggggctcttctggccagacagctcacaatccaggttttcactggtgcctacctagcagctattgacttagtgaactttatgttcattctcttcccagtctgtggatccaaattcaagtctaattcagatcgggaagcccgagagaggaagaggaggcggcagctcaaggccagtgtgtttgccctggccctgcccgctgagcctgggcccgagctgggctctgtgggttgctgtcccgaaggcttcagccaccatccgggggccacagcggaggctgcta

SEQ ID NO: 90970 - DNA, 4191 bp, Homo sapiens
ccaaggcctccagagactgcagaaccaccagtctctggaaacgtctccttcgtcgtcctggctgacggcatgtttgcagtttgggactgttttatgcagctgattctttccaagagtctgaggtttagggtttggctccacgacaagccagctggtctggtctctgacttgggctccggtccgtacccccggggcgccctgctgtgttacagccgcccgacgcccccagacccggccaggtcaccagggcagattggaggaaagggaagaaaactgaaacgggcctcttggtctgcagttttagcggagtcgggattccacagccctgagtggcacatgccggtcaacttcccaaagtcgggctcccgtgtggggagaaatacacacgcaggaatgcacaagcatcgcgtgttcgcaactgtcgctgggaggtctggcggctgtgatgggacatgcactcactcgggcaacacgtccacaggtgacatctattcgatcagtcaacagatatttattgcgcacctacgacgctatctgccgaggggagaggagcccgcgcctcgagtccccgagccgccgcggcttctcgcctttcccggccaccagccccctgccccgggcccgcgtatgaatctcctggaccccttcatgaagatgaccgacgagcaggagaagggcctgtccggcgcccccagccccaccatgtccgaggactccgcgggctcgccctgcccgtcgggctccggctcggacaccgagaacacgcggccccaggagaacacgttccccaagggcgagcccgatctgaagaaggagagcgaggaggacaagttccccgtgtgcatccgcgaggcggtcagccaggtgctcaaaggctacgactggacgctggtgcccatgccggtgcgcgtcaacggctccagcaagaacaagccgcacgtcaagcggcccatgaacgccttcatggtgtgggcgcaggcggcgcgcaggaagctcgcggaccagtacccgcacttgcacaacgccgagctcagcaagacgctgggcaagctctggagacttctgaacgagagcgagaagcggcccttcgtggaggaggcggagcggctgcgcgtgcagcacaagaaggaccacccggattacaagtaccagccgcggcggaggaagtcggtgaagaacgggcaggcggaggcagaggaggccacggagcagacgcacatctcccccaacgccatcttcaaggcgctgcaggccgactcgccacactcctcctccggcatgagcgaggtgcactcccccggcgagcactcggggcaatcccagggcccaccgaccccacccaccacccccaaaaccgacgtgcagccgggcaaggctgacctgaagcgagaggggcgccccttgccagaggggggcagacagccccctatcgacttccgcgacgtggacatcggcgagctgagcagcgacgtcatctccaacatcgagaccttcgatgtcaacgagtttgaccagtacctgccgcccaacggccacccgggggtgccggccacgcacggccaggtcacctacacgggcagctacggcatcagcagcaccgcggccaccccggcgagcgcgggccacgtgtggatgtccaagcagcaggcgccgccgccacccccgcagcagcccccacaggccccgccggccccgcaggcgcccccgcagccgcaggcggcgcccccacagcagccggcggcacccccgcagcagccacaggcgcacacgctgaccacgctgagcagcgagccgggccagtcccagcgaacgcacatcaagacggagcagctgagccccagccactacagcgagcagcagcagcactcgccccaacagatcgcctacagccccttcaacctcccacactacagcccctcctacccgcccatcacccgctcacagtacgactacaccgaccaccagaactccagctcctactacagccacgcggcaggccagggcaccggcctctactccaccttcacctacatgaaccccgctcagcgccccatgtacacccccatcgccgacacctctggggtcccttccatcccgcagacccacagcccccagcactgggaacaacccgtctacacacagctcactcgaccttgaggaggcctcccacgaagggcgaagatggccgagatgatcctaaaaataaccgaagaaagagaggaccaaccagaattccctttggacatttgtgtttttttgtttttttattttgttttgttttttcttcttcttcttcttccttaaagacatttaagctaaaggcaactcgtacccaaatttccaagacacaaacatgacctatccaagcgcattacccacttgtggccaatcagtggccaggccaaccttggctaaatggagcagcgaaatcaacgagaaactggactttttaaaccctcttcagagcaagcgtggaggatgatggagaatcgtgtgatcagtgtgctaaatctctctgcctgtttggactttgtaattatttttttagcagtaattaaagaaaaaagtcctctgtgaggaatattctctattttaaatatttttagtatgtactgtgtatgattcattaccattttgaggggatttatacatatttttagataaaattaaatgctcttatttttccaacagctaaactactcttagttgaacagtgtgccctagcttttcttgcaaccagagtatttttgtacagatttgctttctcttacaaaaagaaaaaaaaaatcctgttgtattaacatttaaaaacagaattgtgttatgtgatcagttttgggggttaactttgcttaattcctcaggctttgcgatttaaggaggagctgccttaaaaaaaaataaaggccttattttgcaattatgggagtaaacaatagtctagagaagcatttggtaagctttatcatatatatattttttaaagaagagaaaaacaccttgagccttaaaacggtgctgctgggaaacatttgcactcttttagtgcatttcctcctgcctttgcttgttcactgcagtcttaagaaagaggtaaaaggcaagcaaaggagatgaaatctgttctgggaatgtttcagcagccaataagtgcccgagcacactgcccccggttgcctgcctgggccccatgtggaaggcagatgcctgctcgctctgtcacctgtgcctctcagaacaccagcagttaaccttcaagacattccacttgctaaaattatttattttgtaaggagaggttttaattaaaacaaaaaaaaattcttttttttttttttccaattttaccttctttaaaataggttgttggagctttcctcaaagggtatggtcatctgttgttaaattatgttcttaactgtaaccagttttttttaattaatctctttaatctttttttattattaaaagcaagtttctttgtattcctcaccctagatttgtataaatgcctttttgtccatcccttttttctttgttgtttttgttgaaaacaaactggaaacttgtttctttttttgtataaatgagagattgcaaatgtagtgtatcactgagtcatttgcagtgttttctgccacagacctttgggctgccttatattgtgtgtgtgtgtgggtgtgtgtgtgttttgacacaaaaacaatgcaagcatgtgtcatccatatttctctacatcttctcttggagtgagggaggctacctggaggggatcagcccactgacagaccttaatcttaattactgctgtggctagagagtttgaggattgctttttaaaaaagacagcaaacttttttttttatttaaaaaaagatatattaacagttttagaagtcagtagaataaaatcttaaagcactcataatatggcatccttcaatttctgtataaaagcagacctttttaaaaagatacttctgtaacttaagaaacctggcatttaaatcatattttgtctttaggtaaaagctttggtttgtgttcgtgttttgtttgtttcacttgtttccctcccagccccaaaccttttgttctctccgtgaaacttacctttccctttttctttctctttttttttttttgtatattattggtttacaataaatatacattgcattaaaaaaaaaa

SEQ ID NO: 90971 - DNA, 1236 bp, Homo sapiens
tttttttttcggttcccggggatttattttgatgcacgcacgaaacggtatctaaacttgcaggcacacacacgtctgtttttaggctcaacttcaaaagcgggtgtgcagttccataggagttctgtattcgtgtccacgttgcacccaggaaaccttagcctgaacaccaatttgaactgtcagttggccctagcttcacacaaacaggagaaaaattgtttaacccctggagctgtcaagtaacctcttcagggtacaacttttattttacacgctgcaattaagggattgcaaaccccagcagagccaccggagccgcttggcagaatctccaacctgggggaaagctcaaagccaataaaactcccaaggcgctgcggcccgagggggtggctgcctcgagcggaggcgatcccttgttggggaaaaaatctgggagtgacttcgccggtcttggtttggtggttatgtttaattgcgaaagggataatgatttctaataaaattgcacggggccaaaagggcagctcggatcgtggtagcagggttaagggagaagtgctagaagctgggccccaggcgtggcgcttggaccttgagcagtgccgggctttgcagaaggcatctctggagaaaaggaagcggagaaagaaaggaaggggaatgtggcggaattggggtaagatagggggtgttggggcaggctcgcggcggagctcgaggaaggttttatcagttcgcaggctggagtgcgctctagaagcaagttcgccgcgtagagaggcctttatacctgtgtcggagcggccggcggcagattgtggtactggcgagcaattggactattgttgatatgctaatgaggcgattaggctgttggtaaagagccagagagtagctccacttgggtgcgagaccgagaggggcatatccgttcacgccgatccatgaaaatgctttggaaattgacggataatatcaagtacgaggactgcgaggtaagcgcgacgccggctcgatcatccgtgcggtcacaggctccgagcttgaccctccctctcctcctcctctccttgcaaccagctgcgaaacgcgggtgggacaaactttccccagcgcagcgcccgtccctcggattcgcccgaagaacgcgggggagaagctgcagagagaggacgtggatgctcccttctttggtttccgaattcctccacagggactagagactacgaa

SEQ ID NO: 90972 - DNA, 475 bp, Homo sapiens
  misc_feature (1)...(475): n = a,t,c or g
agaggtnnnnntttgagacatagacagcgcggnggaattctagaaggtggccattcttaagggtgagggagcgggcaactgcacaagcaaagacgcgggtgcagagaaagtaaaggctggactctgaaaacaaagtgtaggcccacatagctggacccccaagcagggcaggtagaggaagggagctagctgaaagggaggctggggccagcaagggatcaagcaccatggccccctggcagggttagaggacagagaatcccactctgagggaacacacagtcataccctcaggaagcctcaggaatctggtggagggaagatggctctcagggaagacaaagacatgaagacagagaagcaagccttgattgagatcttttggaaatctgagttgttccctatggtaactggacttaccttgaccttgaccttgaccttgaccagcatacaatacccttaaataaagcagctn

SEQ ID NO: 90973 - DNA, 1412 bp, Homo sapiens
tcgggccctggaggactgcagtcgagggagcgtctcaaagagcagtccggcctccccggagcccggcggggatccgcagaccgtgtggtatgagtacggctgtgtgtgactgtctcgtggttgagctcgcaaacctgaaaactactgacgcgccttccgactctcacggccttttctcttgcttgcctgcggtgccaggagagggtttggaatgaggaaaggggttcccacgcatttctgctgtttgttctgtgaatggaaacactgtgccaagccccaagaggattacgcttccaggtgtgtaacgtgttttctgtgtctgccgcttccagcagctgatatctttggaacaaataatccacgtcagcatggggaccaattcggatgcaatgacaaactgacttcccccaaagcagacactactccagtatgtcccagtagaacactcatttgcaatgtgttgagctccgttaagcacacacacactcacacaacaggctcacgaggctcaggcctggcgggtcagaaagcccactccctctcccaaggccactggatcccaggagaagcccagactggcgatactacaaaggtctccagggcctggcagaccccagagtcaggcctgctgttaaaaagtgagagtgctgctgttccattcctggggtcccaagcacttccctttaccccaggacccagggcagcctgcagggcagctggcggtggccttggccatttgcccccagcctccagctggctcctgagctctgcaccagggggtttggggaccacacaggcacctgccttcctagatttccctggctcacttttctgcaaacactggatctgccaggcctggggattggggggcaggaaagaggcccccatccagccccctccaggccagtgtgcacagtgcaccgaggggtcatccgcacagagcgaggtgcaagctcgatgtgtaacctggctgcggcacccgacatccccggtctcggggtgttgatttatttctgaataactttttgggtatagaaaccaattttttttaatatatgacatgtatatgtacacactcatgtgaaatatgtatactttggggggatctatttatgttccagtgggagtcactctcttctgtcgggaatcttatctgctgctttgtgtctttggtcagattcctgacaatttagtttcctgttgtaaaggtgcttttcctggggtgaactaaacctattgattttttttttttaagatttttttttccttttgatttaatatactgagaaagaaatgggagacttttgaatgttaacaagatccattttaggagtgtttggggttgtgtattaaatagccattcattctggaactcaaggacaggactgtaataaaatgggtcgacgcggccg

SEQ ID NO: 90974 - DNA, 3575 bp, Homo sapiens
cagagcagcacctccatcaggtacaacctcgaggagctctaccaggctgtggaaaatctctgttctcacaaagtctccccaatgctctacaagcaactgcgtcaggcctgtgaagaccacgtccaggcacagatccttccgtttagagaagactcactagatagtgttttatttttaaagaagattaacacgtgctggcaggaccactgcagacaaatgatcatgatcagaagcatcttcctgttcttggaccgcacctatgtgctgcagaactccacgctgccctccatctgggatatgggattagaactgtttagaacccatattattagtgataaaatggttcagagtaaaaccattgatggaatcctactgctgatcgagcgcgagaggagcggcgaggccgtggaccggagcctgttgcggagcctcctgggcatgctgtctgacctgcaggtgtataaagattcatttgaactgaaatttttggaagagactaattgcttatatgctgccgaaggccaaaggttaatgcaggaaagagaggttccagaatatcttaaccatgtaagtaaacgcttagaggaagagggagacagagtaatcacttacttggaccacagcacacagaaaccactgattgcttgtgtggagaaacagctgttaggagaacatttaatagcaattctgcagaaagggctcgaccacttactggatgagaacagagtgccggacctcgcacagatgtaccagctgttcagccgggtgaggggcgggcagcaggcgctgctgcagcactggagcgagtacatcaagacttttggaacagcgatcgtaatcaatcctgagaaagacaaagacatggtccaagacctgttggacttcaaggacaaggtggaccacgtgatcgaggtctgcttccagaagaatgagcggttcgtcaacctgatgaaggagtcctttgagacgttcatcaacaagagacccaacaagcctgcagaactgatcgcaaagcatgtggattcaaagttaagagcaggcaacaaagaagccacagacgaggagctggagcggacgttggacaagatcatgatcctgttcaggtttatccacggtaaagatgtctttgaagcattttataaaaaagatttggcaaaaagactccttgttgggaaaagtgcctcagtcgatgctgaaaagtctatgttgtcaaagctcaagcatgagtgcggtgcagccttcaccagcaagctggaaggcatgttcaaggacatggagctttcgaaggacatcatggttcatttcaagcagcatatgcagaatcagagtgactcaggccctatagacctcacagtgaacatactcacaatgggctactggccaacatacacgcccatggaagtgcacttaaccccagaaatgattaaacttcaggaagtatttaaggcattttatcttggaaagcacagtggtcgaaaacttcagtggcaaactactttgggacatgctgttttaaaagcggagtttaaagaagggaagaaggaattccaggtgtccctcttccagacactggtgctcctcatgttcaacgagggagatggcttcagctttgaggagataaaaatggccacggggatagaggatagtgaattgcgcagaacgctgcagtccctggcctgtggcaaagcacgtgtgctgattaaaagtcccaaaggaaaggaagtggaagatggagacaagttcatttttaatggagagttcaagcacaagttgtttagaataaagatcaatcaaattcagatgaaggaaactgttgaggaacaggttagcaccactgagagagtgtttcaggatagacaatatcagattgatgctgctatcgtcagaataatgaagatgagaaagactcttggtcataatcttctagtttctgaattatataatcagctgaaatttccagtaaagcctggagatttgaaaaagagaattgaatctctgatagacagagactatatggagagagacaaagacaatccgaatcagtaccactacgtggcctgacgcatctgcagacggttccccttcatgaaacactagaatgtaccctcagagcaggaagcacacctgtgccatttctgggactctgattgatccagctgtggacattggaaggcgaaggaagggaggtggctcctgggtcatctttcacaaggctcaagacttcaacctgcagatgtatctttttccctccagtttttcctctagttcttttaggcatttaaattgtttctgttactctgtgcaaaataactttgagattggacaagaagatgttactaaagagaagttcctttaaaaggtcttgttcttgtgtcaaaaagctgcaagtttggtttgttctcgtgtgtgatcatgagtgcacaatgaagaagaccctagatgctgcattttttagctctgaagattccttaggtatccctgaagacagctcgctcagatgatcagcatttagagtgaaaacaagggcccttcatgggtgaacattagaaagagccagggttcaaagctggcgaatggatgacgcaccctagccactggcccctctctgtttcatgtatttccaaaagttgtaaactttgatggctgatttttcgtaagtcaggtttctaagtgagctccctgaggtgccaaggccatggtgtccgccctgctgcgtctgttcgtcagctgagttccttgtgaatctctgttttagggtttggggctagtgtgtttgtgtttccattctaagattgagtctggcagtccctgtttttttgcattggggtaactgctctttgattttttttaattgcagtatttgtgtgattgcaataataaagtttggtttggtttttacagtcatgcgcagggacgatccttgttctctgctgtaaactgtaaaaagtttatggagacttaaagtcttgatgttgtgaagcagaggttattttgtggaaagattaaaaggattttgttggtacctggttttgtgttgtgtatatatacatgaggttgaacagtgaaaggaaagttcagtagtgatgttagaagggtaactatgacaaagatacttttgagataacatttaaaagtactttatattttacataatagcatgtttcattttgattaaaagctaccaaaggaattttgatcatggcataagtgtttaaagcaatattttctggaatataccaagtttatataatttgattttgtgctaaattattaagagtctctttttgaaacatgcgggtttgaaatatgacacccttgtgggtttcccatattaaaatccctcactctttaattgtcatttctatctttgaaaattttcatttatgagttcccatgatatgtggtctaagaaagacccaaacagatttctatttttttttcttataaggttcgttgtgtctagagattgttaatattgtaatttaaatgtagacttactttgaataaaattagtttaattggccttaaaattacattaataaaactttgtgatatgcaaatgaaaaaaaaaaaaa

SEQ ID NO: 90975 - DNA, 1628 bp, Homo sapiens
ggtggaattccacccccagcgggcgcgggccggagcacgggcacccagcatgggggtactgctcacacagaggacgctgctcagtctggtccttgcactcctgtttccaagcatggcgagcatggcggctataggcagctgctcgaaagagtaccgcgtgctccttggccagctccagaagcagacagatctcatgcaggacaccagcagactcctggacccctatatacgtatccaaggcctggatgttcctaaactgagagagcactgcagggagcgccccggggccttccccagtgaggagaccctgagggggctgggcaggcggtgcttcctgcagaccctcaatgccacactgggctgcgtcctgcacagactggccgacttagagcagcgcctccccaaggcccaggatttggagaggtctgggctgaacatcgaggacttggagaagctgcagatggcgaggccgaacatcctcgggctcaggaacaacatctactgcatggcccagctgctggacaactcagacacggctgagcccacgaaggctggccggggggcctctcagccgcccacccccacccctgcctcggatgcttttcagcgcaagctggagggctgcaggttcctgcatggctaccatcgcttcatgcactcagtggggcgggtcttcagcaagtggggggagagcccgaaccggagccggagacacagcccccaccaggccctgaggaagggggtgcgcaggaccagaccctccaggaaaggcaagagactcatgaccaggggacagctgccccggtagcctcgagagcaccccttgccggtgaaggatgcggcaggtgctctgtggatgagaggaaccatcgcaggatgacagctcccgggtccccaaacctgttcccctctgctactagccactgagaagtgcactttaagaggtgggagctgggcagacccctctacctcctccaggctgggagacagagtcaggctgttgcgctcccacctcagccccaagttccccaggcccagtggggtggccgggcgggccacgcgggaccgactttccattgattcaggggtctgatgacacaggctgactcatggccgggctgactgcccccctgccttgctccccgaggcctgccggtccttccctctcatgacttgcagggccgttgcccccagacttcctcctttccgtgtttctgaaggggaggtcacagcctgagctggcctcctatgcctcatcatgtcccaaaccagacacctggatgtctgggtgacctcactttaggcagctgtaacagcggcagggtgtcccaggagccctgatccgggggtccagggaatggagctcaggtcccaggccagccccgaagtcgccacgtggcctggggcagggcactttacctctggggacctgggttctctttgtgaagctagggagttataggctgtacaaagcccccactgcctgtcggttgcttggaatccattgacgaagggggacattaccaacctgtaatccaggacagggggtggaaaggggcttgtaggcgtacccacaggctcttgtaaaaggaacccgcctcccaggcgggtaccccctctccgtccct

SEQ ID NO: 90976 - DNA, 422 bp, Homo sapiens
atggggctgagggactggctgagaaccgtgtgctgctgctgcgggtgcgagtgcttggaggagcgcgccctgcctgagaaggagcccctcgtcagtgataacaatccatattcctcatttggagcaactctggtgagggatgatgagaagaatttatggagtatgccccatgatgtgtcccacacagaggcagacgacgacagaaccctgtacaatttgatagtcattcgtaatcagcaggccaaagactcagagataatccctcttcattttaagtagaagcagcataagatgatgtcaattggtgcgaactgaaaggaaagagacaacagtcatcgtattcaaagaattcattttgccaagaagctgccacttccaaggagtggcagaagctcaactatgatatccataccctgcggcag

SEQ ID NO: 90977 - DNA, 2188 bp, Homo sapiens
tatttcgtgaaggccgtttcggttcttcgtgcgcggtagccgccccacttgcgggattccaaggcctcatcgagtgcgggtatctggctgtggattcgccgccgtcctgctggacgcctggaggctcgaaccccgccgcccccctaccccaggctttactcccaccccggcttccgcccactgtgctgcccttcctcggacctgggctgtcgggagagctggagatgttcacccttcctcaaaaggacttcagggctcccaccacctgtctgggccccacctgcatgcaggacctgggcagtagccatggggaagatctggaaggagaatgctccagaaaactggaccagaagctgccagagctccgtggagtgggtgatcctgccatgatctcctctaatacctcctacctgtcctctagaggaagaatgattaaatggttctgggattcagctgaggagggctacaggacctaccacatggatgagtatgatgaggacaagaaccccagtggcatcattaacttgggcaccagtgagaacaaactctgctttgacctgctgtcctggcggctgagtcagcgcgacatgcagagggtggagccatccctgctgcagtatgctgactggaggggacatctgttcctccgggaggaagtggccaagttcctgtctttctactgcaagagcccagtacccctcagaccagagaatgtggttgtcctgaatggtggtgcctcgctcttctctgctctggccacggtgctgtgtgaggccggggaggctttcctgatccccaccccttactatggcgctatcacacagcacgtgtgtctctatggcaacatccggctggcctatgtctacctggacagtgaggtcactgggctagacacacgccccttccagctcacagtggagaagctggagatggccctgagagaagctcactctgagggtgtgaaggtcaaaggcctcatcctcatcagcccccagaaccctctgggtgatgtatactcccctgaagagctacaggagtacctggtatttgccaagaggcacaggctgcatgtgattgtggatgaggtctacatgctgtccgtgtttgagaagtctgttgggtaccgcagtgtcctaagcctggaaaggctccctgacccccagaggacccatgtgatgtgggcaaccagcaaggacttcgggatgtctgggctccgctttggcacgctgtacacagaaaaccaggatgtggccactgccgtggcttccctctgccgctaccacggcctcagtggcttggtccagtaccagatggcacagctgctccgggaccgtgactggatcaaccaggtgtacctgccggaaaaccatgcccggctcaaggctgcccacacctatgtctcagaagagcttagggcattggggatccccttcttgagtcgtggggctggcttcttcatctgggttgacttgagaaagtacctgctcaagggcacctttgaggaggaaatgctgctctggcgccgctttttggacaacaaggtgctgctgtcctttggcaaggccttcgagtgtaaagagcctggttggtttcgctttgtcttctcagaccaggtccaccggctttgcctggggatgcagagggtccagcaggtgcttgcaggcaaatcccaagtggcagaagacccccgtccctctcagagccaggagccaagtgaccaacgcaggtgagctggtcattgtctcgtggccagagggcccagcagccactgtggacctggggcgttctggggctgcagaagactgactgtggatgtgccatttgccaggaaggtatctaacttggctttgtgcctgaagaactgtttcttgtctttcgctgtagcagtgggaaactccttaagctgtggttcagcctgggccctccctctctcctattaaacaaaactaggagagtccatatgtctccattgtgagttatttagaatggaggagtcgtgactgcttctaaccagagcctcagcccccctgaggatgtgaaaagaaaacaaacaacttgtaccttctttctgatatcaccgtcattcctctttctttgtcaccaaggaaacgagtcaaaggaacagcacatacaggagagtttgtagaaaaataaaaaaaagtgataacttccaaactcaaaaaaaaaa

SEQ ID NO: 90978 - DNA, 1297 bp, Homo sapiens
gcacgagccggaaaggaggcccaaagcgcgggcggcgaggcaagatggcggcaaccaagaggaaacggcgtggaggctttgcagttcaggcgaagaagccaaaaagaaacgaaatagatgcggagccgccagctaagcggcacgccacagcagaggaggtggaggaagaagagagggaccggatcccaggccccgtttgcaagggaaagtggaaaaataaggaacggattctcatcttttcttccagaggaataaattttagaacaagacatttaatgcaggacttgagaatgttgatgcctcattctaaagcagatactaaaatggatcgtaaggataagctatttgtgattaacgaggtttgtgaaatgaagaactgtaataaatgcatctattttgaagctaagaaaaaacaggatctctatatgtggctttcaaattcacctcacggaccatctgctaaattccttgttcaaaatattcataccctcgctgaactgaagatgactggaaactgtttgaaaggttctcggccccgtttgtcttttgaccctgcttttgatgaattaccacattatgctttgttaaaagaactcttaattcagatctttagtacaccacggtatcatcccaaaagccaaccatttgtggaccacgtgtttactttcaccattttggataataggatatggtttcggaactttcagatcatagaagaagatgctgctcttgtagaaataggacctcgttttgtcttaaatctcataaagattttccagggaagttttggaggaccaactttatatgaaaatcctcactaccagtcaccaaacatgcatcggcgtgtcataagatccatcacagctgcaaaatacagagagaaacagcaagtgaaagatgtgcaaaaactgagaaagaaagagccgaagactcttcttccacatgatcccactgcagatgtttttgtaacaccagctgaggagaaaccaatagaaatacagtgggtaaaaccagagccaaaagttgatttgaaagcaagaaagaaacggatttacaaaaggcaaagaaaaatgaaacagaggatggacagtgggaaaacaaaataagtcaatggaaacctgatttgtttttcagttactttatatttattttgtattcaatgtgtaaatacttttattatctaatactatcttacgtctaattagtgtagcatttacaagaaagaaaaattaagatcttaaaatcagtgattatctttttctaaataaaatatcaccagaattcatcaaaaaaaaaa

SEQ ID NO: 90979 - DNA, 1218 bp, Homo sapiens; identical to SEQ ID NO: 58650

SEQ ID NO: 90980 - DNA, 1139 bp, Homo sapiens; identical to SEQ ID NO: 59780

SEQ ID NO: 90981 - DNA, 798 bp, Homo sapiens
taccgctgcgagaagacgacagaagggtacggctgcgagaagactacagaagggtacggctgcgagaagacgacagaagggtacggctgcgagaagacgacagaagggtacggctgcgagaagaccacagaagggtacggctgcgagaagacgacagaagggtacggctgcgagaagacgacagaagggtacggctgcgagaagacgacagaaggggctcgcgatagccagccgcggctgcccttgcgcttcccgagctggcggggtccgtggtgcgggatcgagattgcgggctatggcgccgaaggtttttcgtcagtactgggatatccccgatggcaccgattgccaccgcaaagcctacagcaccaccagtattgccagcgtcgctggcctgaccgccgctgcctacagagtcacactcaatcctccgggcaccttccttgaaggagtggctaaggttggacaatacacgttcactgcagctgctgtcggggccgtgtttggcctcaccacctgcatcagcgcccatgtccgcgagaagcccgacgaccccctgaactacttcctcggtggctgcgccggaggcctgactctgggagcacgcacgcacaactacgggattggcgccgccgcctgcgtgtactttggcatagcggcctccctggtcaagatgggccggctggagggctgggaggtgtttgcaaaacccaaggtgtgagccctgtgcctgccgggacctccagcctgcagaatgcgtccagaaataaattctgtgtctgtgtgtgaaaaaaaaaa

SEQ ID NO: 90982 - DNA, 393 bp, Homo sapiens; identical to SEQ ID NO: 58764

SEQ ID NO: 90983 - DNA, 1708 bp, Homo sapiens
ttttttttttagtatttatgcttccattttattgtttttaaggaattaaactgccacctcagtagtcttaaggagcaatataatggaaacatacatacatttaatttagacttatgtccatcatagcttcaaaggcttccctgaaataaggctgggattcacatctttttccgtaaggaaagaaacactaacagtaattttgttatccttctacccacccaccctcattcaaacaattgatgaattcaagtctaacacgatttaaaacttttgtctgctacaacattcatctgatatgcctccctgcataacatagatttcttaaacctaattgaaaataaatcattttttaaaaactctacaagggttctcttaattcaaaattttatcatgatactgattttctcgtccaatacataggctaagtggtttcttaccacattcaactctagtgactttcaataaaagcaggatagctcttcataaatagttgagaagctctaaagtgattttggctattttcttattacatggaacaaagaatggtttggatttttaacagtaatattttaatagctcctaaacagggggatgaaaaggaatcaagtttgcaccagtccaagtacctacagtaatatgatagaagcactcaccaccatttcacactatcactcccatgcttttaataacaagcatttctcactagaaatattgcattaacactggactttcaaactgctaaatgtagaaaatcacttgcctgacttaaaacaaaaaagtttattagttatttttggccagtcaaggttgaaacggccattttgttatttctaacttctgctctagggttcagaaatgattttgcatctgatcattcaagatgagaatttgtttcacctgtacctgacagaataaaatggtaaattagcaatcagatcaccctttgtcaaaagaagtatgttctaaatgtatacactacaaactatctaataaatgatatctgcatactacatatttcatgttttattatgcaccattttagtggggaggaaaaacttcacagggatttattcaaaggatataaataatatcctaagaatgttgatttatacatatgagttctgtataaactgttaagtggtcatcttagctaaactataacaagcccctataatgtaaaagctgactcgaaaggcaccatgtaaagcactgaaatccacaatttagctgttatttcctcttctccaatacaaaattatctggtagtcttcactgttgactccatgataaaatgttccaaattcagactgctttaccgacaaaaggaataggaaataaaagtttttaaatttcaagttagaggaaaaatcctatcacacagcaatgaaacctgagcaaatgcaaatttgtgattacaagaatatgtccttcattaatatattattcaaattcctccatggcattcaaactgtagttgaaaatcctataaacaagaacccacttaaacacagcatcaaactctaccatgaaatgaagaattacataaagcctattcagccctattcagtttaagacaatgaacaaaacagaacacatttcatctaaagaacaccatttaaacccatttaaacagttctataaaataatgttacttaagatcagtatgtgtggtgcatatgtgattccgaccattcagcggacgcgtggg

SEQ ID NO: 90984 - DNA, 1309 bp, Homo sapiens
cccacgcgtccgcggacgcgtgggatggcgtgatgtctcacagaaagttctccgctcccagacatgggtccctcggcttcctgcctcggaagcgcagcagcaggcatcgtgggaaggtgaagagcttccctaaggatgacccgtccaagccggtccacctcacagccttcctgggatacaaggctggcatgactcacatcgtgcgggaagtcgacaggccgggatccaaggtgaacaagaaggaggtggtggaggctgtgaccattgtagagacaccacccatggtggttgtgggcattgtgggctacgtggaaacccctcgaggcctccggaccttcaagactgtctttgctgagcacatcagtgatgaatgcaagaggcgtttctataagaattggcataaatctaagaagaaggcctttaccaagtactgcaagaaatggcaggatgaggatggcaagaagcagctggagaaggacttcagcagcatgaagaagtactgccaagtcatccgtgtcattgcccacacccagatgcgcctgcttcctctgcgccagaagaaggcccacctgatggagatccaggtgaacggaggcactgtggccgagaagctggactgggcccgcgagaggcttgagcagcaggtacctgtgaaccaagtgtttgggcaggatgagatgatcgacgtcatcggggtgaccaagggcaaaggctacaaaggggtcaccagtcgttggcacaccaagaagctgccccgcaagacccaccgaggcctgcgcaaggtggcctgtattggggcatggcatcctgctcgtgtagccttctctgtggcacgcgctgggcagaaaggctaccatcaccgcactgagatcaacaagaagatttataagattggccagggctaccttatcaaggacggcaagctgatcaagaacaatgcctccactgactatgacctatctgacaagagcatcaaccctctgggtggctttgtccactatggtgaagtgaccaatgactttgtcatgctgaaaggctgtgtggtgggaaccaagaagcgggtgctcaccctccgcaagtccttgctggtgcagacgaagcggcgggctctggagaagattgaccttaagttcattgacaccacctccaagtttggccatggccgcttccagaccatggaggagaagaaagcattcatgggaccactgaagaaagaccgaattgcaaaggaagaaggagcttaatgccaggaacagattttgcagttggtggggtctcaataaaagttattttccactgaaaaaaaaaa

SEQ ID NO: 90985 - DNA, 2859 bp, Homo sapiens; identical to SEQ ID NO: 58809

SEQ ID NO: 90986 - DNA, 836 bp, Homo sapiens
ccgtggctgccgtggtcggatggccgggcggctaggagttcccggaagtgcccgcgcagccggtttccggtgcaggtggggaaaatggcggtgtctacagtgttctcgacttcgtcgctgatgcttgctctgtcaaggcacagcctattgtctcctttgctcagtgtgacatcattcagacgcttctacagaggtgacagcccaacagattcccaaaaggacatgattgaaatccctttgcctccatggcaggagagaactgatgaatccatagaaaccaaaagagcccgcctgctctatgagagcagaaagaggggaatgttggaaaactgcattcttcttagtctttttgctaaagaacatctgcagcacatgacagaaaagcagctgaacctctatgaccgcctgattaacgagcctagtaatgactgggatatttactactgggccacagaagctaaaccagccccagaaatatttgaaaatgaagtcatggccctgctgagagactttgctaaaaacaaaaacaaagagcagagactgcgtgccccagatcttgagtacctctttgaaaagccacgttgagctgtgctccacggcctggcatgggggttcagtctgtggatggtaactacttatgatggacgttagccttgcttccggcttcttagatgcccagctgccctaccccagaccactggtcctgcctcaagtgatggacataaccctctcctaggacatacatgtaaatgcacaatgtgactcattctcatacttttttggttcagctctgagcctcaaaagtgatttgtcagcagcgtgggccatgcaggctt

SEQ ID NO: 90987 - DNA, 2541 bp, Homo sapiens
atgcactcaagcagagaagaaatccacaaagactcacagtctgctggtgggcagagaagacagaaacgacatgagcacagcaggaaaagtaatcaaatgcaaagcagctgtgctatgggaggtaaagaaacccttttccattgaggatgtggaggttgcacctcctaaggcttatgaagttcgcattaagatggtggctgtaggaatctgtcacacagatgaccacgtggttagtggcaacctggtgaccccccttcctgtgattttaggccatgaggcagccggcatcgtggagagtgttggagaaggggtgactacagtcaaaccaggtgataaagtcatcccgctctttactcctcagtgtggaaaatgcagagtttgtaaaaacccggagagcaactactgcttgaaaaatgatctaggcaatcctcgggggaccctgcaggatggcaccaggaggttcacctgcagggggaagcccattcaccacttccttggcaccagcaccttctcccagtacacggtggtggatgagaatgcagtggccaaaattgatgcagcctcgcccctggagaaagtctgcctcattggctgtggattctcgactggttatgggtctgcagttaacgttgccaaggtcaccccaggctctacctgtgctgtgtttggcctgggaggggtcggcctatctgctgttatgggctgtaaagcagctggagcagccagaatcattgcggtggacatcaacaaggacaaatttgcaaaggccaaagagttgggtgccactgaatgcatcaaccctcaagactacaagaaacccatccaggaagtgctaaaggaaatgactgatggaggtgtggatttttcgtttgaagtcatcggtcggcttgacaccatgatggcttccctgttatgttgtcatgaggcatgtggcacaagcgtcatcgtaggggtacctcctgcttcccagaacctctcaataaaccctatgctgctactgactggacgcacctggaagggggctgtttatggtggctttaagagtaaagaaggtatcccaaaacttgtggctgattttatggctaagaagttttcactggatgcgttaataacccatgttttaccttttgaaaaaataaatgaaggatttgacctgcttcactctgggaaaagtatccgtaccgtcctgacgttttgaggcaatagagatgccttcccctgtagcagtcttcagcctcctctaccctacaagatctggagcaacagctaggaaatatcattaattcagctcttcagagatgttatcaataaattacacatgggggctttccaaagaaatggaaattgatgggaaattatttttcaggaaaatttaaaattcaagtgagaagtaaataaagtgttgaacatcagctggggaattgaagccaacaaaccttccttcttaaccattctactgtgtcacctttgccattgaggaaaaatattcctgtgacttcttgcatttttggtatcttcataatctttagtcatcgaatcccagtggaggggacccttttacttgccctgaacatacacatgctgggccattgtgattgaagtcttctaactctgtctcagttttcactgtcgacattttcctttttctaataaaaatgtaccaaatccctggggtaaaagctagggtaaggtaaaggatagactcacatttacaagtagtgaaggtccaagagttctaaatacaggaaatttcttaggaactcaaataaaatgccccacattttactacagtaaatggcagtgtttttatgacttttatactatttctttatggtcgatatacaattgattttttaaaataatagcagatttcttgcttcatatgacaaagcctcaattactaattgtaaaaactgaactattcccagaatcatgttcaaaaaatctgtaatttttgctgatgaaagtgcttcattgactaaacagtattagtttgtggctataaatgattatttagatgatgactgaaaatgtgtataaagtaattaaaagtaatatggtggctttaagtgtagagatgggatggcaaatgctgtgaatgcagaatgtaaaattggtaactaagaaatggcacaaacaccttaagcaatatattttcctagtagatatatatatacacatacatatatacacatatacaaatgtatatttttgcaaaattgttttcaatctagaacttttctattaactaccatgtcttaaaatcaagtctataatcctagcattagtttaatattttgaatatgtaaagacctgtgttaatgctttgttaatgcttttcccactctcatttgttaatgctttcccactctcaggggaaggatttgcattttgagctttatctctaaatgtgacatgcaaagattattcctggtaaaggaggtagctgtctccaaaaatgctattgttgcaatatctacattctatttcatattatgaaagaccttagacataaagtaaaatagtttatcaaaaaaaaaa

SEQ ID NO: 90988 - DNA, 323 bp, Homo sapiens
cagacccagctttgtggttttgaatgcttgatgctgataatccttgcgttatgcccttatacagttggctacctatgtgcgattgccgactcttctgtgaactctgatagtttgtactcttgtttctacccacctaccatattactttgcccttactaatgccttcataaatactagcatataaaagaaagtagtccctcagagaggcccctaatggttagctctagtcccagcaagagatgcagtatttaactactttaggcaaaaaaaaggttgcgcttttcgtgataccataaaactgccaatattccctactttgtagc

SEQ ID NO: 90989 - DNA, 1176 bp, Homo sapiens; identical to SEQ ID NO: 58897

SEQ ID NO: 90990 - DNA, 3616 bp, Homo sapiens
cgccggcactcgcccggctcgcccgctttcgcacccagttcacgcgccacagctatatgtccccgagccgcgcgggcgcccgcgacgctactcctcgccctgggcgcggtgctgtggcctgcggctggcgcctgggagcttacgattttgcacaccaacgacgtgcacagccggctggagcagaccagcgaggactccagcaagtgcgtcaacgccagccgctgcatgggtggcgtggctcggctcttcaccaaggttcagcagatccgccgcgccgaacccaacgtgctgctgctggacgccggcgaccagtaccagggcactatctggttcaccgtgtacaagggcgccgaggtggcgcacttcatgaacgccctgcgctacgatgccatggcactgggaaatcatgaatttgataatggtgtggaaggactgatcgagccactcctcaaagaggccaaatttccaattctgagtgcaaacattaaagcaaaggggccactagcatctcaaatatcaggactttatttgccatataaagttcttcctgttggtgatgaagttgtgggaatcgttggatacacttccaaagaaaccccttttctctcaaatccagggacaaatttagtgtttgaagatgaaatcactgcattacaacctgaagtagataagttaaaaactctaaatgtgaacaaaattattgcactgggacattcgggttttgaaatggataaactcatcgctcagaaagtgaggggtgtggacgtcgtggtgggaggacactccaacacatttctttacacaggcaatccaccttccaaagaggtgcctgctgggaagtacccattcatagtcacttctgatgatgggcggaaggttcctgtagtccaggcctatgcttttggcaaatacctaggctatctgaagatcgagtttgatgaaagaggaaacgtcatctcttcccatggaaatcccattcttctaaacagcagcattcctgaagatccaagcataaaagcagacattaacaaatggaggataaaattggataattattctacccaggaattagggaaaacaattgtctatctggatggctcctctcaatcatgccgctttagagaatgcaacatgggcaacctgatttgtgatgcaatgattaacaacaacctgagacacacggatgaaatgttctggaaccacgtatccatgtgcattttaaatggaggtggtatccggtcgcccattgatgaacgcaacaatggcacaattacctgggagaacctggctgctgtattgccctttggaggcacatttgacctagtccagttaaaaggttccaccctgaagaaggcctttgagcatagcgtgcaccgctacggccagtccactggagagttcctgcaggtgggcggaatccatgtggtgtatgatctttcccgaaaacctggagacagagtagtcaaattagatgttctttgcaccaagtgtcgagtgcccagttatgaccctctcaaaatggacgaggtatataaggtgatcctcccaaacttcctggccaatggtggagatgggttccagatgataaaagatgaattattaagacatgactctggtgaccaagatatcaacgtggtttctacatatatctccaaaatgaaagtaatttatccagcagttgaaggtcggatcaagttttccacaggaagtcactgccatggaagcttttctttaatatttctttcactttgggcagtgatctttgttttataccaatagccaaaaattctccttgcctttaatgtgtgaaactgcattttttcaagtgagattcaaatctgccttttaggacctggctttgtgacagcaaaaacccatctttacaggctcctagaagctgaaggttagagcattataaaatgaagagacagacatgattactcagggtcagcaacctagtgagttaggaaaaaaaattaacataggggccctattaagggggaaagccaactatgtttaagtttacgtgtccaaattttaatggaaattttttactaacaattttaaaccatatttttcttccttcatatccatttctaatccatcaaacagcttatgtttacataaaattttatcattcacaaggaagttttaagcacactgtctcatttgatatccacaacttatttttggtaggaaagagagatgtttttcccacctgtcagatgaaaaaactgaagctcaaaaagggttgacttgaccatacagctaatgctgacagatccaagacctagacctaggtcttttgaactcaagtccagcattctcaactatatcaagttactgttcagaatacttaatatctcctctcttcataattatcaatagccccaagctcatggatgacaaatctctgctttatttcttgtctctattttttcactttatagctcctgttataataggcaagtttaatgggtataaacacagggatacccatcctctcttggcaagcacccatgtggcctttggatgaggtcagggtggcaaggctgtagtagataatgagaaaggccagaggctgcaaaagacagtccaaaggacacgagagaaaggaaggggaagaacaggactccaggactgttttatattatagaaaagcaagagctaaagagcatttacacatgttaaacagatacttgttaagcatagtgcctgacacacggcattagctgttattttatgagattccatcagctctgcctctgtcctctttcttctaacatgaaggtatcatgagaagagaaccttctaacataagctgtaattctaaacctgcacttgtccctctccagcaagaggctagcactgaattcattctactcatactacacacccagttatggaatgtccagagttctcgaagaaaataaatgactttaggaagaggtatacattttttaagtcgctctgcctccaaatctgaacagtccctgtaaatcattcttaagcccaagatatgagaacttcgctggaaaagtgggaccctctgagtggggggtccagaaattccccatgctgatggaattgccctatgccccaagggacccaattccttaaccgtgggggagtggaccccaccatggggccctgctccagctctgccataggtaattccaggaaatggggaggcttccacccttaaaaaccagtgtgccaaatggccagctagaggtttggatagggaagtatggtttggttccctagtgtttaccaaatattaagtactcttgatacaaaatatacttttaaacttcataacctttttataaaagttgttgcagcaaaataatagcctcggttctatgcatatatggattagctataaaaaatgtcaataagattgtacaaggaaaattagagaaaggcacatttagggtttattttttacacttggccagtaaaatagggtaaatcctattagaattttttaaagaactttttttaagtttcctaaatctgtgtgtgtattgtgaagtggtataagaaatgactttgaaccactttgcaattgtagattcccaacaataaaattgaagataagctcaaaaaaaaa

SEQ ID NO: 90991 - DNA, 1799 bp, Homo sapiens
cggaatttccgggcggccgccgaggccggctaaacgcagaatggggaagaatcctgtgcgtcctccacgagctcttccacctgtgccaagtcaagatgatattccacttagtcgtcctaagaaaaagaagcccagaacaaaaaacacaccagcaagtgcttctttggaaggccttgctcagactgctggtcgaaggccctctgagggcaatgagccatcaactaaagaactcaaagagcacccagaggctcctgttcaaagaagacagaaaaagacaaggctacctcttgaattggagacttcctccacccaaaagaagtcatctagttcatctttattacgaaatgaaaatggtattgatgcggagccagctgaggaggcagttattcaaaaacctcggaggaagacaaagaaaacccagccagcagaattacagtatgccaatgagctaggagtagaagatgaagacataatcactgatgagcaaactactgtggaacagcagtctgtattcactgcacccactggcattagccagcctgtaggcaaagtatttgtggaaaaaagccggagattccaggctgctgatcgttcagagttgataaagaccacagaaaacatagatgtgtcaatggacgtgaagccttcctggaccaccagagatgtggcacttacagtgcaccgggctttcaggatgattggtctcttttctcatggattcttggctggctgtgctgtgtggaatattgttgtgatatatgttctagcaggagatcagctatccaacctctcaaaccttctgcaacaatacaagaccctagcgtatccattccagagtcttctgtacttgcttttggctctgagtacaatttcagcttttgacaggattgactttgctaaaatatcagtagcaatccgaaattttttggccctggatcctacagctttagcatctttcttgtactttactgctcttatactatctctgagtcagcaaatgacaagtgacagaatccacctttacacaccttcttctgttaatggtagcctctgggaagcaggaattgaggaacagattctccagccatggattgtggtgaatctcgtggtggctcttctggttggattatcttggctatttttgtcttataggccaggcatggatcttagtgaagagttaatgttctcctcagaggtggaagaatatcctgataaagagaaagaaatcaaagcctcttcataataccagctcacctttggaggaataatgacccagtatttgtcccatttttgtttttaaatgtatttttataagatgtatacatgtgtatttgtaatagattttttgattatataatactgaaacatctctcaatattatggaaaatggttaaaattgtgtttgctgtttatgtctaaacattaatttgtctagcattatcatcttaatgacaaagggaataatgaactagaaaccagcaagtgaaagtgtttatttcctattttctcaaaacagttgtatttataactattaccttaaaaagcactggtttagaaaaagccataacttaaatagtgttataaaatatatatcaggtttaaacataaatttagcgaatatggtagaagggaaaaaagccttcatttttgacctccccttactgaataaattgaaatatgaagtttgtcttttctgaaactggcttagtgattgagtatcatgtaataattataatataatttagcttgaaagatgctctacattatgaccaataaaaagggaatgtatgttttgtttg

SEQ ID NO: 90992 - DNA, 932 bp, Homo sapiens
cgtgggcggcggcgcgcgggtgcgatcgcggagctgtgaggcgcaggcagggctctggggcacctagagaccggggccggagacgtggcagccgccctgcccgccagaaagtttcctagaagtttgctgggcgcgggcgcacgactgactggctggaccatgaacgtgttccgaatcctcggcgacctgagccacctcctggccatgatcttgctgctggggaagatctggaggtccaagtgctgcaagggcatctctgggaagagccagatcctgtttgctctcgtcttcaccaccaggtacctggacctgttcaccaacttcatctccatctacaacacagtaatgaaggtggtttttctcctctgtgcctatgttacagtgtacatgatatatgggaaattccgtaaaacttttgacagtgagaatgacacattccgcctggagtttcttctggtcccagtcattggcctttccttccttgaaaactacagtttcactctgctggagatcctctggactttctctatctatctggaatcagtggctatcctgccccagctcttcatgatcagcaagactggagaggctgagaccataactactcactacctgttctttctgggtctgtaccgggcactctacctggctaactggatcaggcggtaccagactgagaatttctatgaccaaattgcagtcgtgtctggagtagtacaaaccatcttctactgtgacttcttctacttgtatgtgaccaaaggtaggtcctgggatgacagcaatgctgacactggcctaaggagttactcatccatttaataagtattccagcagatacagatgtgaacagtcaagtctctgccatccacaatgcttgtgttctaatgcaagaagacaaatattttcaataaagaaacaaatgccataaa

SEQ ID NO: 90993 - DNA, 7553 bp, Homo sapiens
ttttttttttttgacaatgcattttttctcatttattcaaattcactgcaggaagtaaacactaaaagattaaaaaacaaaacaaaaaaattcacactgcagtatgtacagtttcatgacatcacatgaagaaattaaatttctaataaaaatggcaaattatattactgagcagatcgcatcaaatttggttgtgtaaacaccagaattcttactatgaatggtaatgtgcctatattccagtattgctaatactgggatactcttggaataatgtttgcaatgggattaaaaaattcatgaaagtagttgtgtgaattctttatgtttaaaagtggttgacgattaaaaaaattctttaagacccttcgaatcaaagcacattctttcacaaagcttaaaccacagacgtcatgtcccagaaatggaatactgtcatgttaggatgaacatctgatctgatttgttaagacattttcccaaatgcacagatgcacagggtcccccatgcacttttcatgcagcaggtaatcacaacttaaataaaaggtttattttatacatttgtccagacttgcaactgtatacatacatgcacaacttttaaacctgtctgattatatttacacttatacatggaatatacaggaaccaaagagattaaaaggcttttctgttgcattagaacaatacaaaatatgtatttttcattaaggaaatcactatttacatcacctttaaaaaccgattttaacatcttcatgtaacaagtcaatatatatatatatacatattatatatatatatatatataaaatatatactctcaccagtttactcttctgtaagatgcagcagagaataaacaggtaatgaatgctaccttactgatgtcaataagctgtagtaccctttcacaaatgactttattagaagaaattgtctagatatctaaaatagtccttgaaaatgtgtatatgtgcatccttgtatctacatatgcataaacaaagtgaatctgtggatgtatgccctttctcactgttctttaaaatcaccctaaattcaaattgggaacattctctagtaaatcagaacagcattcttcgtggtcatgtttatttaagtattacatattctcattcctttgttaacaacaacgaaaacaaccagccaaccaaaaaaacaaaacaaaacccacacacacacacacaaaagtagcaatgctggcccttggtcttttccctgacctaaatttcatctctcttgtaaaaaaggtcatttccccctacccaagggagaataccaacatattttttctgacatacctctaaggctccaaaccttccacaacgatcaagaaaaatgacttgtttaaaagcttatttatatagtgttgacaataagattgtcagagtatggacatggaatagaatatattcaactggccagtggaattttatgtcagaataagcctatgccttcacttctccatgatgttgcataatacccactcctattactgtataatatttccagtagctatttacaaatcattctgaggaaaaataaccatttagggttttagatcatattaggaaatcacacctatttttaaatataaaaatcttagaaaccacttcaagtagaacaattttaaatcaatatcctaactagtagtgattatagaataatttttgataggtcatttgctaacctggaacacaattaagaacaaaaatatctggtgaatgaattgtggattgtacaaactgaacataaaaacagacctgtttccgcaactgaaaccccatgtggcttcactaatatattaatttcttctaagacagtatcaacatgtacttttcatcactactttaaagtaaaagatccaatggagtgattgagtaccaattctgtcacgtatatgtgccctttgtactttttatttagtcaatctgagtttagtgcccttcttgggtttaaactaaatgttgtaagctttgttggcattgttcttaggacaatggttttaataaaggttaaggatgcattcaggagaagtttccaaaccatcctggaatcacctgagtttggtaagtggccctgtttttccatccctaaggctaactaagtagatgttactcattagaacacacaaataatcacagattttcctgagatgttgagccagatatgaaagttatcccctccacccaatttttgtcataaaaagtgttctgaacccggatttccaaagatataacggtaatatatgaactacaatattgcaaattttgagctgatgtgtgactgtattggggaaaatagaggcatcacatagttttttgtttttgttttacagtctcatgttctgaggaaagtcataagtcatggttctcaaacacaagaaacacctagagagcatgttaagatgcagatggaagattccaggtccacttagcagagattcttgttctgtagatctgagatgctgcctatgaatctgcattttaaaacaagtgctccagatggttctaatgcaagtggtctgagttcaggtttaaggaatcctggtcataacactcgcaggtaccacaggaatggtgagaattaacttttacaagagatggtgaaaactgtccaaagaaaagccattttgcttctgttaaaaacaatttcttaaatattcaacttttcaggaaaccacctaaagataaatgttaacttttctaattctgtaaaaggaggagtattaatttagtaaagtagttaaaatacaaaaaatggaaatctgccttttttttaaaggatctatcaaacttccctcaattgtaatcaatttttactaagtagcacaaggtttaaagaaatatatattgaaaaggatcagggtgggacagacacattgggaaccacaaaacctcttccaagagttaaaaataaacacctttttttttctttttagcaaaagtgaataaatgtaagcatatatttttctaatttatttttgaattggataataagctgtgaatcagcactaggttttttttttattggataattatcctttaaagagttgtttaacagtttagactttaaaaatgtgttatgtaggctgacttctgaaaagcaaaataaagtaccctaataaaggcagcaaaatgcattaatccactatgaatggagttttacattttaatttatgcctaatatttataaaagaatttcattcataggctactcacagttgttatctgatgcatacagaagtgttaaacaaccaattgctagttcagtagtttcctcatgacatctaatgttaagcaaaaattagtatgcatatttcaacatcaccagtaaccaatacttttcaaaatgaaaaaagtttcaattataccatgcttttttcaaatcatgctcttatttatacagatctcaagttcatactcattagttttaaaaagatccaaaactggatggcaggtacattttattctgattctttctttatcgttagcacgcttcccagaagtccataaacttctccatttgcgctgtgtgggcgagaagcattatttcccatatggctattgtaagggcttcttaaattaaagaaagaagctttcgtttctgcagtaggaagtaactcttctttggctgtgacctgtgagacactttcagcagatgaagcctccctccaaatgtccttgtcttgtgtttctcgactggtaacagaattgcctcctttttgaagcatgtaatatagtattgggttggttttggtcaatcttggagagtctttttcatactcattcttctccgcatcagtgataacccacttaatgggtcctttctcactgggcatggaacacccattcaaaagcccagattctggtttggaccctgcacagcccaagtgctcagggaaagtaggactcacaggagtttttactacacctgggtatgaaaatgtcctgttatccatgcaactgctgggctgagtggaactgtacatcagtccatttaaagaagaaatgctaaattcagcgtttgcctgttggtccacattatttttgtgtcctttctttttactgtcagccacagagttacttctgtgcggggacaaatctcgcacacagttttctgagagaagcagctgtttcagaacattaaagcttttgctctctctggcccaactcctgtgttcactttcgctggctgagccatgaccagcaggatatttaaattcaagatcatttctgctaaatttcagctcttcctggttaagcaaggacccatacagtacttctggggcactgtgattgtttgcagcatcaacaatgttgtttttcatctttttaaatggattttctaatggctcagtataaagcttccttttcttagggaccatgcaaagattctttgattctagaagtgccatttcattatttctgtgactcctgtctgaatcatctgccaggtaactatcttgattttgtcttagcaatcgacttagcagaccattcttggagaaagaaaaatcctgaggtgaaacaggctccgatttaaagtcttcggacactggtaaggcaggtgcgcttctctgcacagcaggagccatacccaagaatggggcactcttagcatcatggctcaagtgcacatttgtgttaggaatttgtaagtcatcacaaggctcagattttattttcaccatcagtatttgttcacttaaagctctctctgagtgttcctgagtactttcatctcttaagggagttttctcttttttttcactcttccctttgttggggttccccaggagcaactggaggacagtacgtctttcaagcagattttctatttcagaaccagaaagccctggttcaggacctgttggttgactactaaatgctttattttcttcaactgcatttgttttatttgagagcaaagggctatttaatctatcaatcatacctatcggtttatctgtgtttccagttaacagctgtttgctgggtctctgctcttccactgacatggatgactgcattccacattgtgctaaattttgtaacagcttactggcactaaacgttgcagagttctgtgcaccttcattttgggctggtttctctcctggtgggtctttgctttttgtaaggtccattgagtggttagatgcagtatttgttagcttttcagactgagtactgcagacatatggtggggaattccatttgatgaccagagagtgttgagagagattgatgggagaccctgctttgcttgatgtaagtaaaggtggagtgctcactggagtagtccgatttgtactggggctttctatcacagaagtccttgcataattttgtgtattgaacttgctcacatcattgtgtactccctgagggctggtgtttttttctacattttcttcattcttatggccaagtagcaattgaagaagtgttactttctggtgtgagtttagcttagaattctttgaggtatcttgatcttctttgatatctacatctgggacttttggatcccaagtgtttagcaaggattgagtgaagttatccagggaaacaggttggtcagattctgatttttcagttcggtgtttgcaagacaagtctatgggaacacagttggaataagaactttcatcaccactgctgtcatctgtaaaactaggattgttatctgaatattcatcaatagttgtaggtgtactactttcctcaaaaatgcttcctctctcactgtgactgtgtccattcattggcttaggtatagtctggcttttaagaagatgtaaaagcaaactattgttagcagcttgttttatattgtttctttccagtgagttcttataacctgcatttttaggggaagaaggaatgatacccattggattttgaaacactgtagcactacttttgctagccatcagtttgcttgatgatgttcttgcctgaccattaagatggcttgacattccttttgggagctggtaactgccaacatccttctggccattttcttgcaatctggccatagcagcaagtctttcacttgctgcttgatttgcattttgcgtttttaaagcgtgttctcgagaatactgctgcaaatgggcttcgcttgacagaagtaatgctaactggctacaagcaacactaggtttaggtgaggtggcaggactagcccttttttccaccatgcttgcaacagcctgtaatcttgcagcacatgacaacggttcactcatgacctttgttccactttgtccaacatgatgaggagactctgcaaacctatctctgatgaggtttttagtcacatcaggaagattcgtatcaggcttttgatctttaactttacttttcttcaacaaagtttttaagtgacttgatgcaacaccatagcaccttaaatccttctccacttttaaagaatcatgactgagggcatatccttgctccttgaggctctgcctgatttgttgtgacagagcaacagtctgcagcctagagctgaatgactgaagcaaagaggccagtaatgtgctatcctgtttgcctttaggcacactgtcaaccatgccagctagcaaagcttccttctttacgtttaaattcatgatagaatcagacagcctcttccgctttgctgcattccagtcctcagaagactgcaacagtctggcttttttgaggtgcagcatgccagacccctgatatgtatgtgtattgagaactggaccattactttgacaggtgggaaatgcactgccagaaatgttaaagttctgatcctcttcattatgcccagcagactttttgtcaacggcagtacctgatccccctgctgcctgatgcattagtaatccttctaggtaagttaaaacaatagaatcctggtgcacatcagagccaagctcttctccatgagtcatgttcaatagaagtgttcacaagggcttggtttctattcactttaaagaatggttttctgtggtgagtgcgatgtaactttaataaaggagtatcagtttatcaccttccatcgcaatcagagagagacgtactgttacattctgtccaagatttcttctggcaatgacaagataaatgcagtctgaccacagtgctgatcaacttctacgcaaggaggaggagaagaattccttaacacataggtctgtagcagtaagcagatagaatccttagtgaatatattccttttccttcttcatcttttggtccccattaaatgcaaatatcagtgttcgtctgtctccaagctctgagcctctgctttctgagaaagaaaattgagaaggctgttgaaaagtagctctgatgtcatccggagtcttcagattccctgtcctccttcagtcaagtgtgcatcttctggctgtgtttctcccaaatgttaaaataatgagtcctgagaacagttctgaaatagctcacaatccaaacacttccccaggccgccgcggctcccagcctccggctccgtctcgtgca

SEQ ID NO: 90994 - DNA, 2332 bp, Homo sapiens
atggtgggtcgcaagctggaagatcaatatccgcacctggacaaagcgccgggagatatccgcctgaaagtcgataatctctgcggacctggcgttaacgatgtctcttttactttacgcaaaggcgaaattcttggcgtctctggtttgatgggcgcaggtcgtaccgaactgatgaaagtgctctacggcgcactaccgcgcaccagcggttacgtcaccctggatgggcatgaagtcgttacccgttcaccgcaggatggcctggcaaacggcattgtgtatatgcctgcagcgatcagcgcaccaatccgaactttaacccggcgtctgttccgttgcttaaggagcagccatgacctggtctcgtcgccagtttctcaccggcgtcggcgtgctggcagccgtcagcggcaccgcagggcgcgtggtggcgaaaacgttgaatatcaatggggtgcgttacggcatggtgcatgacgagtcgttatgcatcggctgtaccgcctgtatggatgcttgtcgggaagtgaacaaggtgccggaaggcgtctcgcgcctgacgattattcgtagcgagccgcagggcgaatttcctgatgtgaaatatcgcttcttccgcgtgagtgaatatatcaccctgaccgtgcggcggattgatgacggtgtcggctcccagtggctgacgcgcgatgtaaaacgcggtgattatctctggctttcggacgcgatgggggaatttacctgcgacgataaagcagaagataaattcctgttgctggcggcaggctgcggcgtcacgccgattatgtcgatgcgtcgctggcttgcgaagaaccgtccacaggccgatgtgcgggtgatctacaacgtgcgtacgccgcaggatgttattttcgccgatgagtggcgtaactatccggtaacgctggtggcagaaaataacgttaccgaaggctttatcgctggtcgtctcactcgcgaactgctggcaggtgtacctgacttagcttcacgtaccgtgatgacctgcggcccggctccgtatatggattgggtagagcaggaagtgaaagcgctcggcgtgacgcgtttctttaaagagaaattcttcaccccagtagcagaagcggcgaccagcggtctgaaattcaccaaactgcaaccggcacgagaattttacgccccggttggcaccacgctactggaggcgctggaaagcaataacgttccggttgtcgctgcctgccgtgcgggtgtttgcggctgctgtaagacaaaagtggtttccggtgaatatacggtgagcagcacaatgactgctgacctgactgccgaaatcgctgaaggttacgtactggcctgctcctgccatccgcagggggatttggttctcgcataatcgccttatgcccgatgatattcctttcatcgggctatttaaccgttagtgcctcctttctctcccatccctttccccctccgtcagatgaactaaacttgttaccgttatcacattcaggagatggagaaccatgaaacaaacggttgcagcttatatcgccaaaacactcggaatcggcaggggtgaaacgcatctggggagtcacaggcgactctctgaacggtcttagtgacagtcttaatcgcatgggcaccatcgagtggatgtccacccgccacgaagaagtggcggcctttgccgctggcgctgaagcacaacttagcggagaactggcggtctgcgccggatcgtgcggccccggcaacctgcacttaatcaacggcctgttcgattgccaccgcaatcacgttccggtactggcgattgccgctcatattccctccagcgaaattggcagcggctatttccaggaaacccacccacaagagctattccgcgaatgtagtcactattgcgagctggtttccagcccggagcagatcccacaagtactggcgattgccatgcgcaaagcggtgcttaaccgtggcgtttcggttgtcagtgttaccaggcgacgtggcgttaaaacctgcgccagaaggggcaaccatgcacaagtatcaggcaggtcccgcaacgaaacctacgctgaaaatttgcaatctgcggctatcatcggcgaaatggtgggtaaaaagcgagagatgcaggcacgtctggaacaacataaagagaggatggcgcagtgggccagccagcttcccaaagggacacgcgtggcctttggcacatcacgcgaacagcaattcaacctgcatactcaggagacctggaccggcagcgtgctggcctctctggggctgaacgttcccgctgcgatggcgg

SEQ ID NO: 90995 - DNA, 2253 bp, Homo sapiens
ccacagccacctccggagggatctggctgaggaggaagtggaggtgtcactggccccggcctttgccccaatcttgtgtgggcactgaagggggactacaggttcgagatacttcctcgcgtattgctaaaggaggagttgaccacaccaaaatgagtctacatggtgctagtgggggacatgagagatcaagagatagacgaaggtcaagtgacagatcacgagattcatctcatgaaagaacggagtctcagctcactccttgtattagaaatgtgacttctccaacacgacagcaccatgttgaacgagaaaaagatcacagttcctctcgtccaagcagtccgcgtcctcaaaaagcatccccaaatggttccattagcagtgctgggaacagcagcagaaacagtagtcagtcaagttcagatggtagctgtaagacagctggggagatggtgtttgtatatgaaaatgcaaaagaaggagctcggaatataagaacgtcagaacgagtgacactaatagtggataacactagatttgttgtagacccatccatttttactgcacagccaaatacaatgttgggcaggatgtttggatctggccgagaacataactttacacgacccaatgagaaaggagagtatgaggtggcagagggaattggttccactgtgtttcgagcgattctggattactataaaacaggaataatccgttgtcctgatggcatatctattcctgaactgagagaagcatgtgactatctttgtatctcttttgaatatagcactattaaatgtagagatctcagtgccctaatgcatgagttatcaaatgatggtgctcgtagacaatttgaattttatctggaagaaatgatcctccctctcatggtagctagtgcccagagtggggaacgggaatgtcatatagtggtgcttacagatgatgatgtggttgattgggatgaagaatatccaccacagatgggagaagaatattcacaaattatttatagcacaaaattatatagatttttcaagtatattgaaaacagagatgtggccaagtcagttttgaaggagaggggtcttaagaagattagattgggaatagaaggttatcctacctacaaagaaaaagtaaagaaaaggcctggaggccgcccagaagtgatctacaactatgtccaaagaccctttattcgaatgtcctgggagaaggaagaaggaaagagtcggcatgtagactttcagtgtgtaaagagtaaatctatcaccaatcttgcagcagctgcagcagacattccccaggaccagctggtagtcatgcatccaactccacaagtggatgagctggatattctccctatccatcccccttctggcaacagtgacctcgatcctgatgcacagaatccaatgctgtgatgctgatcttccttgaaaccatagcatgctactcttcacagtgacgttgtactctcctcattctgcactgcaaggccactcttcttcattgtgagatgcacataacaatgtttaggatattgcagtgtaggcttttttaaagaccaaaggtagctgaatggtttttttttaaatgagtacaactctagcattttgaagttccagttgtaaatgtatttgtttaccagtaggtttgtgaaattggttctttgtatgggggatggtcctttttcacacagctaggtcttttcagaagtggtggaaattggcagctggggtactttcagtttggactgatattcatcacacctcagataaaatgcagagtaatatatagttgcactttataaatggtggttaaatggaaatgttcaagccattttatagttgtgatgcacaatataatttaagtgcttctgtcaaagtattcctccagtacaatttgtatagtttgctgcccttgatgagcaaaaagtatttatcttgggcttatctgaatgatcaggatgagatttaatgcccatatcttaccagttcagttatctccagagccatttcaccctttagagtgagtcacatgcagggagtgtgaatgtcagaggtggtttattatccagtctgccttacccttaatctgttcacagatatttatttactaatgctttttttttcttaagagttatgggataggaaaatgaagtgtttgctcttcatttactaaatgattgtaaacttgagtttttcatcaaaataaaattccattgttttaaaaaaaaaa

SEQ ID NO: 90996 - DNA, 1566 bp, Homo sapiens
ttttttttttttgcggtgaactacagaatttattaaataagaaagctatcaattcggaacaggaggaaaaaaaagttttaaaaaaaatctataggaaaatagtcaaaaaagcatttagtgctcatcgccgtccctctgaggggggccgtcagaaaggcaactgggacctgacagacccgggcacatacttgaaattcctgaattctaacctgcattgtacaaaatgccacttgaaacgtccaccagaacccccagccaaagaggcacatctggacagcttcacagcacggaacgtgtgaccttggtccccgtgggtcccggaggaggacagcagcagccacgcggtggcccctgcgcactcaggccatgactgcagggaccacccactggggccacaagagtgacccgggagccagagggagccctgagcatcggcggaaggcacaggtccctgcccggggtggccatctcagaggcacatttagtgtttgttctacttatgaaatcaaggacaaccaattgtacttatcttacaactgatgttctgggatgggactggaaaacattgattccagaaccactctttttcttaaaatcactggcttttatgacaatgtcttccaagagctcattagaatctataagatcgcaggaatttcgccaagaagggctgcatagaaaccacagagacaactcggccagggctgctcccattgtggtggccaagaactggctgagggcacgacactggactcttgcgatcaacactttactctgggtgaagactgcatatttaaggacacaactgcacatttagatcgagcggtggtgacctcagggtatacacggagcttcatgctgagaacacccaggggtcctcaagagtcttcctcctcgtctttaacttcagaaattctgtctatagatttaaggatttcggcaacaagattcagtgtctcagctccggaaaccagttgctcgatggaagcctgtgcactgttcatgaccacccggaggttctgcagggccacgtcggcgttctgcttcaccacggtcaggctggcaccctggccgcaccgcagggcttcattctctcgctggaagttggagacctgcgcctggagcaaactgatttcctgttttagtttcacgacgtggttttctgcctttacagcccgtttggtcatcagctccaggttctgctccacctgctgaaccaccgactccaggtcgtggtagtcgctttcctccttgatcatttttgcttctaacttccgctcaagcgtcctcaccatttctgtttgagcttcagagaagctctgaacctcattcagctttcttctcagcttagaattttcatctttcagctgtggagagagaacatccttattagaaagtcagcatgtctggctcaaaagggcgtgtgcttctgcggtgtggctccagagcctcctgataagcagagatgctgggtcagtgcagcatccacctgcagccactacagagggagaccacagacggaggcaggcacttttcaaagacctgtggtcacagatgccagttaat

SEQ ID NO: 90997 - DNA, 352 bp, Homo sapiens
ggcacgagtgcctctcgcggaggatctccttcatccctctccagaagaggagaagaggaaacacaagaagaaacgcctggtgcaaagccccaattcctacttcatggatgtgaaatgcccaggatgctataaaatcaccacgggctttatccatgcacaaacggtagttttgtgtgttggatgctccactgtactctgccagcctacaggaggaaaagcaaggcttacacaacgatgttccttcacgaggaagcagcactaagagcactctgagtcaagatgagcgggaaaccatctcaataaacacattttggatacttaacccctcccccccaaggtatttgcttttttt

SEQ ID NO: 90998 - DNA, 384 bp, Homo sapiens
tgcacgagcccttctgccaataatgcaagaagcattgtaaaactgggaaatttttagagaatctatggtaaagaaaagacaaaagctaagctatccctgggatgagactcctactttaagataaaaatgatttctgggacaattagggggtctgttatgcaattatacctcagtgtgacttagttcaaccaaactgggtcttcctcatgctaagctgaaccagggttgcagagaggtaaatgatcctgagtatgaagtggcttgtagtatcaggcagactcaagtggaaaaacactggtgacctgcaaaaaattgcatcaggcagtgcactatgggttacaattgtagagccaatgccatgtgggtgttcaccaactatttctc

SEQ ID NO: 90999 - DNA, 376 bp, Homo sapiens
ttgcacgagctttcaccatgacttctaccctgcctctttgtccatactttgggccattcctaccccacattgtctttccctccaaccattccataccagtcacatttcctgaacccagtatgtgttctcatatcaaagtgtctttgcacctgctagtccttcttcctggaattctataaccaattcctttcccctcatcacctactggcctggcatacttgaaaaacttctacttacatgtttggactctaattgaattttcctggatggaccacccccattacacaactaccttgacagagctattcctccctcctctgtgcacctaagcactaggtacagattgctatttatactaatctgcaagtttgttctt

SEQ ID NO: 91000 - DNA, 3280 bp, Homo sapiens
cctgaggcgagtctgggctcagcctagagctctccggcggcggcgcagcttcagggcagcgcgggctgcagcggcggcggcggttagggctgtgtagggcgaggcctcccccttcctcctcgccatcctactcctccctcctcgtcatcctcccccttcgtcctcctcgccttcctcctcctcgtcaggctcgacccagctgtgagcggcaagatggcggcgcccaggccgccgcctgccaggctgtcgggcgtcatggtgccggcgcccatccaagacctggaggccctgcgcgcgctcacggcgctcttcaaagagcagcggaaccgagaaacagcacccaggactatcttccaaagagttctggatatcctaaagaaatcttctcatgctgttgagcttgcctgcagagatccatcccaagtggaaaacctggcttccagtctgcagttaataacagaatgcttcaggtgtcttcgcaatgcttgcatagagtgttctgtgaaccagaattcaatcaggaacttggatacgattggtgttgctgttgatttgattcttctgtttcgtgaactgcgagtggaacaggaatctctgttgacagcttttcgctgtggcctgcagtttttaggcaacattgcctcacggaatgaagattcccagtctattgtttgggtgcatgctttcccagaactgtttttgtcttgcttaaatcatccggacaaaaaaattgttgcctactcttcaatgattttgtttacatcccttaatcatgaaagaatgaaagaactggaggagaacctcaatattgcaattgatgtcatagatgcttaccaaaaacatcctgaatcagaatggccgttcttgattattacagacctctttctgaaaagcccggaattggtacaagccatgtttcccaaactgaacaatcaagaaagagttacactgttagaccttatgatagccaagataacgagtgatgagccactcaccaaggatgacatccctgtgtttttgcggcatgctgagttgattgcaagcacctttgtggatcagtgcaagactgtgctcaagctggcctctgaggagcctcctgatgatgaggaggcactggctacaattaggcttctcgacgtcctgtgcgaaatgactgtgaatactgagctgctcggctatctgcaggttttccctggcttgctggaaagagtgattgatcttttgcgggtgattcatgtagctggaaaagaaaccacaaacatcttcagtaattgtggttgcgtgagagcagaaggtgacatctccaatgtggccaatgggtttaagtctcatctcattcgtctgattggaaatctgtgttacaagaataaagataaccaagacaaggtaaatgagctggatggtatcccgttgatcctggacaactgcaacatcagtgacagtaacccctttctgacccagtgggtgatatatgccatccgaaaccttaccgaagacaacagccaaaaccaagatttgattgcaaagatggaggaacaggggctggcagatgcatccctacttaaaaaagtgggttttgaagttgaaaagaaaggcgaaaagctgatcctgaaatctactagagacacccctaagccatgaatgaactacatccaaatacctgaatttttggaatctgtttcatggatttttcatcttctaccgtatgtgaaattgcaagtgtttgaagatttataagtacaaatttgggaacatacaaatcttttaggtagtagagtttaacgtgtataagctaaaagtgaaagtaactgagtgttctcttgtttctttgcattaatgtaactgtgtggtttgcctttgtccccctggatagaacgtgcatttaaagaatatattgtacttactgtgacagcagataataaaccagtctcttggagggcacaacccttatttgacaaaacttggatgttggcttgactgtgtttgtcccttcagatggcaagtcagcatcattctttatattcctcttctcattgggttttctgaactctggcaggccggttgaagtagtttctcactgtgattaattctagcaatctcttttcacccctctgcctttccaaaacattgacaagactcatttccagttaattaattcgagaaccctccctcttcattttgggtactgggctgtcttgtcactgagccctatccctttggaatgtggcagggagtgaggttggtgagagaacatgtgggcacttaactcttcatgttccagttcatcccagaagtagacatcccaggacccattctgtgtcaaggtgaatgcctgtgtcctccccagcttcatgcctctgtcatgggggaaggaatagcttatgttctgctctggtgcagtgccgtagattaaaggtacatttctatcttctttgatttaaaaagcaccagtctcataaaggtgccactcagttttagccatgtcttcactgaaattgcaaaagtacttttagggagcaggagtttatttgacatctagttatctgtctgtctgttcatctatctatctgtctgctgtatgagaggtaggactggattaaatgaccactgaactcactgaatccagatcattcatatcatcaacaaaagctctagggggaggtcacgttgtgaatgcttaaaacatattattttcttcaacaaccatatcgctaaactaatatatccagagattttgcacaattcgtgttgaaccttccaaaacaaaaataaagacctgtccaaaagttttgacaaaaatactgattgctcccaaataaagtgcttctaagctttgtgtagacatagtttaactgatttgtaaaaatagcttaagcatgttgagaatgaagtaaaagttttcccatgtgctgtctaatgtactctgtgtaactctgaagacacatcagcttctaggattgcagcaatctatgaataacattttttctctcatttatgactttccatcagtaaagaagccattgcagaatttaaaattacacaaaggagtcattctctcctgggacataaagagttaaagctctgtcctctaaatagaagcctggccaaagggagaaaacagtgggagtcccttttcccttttaacaagtttgcaatagacacttctttttttcctgtctcaatggatgtgtgcacaccagtggaatcgcacaaacttgtcggtatgagctatataataacaaacacaaataaataaaagggagccttgtgagaatacaaa

SEQ ID NO: 91001 - DNA, 1856 bp, Homo sapiens; identical to SEQ ID NO: 59089

SEQ ID NO: 91002 - DNA, 710 bp, Homo sapiens
ggcacgagggaaattagaacactgcctagaaacttgatagcattaagaaactactgttatgtttgagtgtgacagtggcaccgtaatctgggtggatagcgtaggggtgaaacaggattggacaggagttgatcactggcaaggctggaagctggggagaggcacactggggtttgttacattgctgtttgtatggttgcatgtatttgaatttttccataagaaaaagtaaataaaggacttgtttacttgcctaaagcagtaccgctcttggaaatgattcaaacaatataaaagcaaagtaaaacattaaagtgtctaattcttccagttagtttccctttcaggtaaccactgtctaagagtttgatgtaaatccttctagactttctaatgtctgtataaacaatcacatacctttatactttttttacacaaataggattatactacacacatggatctgcaatgtggctttttctctgagcaatgtcatggccaatccttcatgttctagctgcatttctttctttttaacttcaccgtatgcctttgtatggatgcaccatgatttattttcccctttccctttgggtaaaacttttaaaatgatttgagccttttgttttttaccagtccgcctttacttaaatgcccttccccctttaaccctggggcctttttttgtgaaggattcccgtttcaaatac

SEQ ID NO: 91003 - DNA, 926 bp, Homo sapiens
  misc_feature (1)...(926): n = a,t,c or g
ggcacgagctatcgctccacggttgttgactatatactgccacccttggtgtccttggttcaaagccaaaatgtggagtggagactctttagcttgcggttgctctcagaaaccacatctctactcgtgaaccaggagtttggggatggcaaggagaaggccagtgttgattctgacagcaatcttctggctctcattcgagatgtcttacttccccagtatgagcacattcttttagaacctgacccagtaccagcatatgctctgaaactgctagtcgcgatgactgaacacaacccaactttcacaagacttgtggaagaaagcaaactgatcccactcatttttgaagtaactctggaacatcaggagagcattctgggtaataccatgcaaagtgtgattgcattactcagcaatctagttgcctgcaaagattcgaatatggaactactttatgaacaaggacttgtcagtcacatctgtaacctgctcactgaaactgccacactgtgcttggatgtggacaataaaaacaacaatgagatggcagctccactgctcttttccctgcttgatattttgcacagcatgctgacctatacctccggtattgtacggctggctttgcaggcccagaagtctggctcaggagaggaccctcaaggctgcagaaagacctgctgctgctcaacaagacctcttgacagacctgattaagcctgctcatttccacttgctttcctaatgaagattcctgaagatttttgatggtttcatccaagtgnctgtccaatactgggttcagctgtatggaagggaaaaccggacagcctctctcctgnaaatgtggaaattttggcncatttactgacatccaagaggaccaaagngcagagcttctgtaangatcnccgaagatgatc

SEQ ID NO: 91004 - DNA, 358 bp, Homo sapiens
atagtccacgtggagataactttagataaaactcgaatacttactgcttggacacaggaatgctgtcctatagaacctcatcctcaaccagctacgtacataggcttatcctatgcattcctggtctctgtgggactgtagggttgtaatatattgtttttgttgggaaaaaatgtctgacttagaaccaaacgattatggtacagaggggacatatcatactaaggatgctgctacccgcgctgctaatataattgtcaataatgaccgcccgaatatcattgatataggggccgccgccaatccacctttgaatacggaggatcttagggcaaaaggcggtgtcattagtggagcc

SEQ ID NO: 91005 - DNA, 2579 bp, Homo sapiens
  misc_feature (1)...(2579): n = a,t,c or g
tttcgtcgctggcccagcatcggagtgtggcagtgctgggctggccggcgggctgggctgcggcccgcgcgcggccggcgatgcaggggggcaactccggggtccgcaagcgcgaagaggagggcgacggggctggggctgtggctgcgccgccggccatcgactttcccgccgagggcccggaccccgaatatgacgaatctgatgttccagcagaaatccaggtgttaaaagaacccctacaacagccaaccttcccttttgcagttgcaaaccaactcttgctggtttctttgctggagcacttgagccacgtgcatgaaccaaacccacttcgttcaagacaggtgtttaagctactttgccagacgtttatcaaaatggggctgctgtcttctttcacttgtagtgacgagtttagctcattgagactacatcacaacagagctattactcacttaatgaggtctgctaaagagagagttcgtcaggatccttgtgaggatatttctcgtatccagaaaatcagatcaagggaagtagccttggaagcacaaacttcacgttacttaaatgaatttgaagaacttgccatcttaggaaaaggtggatacggaagagtatacaaggtcaggaataaattagatggtcagtattatgcaataaaaaaaatcctgattaagggtgcaactaaaacagtttgcatgaaggtcctacgggaagtgaaggtgctggcaggtcttcagcaccccaatattgttggctatcacaccgcgtggatagaacatgttcatgtgattcagccacgagcagacagagctgccattgagttgccatctctggaagtgctctccgaccaggaagaggacagagagcaatgtggtgttaaaaatgatgaaagtagcagctcatccattatctttgctgagcccaccccagaaaaagaaaaacgctttggagaatctgacactgaaaatcagaataacaagtcggtgaagtacaccaccaatttagtcataagagaatctggtgaacttgagtcgaccctggagctccaggaaaatggcttggctggtttgtctgccagttcaattgtggaacagcagctgccactcaggcgtaattcccacctagaggagagtttcacatccaccgaagaatcttccgaagaaaatgtcaactttttgggtcagacagaggcacagtaccacctgatgctgcacatccagatgcagctgtgtgagctctcgctgtgggattggatagtcgagagaaacaagcggggccgggagtatgtggacgagtctgcctgtccttatgttatggccaatgttgcaacaaaaatttttcaagaattggtagaaggtgtgttttacatacataacatgggaattgtgcaccgagatctgaagccaagaaatatttttcttcatggccctgatcagcaagtaaaaataggagactttggtctggcctgcacagacatcctacagaagaacacagactggaccaacagaaacgggaagagaacaccaacacatacgtccagagtgggtacttgtctgtacgcttcacccgaacagttggaaggatctgagtatgatgccaagtcagatatgtacagcttgggtgtggtcctgctagagctctttcagccgtttggaacagaaatggagcgagcagaagttctaacaggtttaagaactggtcagttgccggaatccctccgtaaaaggtgtccggtgcaagccaagtatatccagcacttaacgagaaggaactcatcgcagagaccatctgccattcagctgctgcagagtgaacttttccaaaattctggaaatgttaacctcaccctacagatgaagataatagagcaagaaaaagaaattgcagaactaaagaagcagctaaacctcctttctcaagacaaaggggtgagggatgacggaaaggatgggggcgtgggatgaaagtggacttaacttttaaggtagttaactggaatgtaaatttttaatctttattagggtatagttggtacaatgcttcgttgtatttagtaagcctttacaagacttgttaaagatgtcagagtgccccaagctgccgttccttcccttcctgccccacaagctccttttcctgaatttcctacctaaatattaaccatatgcctagtctctgaaactaaaaacttggacctcatcctcaattattttctcctttcaactctgttgaccctctgtctggtcttcctctagaaggtaccgcagaaattgatgtgtgctccctgccctcgtcactggcccaagcccgggcctgcacatactcactggactgttccagttttgacagctgccagtcttcctggcccctttcacactgcagctgaagttcattacctgaaggacgcctcatcatttcattccttggctccaaaccttctgctgcctctaagataaaagctcaacttcttaacaagggtacaagtngtgcaacttccaacctttttatctgttctctccaccttcagtttagcgtcattccaaaaccacacccttgcanagctntgtact

SEQ ID NO: 91006 - DNA, 2369 bp, Homo sapiens
atgatccctggctcttggcaacataaaatgaaacttcagctgattctcaagtcatcaaaggcctattatgttttgtccgatgctgccatgagtcttcagaaatacggaagagcattacgatacattaaattatctttgctaagccatgatacttattgctgcctctgcaccaatatgctttccgaagagctgttggatctctctcaatattagacactttgtggtgatatccaactaatgctggcccagaatgcaaataatagagcagcacaccttgaagagtttcattaccaaacaaaagaagaccaggagatcctgcatagtcttcacagagagtccagttgccaaggatttgcatgggcaactgatttgtctacagacttagaaagtcaactctctgttagttgtaaatgttatgaggctgctaatgaaatcttgcagtttagggacttgaaaagccaaaatccagaacactatgtacaagtattaaagagaatgggtaacattagaaatgaaattggtgtgttttacatgaatcaggctgctgcattacagagtgagagactagtgagcaaatctgtgtctgctgccgagcaacagttgtggaaaaaaagcttttcttgttttgaaaagggaattcacaactttgaatcaattgaggatgccaccaatgccgcccttttattatgtaacacgggaaggctcatgcggatttgtgcgcaggcccactgtggtgcaggggatgaactgaaacgtgaattttcaccagaagaaggcttgtattataataaggctattgattactatttgaaagcgctaaggtcattgggaacacgagacatacacccagctgtttgggattcagtgaactgggaattgtccactacttactttactatggcaactctacagcaagattatgctccgttatctagaaaagctcaggagcagattgagaaagaagtcagtgaggccatgatgaagtccctaaaatactgcgatgtggattcagtgtctgctcgacagcccctttgtcagtatcgagctgcaaccatccatcacaggctggcctccatgtaccacagctgtctgaggaatcaggttggtgatgaacaccttaggaaacaacaccgggtgctggcagatcttcattacagcaaggccgcaaagctgtttcagctgctgaaagatgctccctgcgaactgcttagagtacagctagagagagtagcatttgctgaatttcagatgaccagtcagaatagcaatgttggaaagttgaaaacactatctggggctcttgatataatggtgagaactgagcacgcattccagcttatccagaaggagcttatagaagaatttggccagcctaagagtggtgacgccgctgcagctgctgatgcttctcctagtctcaatcgagaagaagtgatgaaactcctcagtatatttgagtctcggttgtcatttcttctccttcagtccattaaactgctatcttcaactaaaaagaaaacaagcaataacatcgaagatgacacaattctcaaaaccaacaagcacatttactcccagcttttgagagcaactgcaaataaaaccgcgactcttctggaaagaatcaacgttatcgtccacctgctgggccagcttgccgccggcagtgcagcgagcagcaatgccgttcagtgactgcacagagccgtgtcccagacacgctgtcagtgccttcaacacggagccgggttgttcattcggtgctttgtttcattaaataatagggaaatatccatttaaaacaggtatatcagtggaaacacagagttattttaagtgacagacaaattacggttgagttctgtggcttcttcacttgaagtgctaacatcagaatcaaacttaaagcttccactatttatgtctttgagaagtatgtagtacctcggtattaacagacctggctgtgatgcagttacactttcacgtatttttgaaggatgtcaagctacacgggtctaaagatatgattattttggataaaatgttactttggtcaagagaacttttatccagatgacattacagggttcaagtggggttaggagacctcctgtacatctacagtgtttccttttaaattgtccagaaaaaaggtgtgttcttcataagcttcagtgcaggatttttcaaagacgagctgttgtgcaatttgctgtatttaatgcatgttctgaaaggattcacttttgactttatatgacagttgatcaagaacaggtactacccctttttttcatttcaaacttgaaactgtgaataaggtaagaaaactattttgaataaataaactatttatttaaaatgtc

SEQ ID NO: 91007 - DNA, 2126 bp, Homo sapiens
gcaaagtcctatgtattcttcagagttgttaggaaagaaaacaaataaggttagctacatatttagctaaccttagatttaataaactattaagttatttaggtcaaaaagaataactaaatggatgctacaaatttcaaccagtattttcgatttttttggggtctatcatctgaaccctcagtggcaaacaatacgaaaattcaacatatttttatttgttaaatatatgaatataattaaatatattccttcagtaaactgaactggacaaaactagagaacagaccttttccatactcatttaactttaaaatgatattactttgaattctactacataccatcttagatcctgttttgaaattccattcacattacattcgatttactagaatgcctttttttttcttttttgagatggggtctcactctgttgctcagcaggaatgcagtgggtacaatcacggactcactatacccttgaacttctggggctcaggggatcctcttgcctctgcaggcctaataatttttttttaatttttatttttttgtagagttggggatcttggcctggctaaccaggctggtctcaaacttgtggcttcacgcaatccccacacctcggccttccaaagtgctggggattacaggtgtaagccaccatgcctgatctggaatgctttctaaaaatatggcattataaacataatactaaagagaaaaaaaggttaaatttcacttcaagaaattatcagtctaatagcatcagtaaaaatggcacttttagtcatggcataaaatatacaataaggctatttttcaattattgttttcaagttggaaaatgcattatgaaacactcaaaaagatgctactgggtttactcatcaagtgcttttgacaccatataaatgacagagtaacaccacagttatgtgattgggactcaagaatccttaaatgttaggactgaaaacaggtatatgacttatttgtccagaatttatatttttctgtatcccaataaaataattaagccatgtgtattgtgtaaaattacagtctttcagtctgtcctatgtgcttgctctcctggctagatattagctaaaaattagcaaaaacagccatttcccctattattccccagcaaagatgtgaaaccaaaacgcctaaccttttctgcctggtggactgccctctactggactatttgaggtattcagccagcaggtcaatgtgactaaaaaggtaaacatagagataaatgtaaacattaaaaaaaaaggaaccctttagtatattaacttttaccatgaaaacaatttcagtcattttgagaactgacaatgaagatgtttatacagtcttagtctccttttcaaccttggaggcagatctgcagcaataatagtaacaagtaggagcaatgggtgtactatcatgaccatcttttatgatgactggtgcattaatacaaatcacatttttctgagtccattcatgctatggatgttttcttatgcataaacatagagtagacacatactaaatagatcacatctgttaagtctcttgccacaagcatcaaaacttttcagagctgtctcttccgtgaaaatccatttcatgtagtagcaagttgattttctttgtggttcatccccacgcctgagacttgcagtaatgtaaaaccagtttaccatcactgccaaaacactcatagagagttccaacttcttggtctggggaaggagcaaaggactgattcacataaataaactacaagaaaggaaggaaaaacagagatgtttaatggtatcctgattaatctgcatttttctgcattccaatcagctagctattttgtattgttttcacaattgaagaaagcttctctgaactcctaacttttctaaatagtcaatttaaagagatcattacgaagatctcatttttcctccagaggaataaaaataacacaattccagttcctagaacagtggttcctaactttgtataactaagaaacttttaaatattttttacaaataagctttttgaagagctgggctattcaagaaattaccttatcgtaaaaatgtccccacttacccaca

SEQ ID NO: 91008 - DNA, 3849 bp, Homo sapiens
aaagagaaaagggggcccaggggaccggcgttcagcatacggaggatcccaccggcctctgagttcccttagtatttattgatcattattgggtgtttctcggagagggggatgtggcagggtcataggataatagtggagagaaggtcagcaggtaaacaagtgaacaaaggtctctgcatcatagacaatgtaaaggattaagtgctgtgcttttagatatgcatacacataaacatctcaatgctttacaaagcagtattgctgcccgcaggtcccacctccagccctaaggcggtttttccctatctcagtagatggagcatacaatcgggttttataccgagacattccattgcccagggacaggcaggagacagatgccttcctcttgtctcaactgcaagaggcattccttcctcttttactaatcctcctcagcacagaccctttacgggtgtcgggctgggggacggtcaggtctttcccttcccacgaggccatatttcagactatcacatggggagaaaccttggacaatacctggctttcctaggcagaggaccctgcagtcttccgcagtgtagtgtgtccctgggtacttgagattagggagtggtccgcagtgtttgtgtccctgggtacttgagattagggagtggtgatgactcttaaggagcatgctgccttcaagcatctgtttaacaaagcacatcttgcaccgcccttaatccatttaaccctgagtggacacagcacatgtttcagagagcacggggttgggggtaaggtcacagatcaacaggatcccaaggcagaagaatttttcttagtacagaacaaaatgaaaagtctcccatgtctacttctttctacacagacacggcaaccatccgatttctcaatcttttccccacctttcccgcctttctattccacaaaaccgccattgtcatcatggcccgttctcaatggtcgctgtctcttcggagctgttgggtacacctgcagacaccattgatacaatcatcaaggctgcaagcagcatactctctggggtttgtttcacctttgtgttctctagatattttgtagctaactgcgtcagcttctttagttgtgcccaagttggcggctctgccttcttggtggatggcaacttcatctgttcttctgacgtcaccattttgttcatcttgtgagtcaacggtgctcgattgcgatgtctccgtctccgcggaggtgcttttctttgcatctctgatgggttcattgtagaacttcaaatgtcgtaaggctgactgtagatgtactcgggatctctcgtcgacttgtcctcaatgaccacgctcgagcgtaccttcaccctagagaaaagcctccacgttgggcaccagatgtaggggtgggttgcccctacacacctgtgggtgtttctcgtaaggtgggacgagagatttggaaaagaaaaagacacagagacaaagtatagagaaagaaagaaggggacccggggaaccagcgttcagcatatggaggatcccgccagcctctgagttcccttagtatttattgatcattcttgggtgtttctcgcagagggggatttggcagggtcataggacaatagtggagggaaggtcagcagatcaacaagtgaacaaaggtctctggttttcctaggcagaggaccctgcggccttccgcagtgtttgtgtccctgggtacttgagattagggagtggtgatgactcttaaggagcatgctgccttcaagcatctgtttaacaaagcacatcttgcaccgcccttaatccatttaaccctgagtggacacagcacatgtttcagagagcacggggttgggggtaaggtcttagattaacagcatcccaaggcagaagaatttttcttagtacagaacaaaatgaagtctcccatgtctacttctttctacacagacacggcaacaatctgatttctctatcttttccccacctttcccccttttctattccacaaaaccgccatcgtcatcatggcccgttctcaatgagctgttgggtacacctcccagacggggtggtggccgggcagaggggctcctcacatcccagaaggggcggccgggcagacgcaccccccacttcccagatggggacggccgggcagagacactcctcacttcccagacggggtcgcggccgggcagagacgctcctcacatcccagacggggcggcggggcagaggcgctccccacatctcagacgatgggtggccgggcagagacgctcctcacttcctagatgggatggcggccgggaagaggcgctcctcacttcccagactgggcagccaggcagaggggctcctcacatcccagacgatgggcggccaggcagagatgctcctcacttcccagacggggtggcggccgggcagaggctgcaatctcggcactttgggaggccaaggcaggcggctgggaggtggaggttgtagcgagccgagatcacgccactgcactccagcctgggcaccattgagcactgagtgaacgagactccgtctgcaatcctggcacctcgggaggccgaggctggcggatcactcgcggttaggagctggagaccagcccggccaacacagcgaaaccccgtctccaccaaaaaaatacgaaaaccagtcaggcgtggcggcgcgcgcctgcaatcccaggcacttggcaggctgaggcaggagaatcaggcagggaggttgcagtgagccgagatggcgggagtacagtccagcttcggcttggcatcagagggagaccgtggggagagggagagggagagggagagggagaacctaaatatacttctttgtagagaggatcgtgaactgctttaagtctggtggcatcagaggaaaaattagacatcttcaggttgattccacagagcagttgtttcctttttcacttgacttacatagaattaagtcaggttatataaataaatgtaaaatcaagttggtttttccattgtaaggagaaaaatgctttcatattacttaaaatgcatttcaataaatatagaaaattacatacaaatggccgggtgcggtggctcatgcctgtaatcccagaactttgggaggctgaggcatgcggatcacctgaggttgggagttcgagaccagcctgaccaatatggagaaaccctatctgtactaaaaatacaaaaagtagctgggcgtggtggcgcacatctgtaatcccagctacctggaaggccgagacacaagaattgcctgaacccgggaggccgaggctgcagtgagctgagatttcgtcactgcactccagcctgggcaacagagcaaggctgtctcacaaaagagtttcttagttgtaaactcctttagttttgtttgccaaaaaattataattctcattctcaaaacattttcactgtatgtaggagcctagcgtggtatcttattttagtacatcaaagctaatgttccactgccttctggcttctgtggattctgtcgagaagttagtctgccacctttttggtgatcaatctattcatgcccagcccaaatctattttttctggccgcttctaagatcttttactttgggccagatgcagcagctcatgcctgcaatcccagcactttaggatgccatggtgggaggatagcctgaagccaggagttcaagaccagcctgggcagcatagtgagaccctctattttaatttttttttaattttaataaaaaataagatcttttactttggtgctctacaatcatattatgccacatataggtatggatttttttgtatttt

SEQ ID NO: 91009 - DNA, 504 bp, Homo sapiens
  misc_feature (1)...(504): n = a,t,c or g
nttagtngcatgcggaaccgccccgataggtatgcctacggaaccccccggaattcaggttgacccacccgttcgataaaataatatatattatatatttagtacgagactttgcaaacaaggggttggtatatggaatataggagtgctttatgtggaaataagttcataaatcacaaaatttatagaatcacagattccctgaccttaatccttttgaccttctgccatacatttttgagctctgtcttccaagcaagctattccttcagaagtttctttttggaaggcatttccattactaaattcctgaggcaccagcagaacatatctttcgttgcgtaacttgtgtgatttacatcccaagctaaacactttttcttatgacgcccaaagtaaagataaataacagcttgttgccgtatctgtaggtaaactttctgaagctaaggggactctagttgaacttcagtttctattattatgtgcttgggggccctatag

SEQ ID NO: 91010 - DNA, 407 bp, Homo sapiens
cattaataagcaatgtgttaatatactcttaactactatcctgcactacttctcaaggggcagagctatgtgtgaactgtcaatccatccataaatagctatatatctatctactgcattttaacaaatctaaaatgctgtcaagtataagacagcctatttcagaaatgttaaaatgtggaaaactgtttatctttaaatcaatgaagggtagtatccatccatccatccatccatccatccatccatccatccatccatccatttttccttcccttccttcctctttgcatttatctggctaatctatcatctctctatttagaatatgtatatagatctaatataatatctagaatacaagatatattctttagtgagaaaaagcaaggagtagaacagcggag

SEQ ID NO: 91011 - DNA, 2782 bp, Homo sapiens
aaacacggtgaaaagaaaccgcccattacacaccccagtacaccagcagaggaaacttataacctcgggaggcaggtccttcccctcagtgcggtcacatacttccagaagagcggaccagggctgctgccagcacctgccactcagagcgcctctgtcgctgggacccttcagaactctctttgctcacaagttaccaaaaaaaaaagagccaacatgttggtattgctggctggtatctttgtggtccacatcgctactgttattatgctatttgttagcaccattgccaatgtctggttggtttccaatacggtagatgcatcagtaggtctttggaaaaactgtaccaacattagctgcagtgacagcctgtcatatgccagtgaagatgccctcaagacagtgcaggccttcatgattctctctatcatcttctgtgtcattgccctcctggtcttcgtgttccagctcttcaccatggagaagggaaaccggttcttcctctcaggggccaccacactggtgtgctggctgtgcattcttgtgggggtgtccatctacactagtcattatgcgaatcgtgatggaacgcagtatcaccacggctattcctacatcctgggctggatctgcttctgcttcagcttcatcatcggcgttctctatctggtcctgagaaagaaataaggccggacgagttcatggggatctggggggtggggaggaggaagccgttgaatctgggagggaagtggaggttgctgtacaggaaaaaccgagataggggaggggggagggggaagcaaaggggggaggtcaaatcccaaaccattactgaggggattctctactgccaagcccctgccctggggagaaagtagttggctagtactttgatgctcccttgatggggtccagagagcctccctgcagccaccagacttggcctccagctgttcttagtgacacacactgtctggggccccatcagctgccacaacaccagccccacttctgggtcatgcactgaggtccacagacctactgcactgagttaaaatagcggtacaagttctggcaagagcagatactgtctttgtgctgaatacgctaagcctggaagccatcctgcccttctgacccaaagcaaaacatcacattccagtctgaagtgcctactggggggctttggcctgtgagccattgtccctctttggaacagatatttagctctgtggaattcagtgacaaaatgggaggaggaaagagagtttgtaaggtcatgctggtgggttagctaaaccaagaaggagaccttttcacaatggaaaacctgggggatggtcagagcccagtcgagacctcacacacggctgtccctcatggagacctcatgccatggtctttgctaggcctcttgctgaaagccaaggcagctcttctggagtttctctaaagtcactagtgaacaattcggtggtaaaagtaccacacaaactatgggatccaaggggcagtcttgcaacagtgccatgttagggttatgtttttaggattcccctcaatgcagtcagtgtttcttttaagtatacaacaggagagagatggacatggctcattgtagcacaatcctattactcttcctctaacatttttgaggaagttttgtctaattatcaatattgaggatcagggctcctaggctcagtggtagctctggcttagacaccacctggagtgatcacctcttggggaccctgcctatcccacttcacaggtgaggcatggcaattctggaagctgattaaaacacacataaaccaaaaccaaacaacaggcccttgggtgaaaggtgctatataattgtgaagtattaagcctaccgtatttcagccatgataagaacagagtgcctgcattcccaggaaaatacgaaaatcccatgagataaataaaaatataggtgatgggcagatcttttctttaaaataaaaaagcaaaaactcttgtggtacctagtcagatggtagacgagctgtctgctgccgcaggagcacctctatacaggacttagaagtagtatgttattcctggttaagcaggcattgctttgccctggagcagctattttaagccatctcagattctgtctaaaggggttttttgggaagacgttttctttatcgccctgagaagatctaccccagggagaatctgagacatcttgcctacttttctttattagctttctcctcatccatttcttttatacctttcctttttggggagttgttatgccatgatttttggtatttatgtaaaaggattattactaattctatttctctatgtttattctagttaaggaaatgttgagggcaagccaccaaattacctaggctgaggttagagagattggccagcaaaaactgtgggaagatgaactttgtcattatgatttcattatcacatgattatagaaggctgtcttagtgcaaaaaacatacttacatttcagacatatccaaagggaatactcacattttgttaagaagttgaactatgactggagtaaaccatgtattcccttatcttttactttttttctgtgacatttatgtctcatgtaatttgcattactctggtggattgttctagtactgtattgggcttcttcgttaatagattatttcatatactataattgtaaatattttgatacaaatgtttataactctagggatataaaaacagattctgattcccttcaaaaaaaaaa

SEQ ID NO: 91012 - DNA, 3503 bp, Homo sapiens
  misc_feature (1)...(3503): n = a,t,c or g
cggcaaaaagacaacatacttagaaataaagttaaataaggaggtaaaagactcgtacactgaaaactataaaacattggtgaaagaaattaaagaaatgaataagtgaaagatggcccatgttcatggattagaagaactaatattgttaaagtgtccatactacccaaaatgatctacaaattagatgcaatccctatcaaaactccaatggcatatttacagggttagaaaaaacaattataaaattcacatgaacccacaaaagagctcaaatggccaaatcaattgtgagaaaaaaagaacaaagctggaggcatcacagttcttaatttcaaaatatattagaaagctatggcaatgagaacagtatgctactggcataaaaatagacatgtggaccgatggatcagaagagagaccccagtaggaaatttgcacatatacagtgatctgatctgcaacaagggtgccaagaataaacagtgctacaagcagaacgggcaactacagctcttttgtttaacgaaagagagaaaatgaaagaaagggaaaatttcagaagactaggacccatatgaacaaggagggtaactcgaagacaagcagacagatggacactttggatactgtgaaaagcaatcgcaggaggcagactgttgggggatgtgcgcatgttcgatagcatcttttttgctgaagtgatggcgtgccaaaagtattttcagtgggcataatcctcttcacataaatggcctgaccaaggaagaatgactacaagagagacaatgtgactgaattagaaaatgattgccaaagaatagtattaaggagaagaaaacatttttggtcaccaatctctcatataccactactggatatttacaacatgcttcagtggaggagaagacactgctgctttgcaaagatgacctggaatgccaaaaggtctctgttccgcactcatcttattggagtactttctctagtgtttctttttgctatgtttttgtttttcaatcatcatgactggctgccaggcagagctggattcaaagaaaaccctgtgacatacactttccgaggatttcggtcaacaaaaagtgagacaaaccacagctcccttcggaacatttggaaagaaacagtccctcaaaccctgaggcctcaaacagcaactaactctaataacacagacctgtcaccacaaggagttacaggcctggagaatacacttagtgccaatggaagtatttacaatgaaaaaggtactggacatccaaattcttaccatttcaaatatattattaatgagcctgaaaaatgccaagagaaaagtccttttttaatactactaatagctgcagagcctggacaaatagaagctagaagagctattcggcaaacttggggcaatgaaagtctagcacctggtattcaaatcacaagaatatttttgttgggcttaagtattaagctaaatggctaccttcaacgtgcaatactggaagaaagcagacaatatcatgatataattcaacaggaatacttagatacgtactataatttgaccattaaaacactaatgggcatgaactgggttgcaacatactgtccacatattccatatgttatgaaaactgacagtgacatgtttgtcaacactgaatatttaatcaataagttactgaagccagatctgcctcccagacataactatttcactggttacctaatgcgaggatatgcacccaatcgaaacaaagatagcaagtggtacatgccaccagacctctacccaagtgagcgttatcctgtcttctgttctggaactggttatgttttttctggagatctggcagaaaagatttttaaagtttctttaggtatccgccgtttgcacttggaagatgtatatgtagggatctgtcttgccaagttgagaattgatcctgtaccccctcccaatgagtttgtgttcaatcactggcgagtctcttattcgagctgtaaatacagccacctaattacctctcatcagttccagcctagtgaactgataaaatactggaaccatttacaacaaaataagcacaatgcctgtgccaacgcagcaaaagaaaaggcaggcaggtatcgccaccgtaaactacattagaaaagacaattttttttcaaatgtgcaatttgtaaatattgctaaaagcatgtatagttagaactgattacatccgtaggacaagttttagttaaaactcatcacataaagaaattcaagaagtatttttttaatttctgaagaagttaattcttaaaactataacattatataacaaaaaaggtttcccaaaacaatctatttaaaaaactgtataaggagattctgtgtattaacatgcaataacaagcatgcataaatcaatggttcaagtcttctgttaggggccaataaaatgtatctgcatatgttttccacataaattttaattcaagaaatgacagtcaaaagatccttcattttagattaagcttttcattttaatatataatttaatgtaaataaaacatcactatcaattttaaggaaactttttaattgtgcaaaggataaattttttgacctattttagggttctaaatgcaataagatttagttgagttattccacaaacacattataaagttcagatgtttcatcaatgcagttctcacgaaagtatttactttttaaaaataactgagatattattttaaatttcttttattaatactttcttttattaatatatgggggaaaattattttgacatgacgtggtaaaatgtgaaaaactaatgtgtctcaggctcaagtttttatagttattaaatgtttcaaaatagacaagttttgtttcctcattgatgttaagaaccaaactcctatttcaatgagttattggattagaccaattactgcactcttaaacagcaccaccatttaatttcatgtatatctaacttcgaatatatctgtaaagataatcgaagcaaaagtaatcacttaaaggcacaaataggatgtactgttgaaaaagataaagatgtgcagggtgcagtttcattcaacacatttttaaagatgcatgtctggccaaaatgccaacatacngggaagtttatttccctgacagtcaggtgttacacatgcccaacacttaatcattgtatggcacctatttcctttccttggagtgcccaagtttgcaaacctgcagtttttaatttggtagatgacaaatattctgaatcaccaattaaaaacctttttgggagggatggggaaaactacaaacgtttgacaaacacaattctaggatgaacaatgtatacaatgcacttttatgaagtttttaaaaataaaggaaaacaaaaaactttactgagtgttataagtattttcacaataattttgtttgactccatcatgaattttaaaatcaagaaataccaacctactaacta

SEQ ID NO: 91013 - DNA, 2325 bp, Homo sapiens
tgggggggtctacagcttccggctccaccaggaaactctcctcttccaggaaagaggagtagcttataggatgggttttgttttggatatcgtttcccaatgcattgatgtgctgcactgggccatagactgctgtgaccaggtacacacttgctttataactgatggagcaactcctcagcaggagagttgccagtcttgtgcaggaacatatccagctccatggcaggtcaggcttagatcagacattgtcatggttgggctctccaggaaagatggatttgctccagtttgccctgaacgtctccctcatggccagtccacgccgaaaagggcttcactggccctcaagagccctggggacccgccccagctctgccatcccactgggatctacaagccactcagatgtgctgctgcggtgtcctttgtgctggtggcagccctggaagatgagaagccgctgttgctcccctgccgccctggcccagctgtcaggacccctcagcagagggcagggcgccaagccttcccactgcatgtggcttattgtccccaaggctggcagggctgcggaggaccgaatccacagaccatccagggagcacccacaccccagaaagggggaggggtgggctggcgtcacttagtcttcccctgccccctacccttcagcgcctgcccctccccagctccctatttggccatccccctgactgccccctccccttccttacatggtctgggggctccctggctgatcctctcccctgcccttggctccatgaatggcctcggcagtcctagcgggtgcgaaggggaccaaataaggcaaggtggcagaccgggccccccacccctgcccccggctgctccaactgaccctgtccatcagcgttctataaagcggccctcctggagccagccacccagagcccgccgccgccgccggagccgagccgacccgccccgccgacgaaccccctgaagctgtgccaagatgtgtgacgacgaggagaccaccgccctggtgtgcgacaacggctctgggctggtgaaggccggctttgcgggcgatgacgcgccccgcgctgtcttcccgtccatcgtgggccgcccgcggcaccagggagttatggtgggtatgggtcagaaggactcctacgtaggtgatgaagcccagagcaagagaggcatcctgaccctgaagtatcccatcgagcatggtatcatcaccaactgggacgacatggagaagatctggcaccacaccttctacaatgagctccgtgtggctcccgaggagcaccccaccctgctcacagaggccccgctgaaccccaaggccaaccgggagaagatgactcagatcatgtttgagaccttcaatgtccctgccatgtacgtggccatccaggcagtgctatccctgtatgcttctggccgtaccacaggcattgttctggactctggggatggtgtaactcacaatgtccccatctatgagggctacgctttgccccatgccatcatgcgtctggatctggctggtcgggacctcactgactacctcatgaagatcctcactgagcgtggctactcctttgtcaccactgctgaacgtgaaattgtccgtgacattaaagagaagctgtgctatgtcgccctggattttgagaatgagatggccacagctgcctcttcctcctccctggagaagagctatgaactgcctgatggccaagtcatcactattggcaatgagcgcttccgctgtcctgagacactcttccagccctccttcattggtatggaatctgctggcatccatgaaacaacttacaatagcatcatgaagtgtgacattgatatccgcaaggacctgtatgccaacaatgtcttatctggaggcaccactatgtaccctggtattgctgatcgtatgcagaaggaaatcactgctctggctcctagcaccatgaagattaagattattgctccccctgagcgtaaatactctgtctggattgggggctccatcctggcctctctgtccaccttccagcaaatgtggattagcaagcaagagtacgatgaggcaggcccatccattgtccaccgcaaatgcttctaagatgccttctctctccatctaccttccagtcaggatgacggtattatgcttcttggagtcttccaaaccaccttccctcatctttcatcaatcattgtacagtttgtttacacacgtgcaatttgtttgtgcttctaatatttattgctttataaataaaccagaccaggacttgcaacctaaaaaaaaaa

SEQ ID NO: 91014 - DNA, 417 bp, Homo sapiens
agattgcataagactaacagtaatagaacttcataataaagtccatctttactatggactttactccatatactccaattactccatctacagtaaatgaatcacataaggcttataaggatatcttaaaattatttggaatactgtttcttaacagttttccctagttaaagcaatgagcacttatggtgagaaaaatacctcacccagaatgttatttacaccttaacctaaagagggtgaaatcagcaatcccacccataccccattccttcctttttcttctcagcatgtttatcctggaaacatgacattagtttctagaaatgttcagctaagaaaagtttcatatagattcagacattcaaatgttcatacaggacatctgaactttatcaaaagagtaaaacagaaaat

SEQ ID NO: 91015 - DNA, 1363 bp, Homo sapiens; identical to SEQ ID NO: 58932

SEQ ID NO: 91016 - DNA, 821 bp, Homo sapiens
actgatcccctcggaccggccttgatcccgttcgacccacgcgtccgatagcaaataaatttgaaataatggtttacaagtgctatgaggacataaccaagaaacaacatactacaagagatcagagcaggcttagcgagatgtgatttttgaaatgaatcctaaatgatgaacactaattatgtaatgagtactactcatgtagccatgtgcatccctgcatgtgcctgtgcgtgtgtgtatgcggtgtgctgggtgttaatctaggtaaagcagacagtcgagttctgtcatacttgctgcagctggattccacgttcccatgtctagtttcagattctgtggctttgaggtagtgctgctggcagcatcattgcagcaaccgtcatttctctatccctgagtcatagttacgggagtttaccttgaaatcactagcctataagtggtatcattacttttacagcccatgtatcaattctgaaaccgctaatttgaagcagtgcaggtggcgaaataattaaaacaaacgttgtttctctatctctgagtcataagtacattaggttaccttgagatcactaacccataaaagatttcattacttttacagcccacctaccaattttgaatggactaagttggcagaatattatgttttgaataaataagtagagactttggtctctgacctgaaccttgacagaaaattatgttttggtaggaggcgggatggcttcaaatattctaagttttatataagaaaaggaacagtttcattgcccctggattaaaaacctattttttgattaaatagtatt

SEQ ID NO: 91017 - DNA, 807 bp, Homo sapiens
tgccgtacctgccgggtcgacccacgcgtccgccttaactgtcagatatattatggaaaactgaagaggagaggaaagtctgttgtatatacccatgtgcttgctctttccattgcccttttcttccaagaggtttgctgattgcttactttgagctttactgtttggcaactattttatgttcagattcccaaagactattcattatgaggaaacagtgacaaaatcatagtctgtttatctgaaatataaagactgaaatgacagtgtagagaaatgaagtcatcttctgaattaggcatttttcttggaatgggtacaaccctaccactactctacatcatggaagtcttaacgatttagggtaatacaataatgagaataccaatatggatctattaaatgaggagctgagtaagctccaaatttccctctagattggtaagtctataatttattatatgaaattcctaattattaccatactaagttcaaaagattttaacccaaatcctttagtaactgataaacctcattcttaaaattcttgacagaaataatcttgatgagcttcttctcttcatgacctttccaatgctggtataattttgagggaattactcttattttcattaattctgtggcacggaggaaaagactgactctgtggtgggggctcccttccttacacggcccaccacctatatggcccgtgacgagcgtacttccacgattgttccaatcacaacctgctggctggccaatttccttcaccacaaccccatctgggtataccgcctggcttac

SEQ ID NO: 91018 - DNA, 461 bp, Homo sapiens
  misc_feature (1)...(461): n = a,t,c or g
tccgaaatcctcgaaacactgaggacctccgggnngacccacgcgtncggtaagaataaggaagtctaaatgtaagaggtcaggccaatgtcacaaatgatttagcaatcacaagcaaacttgagagatgattgaataatgttatgtgaacttcttgcaaccacggggaaatcaattacccaagccttagatgttcccttgccaaggcagggtggacagtgtttagggccatgtttattcacctggcacttgcctaatgaaaagggatggttttaagaactacttggaaaatgtttttgaaaggattgccaaatcctcgtgctggaggattattggatcaaatatgcaattgcttgttgaaatggagctctgaatggcctctgtatgcagacagccagagtctctgagaattgtaagccaaaaaagtaagaaccttaagtcaaagaaagggcagctcaccg

SEQ ID NO: 91019 - DNA, 416 bp, Homo sapiens
aaatgagtgtgtattgagcactcacttccctacaacttaaacgtatttaatgtgtaatataatacctcaaatattttactgcagtaatttctcagttcttcacttggggcagagttaagagtacttggaacctcattaagtataacagatgaaacagcaaggattaggaatcaaacccagagtccctgaggattttgtaggatagtgttggtatttagtgcattgttagtttggatggggaactttggtgattattttgaagattgccacagtgttgccttgaaggctgcccggggttcattttgaatttgcattcctgctcaagttcatgggctctctgttgattgagtatatttggctcctttccttttacctatcagggaggaagcatctttgtgtgtttggccctgtactta

SEQ ID NO: 91020 - DNA, 7018 bp, Homo sapiens
ttttttttttttaatgagactgtgctattcactgttcttttaggaatctctggctccccacaaacactattttgtgaagacatgctccagaccactgtgtatgccaatatctctttctccccagagcactgctgacacccctacacaaattaatgtccccatctctactgatacatctgataggtacaaacgatgtgtccgtgatgactggtggggctcatgtaatccccacctaagaaaagtagaaagtgcaacttatcttttaggttaataagtgctgagagatggaggtttttccttctcattttgatggagatgcctagaaaacctcgcctgacactctttgtccaacgcaggatagagaacatagcaacagaaagggaatttgatccggaagaattttactacctattggaagcagcagaaggccatgccaaagaaggacagggtattaaaaccgacattcccaggtacatcattagccaactgggactcaataaggatcccttggaagaaatggctcatttgggaaactacgatagtgggacagcagaaacaccagaaacagatgaatcagtgagtagctctaatgcctccctgaaacttcgaaggaaacctcgggaaagtgattttgaaacgattaaattgattagcaatggagcctatggggcagtctactttgttcggcataaagaatcccggcagaggtttgccatgaagaagattaataaacagaacctcatccttcgaaaccagatccagcaggcctttgtggagcgggatatcctgacttttgcagaaaacccctttgttgtcagcatgtattgctcctttgaaacaaggcgccacttgtgcatggtcatggaatatgtggaagggggagactgtgctactttaatgaaaaacatgggtcctctccctgttgatatggccagaatgtactttgctgagacggtcttggccttggaatatttacataattatggaattgtacacagggatttgaaaccagacaacttgttggttacctccatggggcacataaagctgacagattttggattatctaaggtgggactaatgagcatgactaccaacctttacgagggtcatattgagaaggatgctagagagttcctggataaacaggtctgtggcacacctgaatacattgcaccagaagtgattctgaggcagggttatggaaagccggtggactggtgggccatggggattatcctctatgaatttctggttggatgcgtgccattctttggggatactccagaggagctatttggacaagtcatcagtgatgagatcaactggcctgagaaggatgaggcacccccacctgatgcccaggatctgattaccttactcctcaggcagaatcccctggagaggctgggaacaggtggtgcatatgaagtcaaacagcatcgattcttccgttctttagactggaacagtttgctgagacagaaggcagaatttattccccaactggaatctgaggatgacacaagttattttgatactcggtctgagaagtatcatcatatggaaacggaggaagaagatgacacaaatgatgaagactttaatgtggaaataaggcagttttcttcatgttcacacaggttttcaaaagttttcagcagtatagatcgaatcactcagaattcagcagaagagaaggaagactctgtggacaaaaccaaaagcaccaccttgccatccacagaaacactgagctggagttcagaatattctgaaatgcaacagctatcaacatccaactcttcagatactgaaagcaacagacataaactcagttctggcctacttcccaaactggctatttcaacagagggagagcaagatgaagctgcctcctgccctggagacccccatgaggagccaggaaagccagcccttcctcctgaagagtgtgcccaggaggagcctgaggtcaccaccccagccagcaccatcagcagctccaccctgtcagttggcagtttttcagagcacttggatcagataaatggacgaagcgagtgtgtggacagtacagataattcctcaaagccatccagtgaacccgcttctcacatggctcggcagcgattagaaagcacagaaaaaaagaaaatctcggggaaagtcacaaagtccctctctgccagtgctctttccctcatgatcccaggagatatgtttgctgtttcccctctgggaagtccaatgtctccccattccctgtcctcggacccttcttcttcacgagattcctctcccagccgagattcctcagcagcttctgccagtccacatcagccgattgtgatccacagttcggggaagaactacggctttaccatccgagccatccgggtgtatgtgggagacagtgacatctatacagtgcaccatatcgtctggaatgtagaagaaggaagtccggcatgccaggcaggactgaaggctggagatcttatcactcacatcaatggagaaccagtgcatggacttgtccacacagaagttatagaactcctactgaagagtgggaataaggtgtcaatcactactaccccatttgaaaacacatcaatcaaaactggaccagccaggagaaacagctataagagccggatggtgaggcggagcaagaaatccaagaagaaagaaagtctcgaaaggaggagatctcttttcaaaaagctagccaagcagccttctcctttactccacaccagccgaagtttctcctgcttgaacagatccctgtcatcgggtgagagcctcccaggttcccccactcatagcttgtctccccggtctccaacaccaagctaccgctccacccctgacttcccatctggtactaattcctcccagagcagctcccctagttctagtgcccccaattccccagcagggtccgggcacatccggcccagcactctccacggtcttgcacccaaactcggcgggcagcggtaccggtccggaaggcgaaagtccgccggcaacatcccactgtccccgctggcccggacgccctctccaaccccgcaacccacctccccgcagcggtcaccatcccctcttctgggacactcactgggcaattccaagatcgcgcaagcctttcccagcaagatgcactccccgcccaccatcgtcagacacatcgtgaggcccaagagtgcggagccccccaggtccccgctgctcaagcgcgtgcagtccgaggagaagctgtcgccctcttacggcagtgacaagaagcacctgtgctcccgcaagcacagcctggaggtgacccaagaggaggtgcagcgggagcagtcccagcgggaggcgccgctgcagagcctggatgagaacgtgtgcgacgtgccgccgctcagccgcgcccggccagtggagcaaggctgcctgaaacgcccagtctcccggaaggtgggccgccaggagtctgtggacgacctggaccgcgacaagctgaaggccaaggtggtggtgaagaaagcagacggcttcccagagaaacaggaatcccaccagaaattccatggacccgggagtgatttggaaaactttgctctgtttaagctggaagagagagagaagaaagtctatccgaaggctgtggaaaggtcaagtacttttgaaaacaaagcgtctatgcaggaggcgccaccgctgggcagcctgctgaaggatgctcttcacaagcaggccagcgtgcgcgccagcgagggtgcgatgtcggatggcccggtgcctgcggagcaccgccagggtggcggggacttcagacgggcccccgctcctggcaccctccaggatggtctctgccactccctcgacaggggcatctctgggaagggggaaggcacggagaagtcctcccaggccaaggagcttctccgatgtgaaaagttagacagcaagctggccaacatcgattacctccgaaagaaaatgtcacttgaggacaaagaggacaacctctgccctgtgctgaagcccaagatgacagctggctcccacgaatgcctgccagggaacccagtccgacccacgggtgggcagcaggagcccccgccggcttctgagagccgagcttttgtcagcagcacccatgcagctcagatgagtgccgtctcttttgttcccctcaaggccttaacaggccgggtggacagtggaacggagaagcctggcttggttgctcctgagtcccctgttaggaagagcccctccgagtataagctggaaggtaggtctgtctcatgcctggagccgatcgagggcactctggacattgctctcctgtccggacctcaggcctccaagacagaactgccttccccagagtctgcacagagccccagcccaagtggtgacgtgagggcctctgtgccaccagttctccccagcagcagtgggaaaaagaacgataccaccagtgcaagagagctttctccttccagcttaaagatgaataaatcctacctgctggagccttggttcctgccccccagccgaggtctccagaattcaccagcagtttccctgcctgacccagagttcaagagggacaggaaaggtccccatcctactgccaggagccctggaacagtcatggaaagcaatccccaacagagagagggcagctcccctaaacaccaagaccacaccactgaccccaagcttctgacctgcctggggcagaacctccacagccctgacctggccaggccacgctgcccgctcccacctgaagcttccccctcaagggagaagccaggcctgagggaatcgtctgaaagaggccctcccacagccagaagcgagcgctctgctgcgagggctgacacatgcagagagccctccatggaactgtgctttccagaaactgcgaaaaccagtgacaactccaaaaatctcctctctgtgggaaggacccacccagatttctatacacagacccaggccatggagaaagcatgggcgccgggtgggaaaacgaaccacaaagatggcccaggtgaggcgaggcccccgcccagagacaactcctctctgcactcagctggaattccctgtgagaaggagctgggcaaggtgaggcgtggcgtggaacccaagcccgaagcgcttcttgccaggcggtctctgcagccacctggaattgagagtgagaagagtgaaaagctctccagtttcccatctttgcagaaagatggtgccaaggaacctgaaaggaaggagcagcctctacaaaggcatcccagcagcatccctccgccccctctgacggccaaagacctgtccagcccggctgccaggcagcattgcagttccccaagccacgcttctggcagagagccgggggccaagcccagcactgcagagcccagctcgagcccccaggaccctcccaagcctgttgctgcgcacagtgaaagcagcagccacaagccccggcctggccctgacccgggccctccaaagactaagcaccccgaccggtccctctcctctcagaaaccaagtgtcggggccacaaagggcaaagagcctgccactcagtccctcggtggctctagcagagaggggaagggccacagtaagagtgggccggatgtgtttcctgctaccccaggctcccagaacaaagccagcgatgggattggccagggagaaggtgggccctctgtcccactgcacactgacagggctcctctagacgccaagccacaacccaccagtggtgggcggcccctggaggtgctggagaagcctgtgcatttgccaaggccgggacacccagggcctagtgagccagcggaccagaaactgtccgctgttggtgaaaagcaaaccctgtctccaaagcaccccaaaccatccactgtgaaagattgccccaccctgtgcaaacagacagacaacagacagacagacaaaagcccgagtcagccggccgccaacaccgacagaagggcggaagggaagaaatgcactgaagcactttatgctccagcagagggcgacaagctcgaggccggcctttcctttgtgcatagcgagaaccggttgaaaggcgcggagcggccagccgcgggggtggggaagggcttccctgaggccagagggaaagggcccggtccccagaagccaccgacggaggcagacaagcccaatggcatgaaacggtccccctcagccactgggcagagttctttccgatccacggccctcccggaaaagtctctgagctgctcctccagcttccctgaaaccagggccggagttagagaggcctctgcagccagcagcgacacctcttctgccaaggccgccgggggcatgctggagcttccagcccccagcaacagggaccataggaaggctcagcctgccggggagggccgaacccacatgacaaagagtgactccctgccctccttccgggtctccaccctgcctctggagtcacaccaccccgacccaaacaccatgggcggggccagccaccgggacagggctctctcggtgactgccaccgtaggggaaaccaaagggaaggaccctgccccagcccagcctcccccagctaggaaacagaacgtgggcagagacgtgaccaagccatccccagccccaaacactgaccgccccatctctctttctaatgagaaggactttgtggtacggcagaggcgggggaaagagagtttgcgtagcagccctcacaaaaaggccttgtaacggggagggcccaggggcaggactgtggagacccgtcctgaacgggcgactgtgtcttgactacctttcaaaaccagcactgtgtgggaatgtccgccaggcagagctcggagcctcattgagacaggggagagagaaagacaaagaggggaccttcttccagatgccttcccagttgtaaccggtaaaactgttaccagatagtgtttgtacaaaaaaaaaa

SEQ ID NO: 91021 - DNA, 1870 bp, Homo sapiens; identical to SEQ ID NO: 77088

SEQ ID NO: 91022 - DNA, 393 bp, Homo sapiens
aagtgaatgtatatgttttagtttgtttcaggactctccattctgttccattgatctattttgtatatctttgtgccactgctgtgctctattaatgactgagctttgcaatgttttaatattgggcagcagtagaagtcactcagtgttgtttttcttctttgggattgcacaagagctgaatttattcctgtgtacttttaaagaagagcatttttttaactggcaggtagatttcctagggttaatccaaatgtgttaattgttctctctaatgcagacatcttcctttttcttgaggcctcggtttatttccttatccagactgtgttagctgcatagcttaataaaaggacttttatttttcctagtttgataatacgggtttctttt

SEQ ID NO: 91023 - DNA, 685 bp, Homo sapiens
attattgcttcttttgcccattttctaagggagcgtccatctttttacacaagatactcgaactacaggctgaaggcgaacagagggccccaagggttgcttgtgatgcggtaggcatccagagagcccatctaggtgtaggttgccaaatcaaggaggccttcctggaggaggtggtgttcatctgctgggattccctgttggaaatgttaaatttgctgaatgaatggatggatttttttctagaataagaatggaacagttgatgtccataacccaggaggagactgagagcctgcggcgacgtgacgttgcctccgccatgcagcagatgctgactgagagctgtaagaaccggctcatccagatggcctacgaatctcagaggcagaacttggtccagcaggcctgttccaggtaaggtaaggaagaggagtcccaggtgagggagctgggggagctggctcagggcccaagaccgtgggatgagagctgggcactaaacctcccgccctgggccaccccagcctctgctctgctgttaggggcaagtgatggctgctcttcctgagttttctagccggatccatgattcagtgttgggctgtgttaaagtggtaacagtcattcccatttcttgtgcacttcctgtgtggcaggcactcggcaaagcgatgaaccacat

SEQ ID NO: 91024 - DNA, 1490 bp, Homo sapiens; identical to SEQ ID NO: 59995

SEQ ID NO: 91025 - DNA, 1337 bp, Homo sapiens
ccagccatccagccagccatccagccagccaaccaactatccatccacaatttgtggacacaattccggcattcaaccaaaattccagttgaatgggtgaatggtgaatggctgaatggacgaatgacaggggatcatcatgaatggcaatgcaactatcagagcagccgaaccgccgccagccattcaccatccatccagccagccatccagccagccatccagccagccaaccaactatccatccacaatttgtggacgcaattccggcattcaaccaaaattccagttgaatgggtgaatggtgaatggctgaatggacgaatgccaggggatcatcatgaatggcaatgcaactatcaggaacatgacggtatctgcgagatccatgttgctaaatatgctgaaatattcggattgacctctgcggaagccagtaaggatatacggcaggcattgaagagtttcgcggggaaggaagtggttttttatcgccctgaagaggatgccggcgatgaaaaaggctatgaatcttttccttggtttatcaaacgtgcgcacagtccatccagagggctttacagtgtacatatcaacccatatctcattcccttctttatcgggttacagaaccggtttacgcagtttcgccattcaccatccatccagccagccatccagccagccatccagccagccaaccaactatccatccacaatttgtggacacaattccggcattcaaccaaaattccagttgaatgggtgaatggtgaatggctgaatggacgaatgccaggggatcatcaaagaatggcaatgcaactatcagccattcaccatccatccagccagccatccagccagccatccagccagccaaccaactatccatccacaatttgtggacacaattccggcattcaaccaaaattccagttgaatgggtgaatggtgaatggctgaatggacgaatgccaggggatcatcatgaatggcaatgcaactatcagacagccatccagtcagccatccagccagccaatcatctatccatccacaatttgtgggcgcaattacggcactcacccaaaattccagttgaatgggtgaatggtgaatggctgaatggacgaatgccaggggaacatcatgaatggcaatgcaactatcagccagccatccagccagccatccagccagccaaccaactatccatccacaatttgtggacacaattccggcattcaaccaaaattccagttgaatgggtgaatggtgaatggctgaatggacgaatgccaggggataatcatgaatggcaatgcaactatcag

SEQ ID NO: 91026 - DNA, 1137 bp, Homo sapiens
cccgggcgaccacgcgtccgaaaaatgaagtccaggactatgtcagtgtagaatacctgtctccccacatgggtggaactgatcctttcaagtatagctatccaccactagtagatgatgacttccagaccccactgtgtgagaatgggcctattaccagtgaggatgaaacttcaagtaaagaagacatagaaagtgatggcaaagaaacattggaaacaatttctaatgaagaacaaacacctcttcttaaaaagattaacccaaccgaatctacttccaaagcagaagaaaatgaaaaagttgattcaaaagtgaaagctttcaagaaaccattgagtgtatttaaaggccccttactacacatcagcccagcagaagaactgtactttggaagtacagaatccggagagaagaaaaccttaatagtgttgacaaatgtaactaaaaatatagtggcatttaaggtgagaacaacagctccagaaaaatacagagtcaagccaagcaatagcagctgtgacccgggtgcatcagtggatatagttgtgtctccccatgggggtttaacagtctctgcccaagaccgttttctgataatggctgcagaaatggaacagtcatctggcacaggcccagcagaattaactcagttttggaaagaagttcccagaaacaaagtgatggaacataggttaagatgccatactgttgaaagcagtaaaccaaacactcttacgttaaaagacaatgctttcaatatgtcagataaaaccagtgaagatatatgtctacaactcagtcgtttactagaaagcaataggaagcttgaagaccaagttcagcgttgtatctggttccagcagctgctgctttccttaacaatgctcttgcttgcttttgtcacctctttcttctatttattgtacagttaaagaagtggtgccgggtaggaaccacggttccttcgtccattagttggaaaaagtaacagacctaaaactctaccaagctactaaaaacattgcacatctgtgcttcctaaaaggaaatatgcagcacgtggaggggaacacatacatgtcttgaaaataaactgctagaataaagaaatgctggagaaattgaaaaaaaaaa

SEQ ID NO: 91027 - DNA, 885 bp, Homo sapiens
accagtttaccccctaaccagtatgaaaatacctttcttgctgtgcccttgccacgttgaatcttggttttaaaaatttgctaatccaaattcattttgaaaatgttttcattgttttttgtgttactttgttttgcaccatctcttctgcttctgatgaaagcatgtttcactagaatatataccatatatactagggtatatatatacatattgaacttctctgaagaaagataaatggatgaagctgtgaaatagtatctgtgtatctatatgacttttttttaaaaaactggacacaggttttattataaggagatactattctagggtgaattactattttaaagttggtaaaacctttttaaacttttacaaagtttagatttctctttcaatgaaaattgacaaatttctaaacaaagtttgtttttacttagttttctctgtagcaactccataattaggaaagcagccttagcagcttatttgtttactcaagtggaatagcttggtaccacttttattacttttattttaagcatgagagcacttctctattataattggttttaggctcaaagagcaggctaaggcagaagagtaagataaatgtaagaaattaatctcccctcctctgcccctccccacatcttcctgctttcatagtgtacctaagatagagttgagcaaggagaatatatacaataaatgaaataaatgtcttagatatgacattaaattttgtgaatatttatgtacacacaaacatgtatataaataacttgggtgtgtttctactatggatctctgattactacatcccagttcccttttatctattgcttatatcaagggattctttttttttaatccaaatgattt

SEQ ID NO: 91028 - DNA, 2397 bp, Homo sapiens
tgactctcttttcggactcagcccacctgcacccaggtgaaacaaacagccatgttgctcacacaaagcctgtttggtggtctcttcacacggacgcgcatgaaatttagtggatcaggggacctcccttaggagatcaatcccctgtcctcctgctctttgctccgtgagaaagatccacctatgacctcaggtcctcagaccgacctgcccaagaaacatctcaccaatttcaaatccgagacaaaggagacacgttttatctgtggacccaaaactccggcgccgctcatggactagggaaggcagccttcccttggtgtttaacctttgcagggatgcctctctgattattcacccaggtttcagaggtgtcagaccacgcagggacacctgccttggtccttcacccttagcagcaagtcccacttttctgggggaaggggcaagatttaattaacctcgccttcaaggtgtacaataatagaaaaaagttgcaattccttgcctccactgtgagacaaaccccagccacatctccagcacacaagaacttccaaacgcctgaactgtagcagccagacgtttctccagaacctcctcccccaggaacttgctacacatgccggaaatctggccactgggccaaggaacgcccgcagcccgggattcctcctaagccgcgtcccatctgtgtgggaccccactgaaaatcggactgttcaactcacctggcagccactcccagagcccctggaactctggcccaaggctctctgactgactccttcccagatcttctcggcttagcggctgaaggctgatgctgcccgatcgcctcggaagccccgtagaccatcacggatgccgagcttcgggtaactctcacagtggaagaaggcaggaatgtcaggcctctgagcccaaagctaagccatcatatcccctgtgacctgcacatacacatccagatggccggttcctgccttaattgatgacattccaccaacaaaaggaagtgtaaatggccgggtccttggctttaagtggatggaggttaccttgtgaaaagtcctttacctggctcatccctggctcaaaaaagctcccgccactgagcaccttgtgacccccattcctgcccgccagagaacaacccccatttgactgtaattttcctttacctacccaaatcctataaaacggccccacccctatctcccttcgctgactctcttttcggactcagcccgcctgcacccaggtgaaataaacagccatgttgctcacacaaagcctgtttggtggtctcttcacacggacgcgcatgaaatttggtgctgtgactcgaattgggggacctcccttgggagatcaatccgctgtactcctgttctttgctccgtgagaaagatccacctatgacctcaggtcctcagaccgaccagcccaaggaacatctcaccaattttaaatcagccccctggaccatcacggacgccgagcttcgggtaactctcacagtggaggactcagcccacctgcacccaggtgaaataaacagctttattgctcacacgaagcctgtttggtggtctcttcacacggatgcgcatgaaatttggtgccgtgacttggatcgggggacctcccttaggagatcaatcccctgtcctcctgctctttgctccgtgagaaagatccacctacgacctcaggtcctcagaccgaccagcccaagaaacatctcaccaatttcaaatccacctcccttgtgttctcctcttgtattcccccaccttaaccctcaagtatatctctactccctccttggcgaccgatcatgcaccccttaccatctcattaaaacctaatcacccttaccctgctcaatgccaatatcccatcccacagcatgctttgaaaggattaaagcctgctatcactcgcctgctacagcatggccttttaaagcctataaactctccttacaattcccccattttacctgtcctagaaccagagaagatttacaggttagttcaggatctgcgccttatcaaccaaattgttttgcctatccaccccgtggtgccaaacccatatactctcctatcctcaatacctccctccacaatccattattctgttctggatctcaaacgtgctttctttactattcctttgtacccttcatcccagcctctcttcgctttcacttggactgaccctgacacccttcaggctcagcaaattacctgggctgtactgccgcaaagcttcacagacagcccccattacttcagtcaagcccaaatttcttccttatctgttacctatctcagcataattctcataaaaacacacacgctctccctgctgatcatgtccgattaa

SEQ ID NO: 91029 - DNA, 3329 bp, Homo sapiens
tttcgttttgccgagcgcagagctgcagccgccgagtcggacgtgtccgcgaagatggcgggccggagcatgcaagcggcaagatgtcctacagatgaattatctttaaccaattgtgcagttgtgaatgaaaaggatttccagtctggccagcatgtgattgtgaggacctctcccaatcacaggtacacatttacactgaagacacatccatcggtggttccagggagcattgcattcagtttacctcagagaaaatgggctgggctttctattgggcaagaaatagaagtctccttatatacatttgacaaagccaaacagtgtattggcacaatgaccatcgagattgatttcctgcagaaaaaaagcattgactccaacccttatgacaccgacaagatggcagcagaatttattcagcaattcaacaaccaggccttctcagtgggacaacagcttgtctttagcttcaatgaaaagctttttggcttactggtgaaggacattgaagccatggatcctagcattctgaatggagagcctgcgacagggaaaaggcagaagattgaagtaggactggttgttggaaacagtcaagttgcatttgaaaaagcagaaaattcgtcacttaatcttattggcaaagctaaaaccaaggaaaatcgccaatcaattatcaatcctgactggaactttgaaaaaatgggaataggaggtctagacaaggaattttcagatattttccgacgagcatttgcttcccgagtatttcctccagagattgtggagcagatgggttgtaaacatgttaaaggcatcctgttatatggacccccaggttgtggtaagactctcttggctcgacagattggcaagatgttgaatgcaagagagcccaaagtggtcaatgggccagaaatccttaacaaatatgtgggagaatcagaggctaacattcgcaaactttttgctgatgctgaagaggagcaaaggaggcttggtgctaacagtggtttgcacatcatcatctttgatgaaattgatgccatctgcaagcagagagggagcatggctggtagcacgggagttcatgacactgttgtcaaccagttgctgtccaaaattgatggcgtggagcagctaaacaacatcctagtcattggaatgaccaatagaccagatctgatagatgaggctcttcttagacctggaagactggaagttaaaatggagataggcttgccagatgagaaaggccgactacagattcttcacatccacacagcaagaatgagagggcatcagttactctctgctgatgtagacattaaagaactggccgtggagaccaagaatttcagtggtgctgaattggagggtctggtgcgagcagcccagtccactgctatgaatagacacataaaggccagtactaaagtggaagtggacatggagaaagcagaaagcctgcaagtgacgagaggagacttccttgcttctttggagaatgatatcaaaccagcctttggcacaaaccaagaagattatgcaagttacattatgaacggtatcatcaaatggggtgacccagttactcgagttctagatgatggggagctgctggtgcagcagactaagaacagtgaccgcacaccattggtcagcgtgcttctggaaggccctcctcacagtgggaagactgctttagctgcaaaaattgcagaggaatccaacttcccgttcatcaagatctgttctcctgataaaatgattggcttttctgaaacagccaaatgtcaggccatgaagaagatctttgatgatgcgtacaaatcccagctcagttgtgtggttgtggatgacattgagagattgcttgattacgtccctattggccctcgattttcaaatcttgtattacaggctcttctcgttttactgaaaaaggcacctcctcagggccgcaagcttcttatcattgggaccactagccgcaaagatgtccttcaggagatggaaatgcttaacgctttcagcaccaccatccacgtgcccaacattgccacaggagagcagctgttggaagctttggagcttttgggcaacttcaaggataaggaacgcaccacaattgcacagcaagtcaaagggaagaaagtctggataggaatcaagaagttactaatgctgatcgagatgtccctacagatggatcctgaataccgtgtgagaaaattcttggccctcttaagagaagaaggagctagcccccttgattttgattgaaaatgaactatttgaaacacacagtgaccaagggaagtgaccaaggtgaagatggcctaggatcttcactgtcttactcaagatactggactaagtggaacgttctctaccttcaacatgtgctcgctctgcatgattagtgcaataaaactcccttccttatgcatactgagatagcttagtgtctcgtggaaggtgtcaatttggtttagaatgctgcgcttaccttcccatgcaggctaaagtgattccttcttgctcagtccctctgggtgggaaccatccagtacttgtggacactacacgtttcaacctctctactagcaccatcacccttgaaaactctcagtcagtgtcatgaatgttgcatgacaacagttggccgattagaaggcagactttctacatgcaaatctggcttagtaaatcgaggtgtgggccagagatcctctgacagctgtcctgagctaacactaaaagtcactgggtatttggttaaaggtctcccacaagactgggtattctctttgcctgaagaaacaaggcattgaatctctaaaatgctgttctcaatcattgtcagagaatgttttcaagttgcagtcaagaagatctttcctaatagaaagtcagatggctaccgtgttgggttgtgacttccccttaagtataactaatttgctctgtggtaagagatatgctcattattaccacttagaagatgttgttaaaaacatgtgaaagataggtatggaaaaagcatacacccccaaacagaaaggagttattaaagtaatttacaaacctctcagcactaattagtgtccaactccaagtgggtcaattccttagtataatattaaggcttactagtatcactgctttttccttagcttaatgacttacttagaatttatcctttattttaaatgatctgtactatctagtgtctaaaacactattctccagaaaaatcaatcattttctagccctctccctcagtcctttattgtccattccaatacattgaacacatttcc

SEQ ID NO: 91030 - DNA, 334 bp, Homo sapiens
gttcattgtcagatctctttagtctctttcaaactggaatggttcctctgcctgagcttgacacttttaatgattaccagcagttattttggggggtcccttattgggggtttgtttggtgtttccttttgattaaatctaggttttgcgcctatggctggaacagtacaaggaggaggctgggttcttctctggatcctaataggtggtgcagaattcagttagtccccttagtggtgatgtgcactttacttgcttgattcaggtgctgccttccagcttctccactgtgagatctttgtaattgttaaggatatagtagggagatactttt

SEQ ID NO: 91031 - DNA, 344 bp, Homo sapiens
aagtcactcctgaaatgtggatcttgggcaattattaactgtcatcacttaggggtagagagtggccgaggcttatgggatatctcagacccttcagaaggctacattatccagaatgcatctcatttgctggaagaggcacagttgctgatgaactggttgagctcatgcttgcctgcttgcccctgctgcagctggctgggtgggaacaacaagaggccctgaaagttgtacaaggggcagtggggcaggccttcaggtggcagtcggcccccttctcctggggtggtccacatggctaggcttctaaccatcagctggttttacagctatgctgagaacag

SEQ ID NO: 91032 - DNA, 348 bp, Homo sapiens
tgatattaaatctgaaaaccagtattctgaaaacttcagtgtgagatcatgctgtattatcaaaagaattcccagaagggagcagtagaaatccataaactgaaagaaaatagatattctttcccaatcaacagctgttttctccacctactgttggaaattatattcttttttgtgatatcaggtgcatgggatgcatctttctttgccatcctaatgagatgctctagagagagtgtaatttgccttaacttgtaccttgattgctactctgtgatgattgctcttagaatgcttctggcatatattcatgaaagatggctgggaatcagagacttaaagagaaaa

SEQ ID NO: 91033 - DNA, 2227 bp, Homo sapiens
cacaaggcggtagccatggcggaggcggcggctgcagcgggtgggactggcttgggcgcgggcgcgagctacgggtctgcagcggaccgggaccgggacccggacccggaccgcgccgggcggaggctgcgggttctctctggccatctgctgggccggccccgggaggctctgagtaccaatgagtgcaaagcgcggagagccgcgtcggcggccacggcagcgcccacggccactcccgccgcgcaggagtcgggcaccatcccaaagaagcggcaagaagttatgaaatggaatggatggggatataatgattctaaattcatcttcaataagaagggccaaattgaattgactgggaaaaggtaccctcttagtggcatgggtttaccaacatttaaagaatggatccaaaatacccttggagtaaatgtggagcataaaactacctctaaagcatccttaaatcctagtgatacacctccttctgttgtaaatgaagattttcttcatgaccttaaagaaactaatatttcatattcacaagaggcagatgatcgagtatttagagctcatggtcattgtcttcatgagatatttttgctcaggggaggaatgtttgagcgaattcctgatatagttttatggccaacatgccatgatgatgtagttaagattgtgaatctagcttgcaaatataatctttgtatcataccaattggtggaggaacaagtgtttcatatggcctgatgtgtcctgcagatgagacaagaacaattatttctttggacacttcacaaatgaatcgaattctctgggttgatgagaacaatttgacagctcatgtagaggctggcataacaggacaagagttggaaagacagcttaaagaaagtggttattgtacaggtcatgaaccagattccctggagttcagtactgtaggaggatgggtatctactcgcgcatcaggcatgaagaagaatatctatggcaatatcgaggacctggtggttcatataaaaatggtaacacctagaggtataatagaaaaaagctgtcaaggacctcgtatgtcaacaggccctgatatccatcacttcatcatgggatctgaaggaactcttggtgtaataacagaagctacaataaaaatcagaccagtccctgaataccaaaagtatggctcagtagctttccctaattttgaacaaggagtagcctgtttaagagaaattgcaaaacagagatgtgctccggcatctattcgcctcatggacaacaagcagtttcagtttggtcatgctcttaaacctcaggtttcctctatttttacatcatttttggacggattaaaaaagttttatattacaaagtttaaaggatttgacccaaatcagctaagtgtagccacattactgtttgagggggatcgtgagaaggttcttcaacatgaaaaacaagtgtatgatattgctgcaaaatttggtgggttggcagctggagaagataatggacagagaggttatttgctgacctatgttattgcatacattcgagacttggctttggaatactatgtattaggagaatcttttgagacttctgctccttgggacagggtggtagatctctgtagaaatgtaaaagaaagaataacaagggaatgcaaagagaagggtgttcagtttgctcctttttctacatgcagggtgacgcagacttacgatgcaggtgcttgtatctacttctattttgcctttaactacaggggaattagtgacccactgaccgtatttgaacaaactgaggcagctgctagagaagaaatccttgctaatggagggagcctgtcacatcaccatggagtgggcaagttacggaagcaatggctaaaggaaagtatctctgatgtcggctttgggatgctgaagtctgtcaaggaatatgtggaccccaataacatctttggaaacagaaaccttttataaatccattagtaccattacaaaaaaatgtcaattttttttttaagttttcaactgtgggttatactagtaatcaaatatatcatgggactatattttgggatacatttgtttctttgggttttaaaataagtttgtttttcattctgtagtttgttttgtttctacatctatggattgacagatagtattcctaaatccctcctccattgtaggtacatcattttacattcagcgg

SEQ ID NO: 91034 - DNA, 366 bp, Homo sapiens
ataaaatttagtaatgggaaaaaaatgaaggcttaacatattccttctgaatttaaaataattaaattttctgcaactttagttagcaatagatcatttcactggaaaaatcttagttgtgatatctgtgttgctaaattcaaaaacatactctcatagctgcagaaattaagatgattagtatcgaaaccagtaagctgagagagagaaaggagggagaggagagagagaaagcgcatgtgcgggtggaaaggagagagaaagagggagagggaagaagggagagagaatgagacaagcaaatggtacaaaaagaggtggcaaatagcagaagtgtctgcataaatttataaatccactgactat

SEQ ID NO: 91035 - DNA, 307 bp, Homo sapiens
gaagaaaaaaggcataatattgagagacataaaagatttgaattcatagagaggtctattttttgagtagaaaaaatatatgaagtgccaattctctcctcattataaatttaatgccattctatcaaaatatttgcagaaattttgtaaagaacttgccaaaatttagacttaatctagaggaataaactcctgagaacagtcaggaaaactatggaaagtaagggagggaaaaaaaccacatgggatattaggctgtattacaaagttacagtaactctaacactggttccagtcgacgcggccg

SEQ ID NO: 91036 - DNA, 839 bp, Homo sapiens; identical to SEQ ID NO: 58752

SEQ ID NO: 91037 - DNA, 403 bp, Homo sapiens
ccatatttggctgaaactaggggatggagaagtttctgatgctattttttgaatacaaatacagtagaatcccatttttacatggctcagtatttaatagattcagatttgtggtggattagtttgtttctcctgaaggttagtaactacaaaagaaatcttgctgtaactaatgtatatagaactttagagcatttgcactatttggggcacaatttttcagttaggttatatctatctagcagttgatatattctcaacatatttagcccatgtgcttgacaatcagaaaagttaattcaacattttcagttttggtctttgtctaccgtcaattaaaaatccaaagtgaacaccacatggaaatgattattattggaagtgaaagaacaaagctttggtt

SEQ ID NO: 91038 - DNA, 2711 bp, Homo sapiens
  misc_feature (1)...(2711): n = a,t,c or g
gagccgtcgggcatggagccgtggaagcagtgcgcgcagtggctcatccattgcaaggtgctgcccaccaaccaccgggtgacctgggactcggctcaggtgttcgaccttgcgcagaccctccgcgatggagtcctgctctgccagctgcttaacaacctccgggcgcactccatcaacctgaaggagatcaacctgaggccgcagatgtcccagtttctctgtttgaagaacataaggacatttctcacggcctgttgtgagacgtttggaatgaggaaaagtgaacttttcgaggcatttgacttgtttgatgttcgtgactttggaaaggttatagaaacattatcacgactttctcgaacacctatagcattggccacaggaatcaggcccttcccaacagaagaaagcattaatgatgaagacatctacaaaggccttcctgatttaatagatgaaacccttgtggaagatgaagaagatctctatgactgtgtttatggggaagatgaaggtggagaagtctatgaggacttaatgaaggcagaggaagcacatcagcccaaatgtccagaaaatgatatacgaagttgttgtctagcagaaattaagcagacagaagaaaaatatacagaaactttggagtcaatagaaaagtatttcatggcaccactaaaaagatttctgacagcagcagaatttgattcagtattcatcaacattcctgaacttgtaaaacttcatcggaacctaatgcaagagattcatgattccattgtaaataaaaatgaccagaacttgtaccaagtttttattaactacaaggaaagattggttatttacgggcagtactgcagtggagtggagtcagccatctctagtttagactacatttctaagacaaaagaagatgtcaaactgaaattagaggaatgttccaaaagagcaaataatgggaaatttactcttcgagacttgcttgtggttcctatgcaacgtgttttaaagtaccaccttctcctccaggaactggtcaaacataccactgatccgactgagaaggcaaatctgaaactggctcttgatgccatgaaggacttggcacaatatgtgaatgaagtgaaaagagataatgagacccttcgtgaaattaaacagtttcagctatctatagagaatttgaaccaaccagttttgctttttggacgacctcagggagatggtgaaattcgaataaccactctagacaagcataccaaacaagaaaggcatatcttcttatttgatttggcagtgatcgtatgtaagagaaaaggtgataactatgaaatgaaggaaataatagatcttcagcagtacaagatagccaataatcctacaaccgataaagaaaacaaaaagtggtcttatggcttctacctcatccatacccaaggacaaaatgggttagaattttattgcaaaacaaaagatttaaagaagaaatggctagaacagtttgaaatggctttgtctaacataagaccagactatgcagactccaatttccacgacttcaagatgcataccttcactcgagtcacatcctgcaaagtctgccagatgctcctgaggggaacattttatcaaggctatttatgttttaagtgtggagcgagagcacacaaagaatgtttgggaagagtagacaattgtggcagagttaattctggtgaacaagggacactcaaactaccagagaaacggaccaatggactgcgaagaactcctaaacaggtggatccaggtttaccaaagatgcaggtcattaggaactattctggaacaccacccccagctctgcatgaaggaccccctttacagctccaggccggggataccgttgaacttctgaaaggagatgcacacagtctgttttggcagggcagaaatttagcatctggagaggttggattttttccaagtgatgcagtcaagccttgcccatgtgtgcccaaaccagtagattattcttgccaaccctggtatgctggagcaatggaaagattgcaagcagagaccgaacttattaatagggtaaatagtacttaccttgtgaggcacaggaccaaagagtcaggagaatatgcaattagcattaagtacaataatgaagcaaagcacatcaagattttaacaagagatggcttttttcacattgcagaaaatagaaaatttaaaagtttaatggaacttgtggagtactacaagcatcattctctcaaggaagggttcagaaccttagatacaactctgcagtttccatacaaggagccagaacattcagctggacagaggggtaatagagcaggcaacagcttgttaagtccaaaagtgctgggcattgccatcgctcggtatgacttctgtgcaagagatatgagagagttgtccttgttgaaaggagatgtggtgaagatttacacaaagatgagtgcaaatggctggtggagaggagaagtaaatggcagggtgggctggtttccatccacatatgtgggaaggaggatgaataaattcaaatcccgtgttgcaccctgcaccaaaaattttcagaggaaggggataattaggaagcctgcacagcttcgtggatttaacttgaagtgtttttaaaaagctggcttttntgggctgtttcaacatcctccctccttaggcccntccta

SEQ ID NO: 91039 - DNA, 414 bp, Homo sapiens
atagaaattcgttgaacattatcacgccaagcttggcacgaggaatgcaatagtttcacagtaaaaacagtgcctataagaaaatagatcacatactatttttcaatgatattaagtgtattttgtaactattttcatttggtccttgtaacatgaaataatacatggaacttacctttataataaaaatggagtgccctggttcatcatagaggtgcatctagtttgcccttaatggaagtatacttgctgtgtggattgatagcaccttcttgaaatggaggagctcagctggcctcatggatgtgcaatttttgcagtcccacagggccttgcatacagaagcaccccgagctcagttgaatgtctgtttgattttttcttatttatttttttgagacacagttccacttt

SEQ ID NO: 91040 - DNA, 432 bp, Homo sapiens
agcttcgtacgctcagcttggcacgaggctcatgaccatggccttgatcgttgccactcagttccggttccgctacaaccatttcaaaaacgatgattctaaagggaaagaggtggagatcccgcaggtggaaaggaacaactctacagagtcctctgaggagacaccaaccaccacaagccactcgcaggccttcaacttttgggacttaatcaagctgctctgcagcgtgcagtatggctcaatgctgtttgtggcttggttcatgggttttggatatggcttcgtgttcacctttctctactggcatttggaagacctcaatggaactacaaccctctttggggtctgttcagtcctgagtcatgtgtctgagctgacagcatatttttttagtcacaagcttattgaattgatcggccacatcagggt

SEQ ID NO: 91041 - DNA, 5795 bp, Homo sapiens
actcactatagggctcgagcggccgcccgggcaggtaagaatcagaagacatttgtgctttggggagcagaggccctcagggtatagagaaggaagaagagagaggttcactgtagtcctgaagcagaaataagacctgtggctgaaggaagccttagcaattcactccttcctcttcctgagaactctctgtaggaagtctcacctagcagaggcttcacagtatttcagagaagccaaagattgtttgcctctttggaaactgttatccttccatcatgactgtgtcactcctgccactgttccaccatagagatggcgtcctttgcagcaaaccgtaagttataaggatgagggaagaagagtagagggccaaaaggattccattttgaggaaaaactacagtttgccttgccaggtagaagaatcaggcgcccagacaccatgtcacaaccctccagaactgacgttggcaggaagtagagactttgttgcctgtgtcccccatcctcaccatgtcttcgactcaggacaatggggaacactggaagtccctggagtctgtgggcatcagccgcaaagaactagcgatggccgaagccctgcagatggagtatgatgccctgtcccggctccggcatgacaaggaggagaacagagccaagcagaacgcagacccctctctcatcagctgggatgagcctggggtagacttttacagcaagccagcaggaaggcggaccgacctcaagctgttacgcggtctctctggctctgatcctacccttaactacaactcactatccccacaggaagggccgcccaaccactctacctcccaagggccacagcctggctcagatccctggcccaaaggctccctgtctggagactatctctacatttttgatggttcagatgggggagtctcttcgtccccaggaccaggggacatagagggctcttgcaagaaactatccccacctcctctgcctccccgagcttctatctgggatacccctcccctgcctcccagaaaggggtccccctcatcctccaagatctcccagcccagtgacatcaacactttctctttggtcgaacaattgccaggcaaactgctagagcatcggatcctagaagaggaagaggtgctgggaggtgggggtcaggggcgcctactggggtctgtggactatgatggtatcaatgatgcaattactaggctcaacttgaaatcgacctatgatgcggagatgttgcgggatgccaccaggggctggaaggagggccgagggccgctggacttcagcaaagacacctctggaaaacccgtggccaggagcaagactatgccccctcaggtgcccccccgcacctatgcctcccgctatggcaaccgaaagaatgcgacgcctggcaagaaccgccggatttctgcagccccggtgggctcccggccccacactgttgccaatggccatgagttgtttgaggtctcagaagagagagatgaggaggttgctgcattttgccacatgctggatatccttcgatctggctctgacatccaagactacttcctcactggctatgtctggagtgctgtcacccctagcccagagcacctcggggatgaggtcaacctgaaggtgactgtgttgtgtgacaggcttcaagaggcactcactttcacctgcaactgttcctccactgtagacttgcttatctaccagaccctgtgctacacccatgatgacctgaggaatgtggacgtgggtgactttgtgctaaagccctgcgggctggaggagttcctgcagaacaagcatgccttgggcagtcatgagtacatccaatactgccgcaagtttgacattgacattcggctacagctgatggagcagaaggttgtgcgcagtgacctggcccggacggtgaatgatgaccagagcccctccaccttgaactacctcgtccatctccaagagaggcctgtcaagcagaccatcagcaggcaggccctgagtcttctgttcgacacttaccacaatgaggtggatgccttcctgctggctgatggagacttcccactgaaggctgacagggtggtccagtccgtcaaggccatctgcaacgccctggccgccgtggaaacccctgagatcaccagtgctctcaaccagctgcccccctgcccctcccgcatgcagtctaaaattcagaaggatcccagtgtcttggctgtgagggaaaaccgagagaaggtcgtggaagccctgaccgctgccatcttggacctggtggagctgtactgcaacacattcaacgcagacttccagacggcagtgcccgggagccgcaagcatgacctggtccaggaggcctgccatttcgccaggtccctggcctttactgtctatgccacccaccgcatccccatcatctgggctaccagctatgaagatttctacctctcctgctccctcagccatggcggcaaggagctgtgcagccccctgcagacccgaagagctcacttctccaagtacctcttccacctcatcgtctgggaccagcagatctgcttcccagtgcaggtgaaccggctgcctcgggagacactgctgtgtgccactctctatgctctgcccatccccccaccggggagctcctcagaggccaataagcagcggcgggtgcctgaagccctgggctgggtcactaccccactcttcaacttcaggcaggtcctgacctgtggccggaagcttctgggtttgtggccagcaacacaggaaaatcccagcgcccgttggagtgcacctaatttccaccagccagacagtgtcatcctgcagattgacttccccacctcggcctttgacatcaagttcaccagcccccctggagacaagttcagcccccgctatgagtttggcagcctccgggaagaagaccagcgcaagcttaaagacatcatgcagaaagagtccttgtactggctcactgatgctgacaagaagcgcctgtgggagaagcgatattactgccactcggaggtgagctcgctccccctggtgctcgccagcgcccccagctgggagtgggcttgcctgcctgacatctatgttctcctgaagcagtggacccacatgaaccaccaggatgccctggggctcctgcatgccaccttcccggaccaggaggtgcgtcgtatggctgtgcagtggattggctcactctcagatgctgagctgctagactacctgccccagctggtacaggccctgaagtatgaatgctacctggacagcccgttggtgcgcttcctcctgaaacgagctgtgtctgacttgagagtgactcactacttcttctggttactgaaggacggcctcaaggactctcagttcagcatccgctaccagtatctgctggcagccttactgtgctgctgtggcaaggggctgagagaagagtttaaccgccagtgctggcttgtcaatgccctggccaaactggcccagcaggtccgggaggcagccccatctgcaaggcagggaatcctccgcacgggcctggaggaggtgaagcagttctttgccctcaatggctcgtgccgcttgccactcagccccagtctgctggttaagggaattgtgcccagggactgttcctacttcaactccaatgctgtccccctcaaactctccttccaaaatgtggatcccctgggtgagaacatccgtgtcatcttcaagtgtggggacgaccttcgccaggacatgctaacgctgcagatgattcgcatcatgagcaagatctgggtccaggaggggctggacatgcgcatggtcatcttccgctgcttctccaccggccggggcagagggatggtggagatgatccctaatgctgagaccctgcgtaagatccaggtggagcatggggtgaccggctcgttcaaggaccggcccctggcagactggctgcagaaacacaaccctggggaggacgagtatgagaaggctgcggagaactttatctactcctgcgctggctgctgcgtggccacgtacgtcttgggcatctgtgaccgacataatgacaacatcatgctgaagaccactggtcacatgttccacattgattttggccgcttcctgggccatgcccagatgtttggcaacatcaagcgggaccgtgccccctttgtcttcacctcggacatggcgtatgtcatcaacgggggtgacaagccttccagccgcttccatgattttgttgacctttgctgccaagcctacaacctcattcgcaagcacacccacctcttcctcaaccttctgggcctgatgttgtcctgtgggatccctgaactctcagacctggaggacctcaagtatgtgtacgatgccctgaggcctcaggatacagaggccaatgccactacctacttcactaggttgattgagtccagcctgggcagtgtagccacaaagctcaattttttcatccataatctggctcagatgaagttcacgggctcagatgaccggctgaccctctcctttgcctcccgaacacacactctcaagagctctggccgaatcagtgatgttttcctctgccgccatgagaagatcttccaccccaacaaaggctatatatatgtggtaaaggtgatgcgagagaacactcacgaggccacctacatccagcggacctttgaggagttccaggaattacacaataagttgcggctgctcttcccttcttcccacttgcccagcttccctagtcgcttcgtgatcggccgctcccggggagaggcggtggccgagcggcggagggaggagctaaacggttacatctggcacttgatccacgcaccccctgaggtggccgagtgtgatttggtgtacaccttcttccacccactgccccgggatgagaaggctatgggcaccagcccagcttctaagtcctcagatggcacatgggcccggcccgtcggaaaggtgggaggggaggtgaagctgtccatctcctacaaaaacaataaactcttcatcatggtgatgcatattcggggcttgcaactgctccaggatggaaatgaccctgacccctatgtgaaaatttacctccttcctgaccctcagaaaaccactaagaggaaaaccaaagtggcccggaaaacctgcaatcctacctacaatgagatgttggtatatgatgggatccccaagggtgacctgcagcagcgggagctccagctgagcgtgctgagtgagcagggattctgggagaacgtcctcctcggtgaggtgaacatccgcctgcgagagctggacctggctcaggagaagaccggctggttcgccctgggatctcgaagtcatggcaccttgtgagcccagcagagccaccacccagcatcccaggctggtggcaggagctgggggagaggactctcccctgtgagactcctccttgtgaagggccagggccctgggcaggcctccagctcggtccaggtgattctggcctctgtggtaggaggcagggagagtaagacatgctctgctgtctcttcctctggagactgaacttgggttggttgtgatgagcagccccttggaggctgtgaggttgcagcaaagttttaagtttaccttgtgtcaagggagcaatgcttggtttggggagtgtgtggggtgggctgtatgaagtagcattttgggggtgggtgggtggatatcaagcttatcgataccgtcgacctcgag

SEQ ID NO: 91042 - DNA, 1558 bp, Homo sapiens
tgggatagcgcgcgaggccctcggtcggacgggacgctcgggattcagggactgcctcggcacacgggaagttgccctacaggcgcgggagaaagcgcaggcggcggcttggcagggagaggcaggctgcagtgcacattgggtcaggcacacgcgaggggcagcccccgagggccgtcccagagtcccccgcgccgccggggtcctaacggggtgcaccgtcttccgccgcacgtggattcagcgcgatgcccaaatccaagcgcgacaagaaagtctccttaaccaaaactgccaagaaaggcttggaattgaaacaaaacctgatagaagagcttcggaaatgtgtggacacctacaagtaccttttcatcttctctgtggccaacatgaggaacagcaagctgaaggacatccggaacgcctggaagcacagccggatgttctttggcaaaaacaaggtgatgatggtggccttgggtcggagcccatctgatgaatacaaagacaacctgcaccaggtcagcaaaaggttgaggggtgaggtgggtctcctgttcaccaaccgcacaaaggaggaggtgaatgagtggttcacgaaatacacagaaatggactacgcccgagctggtaacaaagcagctttcactgtgagcctggatccagggcccctggagcagttcccccactccatggagccacagctcaggcagctgggcctgcccaccgccctcaagagaggtgtggtgactctgctgtctgactacgaggtgtgcaaggagggcgatgtgctgaccccagagcaggctcgcgtcctgaagctttttgggtatgagatggctgaattcaaggtgaccatcaaatacatgtgggattcacagtcgggaaggttccagcagatgggagacgacttgccagagagcgcatctgagtccacagaagagtcagactcagaagatgatgactgaaagggactcgggactgaaggtctcctggaagcttctgggtctcactggaccatcaggactgctgccgcccctctggagagagcagctttttatttgtctgtagacagggaacatgatgggcactgacctcctgtaaagaataaaactgtgcccggccagaaaatatgtaatcttaaaaatggatccattcctcctcctctgctttttactttttcggagaggggtcacaatttttcggttcttttgttatgtcactcttaaaatattattgaaacattaatgcagtctttatgacaaaattcccatgggtacattgtcatcctaatagatccagaaagtattaagtgtatgtcttttctagcttttgtctggtgatactaaacattattgtgtcttattcttgctgctacaagtggttctggggactaggagtgacagtgttgcctgagagcttcttggaaatgaagtgtctcccacacaggacacagagtcctgcaagtcaaaaagtccgttttaactgtgaagattaggtcctgtgtactaatgaagacgtttctttctaggatttgtgtgcacttggtttgagatgc

SEQ ID NO: 91043 - DNA, 579 bp, Homo sapiens
ttttttttttttttgtgtgggattcaatattcaagagtctttattgaagacttgagatgggacttccaactcagaggatgtgggaatcccagctcaaatgatacaggataaactgggatgggctaggatggacaggctgtggatatgggagtcatgggtcaaagtcttatcccagatggctccaggtacagtgggcttcctgggctggaagctgggtcctccccacttcattctgctcaaagcttcttgaaggagctggtttgacttcaacttgctagagcctagcctcatctttcagtcaactgggaaggcttatcagagggaatccagcccaaccagatgaagtacattcttctttttggtcgcccgggagctgtccgtggtgctggatgtggctctatcgtccacacggaggaaggagggtgggagggtggtgcagaacccacccgccccaggtgagaagcccaaaagccataggtggccacctacgatgacaccagaaaacaaatgaggctgcttcttcttggatgcccagctccaggcttctgtgaggaggagagactgttcgggtggcccctc

SEQ ID NO: 91044 - DNA, 1350 bp, Homo sapiens
atgctggacacaggttctgagcacctgaaccggatactgaaggctctgccagccctccagagcgctggcagtgaaggacagaacggctccgcagaaagcctcggagaaggcgggacccgggacagcgacagagcacggagaaagctccgcgggggaaacaaggaaatccccaccttctatccctgtctcgtggtgcggtcccctgtgacggcctcagacctgcggggaacccaggactttgccgcctaccacggtctcagccttattctcgagcctctgggcgcctgcaaccggctgtctgtctgtgtgcctgttcactctcccccggggatgcgggtctctccgaggtcgccttctttgcgcactttggttattgatcctgctgaaccggccggagcgcagcggctgcgcttctctgggaaagaacggagtggggaggctggctccgccgtagaggggttggcagtggcggtcagcatgggcgatgggggcgccgagcgcgaccggggccccgcgcgccgggcggagtctggtggcggcggtgggcgctgcggagaccgcagcggagcgggggacttgcgagctgatggcggtggccacagcccaacggaggtggccgggacctcagcctccagtcccgcaggctccagggagagtggagccgacagcgacgggcagcccgggcccggcgaggcagaccactgccgccgcatactggtgcgagatgccaaagggacaattcgggaaattgtcctgcctaagggcctggacctggaccggcccaagcggacacgtacattcttcactgccgagcagctgtaccgcctggagatggagttccagcgctgccagtatgtggtgggccgcgagcgcactgagctggcccgccagctgaacctctccgagacccaggtgaaggtctggttccagaaccgccgcaccaagcagaagaaagaccagagcagagacctggagaagcgggcgtcctcctcagcctccgaggcctttgccacctccaacattctgcggctgctggagcagggccggctgctctctgtgcccagggcccctagcctcctggcgctgacccctagcctgccaggcctacctgccagccacaggggcacctccttaggtgaccccaggaactcctccccacgcctcaacccgctgtcctcggcctcagcgtcccccccactgccgccccctctgccagctgtctgcttttcctcggccccgctcctggatctgcctgccggctacgaactgggttcctcggccttcgagccatacagctggctagaacggaaagtgggcagcgccagcagctgcaagaaagctaacacttaa

SEQ ID NO: 91045 - DNA, 658 bp, Homo sapiens
aatggctgactcgatacattatccgccagcttgcacgaggcttttgcttctaaaggcttgcttccagggtctggataatgcaaattgataatgtaaacaaagctgtgggagaaagatgggtacttattgtaatactttaaagataaatatttccttcatttctatcactaactaggttttcaacaaaagtctgggggatgactttaaaaggcctggtaattgcttattgcttacaaacaattcatatgctaattgaaagctgctcctatctattcattgaagcccttacttcaaaaattttactaatgctttggcagttttagcaacgggaaagtaagaaaactaccgtttaaaatgccattatttagtctttttactaaattaggctggccttccttatcccctatcccattaagcttgcttgaagattttataattgaacatgcaaagtgaaacatgttttacacagagaaaaattcaagagcatttaaaaacaatgtagaaagtaactgccgttactgaggtatggagcggggaaataaattttactttgaagcgcaacaccaaattgtggccagggttggcttgggttaaaacgtgggtgccctgggtgggattttatttctaacatggccctggtttataaaaagggaaggaa

SEQ ID NO: 91046 - DNA, 2828 bp, Homo sapiens; identical to SEQ ID NO: 58829

SEQ ID NO: 91047 - DNA, 323 bp, Homo sapiens
gttttgcttggagtcatgtcctttacctggttgctttatctgctaatcctagatctgtaggtactgaggggatcccagttgcttaaatgctgtatagattaggaagctctttttgaacattaacatagtgccactaagctttggaaagatgcatagaacgtgggaccctttggtcctttggtgcctgccttttagaaagtctcacagagggactatcctctccatcaaccaccaaaacagagcatattttggacatattttatcctatctatttcaaaacaatttgagactgtttactgacatttaggaagacaacctcacaa

SEQ ID NO: 91048 - DNA, 639 bp, Homo sapiens
cggacgcgtgggcggacgcgtgggcttttaaggtagatattattcccagtttgcagagtagaaactgaggctcggaaaagattagtaatttgttcaatatcacatatctagctggtgacacagccaatgcaatttgaaaacaggtcttttggtagcgatggttattgtggtggtgatgataataatgttaggtatcttgcaaagtcattttcatatattttgtttagtctttacttgattgtatgagttttatactctcacttcaaaggtggtgattttccccctacgtgtaagcaaagtctaccaattaagggttttattgagaaacactggtagtacctaataatgggagtaaataataataacccttactatagacttactcttttatgtaaggctctgaaaacaaaatttttttctccctaaaagctattttctgaagaggccatattattacctgcttccccttggatttccaagtttaaacatttggaaaaaagaaacttccttaaaaaactgtgagcttcggaaaactgtttgaaattttccttttaccttttttttttttcagggcccggcgtttcagaaggagggctagaactttgccgctgaaccaaccctttggtccaccgtaatggc

SEQ ID NO: 91049 - DNA, 4519 bp, Homo sapiens
  misc_feature (1)...(4519): n = a,t,c or g
tttttttttttactttcatgcaaaatctttatttggaacatgtatgttactgagcaggccagccgccatcctgaaatagcaaggatatttacactgtgcagagaaatacaagagcttcttgaagacattcatctgtgctttgccggcattttatctgctactttgtcctgcttctctcttccctgtgctcattattcttcatgcaccctcacctctcatcaccttaaggcatcctgtaccagcctgatctgggggcgatgactgcagccggcaatcggccattaccaatggtgtctttctgggaccctttctacctgtcttaggtattaatggtgcccaaagaaaaaatgaagagatgaaagtttctgtgggttaggctggggcatgggtgggtttggcacctgtaggtcccagcttactaagggagggttgaggtgggggatagtgcttgaagccccaggagcttgaaggctgcagtgagcccgtgactgcacccactgccacttccaggctgggccaacagagccaagaccctgttttcaagggggggaaaaaaagtttctttggagttgcaaggccttgtcttcactaaattttagaagtccccccgagatgtttcctgccttaacttcctctgacaggcctgactgtgagggctcgaatttcagctgacctaggtggagagtacttcattgatttttataatctggaaatgactgcttttccccttgctgggacatatggttttcatttctgtttgctgccatatgcttctcaacttgaacttgcctttgtctccttgctccgtgacaatgaatgtctcacatctcggctctgctgcggggcaggggtgaagggaggtggaagaaagaagagatggtcctttggcttggttgtaagccctagtagggcctgtctttcatacggaaagggttcctcctaacccctatcaaagcatggggatgaacggccagacaatctgggcttgcctttgggtttaagtttcagtcactaaacagagaccacagaacaaggacctccctgtcctctgctgtattcgtacacacaagtatcgcagaggctttccaaggtcgatgccaggaatctgcaggagccttggctgccttcccacactgctgatgaaccaaggactgtttcgacaggcaggttgctagcccacatcaaccttttcaagaggcctcaatctgaatttatggtcttaatgactccctttttatttctttccaacaaaacctgcagggtggaggccattcttcctttaatgttattttatcatctcccccttcttagtgtggtgggtcccagagtggaccaacccacactcctggagaaggacctcccgccatgcagattcttaaaggtcactggaatgtgtctcttaaatcctgtcctgagtagcaactctcctcccacagacagatgtacagaatctgcagtcaaaaacaaaacaaaaagaaaatgcaaaaatcccccagcctgcaacagcttcggcttaagaaacacactcccaccccacatcccgtcttttaagcttcatctcccctgcataaatgggtctggtagaacaatgctccccaacgctaaagtaattgcttctaagaacttaggacatgggaaatgtttctctaagctcaaatatggatagaaagacaattctgctgcactggtcactttgcaagagatgctatcctgacatttaattgtgtattatttaatcatttaaaacaaacaataataaaaaactcagccagaacacgcaaacgtgatctctgggggtcacaagatgaaatggtaggtgaatgttatcttctatcagccccttttgcctccgagttgggaaagtagttgtttcaacagatcagcttcatcctttttcttcagaagccccaaaccgagatgctgtcagaataagtcattttgctgctcgcaaaaaatgatcacagtctggtttctgagtcatctgagttttaaaacgtaaacttccattaacaacggcccttcaccaacagtaaaatggggcagcaaaagttctacttagaatttccacgtgaatgaaacccgcaacctacaactctgctaaggaaaccaggatctcaaagaacagattcatgttttagggactttaaaagaagaaatccaagcagttatgcacatggacataatcctgaaaacccagtcaggggctgggtgcactgtcagtgaggagtttttctgtactttgcagaaacatgaggttgaaagtgataatatagatatttggttttcagtcattcagaaattttcttcaaagaaaggcaatttgagctaaattaccatcattttcccttcttttgcaaatcaagaaatactaatccattgcatatgtaatccctcatataatttttagcccaaatggtcaaaattacaacttttaattttatgagctccaaattattaaacaccaacagtaaattgtgtgcatgagaagaacaaagacaaatacaaaatatagaaactttttcttccagccacaaaaaacgaagttatgtatgtatgagaaatagaaacaataactaaacaattagtgttaaattcaagacctctgggaaagctgttgttggttataggctattatttaccttagaatatgaaagtttaaaggtcaaattttcaagttaaacttttcaagttaccttccccccaaaaaagatttacatgtaggcttaaatttagaacagttaaagtataaatgttgaaaatttcaacttaattcagaatggtttcagaaagatatgatacaacaatttaagataacaaaacagaagcgcatcacattttggtttgagaatcacagaaggtacaacagtttttcttccttggggatccttctctttctcttgaggaatgagctaaaattaagttattttgattcaaagaggtatttagatggtatcaacaaaatttcagaggaaatcagaacggagttcatatacatgtatgggtatgtgtgcatacatgtacgagtatacatgtgcacgtatataaatgtatatacacatataccttcttacgtttgcatttaaagagggaagaccccacaaagacctccaggcgcctcagcccttatttggtactaccaggtgacttcaatgattcaccagctacaacagtgtctgaactcttccccactcaacttttcctgggaagaggatctttttgtttcctgcacttattgctgctgtgaaaactggagtgcactctcacttttcataagagctgaattctggactgcagataagtgttttgaaaaggcttggaaagatttttcggggcgacttaggttctgttttgtttgttacagtccgaatacataaagttattatgaaataaaatcatacggtacagatgagaacnatgcgggacagcccggccagccgttttagggccaaaggacagatcacccaacggttcacattttaggaattcgaaatgtctaaaaatagataaggtggtttctctaaaagaaaagaaaatgaaagagaaggggaaaaaataaaagggaaaaggaggacagggtgaaggaaggagggcaagaggtagcnnnnnnnnnnnnnnnnnnnnnnnnnnnnnnnnnnnnnnnnnnnngagggagggaggggaaatgatttagggaatgttagttgtcaggaataccttacttagaaagaaggaaaaaaatgcatgaaaaaatgcataaactttgtgcaggttaatgcagtattaaccacagtagaatacattggcctcataatgcttttgtaatggcatatatataatgtccccaagcactttctaaaaatatgcagagactaattcaagatcattctagataaaaatacgtatttctttaaaggggtggggtggcagggtgggaagaaaagcatggtctcagggtagatccccacacacatacaaagataaaactatgttttttggtaattctagttgatacggcagcaaaaattgtcatgacaatgttggctggttttcagagggttattttcaaatataacctgatagctacacttgtacaaaaatctttgtgaaaagtttcttttattaaccctgtgatatgtctatattgacattttctaagataaaataaaagtagcagagttgtcagtgggtaagggacagagctttaaagcaaaagtgaaccctctttgggttcctctcacacaaagggatacagactcttaaataaaataatacttccttaaaaatctgccgcctaacaattgtttacatcatagaaaaatagcattttcgtaaaaagaaatatagtcactttgttaaaatggtctattttaaaccagcaattatttttcatataaagaatttctaaatacccatacagaaaataaaaatagataatactgagtgcgaagcagacaatggcgtgtttgcaaatgatcaaaatatttcactgccagataaataatactcttagtatattacagtacaagttttaatttttcag

SEQ ID NO: 91050 - DNA, 626 bp, Homo sapiens
tgataatagcaaaatttaatctattgaaatctgagggaaaaaaggtaaaatattcgtgtggctccccagtactgacaggcagaaacacactcatatgtatatgtacatttttcacatcagaggaaatgacaaagctggttctagtgagggaaattttgtaatagaaaagccccctaattgttttttcttgctttgcctgagatttggtttgtggtctcactatgcctaaaccatatgttcagatgaatactattaaaaatcatgttaagccaaaaacatgtctacttttctgcttcatcaatgacaatcatttagctgttttattcacatagaatttggtttaaagtaaaaatcctttctccttccttccaaccagttttacacactggagagtttaaagcccaaattaaagaattttagagaaaattcatataattcagaatagctttacctcctaatagatgtctctctgatacacaggtttatgattggcccatatttactccttttatctaggaacatactaaattttctgtatgttggtgttcaacttataattttcataacttcatccacttaatctttttgaaggttagagacttagatactagatcagactaaacaga

SEQ ID NO: 91051 - DNA, 621 bp, Homo sapiens
tttctttgtaaattctacaaaatgaatgtttccattctgctgaatcaaaagaaaggtttacctctgtgggatgaattcacacatcatgaagcattttcacagatagcttctttctggttattttgtgggatatttggcttctctgtaggaataaaagggtttcagaatttttcttcataaattctacaaatagagtttttccaacctgctgaatcaaaagaaagtttcaactctttgaggtgaatccacacatttcaatgcattttcaaccatagcttcttactagtttttattgaaggatattcagtttctcactagagatctcagtgggctcagaaatgttttattgtagataataccaaaagagtgtttccaacctgctatatatatatatatacacacacacataagttttaactctgtgagatgagtccacctatcacaccccatcctagaaaaaaaaaacttaaaaaaaaagggggggccgccccgttaaaggaaacccttgggggggccaaattttaccgcggccggcgagtaaaaccctccccccttttgggggggggaatttaaaacccagccggggggcctttggggaaaaaaccctttttttttgggggg

SEQ ID NO: 91052 - DNA, 404 bp, Homo sapiens
actggttctaaaggcccaggcgggcgatctagacgatgcctggccgggcccactcttaagcctgcatgcgacgggatgcctctctccctacagagggtgagactgtctgctggcttggggccctcgacaatgaaccgtactgtggcggcgcgccttccgtggactagcctcttactgagatagaaagctctcccgtcttgccaagagtgttctatgtactttgtgatggactagctgcatatgcttggtggttggaaaatagcatttcctagtggttaaaattactttttaagcgcttaactgtgtattttttagattgaagatttcaaatgaaattttgatttgactgaaatatttaatatgtgatgagttgatattaaaatacagaagattactatttttat

SEQ ID NO: 91053 - DNA, 994 bp, Homo sapiens
ctttttatgttctttagcaaccctacatcatgttctttaatttactcacagaaataagtagagtcaagtcagctcttatagttttaaaattctcctacttctcacctaccaagaacccattgcctcttcatgctattttgttcttgattttcctgagcagtaattgggctactgaagcacatttcctttccttctcttatttactctctggggggactactttctcaccagtgcatggtgtgtctgtgctttggaatagatgccaggaaggggtaggatggtcaggggctgctgtatgtcccactccttggagctgtgcagtcagcctagctagccctggctatggtttcatccgcttgatacagatattgatgataagaaacttattccagggatgttgtcttgttttcttattggtggtctctgtcatgttttagtttggctacatttttatagatatgagacgtgtatgtgttttaccaatttaagagactactaggagttctaataaaaaaccagctctttttctcaaggaaaagtaatccttttcaacattgtttataagcctctaggacttgtctagcagtatgctcacatattgaaaatagatttgtctcttccgtattcttcaggggcattttactgtgggtctgtcaggtcttcagactgctaccctggtgaaaacgtgatttaagaaggtatttcggtgtggggctattataagaaacttctgattttaaatgccgtctatctgcaataagtaggatttgttggtgctggtggtttaactggaggggaaaaagaaaatctggcttcagaagaaaaaccaagtttattcttggaagataaatgggtgatggttggaatacctcccagcttcgggaacgtgaggatcacttttatttgaacttcgttggggcttttggattgggccgcccgtggttttcgctttcaacaagggaaggaggggggagtcctttttaattgtgtctcg

SEQ ID NO: 91054 - DNA, 579 bp, Homo sapiens
tctgaatctaccctgagtgcctctccatgcagattctttgtgtaccattatctcatttagttcttattttttaattctaaaaaattatctcatttaattcgtataggctgccttcctgcttataatcctctgccttcctccatcattatacttatatgcagttgaaactatctgtttatgtggctgtggaccacctttactcttgtctgtaatctgagagtctcgctaagggcccaccagtgttggtgctctataaatgagtacgtgatattatatccattttgcaggcaaagaaacgagattatgtgacttgtccagtgccatacagctaataagttccaggtttgagtgcaggactgttttgactttgcaatctttctccttggctaggtggagcttccttagggagaagcagggacagcctcctttaccatccttagtgtctgccttccaggcttggctgtggctgtgcctccttagactgtcccactattcaactgcctaccttgggctattggtagctagggcataccgggaactaaccacggaaacaagagaaagtgaagtcgacgcggcccg

SEQ ID NO: 91055 - DNA, 406 bp, Homo sapiens
aatgtataaaaagtcaggaaatggagagactgaatacagagagttcttacaagaaacttgtctttgaaactggaaggtctctaacttggtccttaattttcagatgttggtttactctgaatgaataaaatatagaagaaaaacttaaggaatataaatgaaaatctttaaagattgttaaataccaaattcctcactctgtgagtgtagttttatttagcacaggtctttttgtaattggaatagttttttaatagacaccatgcttaatcatcctcaagagtctgccgctgtgattcaaagatgtttcatattccacttaaaacatcaagcatctaaaataaaaagaatatactagttcacctcctggagctctgagaaattttaataaaagtcgacgcggccg

SEQ ID NO: 91056 - DNA, 1945 bp, Homo sapiens; identical to SEQ ID NO: 59275

SEQ ID NO: 91057 - DNA, 1880 bp, Homo sapiens
ccccttctttcttgccccagtctccagttctccagtgttcacaggtgagcctaccaacagccactgctcatgatggaggccatcaagaaaaagatgcagatgctgaagttagacaaggagaatgctctggatcgggcagagcaagctgaagctgagcagaagcaggcagaagaaagaagtaaacagctggaggatgagctggcagccatgcagaagaagctgaaagggacagaggatgagctggacaagtattctgaagctttgaaggatgcccaggagaagctggaactggcagagaagaaggctgctgatgctgaggctgaggtggcctccttgaaccgtaggatccagctggttgaagaagagctggaccgtgctcaggagcgcctggccactgccctgcaaaagctggaagaagctgaaaaagctgctgatgagagtgagagaggtatgaaggttattgaaaaccgggccttaaaagatgaagaaaagatggaactccaggaaatccaactcaaagaagctaagcacattgcagaagaggcagataggaagtatgaagaggtggctcgtaagttggtgatcattgaaggagacttggaacgcacagaggaacgagctgagctggcagagtctaagtgttctgagctggaggaggagctgaagaatgtcaccaacaacctcaagtctcttgaggctcaggcggagaagtactctcaaaaagaagataaatatgaggaagaaatcaagattcttactgataaactcaaggaggcagagacccgtgctgagtttgctgagagatcggtagccaagctggaaaagacaattgatgacctggaagatgagctctatgcccagaaactgaagtacaaggccattagcgaggagctggaccacgccctcaatgacatgacctctatataattatcaccgtttctgctctgttctggatctgccccctttactcctcggggaacccaaggccccactctcgctctggattccatttgggtcagcctggctggtccccaaggcattaggatgggggagcaaaaagcaacttatgtattttcttccacccccaccccaaattaaaatgttaagctgctggaaacctcatgccaccctgcatttgtgtcattgacaaagctgttgctgtccctaagaaggagccttgggggtgtgatgtggggaagagctattgtaggctccccctcctctgacttatgtaatcaaagccacttttgtgtgtgtctattttttcttgacatttaaactcagctgatctgattctaccagagtgatggatttagtacaggttactcaggatagtaattttagttatactcctcaagctgaacaagattaaattccttatttccaggttcttaaatcatcctgcctgcagtgtttccattctctcttcaggtattcctcctttgggggggtgtcattgagaagccattgaagtgactctcaatacacattctgtacccttttaccggtggttcaaatggtgcatcctcagaacacccagtgaacccaatacattattgctaagattgactaattatgtcaactccagtcacagaaaaatacacaatggatagaattctggacggtttttttactttttcttctttaaacctttcttacatatttgagacttgctaccatttgcctgctagtgtgtgactagtgggatataagataagtgataaattattattgggaaaactaaaatgaccaatcatgcatatttcaaataatgtgcatatgaggctaatgatttattacatacataaatttctgctagtaaaattttccttggttcatattgtggaattaaatatcaacattttagaaattcccattat

SEQ ID NO: 91058 - DNA, 628 bp, Homo sapiens
tttcgtcagacacctactttaaggacctgtggaaactgggtgatccaattatagggctggggcaaccctgctttggccaccctcatttacaaacttaggttgggagcttgggtttcctgtctcacttccaaaagccttcaagatggcagcagatggacacaccctctcatttcttgtgtcttgtctgtcagatggcaggaggcctgtatcagtaaatttgaggaaaatgttctctcctgggccagcctcacagcttgcgttgggtgtgttggaattgttctcttcggccttgttctgccttgtgatcttttcaattcagtgaataaaccaggtatccattttttcaccaacccaccctgtagattgtcagctttttgtttgagagatagcctgggctcacagttacatgtatcaaagtgagtgtaagttgtctgtgttagaaaggctggcgtgggggctttgttgccatagattagactgtgatttcgttctcatactacgagagacatcttggggattactgtataaccctttgtggaggtacaaaaggacggttaccaagatctggtactactacacatatgcaggcctatcggtgatgattgactccagacacgacttcacagac

SEQ ID NO: 91059 - DNA, 1001 bp, Homo sapiens
ccagggggcaacaggagcagcagctcttcttgcaggaggtgcatttgcactttttgcacttgcaggagccggcgcaggcgcaggagccaccagcctcgcaggagcagttggggtccattgcaagccgaggtgagactggagttcccaagcgagaagagaagaggcagtggaacacgtggagggcgtggagggagcacaggggtggccagcgtagggtccagcacgtggggtggtaccccaggcctgggtcagacagggacatggcaggggacacaggacagaggggtccccaactgccacctcacccaccggaattcatttagtagcaggcacaggggcagctccggcacggctttctcaggcctatgccggagcctcgagggctggagagcgggaagacaggcagtgctcggggagttgcagcaggacgtcaccaggagggcgaagcggccacgggaggggggccccgggacattgcgcagcaaggaggctgcaggggctcggcctgcgggcgccggtcccacgaggcactgcggcccagggtctggtgcggagagggcccacagtggacttggtgacgctgtatgccctcaccgctcagcccctggggctggcttggcagacagtacagcatccaggggagtcaagggcatggggcgagaccagactaggcgaggcgggcggggcggagtgaatgagctctcaggagggaggatggtgcaggcaggggtgaggagcgcagcgggcggcgagcgggaggcactggcctccagagcccgtggccaaggcgggcctcgcgggcggcgacggagccgggatcggtgcctcagcgttcgggctggagacgaggccaggtctccagctggggtggacgtgcccaccagctgccgaaggccaagacgccaggtccggtggacgtgacaagcaggacatgacatggtccggtgtgacggcgaggacagaggaggcgcgtccggccttcctgaacaccttatgctggt

SEQ ID NO: 91060 - DNA, 417 bp, Homo sapiens
  misc_feature (1)...(417): n = a,t,c or g
tttcgtagaaaagttactcactttgtttatatattagttcttagggctttttctcaagggcaaatgcagttgtcaccagatgttaaatatggagaagggagagaagttcagtgcagcagctgcttcaaatttagtcctttaattaatttctctgattatttccccatattgctttccagctctttgtatttggtgactcttagcttggttatttctctggagattttgtgagaattctaactttaacttcagtagttacttatcccctcctgtggtgngntgacttcctctcttttccttcttctacagcaactctccaggactgcagaggtggtttcatgaagggttcccttgccacatggcccaactaagagatgaagaccacacaacacaggaggggataagtacctctggacg

SEQ ID NO: 91061 - DNA, 1066 bp, Homo sapiens
acctcctgtaagctttagaaggattcggtgctgctggcctgctcagacctccgcctgttttgtggagtttctcctgttggcccctcctctctgtaccacaaaagctctaggcgggccagccacccctgtgaaagcggcgcccgtagccagacgccaaggctgccgtcccgagccgagggtggcaccttgcccagcgcacgtgcattctcctgtgggaactcggagggcatgtggtgagcagtctcctgtcagttgaggtggaggctcccggcccatctttgctctcctcaggctgcccagctcctggcggcacatggtggcctggcaaggctgacttggcctcctcagttccccacccatccgcggatcatcgccttccctagccacctctctctatagccaccgacatctgcggagcgtcacagactggttctgagctgtggtttacaaattcaacccaacacagagtgaattcaaatttgcttttggaacagcctttatctccaattaagtgcaagtatatttacactatgtgatattaaaggacttctccaatgactgggaggtactgaaccaagatgtttgtaaagaaacggtggggtgaggtggttaggtagaatataccgtcctggccatttctcttccttcaggcgagtaagcgctccttcagcagaaaggctgcggattgctggctgtgctctgtggactgggccagtaggtgtggcccaggtccaggtcctggcacctctgctgagtgcccagcctgagatgacacatgccatcctggagagaagcagagagggtgctgtctccaggcgttctccagacagcctgggcctggcttgctgagccagctgcaggaggggatctcctgactggggcttgggaccagatctgctgcagagaggcaataactctgtctaaaaagaaaacttgtcccgtgtgattacaaaaacaggaaaaggctccaagctaggaaatgagatttgaggtatggagaacattctcacctgatggaagcatcctgttcctgtacaggaggaggagctggtgcaagccctaggcc

SEQ ID NO: 91062 - DNA, 443 bp, Homo sapiens
aatacattggggcttttaaagtctatgtattaaatgcattaaaaatgcatttttaaaaaaaccattattctgagaaggggtccaaggcttcatcagaacgctaaagggtccaatggcacaaaaacaaggttaagaacctctggatttaggtctctaatatcttctcccaggttcagccctcacccttcacatatgaaggataaatgatcatttgtttggatgctgcagctccaggtgctggggaagcagggagctcaaagaggcaagagctctctgcatgatgctccttgaagaaaagcctgctctggccagaaggaagccaggtggagggaggtggcttggcccctgtggggtggaaacttctctcaccctggtgctgtctagtctaaaacaatggcgactgcatctgttcagccttctgagtttctccacctgttggagga

SEQ ID NO: 91063 - DNA, 4874 bp, Homo sapiens
tagggcaagcctttctgtggcattggatgtgggagtctagcttggattatcaagggcctttaggaagctgtgtcagaaacagcacaattagggtcccacaggggtaccaaattggggatatttttgaggcctggggtctttgagggtatcagaagactgcatgtcaaggatcatcacaccgggtggctggctctgcagtacttgaggctgaggtgccttaacatggtctcaccccttgctggctgtgtgtccacagggggtgtggctcggctccacaccctctggctccccggccctgctaccccccagccaccgagtgaatgcggagcctggctgtgttgtgaccaacgcctgtgcctctgggccctgcccacctcacgcaaactgccgggacctctggcagaccttttcttgcacctgccagccaggttactacggcccaggctgtgtggatgcctgcctcctgaacccctgtcagaaccagggatcatgccggcacctgccaggagccccccatggctatacctgtgactgtgtgggtggctatttcgggcaccactgtgagcacaggatggaccagcagtgcccacggggctggtgggggagcccaacctgtggcccctgcaactgtgatgttcacaaaggttttgatcccaactgcaacaagacaaatgggcagtgtcactgcaaggagttccactaccgaccgcggggcagtgactcttgcctcccatgtgactgctaccctgtgggctccacctcgcgctcatgtgcaccccacagcgggcagtgcccctgtcgcccaggagcccttggccgccagtgcaacagctgtgacagtcccttcgcagaggtgacagccagcggctgccgggtgctctatgatgcctgccctaagtccctgagatctggtgtgtggtggccccagacaaagtttggcgtcctggccacagtgccctgtccccggggggccctgggattgcggggtgcaggtgctgctgtgcggctgtgtgatgaggcccagggttggctggagcccgacctcttcaactgtacctcccctgcctttcgagagctcagtctgctgctggatggcctagagctgaacaagacggcactggataccatggaggccaagaagctggctcagcggctacgggaggtgactggccacactgaccactattttagccaagatgttcgagtcactgcccgcctgctggcccacctgctggccttcgagagccatcagcagggcttcgggctgacagccacacaggatgcccacttcaatgagaatctgctgtgggccggctctgcactgcttgccccagagacaggggacttgtgggcggcgctggggcagcgggcccctgggggctccccaggcagcgcgggactggtgaggcacctggaggagtatgcagccacactcgcaaggaatatggaactcacatacctgaatcccatggggctggtgacgcctaatatcatgctcagcattgaccgcatggagcaccccagttctccccggggggcccgtcgctaccctcgctaccatagcaacctctttcgaggccaggatgcctgggatcctcacacccatgtgctgctgccttcccagtccccacggccatccccatctgaagttctgcccacaagcagcagcatagaaaactccaccacctcaagtgtggtccccccaccagccccgccagagccagagcctgggatctccattatcattctcctcgtttaccgcaccttagggggactgctccctgcccagttccaggcagaacgccgaggtgccaggcttcctcagaaccccgtcatgaactccccggtggtcagcgtggctgtgttccacggacgcaacttcctaaggggaatcctggagtcccccatcagcctagagtttcgcctgctacagacagcgaatcggagcaaggcgatctgtgtgcagtgggacccacctggcctggcggagcagcatggtgtgtggacagcacgggactgcgagctggtgcacaggaatgggtcccacgcacggtgtcgctgcagccggacagggacctttggggtcctcatggatgcctctccccgtgagaggctggagggcgacctggagctgctggctgtgttcacccacgtggtcgtggctgtgtctgtggctgcgctggtgctgactgcagccatcctgctgagcctgcgcagcctcaagtccaatgtgcgtgggatccatgccaatgtggcagccgccctgggggtggcagagctcctcttcctgctggggattcacaggacccacaatcagctggtgtgcactgcagtcgtcatcctcctgcactacttcttcctcagcaccttcgcgtggctcttcgtgcaggggctgcacctctaccgcatgcaggttgagccacgcaacgtggaccgcggcgccatgcgcttctaccatgccctgggctggggcgtccctgctgtgctgctgggccttgctgtgggcctggaccctgagggctatgggaaccctgacttctgctggatctcagtccacgagcccctcatctggagctttgctggccctgttgtcctggtcatagtgatgaacgggaccatgtttctcctcgctgcccgcacatcctgctccacagggcagagggaggccaagaagacctctgcactgacccttcgcagctccttcctgctgcttctgctggtcagtgcctcctggctctttgggctcctggcagtcaaccacagcatcctagccttccactacctccatgctggactctgcggcctccagggcctggcggtgctgctgctcttctgtgtcctaaatgcagatgctcgggctgcctggatgccagcctgtctgggcaggaaggcagcgcctgaggaggcaaggccagcacctgggctgggacctggggcctacaacaacacggctctctttgaggagagtggcctcatccgcatcactctgggcgcctccaccgtctcctctgtgagcagtgcccgctccggccggacccaggaccaggacagccagcggggccgcagctacctcagggacaatgtcctggttcgacatggctcagccgctgaccacactgaccacagcctccaggctcatgctggccccactgacctggacgtggccatgttccatcgagatgctggcgcagactccgactctgacagtgacctgtccttggaggaggagaggagtctctccattccatcttcagaaagcgaggacaatggccggacgcgggggcgcttccaacggccactctgccgagcagcccagagtgagaggctcctcacccaccccaaagatgtggatggcaatgacctcctgtcctactggccagccctgggggagtgcgaggcagccccctgtgctctgcagacttggggctctgaaaggcgcctggggctggacaccagcaaggatgcagctaacaacaaccagccagacccggccctgaccagtggggatgagacttctctgggccgggcccagcgccagaggaaaggcatcctgaagaaccggttgcaatacccactggtgccacagacccgaggtgcccctgagctgtcctggtgccgtgcagccaccttgggccaccgtgctgtgccagctgcctcttacggtcgcatctatgctggcgggggcacgggcagcctttcacagccagccagccgctactcttctagagaacagctggacctgctcctccggcggcaactgagccgtgagcgactagaggaagcccctgcccctgttctacgtcccctgagccggccagggtcccaggaatgcatggatgctgcaccaggccgactggagcccaaagatcggggcagcaccctgccacggaggcagccacctcgggactaccctggcgccatggctggccgcttcgggtcacgggatgcgctcgacttaggggcacctcgagagtggttgagcacgctgcctccgccccgccgcacccgggaccttgacccacagcccccacctctgcccctgtctccccagcggcaactctcaagggaccccctcttgccatcccggccgctggactctctgtctaggagctcgaactctcgggagcagctggaccaggtgcctagccggcacccctcacgagaagcccttgggccactcccgcagctgctcagagctagggaggactcggtcagtggccccagccatggcccctccacagaacagttggacattctttcctccatccttgcctctttcaactcctcggccctctcctctgtgcaatcttcaagcacacccttgggccctcacaccactgccacaccttctgccacagcctctgtgcttgggccctccacgccacgttctgccacgtctcacagcatctcggagctgtcgccagactcagaaccgagggacacacaggcactgctgtctgcaacacaagcaatggacctgcggaggcgagactaccacatggaacggccgctgctgaaccaggagcatttggaggagctggggcgctggggctcagcacctaggacccaccagtggcggacctggttgcagtgctcccgtgctcgggcctatgcccttctgctccaacacctcccggttttggtctggttaccccggtatcctgtgcgtgactggctcctgggtgacctgttatccggcctgagtgtggccatcatgcagcttccgcagggcttggcctacgccctcctggctggattgccccccgtgtttggcctctatagctccttctaccctgtcttcatctacttcctgtttggcacttcccggcacatctccgtggagagcctctgtgtcccgggaccagtagacacag

SEQ ID NO: 91064 - DNA, 6844 bp, Homo sapiens
tttcgtgtggagggtcttctatgtccatgcctcgtgcatgcctcctagggcaaggtcctgggaaggagcccatgccccagtgggaatgcatgtggcagaggcacacgcatgctcctcacagcagcaacaaatgccccctgcacagttttggatgttggagtggctgctgcacctgtgcgctttcctatctacacccagcttcccccactggtgttgctgctccaatcctcacggttctattgcagataaacccgaggagatagtcccggcctccaagccctcccgcgctgctgagaacatggctgtggaaccgagggtggcgaccatcaagcagcggcccagcagccggtgcttcccggcgggctcagacatgaactctgtgtacgaacgccaaggaatcgccgtgatgacgcccactgttcctgggagcccaaaagccccgtttctgggcatccctcgaggtacgatgcgaaggcagaaatcaatagacagcagaatctttctatcaggaataacagaggaagagcggcagtttctggctcctccaatgctgaagttcaccagaagcctgtccatgccggacacctctgaggacatcccccctccaccgcagtctgtgcccccgtccccaccaccaccttccccaaccacttacaactgccccaagtccccaactccaagagtctacgggacgattaagcctgcgttcaatcagaattctgccgccaaggtgtcccccgccaccaggtccgacaccgtggccaccatgatgagggagaaggggatgtacttcaggagagagctggaccgctactccttggactctgaagacctctacagtcggaatgccggcccgcaagccaacttccgcaacaagagaggccagatgccagaaaacccatactcagaggtggggaagatcgccagcaaagccgtctacgtccccgccaagcccgccaggcggaaggggatgctggtgaagcagtccaacgtggaggacagccccgagaagacgtgctccatccctatcccgaccatcatcgtgaaggagccgtccaccagcagcagcggcaagagcagccagggcagcagcatggagatcgacccccaggccccggagccaccgagccagctgcggcctgacgaaagcctgaccgtcagcagcccctttgccgccgccatcgccggagccgtccgcgaccgtgagaagcggctggaagccaggaggaactccccggccttcctctccgcagacctgggggatgagcatgtgggcctggggccacccgcccccaggacgcggccctccatgttccccgaggagggggattttgctgacgaggacagcgctgagcagctgtcatcccccatgccgagtgccacgcccagggagcccgaaaaccatttcgtgggtggcgccgaggccagtgctccgggtgaggctgggaggccgctgaattccacgtccaaagcccaggggcccgagagcagcccagcagtgccctccgcgagcagcggcacagccggccccgggaattatgtccacccactcacagggcggctgcttgatcccagctccccgctggccctggcactctccgcaagggaccgagccatgaaggagtctcaacagggacccaaaggggaggcccccaaggccgacctcaacaaacctctttacattgataccaaaatgcggcccagcctggatgccggcttccctacggtcaccaggcagaacacccggggacccctgaggcggcaggagacggagaacaagtacgagaccgacctgggccgagaccggaaaggcgatgacaagaagaacatgctgatcgacatcatggacacgtcccagcagaagtcggctggcctgctgatggtgcacaccgtggacgccactaagctggacaacgccctgcaggaagaggacgagaaggcagaggtggagatgaagccagacagctcgccgtccgaggtgccagaaggtgtttccgaaaccgaaggtgctttacagatctccgctgcccccgagcccaccaccgtgcccggcagaaccatcgtcgcggtgggctccatggaagaggcggtgattttgccattccgcatccctcctccccctctggcatccgtggacttggatgaggattttatttttacagagccattgcctcctcccctggaatttgcaaatagttttgatatccccgatgaccgggcagcttctgtcccggctctctcagacttagtgaagcagaagaaaagcgacacccctcagtccccttcgttgaactccagccaaccaaccaactctgcagacagcaagaagccagccagtctttcaaactgtctgcctgcctcattcctgccaccccctgaaagctttgacgccgtcgccgactctgggatcgaggaggtggacagccggagtagcagcgaccaccacctcgagacgaccagcactatctccaccgtgtctagcatctccaccctgtcttccgaaggtggagagaatgtggacacctgcacagtctatgcagatgggcaagcatttatggttgacaaacccccagtacctcctaagccaaaaatgaagcccatcattcacaaaagcaatgcactttatcaagacgcgctcgtggaagaagatgtagatagctttgttatccccccgcccgctcccccgcccccgccgggcagtgcccagcctgggatggccaaggttctccagccaaggacctccaagttgtggggcgacgtcacagagatcaaaagcccgattctctcaggcccaaaggcaaacgttattagtgaattgaactctatcctacagcaaatgaaccgagagaaattggcaaagccgggggaaggactggattcaccaatgggagccaagtccgccagcctcgctccaagaagcccggagatcatgagcaccatctcaggtacacggagcacgacggtcaccttcactgttcgccccggcacctcccagcccatcaccctgcagagccggccccccgactatgaaagcaggacctcaggaacaagacgtgccccaagccctgtggtctcgccaacagagatgaacaaagagaccctgcccgcccccctgtctgctgccaccgcctctccttctcccgctctctcagatgtctttagccttccaagccagcccccttctggggatctatttggcttgaacccagcgggacgcagtaggtcgccatccccctcgatactgcaacagccaatctcaaataagccttttacaactaaacctgtccacctgtggactaaaccagatgtggccgattggctggaaagtctaaacttgggtgaacataaagaggccttcatggacaatgagatcgatggcagtcacttaccaaacctgcagaaggaggacctcatcgatcttggggtaactcgagtcgggcacagaatgaacatagaaagggctttgaaacagctgctggacagataaggacggctgctctccacctcgcagactgctcttgttataagtagagatgggctcgtgctgaaacatctgaatgccaagcgaagtctgtgagcatcaaccccactccatgggtttgtctcctggtacccaaagaaatactgagttgtgtccacaacatggctgggtcttcagacccctggctcaccatgtgggtgtcttgggcagtttctatcacacatgggacaaggggagggagtttttctaacatggaaaaagattcccagcctgccgcccagcatgcaggtggcctcgctttgccgggtccgtgaggctccccgtcaattttgcacgggatcctagctcttgtaggcagacaccagtgcactctagatacctcctgagacctccgtcctctgctttccgggcagctctcaccaccccaggccccggcatgaggcctttcctcagtcctgtggcctctcagaggacacctgatgctcacctgcccctctttctcctgcacttggcttgcagtgagatgctcccagatgcatttgtccagtgccccatcatgggcctgaaaggcagagaaactttttcctacacagattcttttccccatctcctcctgtggtttgcatccatggctctttggccatgaggttcctggcagtgctgggagtttggatgggatcgtgcccagctttgcttagctttctttatttctgcaaatctgttagcataattccaaggtggccaagcagatgtcacatggagttagtcaaagcacaaagtcacgattccacaatggaggggagacctggccaagggagccagccagcgtgcaactgcccaagctccaggtctccaggacaagagcagttgtctgccatgagcacccatccaggatggagaataagggcttctctgcctctcagaattctttttaattgaagatgtcttgagctctgcaaagatcagagcaggtgagcatccactttgacatgaaggacaagaagacgcatggctcatggcgggcacatgcggctgccagtgagacagcgtctcctctgggagctgggcgggcacagcatcctcagttctgtgcccagccaagggtgagcatctctgctgagacagtccttttgctctcggaggccagggaagatggtacttagaggcttttcccctatcgctctgggtgtctaggaatcccaccagcttgtcttaacagtacaacagcttctttgaggacccagtgggtatggagtatagacagaacccagggttgagaacagaaggtgggcggcaggatcagagtgaaagcagaggcgtgaggagaggaaagcagggaggtctcctgggctgccaggtcagcctctctggcaaggctttcttgagccccgcccctttctttccccggagtccctccaccccataacaatacctcgaatttccaaaagaggtcaccagatgcacatgggccgcaaaacacacagtcaggcttccagcacattctcccccatttggaggatactcgaatgtcaggtttttggttttattattatttcagaactagctcagcccatctctaattataaaacatggttttgttttttttttttcctttttttcttgattaggtctggaacagctctagaatgaacacataaaatttagcaatttaaaatctttctttactgcaagtttaaatagttgtacagatagtttataagcacaatattttaagaaaaaaaagtggctggtctactaggcagcctttgtgccacttcagtgctagaaagttaaagaaaaaaaaacttttgtgatttaataatactatttctgtgggaataattataaaagtatgaccttttttaaatcaacctttatttggatgcatctgaaccagcagagctgtggtttattattttctatctttgctaggaacttcgtcattgaagggacaatttcttcaaagtggttacaattcataatgcagcagtttctccaaaaacaaaaacaaaacacacaccacacacacgcgcttttccagtcacacacccctgatgttggaaccaagtttttggaccttctgttccaaaaccttttgcaggtcaatctttgtatttgaaatgatccaatccaacttgaagtcaattgaatattaaggcggttttacttccgtgtgctttcagtttttccatcatgaggatgaatgaggcattactctagataaaatttccaagacaggatactacaggtggcctgctgaggctgccccatattttagaaaatgtaaaaatggtggtttggccattaatttgtcttccatttgatgataccgcaaaattccgtgagtccattcctttggcatggcactttccctgggcctacagttggtattacctctgtgctcagtgccaggcaaaacactagctcaaaggagagtcaaggaaaccgctggcagacgataaccagtcgaaactcgtgacttcggtttgttgaactttggcagccagttggtgagggccagatgttattccctttcttaaagatactccaagccacatgccactaaccacaagcaagctggctgcaagactaaagagctgataacatagtttatttttacactgtcttattatagagaagtaatagacctatcagaacctgcactgaccaacaaataaacacatgttgccaagatgaatcggtctctatctctatctgcttattttggtactgaaaagcaatagttcctcattcaaatcaccacccactgttctccccctttgggacatgttaggacgaggccctattccatgcccctctttaatggtggaacaaatgttaaactgctcatctaaagatcatgttgatattattccaggttttaagatcaacttttgttacatactgtaatttaaataaactgcatttacatgcctagtttctgtaatattgtgtatacaaaacccaaatctctcaaaatgtaaattatgtatacctgccaagataccttttccagggtgtctgcgcacattttaagttaattcacataatataaaaattactcaatgtgactgttgatttgcctgaactttaccatatcacaaagtgaattatttgtgatactttagttaataaaatggtaaatttttttctcagttattgaacaagcaagcattatccagttgatctggcaatgactttttgtgtgtgggccacaatattgattttcccattaacaattttttttgttttttaaatactaatatgtttcacactatagtttgtgtaacaacacgtgttcgcattatctatgttgctgttacttttgtgcttttattctttttagactttataaaaaaaaaa

SEQ ID NO: 91065 - DNA, 5785 bp, Homo sapiens
ccgtaattaaatagcatttactcttattattactaataataataacgtaatcatacctctagtcatagcataccatttatcgggctcggcgcaggcccgcggggagcgcagcccggcggagagactgatggagaggcagaaacggaaggcggacatcgagaaagggctgcagttcattcagtcgacactacccctaaagcaagaagaatatgaggcctttctgctcaagctggtgcagaatctgtttgctgagggcaatgatctgttccgggagaaggactataagcaggctctggtgcagtacatggaagggctgaacgtggccgactacgctgcctctgaccaggtggccctgccccgggagctgctgtgcaagctgcatgtcaatagggccgcctgctacttcaccatgggcctgtatgagaaggcgctggaggacagcgagaaggcgctgggcctggacagtgagagtatccgggcgttgttccgcaaggcacgcgctctcaatgaactgggacgccacaaggaggcctacgagtgcagcagccggtgttccctcgccctgccccacgatgaaagcgtgactcagcttggtcaggagctggcccagaaactggggctgcgagttcgcaaggcgtataagaggccccaggaattggaaaccttttctctgctcagtaacggcactgcggctggcgtggcagatcagggaacttctaatggattggggtccatagatgacatcgaaacagactgctacgtggaccctcgaggctccccagcccttctcccctccacgcccacgatgcccctgttccctcacgttctggacctgctggcccccctggacagcagcaggaccctccccagcaccgacagcctggatgacttctcagacggggatgtctttggcccagagctggacaccctcctggactcgctgtctctggtccagggtggcctgtctggcagcggcgtgcctagtgagttgccccagctgatacccgtgttccccggcgggaccccactgctaccacctgtggtgggtggctccatccctgtctccagcccactgccccccgcctccttcggcttggtcatggacccctccaagaagctggccgcctctgtgctggatgccctcgatcccccgggccccacgctggaccccctggacctgctgccgtactcggagacccggctggatgcactcgacagctttgggtcgacacgaggctccctggacaaacctgactccttcatggaggagaccaactcacaggaccaccgtccccctagcggtgctcagaaaccagccccctcgccagagccctgcatgcccaacactgccttgctcatcaagaaccccttggctgccacccacgagttcaagcaggcctgccagctctgctaccccaagacaggcccccgggctggcgactacacctaccgtgagggccttgagcacaagtgcaagcgggacatcctgctcggccggctccggagctcggaggaccagacctggaagcggatccggccccggcccactaagaccagcttcgtgggctcctactacctgtgcaaagacatgattaacaagcaggactgtaagtacggggataactgcaccttcgcctaccatcaggaggagatcgacgtgtggaccgaggagcggaagggcaccctcaaccgcgacctgctcttcgacccgctggggggtgttaagcgcggcagcctcaccatcgccaagctcctgaaggagcaccagggcatcttcaccttcctctgcgagatctgctttgacagtaaaccccggatcatcagcaaaggcaccaaggactctccgtctgtctgctccaacctggctgccaagcacagcttctacaacaacaagtgcctggtgcacatcgtccgctccacctccctcaagtactccaagatccgccagttccaggagcacttccagttcgacgtgtgccgccatgaggtgcgctacggctgcctgcgggaggacagctgccacttcgcccacagcttcatcgagctcaaggtctggctgctgcagcagtactcaggcatgacccacgaagacatcgttcaggagtctaagaagtactggcagcagatggaggcgcatgcggggaaggccagcagcagcatgggtgctccgaggacacatgggcccagcacctttgacctgcagatgaagtttgtatgtggccagtgctggagaaacgggcaggtggtggagcctgacaaggacctcaagtactgtagtgccaaggcccggcactgctggaccaaggagcggcgggtccttctggtgatgtccaaggccaagaggaaatgggtgtcagtgaggccactgccatccattcgtaacttcccacagcaatacgatctctgcatccatgcacagaacggccgcaagtgccaatatgtggggaactgctccttcgcacacagcccggaggagagggacatgtggaccttcatgaaggagaacaagatcctggacatgcagcagacctatgacatgtggctgaaaaaacacaacccaggaaagcctggagaagggacccccatcagttctcgggaaggggagaagcagatccagatgcccacggactacgcggacatcatgatgggctaccactgctggctctgcggcaagaacagcaacagcaagaagcagtggcagcagcacatccagtccgagaagcacaaggagaaggtcttcacgtccgacagtgacgccagcggctgggccttccgcttccccatgggcgagttccggctctgcgacaggctccagaagggcaaagcctgcccagatggggacaagtgccgctgcgcccatggacaggaggagctcaacgagtggctggaccggcgcgaggtgctgaagcagaagttggccaaggctcgcaaggacatgctgctgtgcccacgggacgacgactttggcaaatacaacttcctgctgcaagaggacggggaccttgccggtgccaccccagaagcccctgctgctgctgccaccgccaccactggggagtagggccaggtgttggccgtgggtgaagtcctggggtcagggggtggggtggggccagaaggcctgatagaagggtcagggcaggccaggggggtggggggccgccctcatcaggcagcccccagccccctgaggccccgtccatcttctccccaccaccgccccggtgtgcatacccaggcgcacgtgctgcagcccccggaggccccgctgaaacctgggctgcccttcccccacccccacggctctcctggttgaggagggaggggcctggctgacccctccagcttcagcctccagctttaacttctgtctgctcctaatgggggcccaaagctcagggctggggagcctggggtccccacttgaatctccagcaggagggtccttctctccctggcccgtcctcctcccaccccctccccctgggggcaaatcaggacacaacagagggcagaggccccattagctttaaaatgtagccccaggttggagctgggaacactgtactggccacttaccctctggggcctcagctttccctccggaaggctgggaggaggtgggctagatgatctttggagcttaaggagtcccagccctttctctgatgccaccacctgaaccctgctccctcgtgggccagtgaaaatagactgtaggtcctcagagccttcagagatgatccagcccaaaccccattttgcagagaggaaaactgaggcctagaagggaggagtggtccacccacggtcccagcacaaggcagagctgggatgaaaacagggctgaaaagactcagggccaattattggctgagcccacggtcccctcagcagggatgcgatggtctctgaatcagtgtgcagctggggtcccaggcagcgctgcctgggggctggggaggggaggcccagaggagggctggccatgtgagcaccccatgaagggaccgccccctcccaaggatggtccctttgggtgcagcagcagaggtcacctcctgacatgcgctctgggaaaggtggcagagggcaggacaccatgagctcaggatctgtgtgaggtgtgggaggtgggaagggtgagggtctgggggaatgcggagaaaagggaggcttgaccccggggcaccatgggccactccaggatgggacacggcccctctttcttggggacccagtatgtcctctcctctagacccagacatacagttataaccgtctgtcctagcccctccctaatccctggccctcccagctgtctgggacttcagtggacccccagcccctgcccccactcaccaaggcctcgctcgtccctctcgtctgacatgtctgtgtgcacccccctcctctccaccctaccttccatcaaccagggcagatccaccgtgccctggttccccagacattccagaatgccccacatcattggcacaggagtggggcagccccggaaggaaccagggattaggctgtaggggggtgagaaggagagaagggaccaccccattcttctcaagcaaggattgccagcgcgcgctgacacagtgatgggctgcccagggctggaggggacgctgttcctcccgccgccactgcccaacctttcctgataatcgtggcatgcgccctttcctcttccctgccccaccccctggccgcagcaggccagcactgcagagtttgggtgctggtggtgtggctgtaggggaggggagaccacacccaaggtgggggctgtggccatgtgtggccgtgatgtcgatgatactcgttttccctgatccgtggtgttgcagtccgttgtcaccagccttgtttctagtgtgtatatatgtcgcccccgtgatgcatatatacacaggtattaaatatatcgctctatataatattatatatgtgtgtggtatccaaggaatcacttttatgagggctaaagataaagaatttggccagaaaatgcagccatccttgtgtgattaggagggtttcaggggccactggactatttgcaaggtgacagggactggagccatggctcagaggtgattcgggcagccagggacaggagccaccctccccaggcccaactctgctagcttcccagaccacccccatcgagtgcggagagagtgggagtgctcagggaaagaaggtgatttgtatttgtctccccgctgaaaagaacaggattcaagtccagagttttcatcttcagcctgtgatctgtccagggacccttgggatctggggcttcctggcctggccagagctggagcccccacagggtaaggaagagagagtgggaggcaggagtgtgattggggaggagggacaggaagacccttttaatgatgagggtaactatttcagttgtgagccttctagggccccaggctgggaggctcagaggactgaatctgggacctgtgttccccccggcaggcagggacaaagatggcatggcaagcatgggggcggggtgggtggggagggatgctgcatttctcagctgggcagtaatcaatttaatggtcctttaaaatgtctgtgtattaaaaatttaagaataccacactttaatattaaatattcataaggtgctagtatcttgataataatgtagatgttttaataacaatttttgtccttcttaaaataaaatgaaagaaacttgcttcccttagcctttgttctagaaaataaacttgtgcactttgaa

SEQ ID NO: 91066 - DNA, 2282 bp, Homo sapiens
ctgcagcaccagccgtctgcagctccggccgccacttgcgcctctccagcctccgcaggcccaaccgccgccagcaccatggccagcaccatttccgcctacaaggagaaggtgaaggagctgtcggtgctgtcgctcatctgctcctgcttctacacacagccgcaccccaataccgtctaccagtacggggacatggaggtgaagcagctggacaagcgggcctcaggccagagcttcgaggtcatcctcaagtccccttctgacctgtccccagagagccctatgctctcctccccacccaagaagaaggacacctccctggaggagctgcaaaagcggctggaggcagccgaggagcggaggaagacgcaggaggcgcaggtgctgaagcagctggcggagcggcgcgagcacgagcgcgaggtgctgcacaaggcgctggaggagaataacaacttcagccgccaggcggaggagaagctcaactacaagatggagctcagcaaggagatccgcgaggcacacctggccgcactgcgcgagcggctgcgcgagaaggagctgcacgcggccgaggtgcgcaggaacaaggagcagcgagaagagatgtcgggctaagggcccgggacgggcggcgcccatcctgcgacggaacacgttcgggttttggttttgtttcgttcacctctgtctagatgcaacttttgttcctcctcccccaccccagcccccagcttcatgcttctcttccgcactcagccgccctgccctgtcctcgtggtgagtcgctgaccacggcttcccctgcaggagccgccgggcgtgagacgcggtccctcggtgcagacaccaggccgggcgcggctgggtcccccgggggccctgtgagagaggtggtggtgaccgtggtaaacccagggcggtggcgtgggatcacgggtccttacgctgggctgtctggtcagcacgtgcaggtcagggcaggtcctctgagccggcgcccctggccagcaggcgaggctacagtacctgctgtctttccagggggaaggggctccccatgagggaggggcgacgggggaggggggtgatggtgcctgggagcctgcgtgtgcagccggtgcttgttgaactggcaggcgggtgggtgggggctgcagctttccttaatgtggttgcacaggggtcctctgagaccacctggcgtgaggtggacaccctgggccttcctggaagcctgcagttgggggcctgccctgagtctgctggggagtgggcattctctgccagggacccatgagcaggctgcatggtctagaggttgtgggcagcatggacagtcccccactcagaagtgcaagagttccaaagagcctctggcccaggcccctccgtgggacagccccgccgcccctccccaccagggctttgcagatgtccttgaaagacccaccctagagccctttggagtgctggcccctcctgtgccctctgccctggtggaagcggcagccacaagtcctcctcagggagccccaagggggattttgtgggaccgctgcccacagatccaggtgttggaagggcagcgggtaaggttcccaagccagccccaacacccttcccacttggcacccagagggggctgtgggtggaggcctgactccaggcctctcctgcccacaccctctgggctgagttccttctttcccttggacgcccagtgctggccttggaggacggtcagctggaggatggcggtgggggaggctgtctttgtaccactgcagcatcccccacttctccacggaagccccatcccaaagctgctgcctggccccttgctgtaaagtgtgaagggggcggctgagttctcttaggacccagagccagggccctcaacttccatcctgcgggaggccttggccgggcactgccagtgtcttccagagccacacccagggaccacgggaggatcctgacccctgcagggctcaggggtcagcagggacccactgccccatctccctctccccaccaagacagccccagaaggagcagccagctgggatgggaacccaaggctgtccacatctggcttttgtgggactcagaaagggaagcagaactgagggctgggatattcctcatggtggcagcgctcatagcgaaagcctactgtaatatgcacccatctcatccacgtagtaaagtgaacttaaaaattcaatcaaatgaacaattaaataaacacctgtgtgtttaagacatgaaaaaaa

SEQ ID NO: 91067 - DNA, 750 bp, Homo sapiens
cctggggattataattaacaacttaatttaaaataatatagtttgaattaatggcaattttaatttcaaatagtacacaaaaactttactttggtacagatctgttccttctctactcctttgtggtattatcatcatgcaaattacaacttaatgcattataagcttaccaacagtttcataattgttgctttgtgtcttttaaataagatagaagaaaatagagacatacaaaaatatactacttttcatatttatatatgtagttagttctatctctgctttttttttctgtaggtggatttgagttactgtcatgtgtctatttaagcctgaaggactctcttagtataggttaagtgtttcttgtccacaatgcttgggaccagaagcgttttaaatttcaaatttttttgagatattggaaaatttgctttatgcttaccattggagcataccaaaaccagaatgctccactgagcattatccttgaatattatggcaacacttgaaaagttttagatgctggacactttaagagtcacatatttgaaataattgtgttattttggagcagagggagatgcttaccattggagcacccccaatcctgaaaggtcgagtgagcgatttccttgagtattagaggaggactcgatccgttttagactctgcaccatcccccatccaaatttacaaaactgtagcgagccggggtcggcgcgtggggcccgcctccaaccccccctt

SEQ ID NO: 91068 - DNA, 490 bp, Homo sapiens
  misc_feature (1)...(490): n = a,t,c or g
ggcgngnnntttgataccgaagacgtcggatnngctactgagaacattcgaaancncngncggcgggcagaagcactgtaggcagggaatgcatattcatattcagaatatgttggtgccagtgaggacaaattcctgtcccctccatgtatgtagaggtcttgctttgctttctttttttaaggtatggtattatccactgtcattaatattttggagcattttacttccacattaaaaaaagatcaaaataggtaataattatctgaccaagaaatgctttaaataaattgtagacttatgacagctatatcatctatctaataaccttggagtaactgtaaaatagtgacttttgaactgtagactttactcatgcagatatctcactaattttgttgaaatctaccagatagaaatccattgttatggcttgtatggttgaaaactttttaagctgtcatttgtttcaagatacagattgactcgg

SEQ ID NO: 91069 - DNA, 1923 bp, Homo sapiens
ctcgacttcgatcgccttaggaattcggcacgagcaggagcagcaggagcatggccgaggatctgggactgagctttggggaaacagccagtgtggaaatgctgccagagcacggcagctgcaggcccaaggccaggagcagcagcgcacgctgggctctcacctgctgcctggtgttgctccccttccttgcaggactcaccacatacctacttgtcagccagctccgggcccagggagaggcctgtgtgcagttccaggctctaaaaggacaggagtttgcaccttcacatcagcaagtttatgcacctcttagagcagacggagataagccaagggcacacctgacagttgtgagacaaactcccacacagcactttaaaaatcagttcccagctctgcactgggaacatgaactaggcctggccttcaccaagaaccgaatgaactataccaacaaattcctgctgatcccagagtcgggagactacttcatttactcccaggtcacattccgtgggatgacctctgagtgcagtgaaatcagacaagcaggccgaccaaacaagccagactccatcactgtggtcatcaccaaggtaacagacagctaccctgagccaacccagctcctcatggggaccaagtctgtgtgcgaagtaggtagcaactggttccagcccatctacctcggagccatgttctccttgcaagaaggggacaagctaatggtgaacgtcagtgacatctctttggtggattacacaaaagaagataaaaccttctttggagccttcttactataggaggagagcaaatatcattatatgaaagtcctctgccaccgagttcctaattttctttgttcaaatgtaattataaccaggggttttcttggggccgggagtagggggcattccacagggacaacggtttagctatgaaatttggggccaaaatttcacacttcatgtgccttactgatgagagtactaactggaaaaaggctgaagagagcaaatatattattaagatgggttggaggattggcgagtttctaaatattaagacactgatcactaaatgaatggatgatctactcgggtcaggattgaaagagaaatatttcaacacctcctgctatacaatggtcaccagtggtccagttattgttcaatttgatcataaatttgcttcaattcaggagctttgaaggaagtccaaggaaagctctagaaaacagtataaactttcagaggcaaaatccttcaccaatttttccacatactttcatgccttgcctaaaaaaaatgaaaagagagttggtatgtctcatgaatgttcacacagaaggagttggttttcatgtcatctacagcatatgagaaaagctacctttcttttgattatgtacacagatatctaaataaggaagtatgagtttcacatgtatatcaaaaatacaacagttgcttgtattcagtagagttttcttgcccacctattttgtgctgggttctaccttaacccagaagacactatgaaaaacaagacagactccactcaaaatttatatgaacaccactagatacttcctgatcaaacatcagtcaacatactctaaagaataactccaagtcttggccaggcgcagtggctcacacctgtaatcccaacactttgggaggccaaggtgggtggatcatctaaggccgggagttcaagaccagcctgaccaacgtggagaaaccccatctctactaaaaatacaaaattagccgggcgtggtagcgcatggctgtaatcctggctactcaggaggccgaggcagaagaattgcttgaactggggaggcagaggttgcggtgagcccagatcgcgccattgcactccagcctgggtaacaagagcaaaactctgtcc

SEQ ID NO: 91070 - DNA, 1261 bp, Homo sapiens
ttttttttttttattgacatttcgatctaagtggtcataaaccagataggtagttttattaaaagatttaccctaagaacactccttctattcccatttctgacatcctacccacacccacattcatcgactaccatgtcttcataatgtcgtagaatgacattgtcattattgtcctggtagagcatggaaatgggagacagcttggtggggatacacacagcctgggggatctctgggtcaacggcatgcatcagggcttgcatgaaagcataattggagctgttgagagagatggtcagtgagaagggacactctccatggcagtaatttgccatgaaccccttgggggcaatgatccacttgtgccaacccaggtcccggaagttaatgaatagctggtgacggtggcagaggttcttacaagaaagcttggggacagggatggctgctctccttttccgagaagggtggcactgatcagggttgagagtcaccaccagcagggaagcatgaagggagcatcttagtctggcacaggtgtcttcaggctgaaaattcacccctgagtctctatcttctttgaccagtatctccaggaataacccgaaatttttccgggggttgtcattccaatccttagctacatccagcaggttgaagtgaacagcaccttgtggccatgggactgaccgcaacacaaacattttacctggcttaggggtggtctggccccacacatgaggctcctgaaccaggaacagagccagttccagctctggtcccaggttatagtaagaattgggccccaagtccaggcccagctgggccaatgtcaactgttccctttctttgatggcagacaggttaaagtagaggagcttctgcaggcaggaggaagcttgggaaattttctttgggtaaagaaagaaaccttggtctgggagaaagcgaagtacattcccgcggacgcccagctcctttacgtagcataagtctcgggagaccccagtggtcgctgctgcctcgcgatcctggaaaattttcttcaagatataaggcacaggttggaacttctggggtgaaggcgccttatctaagcccagaaattggagaaagacatattcttgaaattggactgcctggcccaaagccagaattaacaggaagctgaaagccaaatctggcaagaaacgaagcatggcctctggagtggctgtcagaccggggagagctccctcgtgccgaataccgcaggcaa

SEQ ID NO: 91071 - DNA, 1375 bp, Homo sapiens
cggagtgcaagtgagcttctcggctgccccgcgggccggggtgcggagccgacatgcgcccgcttctcggcctccttctggtcttcgccggctgcaccttcgccttgtacttgctgtcgacgcgactgccccgcgggcggagactgggctccaccgaggaggctggaggcaggtcgctgtggttcccctccgacctggcagagctgcgggagctctctgaggtccttcgagagtaccggaaggagcaccaggcctacgtgttcctgctcttctgcggcgcctacctctacaaacagggctttgccatccccggctccagcttcctgaatgttttagctggtgccttgtttgggccatggctggggcttctgctgtgctgtgtgttgacctcggtgggtgccacatgctgctacctgctctccagtatttttggcaaacagttggtggtgtcctactttcctgataaagtggccctgctgcagagaaaggtggaggagaacagaaacagcttgttttttttcttattgtttttgagacttttccccatgacaccaaactggttcttgaacctctcggccccaattctgaacattcccatcgtgcagttcttcttctcagttcttatcggtttgatcccatataatttcatctgtgtgcagacagggtccatcctgtcaaccctaacctctctggatgctcttttctcctgggacactgtctttaagctgttggccattgccatggtggcattaattcctggaaccctcattaaaaaatttagtcagaaacatctgcaattgaatgaaacaagtactgctaatcatatacacagtagaaaagacacatgatctggattttctgtttgccacatccctggactcagttgcttatttgtgtaatggatgtggtcctctaaagcccctcattgtttttgattgccttctataggtgatgtggacactgtgcatcaatgtgcagtgtcttttcagaaaggacactctgctcttgaaggtgtattacatcaggttttcaaaccagccctggtgtagcagacactgcaacagatgcctcctagaaaatgctgtttgtggccgggcgcggtggctcacgcctgtaatcccagcactttgggaggccgaggccggtgattcacaaggtcaggagttcaagaccagcctggcccaagatggtgaaatcctgtctctaataaaaatacaaaaattagccaggcgtggtggcaggcacctgtaatcccagctactcgggaggctgaggcaggagaattgcttgaaccaaggtggcagaggttgcagtaagccaagatcacaccactgcactccagcctgggtgatagagtgagacactgtcttgacaa

SEQ ID NO: 91072 - DNA, 1333 bp, Homo sapiens
atagaatacaaaaatggcacaaagcaaggaagtaaggcaggaagggttttatgtaggttgtgactatatgatatgaatctcaaaagttatattttacagagtaaagaagtagggagctggaataattctaggcaggagggattcattttagcagtcagtgaattgtgatactatagttgggaagtacagtgatgtgctgaaatgtagggcatagtcagtggctagtatgagatgatgctgaaggagagatggacaggggtcactccttggccttctatgccaccccaaggatttgggccatggggaagaaaaagggatcacatcgacaccagcatcttagtaagcagcctttggctgctgtgtagaagattgcttggatcagtttaagcccatggaggcagagagctttcttattagattttgtcatgatcctctaaagtaccacggagctgaccgtccagtcatctttaagcgaagtgaatatccgtagaatttagtcatggagttgatattttgtgatgatagaggctaagaaagtctagaatgactcaactagtgccaccaaaataaggaatacaggaagtggactaggtaggtttcaaagggaagatgatgagatcagttttttatagctgagtataaactgcccctgtggattacaggtgggtgtgcacagtaagcagctgcataatttagtaggattcaacatcaagagtgaagatacagattttgactctgcagcactgaaaaccatttggattagattacctagacagaggagggatgtcactaaggacagagcttcaacatttaaaagtcaggctgggtgtggtggctcacgccattaatcccagcactttgggaggcccagacagaaggttcattgagaccagaagtcaagaaccggctaagtaacataacaagaccctttttttcaaaaaaaaaaaaaatattggtttaaaaaaaaccttttaaaaaggtagggcggggacccttgtggcccaccttaacggtctttttctttggggaaaaggccctcttgattggggggcaatccaccagggtttgggtggggaaaaattttcttgaagacaaatgtttaaacggaacatctgaaacagggtggaaggtggaaagcgcctatgggtgcccaggggggatataactttttggggagaccgtttgccacgacttttctttctctaaaagatcgatttgcaacttggtttaaaaaagaaaaaggaggcctttaaggctcccatccggctgcgtggttttctagcccatgtgcgggcgcgtagaggaggggaaaggatcctgcgggtccggagcg

SEQ ID NO: 91073 - DNA, 841 bp, Homo sapiens
catgcgtgagccaccgcgcccggcccactatcgcttaatttaaagagctgtaatgcatgtttgtaatgcagactcaaggaaaattataatttccttaaatgtgtatagaggatgtgtgagagtggaaagatgtctattccaaggtggataaaaaataaaatggtggactacctcaacatggaggtgccagctgtccaattacagctgtcactctgtttctgggaatttctcccgattcttagccggagctgcggcccgcaactccctcagcctggcaggtcccaggatgcttcggggcaaccccacgcatgcgcgctctggcgtagttccctgaagcactcgctcgcagagaatcctggaatcttcgcttgtggagctgaggaggcaacggagtttttccgcgctttttctttcagcctcagattaagtatcattcgttactattattttctctactgagcgtggaaagctggctgaaaattccagagtgtaatttctgtgggtctgtttctctaaaacttgcccctcacgcagcttgtacagaagttagattggcgcttactcccagctggtggaagattcggaattagctgcgcctctgctgcgtgagagagggctcagctttaaagcttcccagctcctctgctttcccgctgccccctactctgccggatgtaaaataggcctcttaaccttaactgcggctgccaggtgacatacctggagaaaatccctcagcggggccattgggataaacgggggcgaagtgtttttttctaacgaccctggagccccaaggcaacccttttttttttccactggcaaaggccacccccgtccc

SEQ ID NO: 91074 - DNA, 539 bp, Homo sapiens
  misc_feature (1)...(539): n = a,t,c or g
attgagacggtagaccatagtcagtgtggtggaattcctgtcaagccagggtgaaggatccgtggccaggcagaggtctgtggagtggagaggcgaggcctcacggtggaactctcagatgacagcatgcaggcaccaagagagtggacgcacatacagaagacagccatgcactgagctggggacatgcaacaataacaggtgagttccaacaaattggttcaaaaagaggggggataaacacgctggcccatgctgggcaagcatggcaccaccttccaggcactgtcttcttctgatcagcactctgggtgtctttgcacttaactgcttcaccaaaggtcagaagaacagcacgctcatcttcacaagggaaaacaccattcggaactgcagctgttctgcggacatccgggattgtgactacagtttggccaacctgatgtgcaactgtaaaaccgtcctgccccttgcagttaggagcgaaccagctacaatgggccttttgaccttntggttcacggacacatttgcgttgg

SEQ ID NO: 91075 - DNA, 1324 bp, Homo sapiens
ttttttttttttgttcttcaactttgatattttattgaaaaaagtacacaaaaaccactgaggtacacaagcccaggtaagcataccaagcaagccccctcacaccttttgtctgaaaaaagcttgacttctttgcagcaatgtctcgcccattccagcagcagtatctcagttaacttggttccttttcctccaggctcaaaacaaaatcaaactcttcctgggtcaggggctggattgataatctctggcgagtgaagagaaccatattttttaaggggccaccagtagctttgtgagcttgatgataggatttgagctcagccaggggaatgaaacgtttcatcatccgaacaaactgtacatccaccatggaccacttagggttgtcctctttgctagatgggtcataatggggattgtttttctcaaactgtgtgtggtctgggtaagcctctttcacgatcttcatgagtcctgcgatgcctggctctttgcagttgctatggtagaagaaggcttcttctcccagcttcatggctctaaggaagttccgagcctggtagttacgaacaccatcccagcatgttgtctgtttgggctgtgctttgagatcctcaatgctgaacttcacatctacacctttctctaggcggctctctggctctgacttcatcagccagtggctgcttagattcttcaaacagtttttagtggctgaagtcttctgagggttggagtcctccactttagctaatgcctcacctgagttctcagttttggtgcgttttcctgatagtcccttgtctgaaccagaagtcccagccagcctcttccggggtctcgacatggtcacgctgcaggggactttagtgcggacgattctggaatcaacggagatacaagaaagaatgctaatgtcctccaaaacccgcgcagagcgagatggaggcaacgagaggcagcctagaacgtctccaacttttgcgaaacacagacgcctacgtttgagccctcaaatccttccctccgttatctgcgccatttccatctcgcataacctgcccctaaactcttctcggttctgtccttggtccttctcatccaggaacccctatctcagtatgtagttcactgggaagtggctccacagagacacttttgttgggtgaatataagtaagccttgtgttaccttgttatccttgctaattaggatcaactgaatggataatctagatgatgaagtaatttgctggctacagacccaacactctgcagactcgactgcggtccgcctccgctgcgccgcaggctgtgcagcg

SEQ ID NO: 91076 - DNA, 492 bp, Homo sapiens
  misc_feature (1)...(492): n = a,t,c or g
gggaaagtncgnnncccnaggnnnnntnnnnaatcgagaccctanttctgagagcctaatccgtgcggnggaattcacttgtttttgcgctcttctagtctacactctgtattccttgagttcagatccaccctagagggtggatctccagaaataactatcggctccgctatgggccagcgggtgctcagtgactgtgtgatgggtaaagtaaccctgttacctgagagtctagagactagaagaaactcacaggatacttttctgatggaacaaaagtctgcatgcaatatactgaatttctggttcattacgtgtgtaagttttttgcttattcattaattattttggtttaactatagaaataggtaggataacctcactaaaagagtaatcattaagttaataattacattttttaaaancattctttctatctctctcttttaaaggaatcctttgctgaacacctacgctattcaaatggggtcn

SEQ ID NO: 91077 - DNA, 3056 bp, Homo sapiens
gccttcgttccagctaaattttaatttgtcggatttttgacaagaccgtctaaattatacattggagttttccacaatgaccaaacaccacatctcttcctttgattatcattttcaaaagggattataaaaaaagaaccttttgatggatcagactgaaccctgaaaccacatggagtgcagagctaaaaataaaaggaagtaagaactggtccccgagaagggaaaggaaagggaaatcaaagcaaactctgacgggaatggagagacgagtcctggtgagggtgacatggtgtcaccctccaggccaggccggataaggagcggccaacagtgagggtggggcgcagagtggcacaaaaatagccactactttagtccagaggggaataaagaaatttgtcaaaagcaaggagagagaagtggagacggagggagggaggaaggaagggggcaggaccatgtcctcccagcagccgtgggagctgcggactcctttaaccctggcacatttctaaccgccggcataatcgctgactttcagctgtgcaccgacatgttccccagctcagcccacatcaatgacacccttgtttccatagtaaccaagggagagtgaaggggaaagggtgtgttgcactgggtgcagggaatccagccaaaagcagccacacggggtaggtcgggaggaggggaggactcgagtttttcccacaactggcttgagcacatatcacgagcaccccccaggccttgcctgccctccggcccccagccctctcccccgcacattcagatgcaattgtgcgcagggcaaaagtctcgctaagactcactggggacaggaggaggggaaaaggggtcttccctttccagcttcaaattctgtcttctggtcagggggcaggagtgggcagggaagaggcaagagggctttaaaaagtattttgtttttaaatgggagctttcaaactctgcctttttcaggcttctctcatctaccccagagccccaggagggttcaaaagggctcaaagggaagatgaaagcgtgtgacatctgcagtgtctctgtgtctctgcagctgagagcaaatcagaacatttacagaggccgttatcagaggagtggcttctgcctgctaggagaggcccttgggatggctctttaaaaacagtccccctaagttggtggtaaaaagaacaaaaaatattttaacagaccctccaatgccaaagttccatactgcagtgttccaaaattgcagacctccaagcaggcattttgcccctcagataacttgtccctgctgaactattcggaagaaaaaacaatttgcaagtgctagagcccacatttgcagcctggtagaagggggatttctgattccttataattctgtgttgcctctgtaagggagagcttgggtgagccagagaagccagtggaggaggctgcagagagcagctagctctgaggttaaaaaaacccctcactttcttttgttttgcaagtccttacaggtctgtccacagcaactctggggcaccttttcacggctggctttgttaatgactttcatgtcagatcgcttttgaagctggctatgcctcagtctctgctgcactcttagccagaagcagctgggtattgagggccaggggctgcagcggccccttcagtctgctcacacgccctgatgggcttgggaagggccacctcccaggatgagaaggcagctggcccccagggacccaccagtcactggacagtctcttattcattctctgaaaacccctgagctcaggcaccagaacagagtttaattcaggagccgggcaatgctctggcctgtttccccatgtttgaagctgaggatttctgaggttcagggaaacaagctcgttttgcaacgaggggcaggagaaatgttctgctattcctctccaatcaatcaacagaggacggacattctgctgccagagaggcagaggagcccagcagctggggtgactcttgattccttggacacgacccctgcagtcacacacacacccatgtcctccccagcagcaaaccctctccatccaggagcatcccacaccaccaagttgccagcactgtaaaaattgatctaaaaatcgatctgcctggcttttctcagtggagcaggttcatggtaaagctgcatttatttctaaaatctgatagcagcggcctattgtgatcgtttaaacacagaattctttgagctttagaaatcctgtctataggatggccgtggagaagccagctaatctcagagtcggctgctcactgctccactgagctggagaaagcctgtttacgctagcctgagccctcgatgtgagagctttttaaggaccttgtaatttttctggaattaaacctcccacctctccttacattccagatgtcattacagtcaaaagtcataagaatttgcttctctgtgtggctggctggggcaaaaggcaggggtgggtgggatggggtatgtttctgtagtgacttgtctgcaagaaaagactttttttttttttctgtccaaagtagtgaggatttacatacgtagtctccgacctgcaagacgatgacgatggtttaattatctgccttttctccccccacccccacccacgcagcttcctgtcggacagactgaagcctggctgggctagtgacggtaaaaatcactgacagcaccagcaaacactgtctgtggtttcaaaaccatggagggaatgcaagggacgggtcagtaaataaatgaactcagcaaagctgcttcttcctctttttctttttcttttttttttttttgagaggaaaaaaaagcccactggaattgtctaaactgcaatgcaatctcttgctcatttaaaagatctcattttctaatcatgtgctttgagacatttaatactatttcaattatgcagaggaaataatataattcctttatttgaaaaatgatactgaacctcagagatcagttaaatctactgctggaatgggggattctttctaaaccg

SEQ ID NO: 91078 - DNA, 468 bp, Homo sapiens
  misc_feature (1)...(468): n = a,t,c or g
nnaagcggccgnctgnccccnaaggttcaganagacagntcnntnnntnanggaacctgncgaaagagaagaccttttaaaggatttgacacatgtttatttttagaagaccagattctcttttatctcagacgggatgaagttgtataggtagagatattaagtgctgaagtatgtatgacaaaaatatgccagtccttgtttttattcccttttagcctgttggattctgagaataggtttgtattgatagacttatattggcctacttggatgtttaggatagggtgttgctctggcggcatttgaaacaaggaagagaaagatgtaatggggtccttatccctaataaaatttgatatggtacttagaatcattcaattgtatgattcttctcaaaggtgagaaacattgtacaggtaattcagccctttattttagaaaggaggaaaacaaggtttagaggan

SEQ ID NO: 91079 - DNA, 1021 bp, Homo sapiens
ttggacggcattgttgatccctagtccgtgtggtggaattccagacacggcgcggctgagcagcagtgtgttcatggagaaagaatcaaagcgcacatcttgtactttgatgcccataggaagggctctcctctggcccctctggctttgtttggagcagaaaacaacaaagtgagttcagtagctgcagctgaggacagccaccctttcttcgtctctgctgagcgaaggctacacggcccttcctccttgcagctgtttcaccttctaccttgcgtggagccaggcttttgcaccgaatctgagatgccattttaaacagaagactccatcctcttgaagatgggaaattcttacgctggacagctgaagacgacacgctttgaagaggtcttgcacaattccatcgaggcatccctgcggtccaacaacctggtgcccaggcccatcttttcccagctgtacctggaagctgagcagcagcttgccgctctagaaggtggtagccgagtggacaatgaggaagaggaagaagagggagaaggagggctggaaacaaatggccccccaacccctttccagctgcaccctctgcctgaaggatgctgtaccacagacgggttttgccaggccgggaaggacctgcgccttgtctccatttccaacgagcccatggatgtccctgcgggctttctcctcgtgggggtcaagtcccccagcctgccggaccatctcctggtgtgcgccgttgacaagaggttcttgccagatgacaatggccacaatgctcttcttggtttctctgggaattgtgttggctgtggaaagaaaggcttctgttacttcacggaattctccaatcatataaatctgaaactgaccactcaacccaagaagcagaaacacttgaagtattacctggtccgtaatgcacaagggactctaaccaaaggacctttaatctgttggaaaggctcagagtttagaagccggcagatccccgccagtacttgttacagtt

SEQ ID NO: 91080 - DNA, 1965 bp, Homo sapiens
  misc_feature (1)...(1965): n = a,t,c or g
ggctggaagaattctcggctggcggggccgggggcggcagggggctagcgtccggctgagcccggcgggttcctgcacgcggacccacgctttgtcgggctgctctgctgagtgacaccgccgtggcatccgaggagctgtggtccagcctgcgcggcgggaagcggcggcggcggctccagcgtcctaagagaagctgaaacctatcaacactcttcaaaatgcaatggaatgtaccacggactgtatctcgactggcacgcaggacatgcttggaaccacataatgctggtctctttggacactgtcaaaatgtaaagggacctttacttttatacaatgctgaatccaaagtggttttggtacaaggccctcaaaaacaatggttgcatttatctgctgcccagtgtgttgcaaaggaaaggaggccattggatgctcatccaccccaaccaggagtccttcgccataagcaagggaagcaacatgtttcattcaggagggtttttttcatccagtgccacagctcagggaactccggaaaaaaaggaagagcctgatcctttgcaagacaaatctattagtctttatcaacgattcaagaagacatttagacagtatggaaaagttctgattccagtgcatctaataacttctggtgtttggtttggaacattttattatgcagccttgaaaggagtgaatgtcgttccttttctagaactcattgggttacctgacagtgtggtaagcatcctgaaaaactcccagagtggaaatgccctcacagcatatgccttgtttnnnnnnnnnnnnnnnnnnnnnnnnnnnnnnnnnnnnnnnnnnnnnnnnnnnnnnnnnnnnnnnnnnnnnnnnnnnnnnnnnnnnnnnnnnnnnnnnnnnnnnnnnnnnnnnntgctcggtataccgtgactttgggaggaacatctgtcactgtgaagtatctgcgcagtcatggctacatgtccacgccgccacccgtcaaggagtatctgcaggacaggatggaagagacaaaggagcttatcacagagaaaatggaagaaacaaaagatagactcactgaaaagttacaagaaaccaaagaaaaagtttcctttaagaaaaaagtggaataaggtgccttatatagcagtatagaaaattcctgcactttaaccctttggaaactatgggcaaagatacatgtgtctgattatttttttggttagttgccgaaatatactagttctctgagggttaaagaagtaaaatacctttttaaagttaaatatcactagaaaaatcagtgttattacaagggaagaaatgaacccagtttaagaatttgccatcagtagcagtattaagcagtggttaatgtcttagaagtccagacttctttttcaaggtcttcagaacccacacttgatttctgttttgttgcagctgtaattgacacacactaggcagctgactccttgaatatccagtgtgacccataaaatagtctgttaataccggatcttaatttttatgttattcattaagattttaactatattcagtacgtaatttggagacaaactagcatcatcaaaactgcctgtaaataaggtgtttagtctttctataaaaacagaatagagcagttacctaccagttaaaatatccttatatgaagaaaatagaataaagatccagtcatatatgtaaataagatgtactgattgtacgtaaatgaaaaatggaccctttaaaaattatttttacctgaagcttgtcataatttttttaaagcaaatatatatatggtgatggtacttttcaaagtgtgtattagtggtgatcacctcaaacataaacctctgttgtgaatcatttgtgtccttttcaactgtctttcagaggaaaggtaaaaaatcattaaacctgaaattcattgttaaaataaaaaaaaaaaaa

SEQ ID NO: 91081 - DNA, 840 bp, Homo sapiens
gatcaagcctctggagatgctccaggaccaaggaaagaggagcgtgccctctgagaagttaaccacagccatgaaccgcttcaaggctgccctggaggaggctaatggggagatagaaaaggtcagcaatagatccaatatctgcaggtttctaacagcaagccaggacaaaatactcttcaaggacgtgaacaggaagctgagtgatgtctggaaggagctctcgctgttacttcaggttgagcaacgcatgcctgtttcacccataagccaaggagcgtcctgggcacaggaagatcagcaggatgcagacgaagacaggcgagctttccagatgctaagaagagataatgaaaaaatagaagcttcactgagacgattataaatcaacttgaaagaaatcatggaaactttgaggcagcgtaagttatcatgtgccctgctgtttctgatggcccccaaactagaagtcatcagtttactgggaccccagcctcccgctacccctgcatttgtccattttctgtgctggatggctggaagcagcccacaggtttggggatccattcatggctagcccaggcttctgtccatggaataacatgtggagagagcttcttgaccagtaagataccttctagcagctgtcaaagtacttaaaaacctctatgaatagaatcaaagcttcagttcagttgctgaatttccaagaagaaattcaaatcaaatttaaaatgcccactcattcattcattcaacaaaactgtgagtatctggtttatgccagaggccatgcaaagaggtaactaagatgcagagaaggacactgccttccaggag

SEQ ID NO: 91082 - DNA, 914 bp, Homo sapiens
atttccttcttttgagggattgtagtcttggtaaaatgaagcagtaaacttggtcaagtctaaatgacgagtgagacagaagataacatttgtcagggaattctgttttgttttcttaagtctgcacctaacaggaacttagcaatttccagccagctagtagtaataacaacagaaatagcaattgacctttaacacctcgtccaacaatgtttagtgggtgggtactctgtgttaagcattattctagaatatagggacacaaatgttggacacagcttgcacaggtttattatgcaggtgatgggaaggtttctgatatgacacgtgctctggaccaagggccttgcattttaataagtggagtgaataaaaatttatagccaaatgtcatgttggcagcaatggaagtgtgctccggaggtgacaaatgctttgaggaatatagagtgtctgacagcacaatgtgaagaaatgacagctgccatctttgcctgtctttttctctgtgctgcatttgctttgctcttgtcacctttcttaggctggttactgggcagttggaagagactgtggagaattcaattcagttgtttggcttagggacataaaattgaactgcataattcatggataggtatctgcagcatcgtcttcgtgccctgtagaatgggttgactgccaaaggattttacgattctaaaatcctaacagattttaacagttgcttaaatattatttcttggcatatatagctttttaagtctgtgggtcaaagatagatgtactcatttgagacttagtgatttgttttataagtatgttgaaataacttgagccagttcgaaattgggcccttcttttttaaagaaaagacttccccaaacttaaaacctgggttttaagaggtcttc

SEQ ID NO: 91083 - DNA, 713 bp, Homo sapiens
gcccaaaacgtatattcgtcaacaaatacttatttaaataaatttaaatagttattaaatgaatatgtatccaagctgtgccattgtttgcattgcctattaaatgaggaggctataaaatgatatttaagttgcttccagctctgaaatacaataaaatctgacatgacaggataccatacaacaggatgcagtattctttcactctatttgaacatgtgtagtcttttttacttggctgggctgctgggattttgctatagtctctttacacaatacatgccaatataagaaagagaagcaaatctttcttagatgacaaaatctaactcatgctgccagattctgattagtgataagggaagcaagactggccatatcagcaactatatgttggaccttatcactttgtttttatttttgttttcaatcaaactccagttttattagaataatcctcactgcagtaggcatgcttgcctatagattgcagaggttttttaatgcaggtggggattccacaccttgaagtgagaatttgcctcttgggaagtaacgagctctcctggagaatgaattgtcacctcacattttccatctgtcctcaaagaagtgggtttatttttagcgaacatgataaacccccagagggcataagtgaaagaattccccttaaccagtaggggttcacttttggttcaatttcaaggtga

SEQ ID NO: 91084 - DNA, 656 bp, Homo sapiens
gattattaacatatgtttttggagggggattttgcgagttgcatttatatgtgggtatcctagatgtcctggggatacacaccaggtaaaagagaagaaagtaagatggtataccttctgcaactttgtcaattctttgtgcttttgctcagtgtaccagggagatggaaaaaattctaatcaaatgtctcataaaaacatttatatgcccataccagaaaatggcaatcaagcatgctagatttcactcctttttattcctcatgctatttattttccacatgtgatcttttccattactttgaagggtttgtctaaaaactaattatttccttcttggcactggggctgcaattcaggtagcggccacctgttaaataattaggcctttttattgactccatagctatagtctaagctttttccaggagtggtcactaaaagaaaataagaatggaccacattatctaccacttaaactttcctagtaaaaatatactgtgcataacaggagagggacaacctggcttattagatactaaacagtattaccttgctacaacaattaagcagtgaggtactggcacaaaaatttacaaagaaatcaaggtaaaataataaaactcactcaaaatatacataagggccttactttg

SEQ ID NO: 91085 - DNA, 641 bp, Homo sapiens
cggcacgagtgggcacagttgctggtggaggtcctggctctggtgggagtgcctccaattcccttgctttacgcagcttctcacgctttcgctggatggcagcaacccgttcacgtactgcacgggccactggctggtaatcggcttcacagaccaagcccagagccacctggaattggggtgggggatgaggaacacagcttgggaccccctatcaaagatccatcaggacgccttccacgtgcacccactgcctcttcccttctcgcttgggaactctagtctcgcctcgggttgcaatggaccccaactgctcctgtgccgctgcaggtgtctcctgcacctgcgccagctcctgcaagtgcaaagagtgcaaatgcacctcctgcaagaagagctgctgctcctgctgccctgtgggctgtgccaagtgtgcccagggctgcatctgcaaaggggcatcggagaagtgcagctgctgcgcctgatgtcgggacagccctgctcccaagtacaaatagagtgacccgtaaaatccaggattttttgttttttgctacaatcttgacccctttgctacattcctttttttctgtgaaatatgtgaataataattaaacacttagacttgaaaaaaaaaa

SEQ ID NO: 91086 - DNA, 1527 bp, Homo sapiens
gaattcccgtgtcgacgatttcgtgagcgcggcagcccgcgcagccggtgactgggggactgggtttggagtaggacctgcggcgtgctcgagactccgacttcggtcttgcggcgcgctcgcgcccgcgggccatgccccactgactctaagtgggcactgccccggctccgggagggcgagaccgagcgccggccatgggaagcttccagctggaagactttgcggcgggctggatcggaggtgcagccagtgtcatcgtcggccaccctctggacacagtcaagactcgcctgcaggctggcgttggctacggaaacaccctcagctgcatccgcgtggtgtacaggagggagagtatgttcggcttcttcaagggcatgtccttccccctcgccagcattgccgtctacaactccgtggtgtttggggtcttcagtaacacgcagcggttcctcagccagcaccgctgcggggagccagaggccagtcctccccgcacgctgtcagacctgctcctggccagcatggtggccggcgtggtctctgtcgggctgggagggcccgtggacctcatcaagatccggttgcagatgcagacacaaccgtttcgggacgccaacctcggtttgaagtccagggcagtggctcctgcagagcagccagcataccaggggccagtgcactgcattacaaccattgtgaggaatgagggcctggcggggctataccggggggccagtgccatgctgctgagggatgtcccaggctattgcctctacttcatcccctacgtgttcctgagtgagtggatcacacctgaggcctgcacaggccccagcccctgtgctgtgtggctggcgggcggcatggcaggagcaatttcttgggggacagcgactcctatggatgtcgtgaaaagtcgactccaagctgatggggtttatttaaacaaatataaaggtgtcctggactgtatctcccagagttaccagaaggaaggtcttaaagtgtttttcagaggcatcactgtgaacgcggtgcggggcttccccatgagtgcggccatgttccttgggtacgagctgtcgctgcaggctatccgcggggaccacgcagtgacgagcccataagcgccagggtctcatcccattaacaggtcaatgctaaaagtgtctgcagaacccatgatgtgaatttactgaagagaaagactctccaccaggtgggctttcagccaggcaggctgtcctcagaacctcttccttccttcacaattacaagcattctcatccccaccccggctggggcagcggagcttctgccttggagggattcaactgaccattggtcaactgatcaccaactattccagctttggacctgcacctggtaacaaacaaacgaacagaacaaaacaaaactggagtaaaatagaccctccccccatggccattgtaaactcactgtgaattcatgggaagagctggagttggctctaagtttcaaaataaaagcattaaaaac

SEQ ID NO: 91087 - DNA, 550 bp, Homo sapiens
gaaggtgccgttcctcacaaccgtctacagatgaatggtccagtggcaagcagcagagcctgagctcagacccatccgtgtttgctatggtggcataaggacacatcacatggcacctgaggcgggatgtccagaacattccgtgcccgtggttaagaaacgggagaaggataaagtggtctcacgaaaccagagtgctcaagagatgctttagatgtttacaaaacagcccaaatatccttctagaaactggctccagcctggcgtagaggagtgctggaaattctacaaatgtcaccacgcagccggccaccaggtttgcacgttcttctccaggtaccagctcctaatttcagacacggaattttattcagggacactgacttcctgcccctggcacaggcatccttccttccaggtctggggagggcacttgtggatgctgctcctcgggaagagatcccagcacacatccacctccaggggacggacggccacccacacatgaggaccgaattccaccgcactgccagtgactcaaacccacttc

SEQ ID NO: 91088 - DNA, 819 bp, Homo sapiens
  misc_feature (1)...(819): n = a,t,c or g
cccacgcgtccggaccgggtggtttgcttaggcgcagacggggaagcggagccaacatgccagtggcccggagctgggtttgtcgcaaaacttatgtgaccccgcggagacccttcgagaaatctcgtctcgaccaagagctgaagctgatcggcgagtatgggctccggaacaaacgtgaggtctggagggtcaaatttaccctggccaagatccgcaaggccgcccgggaactgctgacgcttgatgagaaggacccacggcgtctgttcgaaggcaacgccctgctgcggcggctggtccgcattggggtgctggatgagggcaagatgaagctggattacatcctgggcctgaagatagaggatttcttagagagacgcctgcagacccaggtcttcaagctgggcttggccaagtccatccaccacgctcatgtgctgattcagcagtgtcatatccgtgtccgtgagcaggtggtaaatatcctgttcttcactgtccgcctggattcccagaagcacattgacttctccctctgcttccctattggggtggccaaccccagccacgtgaagaggaagaatgccagcaagggccagggtggggctggagccagagatgacgaggaggaggaataagcctgcttgtcccctcctgggctggtggattgtctagttttcctgtacgaggcctttcccggagcagcccggctacgaagcgacacccatggcggagaagctaaggaagactcccgctcccgaattcccgcncntggacagtggtcatcgagnaggggtttcaattggggcactgctc

SEQ ID NO: 91089 - DNA, 1856 bp, Homo sapiens
  misc_feature (1)...(1856): n = a,t,c or g
ccgcgctttttgcccgtgaagcgccggtgacgcttgagattggttttggcatgggggcgtcgctggtggcaatggctaaagatcgccctgagcaggacttcctcggcattgaagtgcattcaccgggcgttggtgcgtgcctggcttctgcgcatgaagaaggtttaagcaacctgcgcgtgatgtgtcacgatgcggttgaagtgctgcataaaatgattcctgacaattcattgcgcatggtgcagctctttttccctgacccgtggcacaaagcgcgccataataaacgccgtatcgttcaggtgccgtttgccgaactggtaaaaagcaaactgcagctggggggcgtattccatatggcgaccgactgggaaccttatgcggaacatatgcttgaagtgatgtcttctattgacggttataaaaacctgtcagagagcaatgattacgtaccgcgtccggcatcacgtccggtgacgaaatttgaacaacgtggtcatcgtcttggtcacggagtatgggacttaatgttcgagagggtgaaataatggcaaagaaccgtagccgtcgtctgcgtaaaaaaatgcacatcgacgaattccaggaattaggattttcggtggcatggcgattcccggaaggtacatcggaagaacagattgataaacccgttgatgattttattaacgaggttatcgacccgaacaaactggcctttgacggcagcggttatctggcctgggaaggtctgatctgcatgcaggaaatcggcaaatgcaccgaagaacatcaggcgattgtgcgtaagtggctggaagagcgcaaactggatgaggtacgcaccagcgaacttttcgacgtttggtgggactaagaaagcatacgggcgatgacaaatgcaaaactgcctgatgcgctacgcttatcaggcctggaaagatgcacgatcgagtaggcgggataaggtgtttacgccgcatccggcatggaaaacgcgtactttgttatcaatctggggccagcaaatgctggcctgattttttcttgagggaagactatgatgcgcaaaatgctgctggcggcagcactttcagtgacggcaatgaccgctcacgccgactaccagtgcagcgtcacgccgcgtgacgatgtgattgtcagcccgcaaaccgtgcaggtgaagggcgaaaacggcaatctggtgatcacgccagacggcaacgtgatgtataacggtaagcaatattccctgaatgccgcccagcgcgagcaggcgaaggattatcaggctgaactacgcagcacgctgccgtggattgatgaaggcgcgaaaagccgcgtcgagaaagcccgtattgctctggataaaattatcgttcaggagatgggcgaaagcagcaaaatgcgcagccgtctgaccaaacttgatgcgcaggtgaaagagcagatgaaccgcattattgaaacgcgcagcgatggcctgacgtttcactataaagccattgatcaggttcgcgccgaaggccagcaattagtgaatcaggcaatgggtggaattttacaggacagcattaatgaaatgggcgcgaaagcggtgctgaaaagcggcggtaacccattacagaatgtgctgggaagcctgggggggctgcaatcctcaatccaaaccgagtggaaaaagcaggaaaaagatttccagcagtttggcaaagatgtttgtagccgcgttgtgactctggaagatagccgcaaagccctggtcgggaatttaaaataatcctctattttaagacggcataatacttttttatgccgnttaattcttcgttttgttacctgcctctaactttgta

SEQ ID NO: 91090 - DNA, 2624 bp, Homo sapiens
tggccacatgatgtcgctgtacaccacaaagtcttgtcaatagaagggagctactgatcactaaaagtgaaggaggaagctccattttgtcaccgcctgagagaagacagaaacggtaaagagataaatgattggaaatattagataaaatggcatgattttgaagtaagaggagagcataagaaaggtgtagtccttttgcaatggtgttttctaggagagggggcctgggagcccgggatctgcttctttggcttctgctcctcgcagcctgggaggtggggagcggccagctccactactcgatcccggaggaagccaaacacggcaccttcgttggccgcgttgctcaggacctgggactggagctggcggagctggtgcctcgcctgttccgggtggcgtccaaaacacacagggaccttctggaggtaaatctgcagaatggcattttgtttgtgaattctcggatcgatcgcgaggagctgtgccagtggagcgcggagtgcagcatccacctggagttgatcgccgacaggccgctgcaggttttccatgtggaggtgaaggtgaaagacattaacgataatccacccgtcttcaggggcagagaacaaataatatttattcctgaatctagactcctgaattcgcgttttccgatagaaggagctgctgatgcagacattggtgctaacgctcttctaacgtacacgctcagcccgagtgattatttctctttggatgtagaggcaagtgatgaactgagtaaatctctttggcttgaattgagaaaatatttggatagagaagaaacaccagaacttcacttattactgactgccactgatgggggcaaaccggagctgcaaggtacagttgagctgctgatcaccgtcctcgacgttaatgataacgccccactgtttgaccaggccgtatacagagtccacttgttagagactacagcaaatggaacattagtgaccacattaaatgcctctgatgctgacgaaggtgtaaatggtgaagtcgtcttttcctttgacagtggtatttctcgtgacattcaagaaaaattcaaagttgattccagctcaggagaaattaggttaattgataaactggattatgaagaaacaaaatcctacgaaattcaagtaaaggcagttgataaaggaagtcctccgatgtcaaatcactgtaaggttttggtgaaagtgctggatgtaaatgataatgctccagaactggcggtcacttcattgtatttgcctatcagagaggacgctccactcagcaccgtcatcgccctcatcaccgtgtctgaccgtgactcaggtgccaacgggcaggtgacttgctccttaatgccccacgtccccttcaagctggtgtccaccttcaagaattactactcgttggtgttggacagcgccctggatcgcgagagcctgtcggtctatgagctggtggtgaccgcgcgggacgggggctcgccttcgctgtgggccacggccagggtgtccgtggaggtggccgacgtgaatgacaacgcgcctgcgttcgcgcagcccgagtacacagtattcgtgaaggagaacaacccgccgggctgccacatcttcacggtgtctgcgcgagacgcggacgcgcaggagaacgcgctggtgtcctactcgctggtggagcggcgggtgggcgagcgcgcgttgtcgagctacatttcggtgcacgcggagagcggcaaggtgtacgcgctgcagccgctggaccacgaggagctagagctgctgcagtttcaggtgagcgcgcgcgacgcgggcgtgccgcctctgggcagcaacgtgacgctgcaggtgttcgtgctggacgagaacgacaacgcgccggcgctgctggcgcctcgggtgggtggtactattggtgcagtcagtgagctggtgccgcgattggtgggtgcgggtcatgtggtggcgaaggtgcgcgcagtggacgccgactcgggctacaacgcgtggctgtcctatgaactgcagccggcagcaggcggcgcgcgcatcccgttccgcgtggggctgtacacgggcgagatcagcacgactcgtgtcctggacgaggctgacttgtcgcgctaccgccttctggtgctagtgaaggatcacggtgagccggcgctgacagccacggccactgtgcttgtatctctggtggagagcggccaggcgccaaaggcgtcttcgcgggcgtcggtgggtgtcgcgggcccagaggcggcgctggtggatgtcaacgtgtacctgatcatcgccatctgcgcggtgtccagcctgctggtgctcacactgctgctgtacacggcgctgcggtgctcagtgccgcccactgagggtgcgtatgtgccgggcaagcccactctggtgtgctccagcgcgttggggagctggtcgaactcacagcagaggcggcagagggtgtgctctagcgagggcccacccaagaccgacctcatggccttcagcccaggcctatctccaagtcttaacacgtcagaaagaaatgaacaaccagaagcaaatttggatctttctggtaatgtaagtccaactttcgagttttggctt

SEQ ID NO: 91091 - DNA, 445 bp, Homo sapiens
acactctggtggatttcccagtttgcccttgggcaaactacttcccttctctgagcttcaggtttcccgtctgttaaaggactgcctgaggtgacctgtagggtcactttctggccctaataatctggaacattgactctctagtgagtctcttgagtgtgggtgggattgaaaattgtgattctaaccccaaagattaccctacctttccccttccttagagcacccaccactagtgaagtcatcctgttccctgagtgagggatgtttagatgatttccttaataggaccagagatgtcaagtaattttcttgaggtcatactgctgaagtgcaatcttcattggggcaggcattacttctactgtctatatatcctctgcatataccactggctctgctggtagatgtgcggcgaatgaatgaatgaatggacatatgaatg

SEQ ID NO: 91092 - DNA, 2521 bp, Homo sapiens
ggcacgagccgtcccggcggtaatgcgctcccggccgtgacccccgctgggggcgggggccgggatccatgcgcggagcccccacccggcccggcgcctgcggctgacggcggcgggggttggggggcgcgcgtctggcctcctgcccaccccctggcgtcgacatcacgggccgtcgggggctgcgccctaccccgcggccaggctctggcagggaccctggaggtgccgccggcctcagcccatggcccaaaggtacgatgagctgccgcactacccaggcatcgcggatggccccgcagccctggctggcttcccagaggcagtgcccgcggcaccagggccctatggccctcaccggcctccccagcccctacccccaggcttggacagcgacggcctgaagagggacaaggatgagatctatggacacccgctcttccccctcttggccctgggctttgagaaatgtgaactggctacatgctctccccgtgatggggccggagctgggctggggacaccccgcggcggcgacgtctgctcctctgattccttcaacgaggacaacactgccttcgccaagcaggtttgctctgagaggcccttctcctccaacccagaactggacaatctgatgatccaggcaatccaagtgctgcggttccacctgctagagctggagaagggaaagatgcccatcgacctggtcatcgaggatcgggatggcggctgcagggaggacttcgaggactacccagccccctgccccagcctcccagaccagaataatatatggattcgagaccatgaggatagcgggtctgtacatttggggaccccaggtccatccagcggggggctggcctcccagagtggggacaactccagtgaccaaggagtcgggctggacaccagcgtggcctctcccagttctggtggagaagatgaggacttggaccaggagccacggcgaaacaagaagagggggatcttccccaaggtggccaccaacatcatgcgagcctggttgttccagcacctctcacacccgtacccctcggaggagcagaagaaacagctggcgcaggacacggggcttaccatcctgcaagtcaacaactggttcattaatgcccggagacgcatcgtgcaacctatgatcgatcaatccaaccgcacagggcagggtgcagccttcagcccagagggccagcccatcgggggctataccgagacagagccacacgtggccttccgggctccagcatcagtggggatgagtttgaactcggaaggagaatggcattatctatagaggctgatgcgggagagacccagcctccggctgtgacccccagcctcacacctggctctggttcccgcctggtcctctggcttcaggatcccacctccaaaggcctctccgctcaacgcctacctccctaaggccctgctgggacatgggggcctgagtgcccacccaaggggctctcaaggacaccggcaaggcctccaggctctgagccccgcttctgccttcacctctgcctgggacccgagctgggctcctgggccttggtccccagaagatggcagctagggcctcgccgcgaggacagagaagggacagggtggctgggcagtcagggaaggagggtcgcccggatccgacattttggagagattctttcaccctcctgtcccccccacctcccttctctaatttcttctttttttaatgataaagtcttaaaacacagaaaaaaaaaagacttcagagaattaggtagatgaagcactttatacagtatatatcttcagcttaaatttgttttgagtattttttttatttttaagtaggcaaagatttaaaattttttatttttagtttgcttcaaacatttactaaaaagacgtgggcaatatttaccaaaacaaaacagaacccaaaaaattgtacatcttgatcttagcaaatatccttattgtagagacacttaataaagagatggtattttaatatctgcagttctgaggtagggtgtaacttagttctacattgtgatttaggaatttttaaacctttcttcttcaggggagaagtgacccaggcctcgagtttagtgctaaagccactagtgtacttatgctgtcacctaaccaccacatgcgacatggaggcagaggctaaatataggggctttcttaagaaagtgagaggaaattagcaagcattattagtgtttgactactgctatcaagtgaattcaaaggaaacaggtttttatgccatatttaagttacagaaaccaggcatgcttagaatagtttctagaggttattggagaatagaaagctaagaaaacttggtatacgatttacaatggaaatataattacactttttactctcagaatattgttcacattagacttcctgtttatcttttatattcttgcatttatataatgcctcatcctttcaaagttctttcacatattatatgatcttctttatg

SEQ ID NO: 91093 - DNA, 968 bp, Homo sapiens
ctgttgcacacacacagtggcacacatgccaaagactctctcagctgacccacagatccattctcaagtatttactgatagacactcatgcgtgccaagtcctcatcctcaaacatacacatgcctctctttctctcccgtcttgccaggagtgtttcccctcctccatcccctctgcctcccatatggtgtcccaccctcaccccccacccagcccaaggtggggacagacacctgaggggctgccagctgcttccccgtgtgggcccgggccgcgctcatgcttctcgtccatcctgcccacaggggactcgtgggggatgttagcgtgcctgtgcacggtgctctggcacctccctgcagtgccagctctcaatcgcacaggggacccagggcctggcccctccatccagaaaacctatgacctcacccgctacctggagcaccaactccgcagcttggctgggacctatctgaactacctgggcccccctttcaacgagccagacttcaaccctccccgcctgggggcagagactctgcccagggccactgttgacttggaggtgtggcgaagcctcaatgacaaactgcggctgacccagaactacgaggcctacagccaccttctgtgttacttgcgtggcctcaaccgtcaggctgccactgctgagctgcgccgcagcctggcccacttctgcaccagcctccagggcctgctgggcagcattgcgggcgtcatggcagctctgggctacccactgccccagccgctgcctgggactgaacccacttggactcctggccctgcccacagtgacttcctccagaagatggacgacttctggctgctgaaggagctgcagacctggctgtggcgctcggccaaggacttcaaccggctcaagaagaagatgcagcctccagcagctgcagtcaccctgcacctgggggctcatggcttctga

SEQ ID NO: 91094 - DNA, 1948 bp, Homo sapiens
ttttttttttttgccacatttcacatttgagaacccagaattcagctcctgttatacaaaatttgtaaaaatttattgccttggcgtaaagtgacaatcatgccttggcgtaaagtgaaaatcttcacagaagggtatgctttgtgtcaccaaatgggggtgcagctgtgtgatatctgtgcagtttgtgataaaattaaaaattttctgtgaaagattcttaactggaaattggaagggaaaacaagaagaaacaatgtaatgtagcagtggaaacaaaattctcacaatgaatagcagtctttccagcttctttgacacggatttcctcatcatcaatgggcggctctcctggaactaggggatgagtgtgaatctccatttgagggaaggggaagaagagcttggaggggtgacagcctccccctgaggagagccagttgtgttcatgattttggttccttcttcctcctaattaagcatctgcccaggagcccaggagccagggcttagcttcctggctattttcaactcttgttagtgaagaccagcattgccagcccactgaccccagtagggtcacccctgcccactgagaaccagccaccccctcaccccccaccagagttccctgcaggaaccagctgcctctagtgggagacagagtaaaggcagaggggcccctcctttctcaggtgccctgtgctagtgttgggcagctctaaggttggaaactgctttccccactgagctgaaggctgcctcctgggatatgcacccggcggtccccattcagccccgggagccactcgggtcaagtctggctgtatcccgagggcgaccaggacagccctgtgagcggcagttcccctcctggaacactgcttcaccagcccatcaccccagccctgtggactgctcctccctcacctggtttctacgtggacccaccattcttgccctcctggacccctaaactggcccatgtgtttagttgcagaatgggggccaggaccggacatgtggtttgattgctaaggacctagcagaggctcatcatgtggtagactctgtattttatcgtgtgtgtatgtgtgtgtatatttacacacacatacacacaagatagatatatatattaagtggacactgtatgtgtatatatacacatacatatattatagatgtatgcatatatgtatatatgtacacatatatgtatatgtgcatatagaggtatacatatagatgtatatctatacatgtgtatatatatacatatatggatacatacatatttatgtgtacacatatatgtatatgtgtatatatgtacacatatatgtatgtgtatacatacatatgtatatgtgtacacatatatgtatgtgtatacatacatatgtttatgcgtatacatatgtttatgtgtacacatatatctatgtgtatacatacatatgtatatgtgtacacatatatgtatgtgtatacatacatacgtacacatgtgcatatgtgtatacatacatatgtacacatgtgtatatgtgtatacatacacatgtgtatatatgtattaagtggacattgtacttctgatgtggatacggtgatgaagctacaaagtcacactatccctatggccttgtgtttagatggagcaaagcaactaaaaattgcctcaacaatcctgcaactcccagatcttcaatttacactgaacaccgtacgcaattgttctgggcccatctttccaatctattgaaataatagggactgcatcccctgcttccatcccctgttcattccttccatggtctacccactgggagggagcgctcaagggggaaactagaagttttaaaaagacaggaaagtctagagaaagaactagtcaaaaagcgaaaaatcctcatctgcccaattattgtttttttttcctacc

SEQ ID NO: 91095 - DNA, 405 bp, Homo sapiens
ggaattcgctcttggtcaatagcagggtgtggtgctcctgccaggggacgcattctccgtgtgacctctacaccccaggtcaggtcaggatgtgatttgcttctccagggccgtgactcactagatccacctcccactggtgcctggtggcccccgacagccctggccctgtccaggccctggcctgtcctacagtcacaggtgctggcctgtccctgctgtcctcctgaccacctggtgctcccggccaccctgcccgcccccctgtctcctcgggacagcctggctgcctccacttgctggcccctgccggcccaccctctttccaagcctgccctgcccctcagctcctggggtggggaggggagacctcgccttctgcctgcagcgactcccacctgtcac

SEQ ID NO: 91096 - DNA, 766 bp, Homo sapiens
ttttttttttttccaggagaatgactcagtttattattctcaatttgaccctatgtatcccactgtaggctcaaacactgcacagagctgccacgtctaacctcgtaacaactgcgtccctggaaggtgaagggggtaaaccacaaagtcagaaactttgggaaaagccacggtcgcatgcacacctctcaaacaaggaaacaaactacaagaaagggctcagtcattgtacacagcaagtgtgcagtgggcaaagttctgttcttttgacattggccaaatgcgtaagtccctggtttcttgggctcaatcacggtccaaggttagtaagaaggccaacaatgttgtgagcaggattcaatttctacagggtcatggggcatcatccaccatgtgaaggggctccagcaggttggacatgatcaatacccatccagattaggaccctgacgcccttgccagagctcgggctcgggcagctttggcctcgtcttctagctcatctaggaaacgctcctgggaaatcgagtagaaggtgtaaccataaatagccaacaccagggccccgatgcctaggccggtcacgatgttccgggttcgccgccgtggtaggaccttctgccactgggcaagctccgcctgccgcatggaatgcagttgctcgggtgtcagcttctcccgagtcgggtcgatacgctgagcgaacggggcctctccacgcttagaatccagagggtcaccagctcccgaagacgccatgttgcca

SEQ ID NO: 91097 - DNA, 1277 bp, Homo sapiens
ttttttttttttggcatgagagatgcaacaggctttattgttgcagcaacactaacatatacgccccattccctgctgaggcctgtccccacctcaccccttggttgtcgatggtgtggaacattggggtgaggggcaaaatgcctaagcagagctggagggaggcaaatgggactggtgagggtcgggatcacctggaccaggggtccaacagtcaggatacccgactccatccacacaggggcatggaacacttgggttctgagttcaagatttggcaatgtcttgacctgggttggaaggtagggtggggtctggaaaagctttggtccagggttcaagatttgagagtgccttgctccaggccccagtttggggatgagcatggagaagggtggatgggagtgtctctgggttcacaatttgaaattggccatggatgctctggcctgaagccccagttttggggctggatgtaggtggctcttggtcctaggttcaaggctggggaagactcttgtccctaggtaatgggggctgggtgtgagggatatcttagtttggggctggcgtgggggtagggcggtcccaaatgtcctgttttgtttgggcagggggctctaggctcctgttttaagtgctgggaaagggctctgggtcccaattatgggctgggggtggggtggtattctccaggtcctgggtacagatcccaggggcctaggatccagcctcctgctcttgtcccagtgcctctagtagcaggcccattggcgtccgcttgagaccaatgctctcgatcttgttctcaatcttgttcttaaggttgcgcaggcgcaacgaggcgtgcaccaggatcagaagcaccggcccggcgatgctgaacaggaaggtgcaagcgccgcccgcgacccagagcaccaggaggccgacggcaagcactgcggccaggcaggctgcagggtggctgcggcggcagcggcgcacagctgcgcgggtctcagctgcccacaccagcacgccgagggccaccgccactaccagcgcgctcaggagcgtatgaagtgaccgcacgtacccggcgagagcgaggccgatgccgaagcagagaaggtagttggtttggtagtagaggaggttgttgatgactcggtggcaccatcgctgcgggtcgcatggatccggagccgccagacgcgccgaccccagaacaaagtcgtccagggcgcgtagcggtggcaaccgcacctccgacatcctgccggttaatgtggcta

SEQ ID NO: 91098 - DNA, 1196 bp, Homo sapiens
tgcggtggaattcgtgggaccttgcttggcgagggggaaaatctctgggtttctggagtgggagggttcgtgcagcagctgttgactggtacatgaagcattcttttatgtttgttgaagctgatgattgacatctcccgtgggtgtgccagttcttgtggagttaagacaggatttttggaagcaaggaagttagtgggtgagcttggggatgtagctcagctatctgctggtctagtggcctctaagctatagggaggggacagagccctgagctacagatgcttgagtgggttattgtgtcggtttgctagtgcagtctggtttttaagctctaaaattgaggtattttattagaagtggatttgggttgaactcttaatttgtataagggatatattttggttggggaaatagaactgagttgctaattcttattgtactcattactccatacaagaatgttatgttgaataataaaattggagaagatttcattttgtgtttccagggagtattctgtgtggggaactgtttccttacgtgaggccggcggcataagtcaaagatgagttttgtccttgcgaatcacacagattgagtctgtgttccccagggtgtgccgttacctgatttttaagtgagccagggcggacagcagcttttctgatttacagagttcttcagatttacaaatggacaatgacatcacagtttttagcactgaagccagtctcatgctagtaacagtgggtgagccgctcgagggactgggttctaatgaatactggtatgaacggggagtctctgcagtcgccagacaaatcatactcagccccttcccccgtagagcaacaagtggttcttttagagttgactggcagcatttcctgtcgggggaggtggggtttgatggagttagaaagctcgcctctgtgtacattctctcctgggctgttactttctgtagacgcacaaaatcagccccaatgtttttaagggcatcttagccaaggaagctggcttttgtgtcgccacttccaggcctgcattaagagagagcccaggcaccagggctaccactggaacctgcctcagcgtcaactgctgctggtctgtagccaggcccagcctttgagacgggtttactgtcaccaggagcctcttagtgccagccctgaacttctcctggctaa

SEQ ID NO: 91099 - DNA, 809 bp, Homo sapiens
ttttttttttttgagactgtatccagcaggctttatgggctttttaggggagctgtgccgaggctggggggctgggggcaggggattaactctttccctggggcagcgctcctggctctgaacccatcaggggattttcttgggcaggggattaatgatcccactctcgatgtattcgaagactgtgtatgggtcctggtccccattgagggtgatggccgacccatacaactgctccaagtcagctgagttcctgtagaacaggtccattttcagcttgacctgctcttcagcatcctttgggttctgcaggaggcgagcctggatctccatggtgggaggtggcttgtacatgaggtggtacctttccccagtgactggatcaattcttctcagagtcagccgctccatgatggaatcaaatggcacattcaggaaaaactccctgttgggattgtagcccaggcggttcagcaggtgtgcctggtcgaggtcccgcgggacgccgtgtagcacccagcctttctggatgcagtcctgctggtccaggcgctggctcagcaccttcatgaggaggctgtcaggaactacaccgcacccacactgcctctcctcatccctcacattcgcttcaaactgcccggtgtaacttctttccttcttcaagccctccttgaaattgatgtcaagatgagcatcagtgttcatgggggaggctggcatttgcttctctttctcctgtggtccctgggtccctgggtcccgcccctcctgaaggatcccaataggacccaggaggtccagggaat

SEQ ID NO: 91100 - DNA, 1168 bp, Homo sapiens
gcggccgcggcggggccaggggcttgtacaggaagtacagacagagaacgtgacagtggctgagggtggggtggctgagatcacctgccgtctgcaccagtatgatgggtccatagttgtcatccagaacccagcccggcagaccctcttcttcaatggcacccgtgccttgaaggatgagcgtttccagcttgaggagttctccccacgccgggtgcggatccggctctcagatgcccgcctggaggacgaggggggctatttctgccagctctacacagaagacacccaccaccagattgccacgctcacggtactagtggccccagagaatcctgtggtggaggtccgggagcaggcggtagagggcggcgaggtggagctcagctgcctcgttccgcggtcccgtccggctgccaccctgcgctggtaccgggaccgcaaggagctgaaaggagtgagcagcagccaggaaaatggcaaggtctggagcgtggcaagcacagtacggtttcgtgtggaccgtaaggacgacggtggtatcatcatctgtgaggcgcagaaccaggcgctgccctccggacacagcaagcagacgcagtacgtgctggatgtgcagtactcccccacggcccggattcatgcctcccaagctgtggtgagggagggagacacgctggtgttgacgtgtgctgtcacggggaaccccaggccaaaccagatccgctggaaccgcgggaatgagtctttgccggagagggcggaggccgtgggagagacgctcacgctgccgggtctggtatccgcggataacggcacctacacttgcgaggcgtccaataagcacggccatgcgagggcgctctacgtacttgtggtctacggtgagagcaggctgcggccgactgagggcgggggcggggcgccagaccctggtgcggtggtagaggctcagacgtcggttccctatgccattgtgggcggcatcctggcgctgctggtgtttctgatcatatgtgtgctagtgggcatggtctggtgctcggtacggcagaagggttcctatctgacccacgaagccagtggcttggatgaacagggagaagcaagagaagccttcctcaatggcagcgacggacacaagaggaaagaggaattcttcatctga

SEQ ID NO: 91101 - DNA, 454 bp, Homo sapiens
  misc_feature (1)...(454): n = a,t,c or g
attgaactcgatagcatcggcaagngccgcggaanttcaatctcttggtttctcatcctctggccagccactgaatgtttagttcttcttctcctgtgtgcattctctccttaggctgtctcatacactctgacttcagtaaccaatgacatgccagggaatcccactgtatgttcctagcccatggctctcctttgccacccacacagctgcctatttagtgtctgtgattatatttcccacaggtatttaacttgccatctttctcttccaaactctttttcctccagttttccatatcagtaaattctaccactatccctactagctcaagctagaaacccaggaatcattttttttctccctacatttaatgcattgtgaagtcctgtccattctacctcctaaagactttctctatctacctattactatgcatcccaagaaaccatca

SEQ ID NO: 91102 - DNA, 4528 bp, Homo sapiens
ttggacatttttgagcgccgtggcttgaacggtgctttttgttcattcctgggttttaatattattttccttcttcatccctctctggccactatggaattctaatttgaaccatgtttggattgaagccgcctctgtatttcttaccagggtcctcactgagcagcgagtcgtcccccgtgtcctctccggccaccaaccacagctcccccgccagcacacccaagcgcgtgcccatgggccctatcatcgtcccccctgggggccacagcgtgcccagcaccccccccgtggtgaccatcgctccaaccaaaaccgtgaatggtgtctggaggagtgagagccggcaggatgccggtcccaggagcagcagtggaggtcgggaacgcctcattgtggagcccccgctccctcaggagaaggcagggggaccagccatcccctcgcacctgctcagcaccccctaccccttcggcctctcccccagctcagttgtgcaggattcccgcttcccgccactcaacctccagcggcccgtgcaccacgtggtgccccccagtaccgtgaccgaggactacctgagaagcttccggccctaccacaccaccgacgacctccgcatgtcctcactgcctcccctcggcctggacccggccactgctgcagcctactaccaccccagctacctggccccacaccccttcccccacccggccttcaggatggacgactcctactgcctgtctgccctgaggtccccgttctaccccatccccacccccggctccctgcccccactgcacccatcagcgatgcacctgcacctctctggggtccgctaccctcccgagctctcccactcatccctggcagcgctgcactcggagcgcatgtctggcctcagcgcggagaggctgcagatggacgaggagctaaggcgggagagggagcgcgagcgcgagcgcgagcgtgagcgtgaggctgaccgcgagcgggagaaggaacgtgagcgcgaacgcgagaaggagcgcgagcaagagaaggagcgtgagcgtgagaaggagcgcgagcgcgagctggagcgccagcgggagcagcgggcccgggagaaggagctgctggccgccaaggccctggagcccagcttcctgcccgtggccgagctgcatgggctgcgtggccatgccactgaggagcggggcaagccctcggagcagctgaccccaacccgagcagagaagctgaaggatgccagcctgcaggcgcccaagcccgtccaacaccccttgcatccggtgcccaccccacaccacacggtgcccagcctcatctccaaccatggcatcttctctctgcctagcagcagtgctgccacagccctgctgatccagcgcaccaatgaggaggagaagtggctggcgcggcagcggcggctgcggcaggagaaggaggaccggcagtctcaggtgtccgagttccggcagcaggtgctggagcagcacctggatatgggccggcccccggtgccggcggaggcagagcacaggccggagagcaccaccaggccaggaccaaaccgtcacgagccaggtggccgtgaccctccgcagcactttggggggccaccacctctgatttcgcccaagccccagctccatgctgcacccacggccctctggaaccccgtgtccctgatggacaacaccttggagacgcggcgggccgaaagccactctctgcacagccacccggctgcatttgagcccagccgccaggcagccgtgccgctggtgaaggtggagcgggtcttctgcccggagaaagcagaggaggggccacggaagcgtgagcctgcccctctggacaagtaccagccacctccgccgccaccacgagagggagggagcctggagcaccagcccttcctgcccgggcccgggcccttcctggctgagctcgagaagtccacccagaccatcctgggccagcagcgggcctccctcccacaggcggccaccttcggggagctcagcggacccctgaagcctggctcgccctaccggcccccagtgccacgggcccccgaccctgcctacatctatgatgagtttctgcagcagcgccggaggctggtcagcaagctggacctggaggagcgcaggcggcgggaggcccaggagaaagggtactactacgacctcgatgactcttacgacgagagcgatgaggaggaggtcagggcccacctccgttgcgtggccgagcagccgcccctcaaactggacacgtcctctgagaagctagagtttttgcaactttttggcttgaccacccaacagcagaaggaggaattggtggcccagaagcggaggaagcggcggaggatgctgcgagagagaagcccgtcgcccccaacaattcagagcaagcggcagacgccttcaccgagactggcgctgtctacccgctacagccctgatgagatgaacaacagtcccaacttcgaagaaaagaagaagttcctgaccatcttcaacctgacccacatcagcgctgagaagaggaaagacaaagagagacttgttgaaatgctccgtgccatgaagcagaaggcactgtcagcagcagtggccgactccttgacaaactctccgagggacagtcctgccgtctccctgagtgaaccagccacgcagcaagcctctctggatgtggagaagccggttggtgttgctgcttccttgtctgacatcccaaaggccgcggagcctgggaagctggaacaggtccggccccaggagctgtcgagagtccaggagctagctcctgccagcggggagaaggccaggctgagcgaggcccctggaggcaaaaagagtctgagcatgcttcactatatccggggcgctgcacccaaggacattcctgtgccgctgtcccacagcaccaatgggaagagcaagccgtgggagccctttgtggcagaagagtttgcacatcagttccacgagtcagtgctgcagtccacccagaaggccctgcagaagcataaagggagcgtggctgtgctgtctgcagagcagaaccacaaggttgacacgtccgtccactacaacattcctgagctgcagtcctccagccgcgcccctccaccccagcacaatgggcagcaggagccccccactgcaaggaagggccccccaacccaggagttggaccgggactcggaggaggaggaagaggaggatgatgaagatggagaagatgaggaggaagtccccaagcgcaagtggcaagggatcgaggccgtttttgaagcttaccaggaacacatagaagagcaaaatctggagcggcaggtgttacagacacaatgtagacgactggaggcccggcactacagcctcagcctgacggcagagcagctctcccacagcgtggcggagttgaggagccagaaacagaagatggtctcagaacgggagcggctccaggcagaactggaccacttacgaaagtgccttgccttgcctgcaatgcactggcctaggggctacctgaagggatatcccaggtgacggtttcccttgcactaggccgaacctatagtatagaaatattatctattttattaccttgaatatttaatatttttcactgggaggtttgaagcttacaaaatgagaatgtgccatgcatgaagcaaaggattccaggctccagaaaaaatgaatgaactcaccttgacgtcaatgcaattgaatcaccgttgtcattcagcgagcaaccaatgtaggattgcccacagtttttctttttaaaggtggttttcgcccttcctctcccacattatttcttaatctgaacatgaaggctccattagcaacactaaaacttgatcattaacagccccctgtgcatatgagtggatcaaaccggttctgttctttcttgtgttgccatgttactatgcctcaagcccagtttgcttttgccgcagcaatggggccagtctcattcctccccaggagtgaaacttgcttcagctgaaaaggttgggtgcattgtcagtaaaaagggcttatttgtttcattttactttcctgcaaaattttcttcaaagcaacaagtcctaggagcacacaaagcaacccaaaggcttttccctggaaaagctctttcttacctaaagataaaaccaattcacaaactgaaggtagctttttattactccgtggggagcatgtacagagctctgtgtatacacagcttcacacccaccagattgttactacagtgggttgggttttcatacagacgtaaattttgagagaaaagtcaaaggtgcttcagccttgtactgtgtatatatattaaaaaaaaaaacaaagttttgtatgtttttattactttaactattgttataaaaagcctgccatttttaatatgtggtttgggggatttttgtttgtttttcctgttagggggttttgtttgttgttttggttttttttgggcaaaaaaaaaa

SEQ ID NO: 91103 - DNA, 3163 bp, Homo sapiens
cagcgcttgcgcgctcgcgggccgctccctccgctcggaagggaaaagtctgaagacgcttatgtccaaggggatcctgcaggtgcatcctccgatctgcgactgcccgggctgccgaatatcctccccggtgaaccggtgcggctggcagacaagaggacagtcgccctgcctgccgcccggaacctgaagaaggagcgaactcccagcttctctgccagcgatggtgacagcgacgggagtggccccacctgtggcggcggcaggcttgaagcaggaggatggtccgcacatccgtatcatgaagagaagagtccacacccactgggacgtgaacatctctttccgagaggcgtcctgcagccaggacggcaaccttcccaccactcaacacaatggccctgcctcccaccgctttatttctttcggtttcggatgcaaaacaaaaaattttaaaagaaaatgtgacttcaaaggaaaagaacaaatttccaaagacttgggggagtgaaggcagagcctggtgcagatggacgaggtctgcagacggagggcagaggtggtggaaggggccaggggcctgcaggcctccccctggaactgggactggtctcggtctgctgacgtcagggtcagctcccccgcggagctgacttcagcagcccacagctgtggggcttcagcagccacaccagcccagcccagcccagctctcgatacgtttggtctttcatgctgaaaaataaataataaagcctgtcccgtgtctactgcctcccccaactgcacagacgccagcctctaggcctgactgccagggaggtggaaacactggccaccagcccggcagcccctacaggccccccagatgggctgcctcagtcgtcctctgagagctgcagatcctccagctcgtcctccggcccctgggccagctgctgcagctccccaggggccagccccgcctctgcgtctgggtctccatcctccgagttgctgctgtcctcctcgccctcctcctcgtcctcttcatcgtcttccaccccatgccgagtgctcaggggcctcagtatccctctctccgagaatccctcggtgtcgtcctcttcagagctgttcaggtcaaagaggtctttaaattgcttcctgtcctcatccttcctgtcagccatcttccttcgtttgatctcagggaagttcaggtcttccagccgctctttgccactgatctccagctggatctcccggtcacgcagcttgcgccagtggctgtagtacaaggtcaagggtgtcccctcttcccgggtcagcttctcccaggcttccactgcctgctgctcagagacgccgaaggaaaccctctggcggcggctgcagatgtatgccgagttctcctgaaccttcccaagcagctgctgcacctgccggcagtagttggccaccttgcactcccggaggaacgacttcagctgcaggaccacaggcagcaccagctccgggaagccgatgcagtgtgcctggctgtgcaggtactccagggtgaggtcgtacagctgctccaccaggccgtcccggtacgccttctcctgcaggttgacattggacagcttcaggatcacggagaagttgatgggcttggagctcatgcgccctggcttcctgttgaagtcgacctgctggaacatctccaggatgaaaggcagcaccgggatgaaggcccccgagctccccgagagcagcgtcagggcacggatgcagtgcattcgcagcgggtagaagcgggcagtggggatgagcttgatacagccaatgatgacttgggcaagggggtagaccaagggctggagggcttcgctggggcccgcagtgctcaggacccggcaccacaggaagaggcagtgcacatactgccagttgtacacagactggtatgtttccttcttgcgggtggtcatggcgttgcgcaggtgtatggcgagctggcggatgtagaggaaggcgtgctggtaggccacacccggctccagggccagcagctccgtcaaggtccactgcatgaaactgatgaaggggagggcaccaggcgaggtgaacttgcagttcctcacatacgtgatgtacatttgcttgaggacggggccaaggaaagtgtccttcttgtgccggcagactctgctgaggaccaggaaagccagcacccgcagagactcctccccagtgctccatacgaccaccattctcttgagcagcatgcggcactgcttggggaaggtcaggaagcagggcaccagcacgctgatgtgccgcagcacggccgccaacaccgtcgtctccgacagacaggacaccagctgtatggccgagcccaggtaagccttgatgtccacacgaagcttcccccagagcgggctgctggacggctgcagcatcctgctgctatcctttgccacctttccaaacagcagcttctggagacagccaatgaggtctctgatgcagaaggtaaccagagcattgaatgcagcactgtccgtgacctggaatttgttggcctcagcactttcctggtcccctcgggtggtggccacagctgctcggaacgcctgtaccacttcatggaacagctttggagtgaggcgttgctttgctgcctgcttccatctctcaaccatggcgacggtcacaggaacagaattcttcttccccttcagccctctggggactctgtccccatcttctccttcctccgctccatcctcctcctcactggcttcctccagcacatctggcagggagtggaacggcccctcttcctcctcagagctgtccgagtcgctgaagtttagcaggctctggtcattctcctgcaggaacttgtagaactcggggtctctgtccttcagccgagagagctggtctttgtgctcagaggcacggcctttacgccggctggccgaggggctcccgcccggcttatccggactccgggcagcctcgcgtgcttcccgtgtctccgcttgtggagaattttcggactcggattcggactcggagtcaaagcccgaagctaggaactcgtccaccgtcagctccgccaggcgcctcttgcggctccccgcagctgccatgacaccaacccgaagcgtgcaccccacttacgaaa

SEQ ID NO: 91104 - DNA, 1444 bp, Homo sapiens
tggaaatgggcaacggcgggcggagcggcctgcagcaggggaaggggaacgtggatggggtggcagcgactcctactgctgcctcggcctcctgccagtacaggtgcatcgaatgcaaccaggaggccaaagagttgtaccgagactataaccacggtgtgctgaagataaccatctgtaaatcctgccagaaacctgtagacaaatatatcgagtatgatcctgttatcatcttgattaatgctatattgtgcaaagctcaggcctacagacatattcttttcaatactcaaataaatatccatggaaaactctgcatattttgtttgctttgtgaagcatacctgaggtggtggcagcttcaagattccaaccagaatactgcccctgatgacttgatcagatatgctaaggaatgggatttctatagaatgtttgcgattgctgctttagaacaaactgcctattttattggcatttttaccttcctgtgggtagaacggcccatgacggcaaaaaaaaagcccaacttcattttgctgctgaaagcattattattatctagctacggaaaactcttgctgattccagctgtcatttgggaacatgactacacatctgtgtgcctcaaactcattaaagtatttgttcttacatcaaattttcaggcaattagagtgaccctaaacatcaaccgtaagctctccttcttggccgtgttgagtggcttactgctggaaagcatcatggtctacttcttccagagtatggaatgggatgttggaagtgattatgccatctttaaatctcaggacttctgaagagttttattcttcttcactatctgtggcatgaccagctgtatctgaaagagaaaagacatgaaatataaaccaacctcctcatttctgttgagtaaaatgaagcaaagattggaaacactttctgaaaaagaaagcaatgataatagcggtggatacccacccccacaaatgcacccaagagacaagccatttacatacagatattcacagtcacacatagaaacacccacatggacacaaggaatgttgctgcagagactgaatgacatgcaacaggtgaaggtttatacgttatacacaaggccaggtaagcgctcataattcacacataataaaacatctaggtttcattcctttgacatgtttatatctttttaatttaaatgttgttactggcttaaaatattttgtgttcttacaatagaaacgcttttaataaagtctttcagaataaaccaagtttttgtaaattttcaattcaataattaaggtaatctttaaaattggatgatccaaaaataagtgataatgaaaaccactgagttatatactttgcaagggtaaattacatctgaataaagctgtaattaaaaacaacacctctccccttaaaaaaaaaa

SEQ ID NO: 91105 - DNA, 607 bp, Homo sapiens
tcgtgcgagcagtcggctactacaccccatttgtatttatactccttgttataaatagcttggctgtaacacatagcccaagtgtttaaatgggtgtgttcccataaaactttatttacaagagcagggtgccttggaagcagcccacggctgtagttcatagaccctgtctgctctgaagtagatgatgcctgagtgcccccgaggtgggttgctggtgcctgccttgctgctgtgagtgccaatggtgcccaccttgctgctgtgagtgccagtggtgcccaggacggccctgcagggatggcatcgagtccactctctgagccgtgcttgccggagtctgagtgggggcactgtttgtcacctccccatttctctgttcatgtgtttctcattcttcttccaccaccctggggactcagcaagagtgcagcttgccaggtcctcccactgcagccagggcctgggaacttgcatttagtgatgcgtgtgtccctgactcttgagcaggtgctcccagggtctctgtgaaatatcattgacaagggctgtggcagggagagaacatccaattccacaggatcctgggagtacagcctcaaacatc

SEQ ID NO: 91106 - DNA, 1286 bp, Homo sapiens
gaagtagtaggcaatgagccagaaggggtcctcagtcagtttcgggagcactggtgtggagtggatgaagccagtgaggacacagtggagacagtggagcaccagagaacccagggcaaggaagctgggcagccgggcccttcaccagtcaggccacctgcagtctgcagtcagagcctcagatcttacactggcagcacacggggacacagcagctggactggcagcagcagggcttgtagcagctggattggcagcaggatgatccacagcctgagaagcagctacagggcttacagcagctggactggcagcagtagggcttacagcagctggactggcagcaggatgacccacagcctgaggagcagcagcagggcttgcagcagctggactgggagcaggatgatccacagcctgaggagcagcaacagggcttacaacagctggactgggagcagccacaagaaccacatccccccttggaacccccacaggagccacagccccccttggagcccccacaggagccacagctggtgcaggaacaggctggcacccaggagcacacgggcttgcagcagcagacaggcacataacatctggagccacatcccccacagctggagctgcagcccccacagccagagccacagcccccacggccggagccacagcccccacagccagagccacaacccccacagctggagccacagcccccacagccggagccacagcctctggagcagccacagcagcccatggttctggtggattgagggtggagcaggtagaggagcaggtgagagggaggtgcaggtgtggagctccctgagcctgggctctttatatacctgtccagatgtcaggcatgacacagggtccctttcttgtgactgtttacactatttttccagagctctatttttttcctctttgctagtgacttccttctggctcagttgagcatctactttctttgttttctaaatttgtctttttccccatttgttttggcccctacaattaaaacctcagctccaggctgtctggttcttcctgcaaagctccagggtgctggtcacctgctctctgctgaccacatgtgaccaatgggcaacagcctctgcccacgtgctctaatctttcctgtgttgactccctcaataatattaattttacatttttagatttcaaaattatccacgatctttatactcatgccagtctcagctttccgggtgtgttagaccattctttgcattgctctaaagaaatacttg

SEQ ID NO: 91107 - DNA, 2216 bp, Homo sapiens; identical to SEQ ID NO: 60202

SEQ ID NO: 91108 - DNA, 5716 bp, Homo sapiens; identical to SEQ ID NO: 58881

SEQ ID NO: 91109 - DNA, 454 bp, Homo sapiens
  misc_feature (1)...(454): n = a,t,c or g
tatgcggcganttnccggaaagggnccatgactgagcttgctcggagtattgatgaagtccattnttctatatttgngnntaanatcccaacaggggactttggactggagactcctattgtccgggccaaaatttcctaaatgtggttgtggggtgggggttttttttntaattttttttcttcccctcctttgacagaagccaggcttgcatcactgaagactccctgcacttagatctgctttttcttcttaatctttaactaacgttcctctcataaccttttgagtgacttataattgcatagtatcagcttcttggaaaacctgacttgataaactatcctatttgaaatacagatatatacgcatttaacaatttttgacattattagcacattgagtattaaatagtatctgaagagagatacctttaaaaatgaaaacaccttcc

SEQ ID NO: 91110 - DNA, 466 bp, Homo sapiens
  misc_feature (1)...(466): n = a,t,c or g
ccgtcacgtaattttcgggncgacccacccgtccgctgacctccactggctctagacacgggccgtcttgatccagcattctgcttttgaccattcaaacttaacaccaatcttgatgacttcctgcaacctccaatgatcatactgttcccatttctgttattttatgctaaactcagcccagggagccaatgccaggctttgccgtaatcacacccagcctttcataacatcagttactgatcggagtactcccaaaggcggcacacctagaacaagagctatccaaatgcaccccacccagaggccacattctagttcatggcttaggaaaagcaaatattgtaaagggacagaggctaaagcagacattatcgttcaaaagtaacccgtttccacctaccccatgtgattaaagtgctgctgttaatttcctaccatgtgctggtaaaattataattatctt

SEQ ID NO: 91111 - DNA, 425 bp, Homo sapiens
aacaaaattcggagcccggcccacggcgcgcgctgctgatgggtctgggcccgcctaccgacggcccaggacccatcgacccacgagtcggtccggccgccgggtgcacaatgggtgggtccttcaatggcgccgctatgaagaaagtggataaactgctcctgctggaggccggacttaacgacgaagaagtttctcaggggggtggagacttgaaacaggtctgtctgcagaatgctcatcatgaccctctgctgactggagcatcttcaagtgcaaatgcgttcataccccagacagactgttcctttttgcagtaaaatgaatctttcaaaggcttcccacaccactccttatgatccagtgaatattcaagagagctacatttgaggcctgtgcaaaagcttatccctgtaacacatgtg

SEQ ID NO: 91112 - DNA, 421 bp, Homo sapiens
atctaattgtccttttagcattttatgtaatagaaaataatatttagatgggcagtgtagcctaatggttgatcattggcttcagaatccaaaactgtggttcaatttactcatatatagaatggggacaatattttctacctcatggggtgattgtaaggattaaacaagttactcgtctgtagaaatttctcttccacacacttcatatctcttgttaacatcccttccacagaatgcactttggaaatgatagttttaaaagttgggagtgctttcagctgcaagaccaacacacagttataacagggaatatggaggtgaacattattaaagtgttggcccagtggctctggctctggattagaatctcagtgatcctgttggctttcccttgaacctcaagatggctgcagcagct

SEQ ID NO: 91113 - DNA, 2586 bp, Homo sapiens
gtcggggccgctttgcaggtccctagtcaggaccgagcaggggagtaggataggaatccccgccgcacctttgtacgagcctgaccccttccgtgggtttgttcctgggtcgccgtcaagctgcggtctctcctcccccgcccttcagccccgcggtctccaggggcggcgccctgggtctggaacgcggttgccaccgaggaggcggcggccctgcgtctggaacgccgttgccaccgaggaggcggcggccccgagcgcgcctggaagccccgggcaaccggccagggtcgggcacaggtggggtccgtcaggccgcccggggctcctctgtcccagctctgcggcccagggggtgacgtgatggcggcagcggtgctgacggaccgggcccaggtgtctgtgacctttgatgatgtggctgtgactttcaccaaggaggagtgggggcagctggacctagctcagcggaccctgtaccaggaggtgatgctggaaaactgtgggctcctggtgtctctggggtgtcctgttcccaaagctgagctgatctgccacctagagcatgggcaggagccatggaccaggaaggaagacctctcccaagacacctgtccaggcgacaaaggaaaacctaagaccacagaacctaccacttgtgagccagccttgtcagagggaatctcacttcagggacaagtgacacaaggaaactcagtggactcacagttggggcaagccgaggatcaggatgggctatcagaaatgcaggaaggacacttcagaccaggaatagatccccaggagaagtctcctgggaagatgagccctgaatgtgatggtttagggacagctgatggtgtgtgttcaaggattggacaggagcaagtctctccaggagatagagtccgtagccataactcatgtgagtcaggtaaagatcccatgattcaggaagaggaaaataactttaaatgcagtgaatgtggaaaagtatttaacaagaaacacctccttgctggacatgagaaaattcactctggagttaagccctatgaatgcacagaatgtgggaaaacctttattaagagcacacatctcctgcaacatcacatgatccacactggggagaggccctatgagtgcatggagtgtggaaaggccttcaaccgcaagtcataccttacccagcaccagcggattcacagtggagagaagccttacaagtgcaatgaatgcggaaaggccttcacccaccgctccaattttgtcttgcataacaggagacacactggagaaaaatcctttgtgtgcacagaatgtggccaagtctttcgacataggccaggctttctccggcactatgttgtccacagtggtgagaatccctatgagtgcttggagtgtggcaaggtcttcaaacacaggtcatatctcatgtggcaccagcagactcataccggggagaagccctatgagtgcagtgaatgtgggaaggtcttcttggagagtgcagccctgattcaccactatgtcatccacactggagagaagccctttgagtgcctcgagtgtgggaaggctttcaaccaccgatcctacctcaagaggcaccagcggattcacactggggagaagcccttcgtgtgcagtgaatgtggaaaggccttcacccactgctctacttttatcttgcataaaagggcccacactggagaaaagcctttcgagtgcaaagagtgtgggaaagcctttagcaatcggaaggacctcattcgccacttcagcatccacactggagagaagccctatgagtgcgtggagtgtggaaaggccttcacccgcatgtcgggcctcacgaggcacaagcggattcatagtggagagaagccctatgaatgtgttgagtgtgggaaatcgttttgctggagcacaaacctcattcgacatgccattatccacactggagagaagccctataaatgtagtgaatgtggaaaggccttcagtcgcagctcgtccctcactcagcatcaaaggatgcatactgggaaaaatcccatcagtgtaacagatgtgggaagaccttttacaagtggacaaacctcagttacccttcgagaacttcttttagggaaggactttttgaatgtaaccactgaggcaaatattttgccagaggaaacatcttcctctgcatctgatcaaccataccaaagagaaaccccacaagtgtcttcactgtgagaaaaccttctgttgctgaatattacttgtcatctgaagagtcatattagaaattcgttcagtctagagccttattctccatctgataatttatcctggagagagacccagtggttattgtgcacataggagaaccttcagctgcatctttctccttagtttacagtgcaattttatctcaggaattatttttaaaaggaggaggggacatagaaaaaatgaaatgcaagcacacatcttttcaggcttctctgccaagcctatggcgctttgtcatggatttcttagtgtatttgggggaagggaaatgtttcaaggtaaagaaccttgacccttaaa

SEQ ID NO: 91114 - DNA, 1643 bp, Homo sapiens; identical to SEQ ID NO: 58719

SEQ ID NO: 91115 - DNA, 1837 bp, Homo sapiens
gtttatcctttgaaaaagtagatattcagactgacaatgatttgacaaaggaaatgtatgaaggaaaagagaatgtatcatttgaacttcaaagagacttttcccaggaaacagacttttcagaagcctctcttctagagaaacaacaggaagtccactcagcaggaaatataaagaaggagaagagcaacaccattgatggaacagtgaaagatgagacaagccccgtggaggagtgtttttttagtcaaagttcaaactcatatcagtgtcataccatcactggagagcagccctctgggtgtacaggattggggaaatccatcagctttgatacaaaactcgtgaagcatgaaataattaattctgaggaaagacctttcaaatgtgaagaattagtagagccctttaggtgtgactctcaacttattcaacatcaagagaacaacactgaggaaaagccttatcagtgttcggagtgtggcaaagctttcagcattaatgagaaattaatttggcatcagagacttcacagtggggagaaacccttcaaatgtgtggagtgtgggaaaagcttcagctacagttcccattatatcacacatcagacaatccacagtggggagaagccctatcagtgtaagatgtgtgggaaggccttcagtgttaatggaagcctaagtaggcatcagagaatccatacgggagagaagccctatcagtgcaaggaatgtggaaatggcttcagctgtagttctgcatatattacacatcagagagtccacactggagagaaaccttacgagtgtaatgactgtgggaaagcgttcaatggtaatgcaaaattaattcaacatcagagaatccatactggagagaaaccttatgaatgtaatgaatgtggaaaaggctttaggtgcagctcccagcttaggcagcatcagagcatccacacaggagaaaagccctatcagtgtaaagagtgtggaaaaggcttcaataataatacaaaactcattcagcatcagagaatccacacagcttctctggctgagcagctcttcaaagcatctgggaaccaccccaactggggatgctgcctgaccatcagctccccggggccgagtgtgtatggccccaagatgaacatgaggggagccccaaattcaaggctggctggtggcagagagaaacgcacccaggacacagacttcgggcagtgctccttcctcccttcacactctccctcctgctttgaaccgtggaatgtgacagattacgactcgagctggtaccgacagaagcaggttctcagtggtgtatggtcctcacccctgtccattctcaagcttcccaggaccctcatccggatctccatccacatacaagagatggatactcctggggagatgctgatgacaggcaggggcagccttggacccaccctcaccacagaggctccagcagctgcccagccaggcaagcagggcccacctgggaccgggcgctgcctccaagcccctgggactgagcccggagaacagacccctgaaggagccagagagctctccccgctgcaggagagcagcagccccgggggagtgaaggcagaggaggagcaaagggctggggccgagcctggcacgagaccaagcttggccaggagtgacgacaatgaccacgaggttggggccctgggcctgcagcagggcaaaagcccaggggcgggaaaccctgagcctgagcaggactgtgcagccagggctccggtgagagctgaagcagtaaggaggatgcccccaggcgccgaggctggcagcgtggttctggatgacag

SEQ ID NO: 91116 - DNA, 1026 bp, Homo sapiens
atgggccaggtggagtgtggaggacagaagctgggaaaccagttagaagatgacagtgaaccagcagaggggaaggtgtacagctcagatgaggagaagctggaggcatcagcaggagacccagcaggcagcgaacaggaggaagagggctcaggcggtgacagcgaggatgacggtttcctggacagttctgcagggggcccaggggctcttctgggacctaaaccgaagctaaagggaagcctggggactggagctgaggagggggcaccggtgacagcaggggtcacagctcctggggggaaaagccgacggcgccgcacagcatttaccagcgagcagcttttggaattggagaaggaatttcattgcaagaaatacctgagcttgacagagcgctctcagatcgcccacgccctcaagctcagtgaggtgcaggtcaagatctggtttcagaatcgacgggccaagtggaagcgcatcaaagctggcaatgtgagcagccgttctggggagcccgtaagaaaccccaagattgttgtccccatacctgtgcatgtcaacaggtttgctgtgcggagccagcaccaacaaatggagcagggggcccggccctgaatgggcacccaagaacttaggaaggcgagggatctgtacctgagcctgctctgagactgtcagggttctgtggaccagaggggctgcaactgtgattctgccttgagaggggctagttgggaattaacctagccctgggtgtgctcttcccagactcctcccagaacctgagatgtgaagcacttgggcctgagcctgttccagagaacttcaggactaggggcttcaaggttaaagggggctggggttctattgctgagggagctgttgggactgaggtggactcctggggagggggtgggttctaagatgcctaagggcctgaaggttctgtggcaaatgccctggaaccagcttctgatgggtggagggaacaggcgatacctagccaagtagatcgcagctcct

SEQ ID NO: 91117 - DNA, 3677 bp, Homo sapiens
gtcggcgtcgtctacctccagcttctcctccctcctcctccgtctcctcctctctctctccatctgctgtggttatggcctgtcgctggagcacaaaagagtctccgcggtggaggtctgcgttgctcttgcttttcctcgctggggtgtacggaaatggtgctcttgcagaacattctgaaaatgtgcatatttcaggagtgtcaactgcttgtggagagactccagagcaaatacgagcaccaagtggcataatcacaagcccaggctggccttctgaatatcctgcaaaaatcaactgtagctggttcataagggcaaacccaggcgaaatcattactataagttttcaggattttgatattcaaggatccagaaggtgcaatttggactggttgacaatagaaacatacaagaatattgaaagttacagagcttgtggttccacaattccacctccgtatatctcttcacaagaccacatctggattaggtttcattcggatgacaacatctctagaaagggtttcagactggcatatttttcagggaaatctgaggaaccaaattgtgcttgtgatcagtttcgttgtggtaatggaaagtgtataccagaagcctggaaatgcaataacatggatgaatgtggagataggtccgatgaagagatctgtgccaaagaagcaaatcctccaactgctgctgcttttcaaccctgtgcttacaaccagttccagtgtttatcccgttttaccaaagtttacacttgcctccccgaatctttaaaatgtgatgggaacattgactgccttgacctaggagatgagatagactgtgatgtgccaacatgtgggcaatggctaaaatatttttatggtacttttaattctcccaattatccagacttttatcctcctggaagcaattgcacctggttaatagacactggtgatcaccgtaaagtcattttacgcttcactgactttaaacttgatggtactggttatggtgattatgtcaaaatatatgatggattagaggagaatccacacaagcttttgcgtgtgttgacagcttttgattctcatgcacctcttacagttgtttcttcttctggacagataagggtacatttttgtgctgataaagtgaatgctgcaaggggatttaatgctacttaccaagtagatgggttctgtttgccatgggaaataccctgtggaggtaactgggggtgttatactgagcagcagcgttgtgatgggtattggcattgcccaaatggaagggatgaaaccaattgtaccatgtgccagaaggaagaatttccatgttcccgaaatggtgtctgttatcctcgttctgatcgctgcaactaccagaatcattgcccaaatggctcagatgaaaaaaactgctttttttgccaaccaggaaatttccattgtaaaaacaatcgttgtgtgtttgaaagttgggtgtgtgattctcaagatgactgtggtgatggcagcgatgaagaaaattgcccagtaatcgtgcctacaagagtcatcactgctgccgtcatagggagcctcatctgtggcctgttactcgtcatagcattgggatgtacttgtaagctttattctctgagaatgtttgaaagaagatcatttgaaacacagttgtcaagagtggaagcagaattgttaagaagagaagctcctccctcgtatggacaattgattgctcagggtttaattccaccagttgaagattttcctgtttgttcacctaatcaggcttctgttttggaaaatctgaggctagcggtacgatctcagcttggatttacttcagtcaggcttcctatggcaggcagatcaagcaacatttggaaccgtatttttaattttgcaagatcacgtcattctgggtcattggctttggtctcagcagatggagatgaggttgtccctagtcagagtaccagtagagaacctgagagaaatcatactcacagaagtttgttttccgtggagtctgatgatacagacacagaaaatgagagaagagatatggcaggagcatctggtggggttgcagctcctttgcctcaaaaagtccctcccacaacggcagtggaagcgacagtaggagcatgtgcaagttcctcaactcagagtacccgaggtggtcatgcagataatggaagggatgtgacaagtgtggaacccccaagtgtgagtccagcacgtcaccagcttacaagtgcactcagtcgtatgactcaggggctacgctgggtacgttttacattaggacgatcaagttccctaagtcagaaccagagtcctttgagacaacttgataatggggtaagtggaagagaagatgatgatgatgttgaaatgctaattccaatttctgatggatcttcagactttgatgtgaatgactgctccagacctcttcttgatcttgcctcagatcaaggacaagggcttagacaaccatataatgcaacaaatcctggagtaaggccaagtaatcgagatggcccctgtgagcgctgtggtattgtccacactgcccagataccagacacttgcttagaagtaacactgaaaaacgaaacgagtgatgatgaggctttgttactttgttaggtacgaatcacataagggagattgtatacaagttggagcaatatccatttattattttgtaactttacagttaaactagttttagtttaaaaagaaaaaatgcagggtgatttcttattattatatgttagcctgcatggttaaattcgacaacttgtaactctatgaacttagagtttactattttagcagctaaaaatgcatcacatattcatattgttcaataatgtcctttcatttgtttctgattgttttcatcctgatactgtagttcactgtagaaatgtggctgctgaaactcatttgattgtcatttttatctatcctatgttaaatggtttgtttttacaaaataataccttattttaattgaaacgtttatgcttttgccaacacatcttgtaacttaatatactagatgttaaggttgttaatgtacaaaaaaaaaaaacccttatactcacctgcgttttcatttgtttgacatttgtctattattggatatcattatcatatgaacttgtcagtgggaaacaaactgtctaaaaatttttctcttacgtttaacatacaatcatgtgaaatttaggcagagttcgataaattactggcaaaaacaaaactcttttataaagattttctaatgttgactttaatactctaacatggtacaaaccaaatggtaaaatcccaagtcatttcttttttcatctctatttagcaacagaattaagtggatgaagatattctactatgcattaaatcttgaactttataaaacatgtacaaaaattgtacaagataagttccacctggtaatgtctttccctaatacagggttgcgcttgcattggaccctagggatttgcactaaaattatatcaaggtctcagatgagcttagtgcacaagcactatcactttaaatactattatttgctaccacagcaactatatatttccatagcttttggctgggggcgggggacatttttattacaacttgaaattgctttgctggttg

SEQ ID NO: 91118 - DNA, 2653 bp, Homo sapiens
ggcacgaggcggcattcggtggtcagaggcctgtgcggctgcaggtagagtgtcttaggtgaggaggtacttttaagcaccgcgcgaaatgggggcgaagagaatttttttacttttgagggtgggactatcctgcaaggtgtgactgcggtcgggttttccgtagccagtttcgcaccagggatccttgggaagcgctgggatggttcaactgggtggggtcagaagctgctcccctgcccttctttcctaggaacctaggaaataactcggaacctgtaacgtcccactggtttggacatattcctctcctgatctggcctcatctgttccagggaggtgggattgaaacatatgcagtaatgtcacctcaaaagagagttaagaacgtccaggcacaaaacaggacttcacaaggtagtagtagttttcagaccacgctttcagcctggaaagtaaaacaggatccaagcaactcgaagaacatctcaaaacatggacaaaacaatccagtgggagattatgaacatgctgatgatcaagctgaagaagatgctttgcaaatggcagtgggatattttgagaaaggtcccattaaagcttcacagaataaagataaaaccttggaaaaacacttgaaaactgtggaaaatgtggcttggaagaatgggttagcttcagaagaaattgatattctattaaatattgcactcagtggcaaatttggaaatgctgtaaacacacggatattgaagtgcatgatcccagcaacagtaatatcagaagattctgtggttaaggcagtctcctggctttgtgttggcaagtgttctggtagcaccaaggtacttttttatcgttggctggttgcaatgtttgacttcattgatcgtaaggagcaaattaacttgctctatggcttcttttttgcttcattgcaagatgatgcactgtgcccttatgtttgccatttgttatatttacttacgaaaaaagagaatgtcaaaccatttcgtgtgagaaaactgcttgatcttcaggccaaaatgggaatgcagcctcatctccaggctttgttgtcactgtataagttctttgctcctgctctgatttcagtatctttgcctgtaaggaagaagatatatcttcagaattcagagaatctatggaagacggctctgcttgccgtgaagcaaagaaaccggggaccttctccagaacctctgaagttgatgttaggtccagctaatgttcgtcctctaaaaagaaagtggaattctctctcagttataccagtgctcaattccagtagctacactaaagaatgtggaaaaaaagagatgagtctttctgattgtctgaatagaagtggatcatttccactagaacaacttcaaagcttcccccaacttttacagaacatccattgcttagagctgccttctcagatgggctcagtgctaaacaactctctgctgcttcactacattaactgtgtcagagatgagccagtcttgctgaggttttattactggttgagtcaaacattacaagaagaatgtatttggtacaaggtgaataattatgaacatggaaaagaatttaccaacttcctggataccatcatcagggcagagtgcttcttacaagaggggtattattcctgtgaagcattcctgtataagagccttcctctctgggatggccttagttgtcggtcacagttccttcagcttgtgagctggattccttttagtagcttctctgaggtgaaaccacttctttttgaccatctagcgcagctcttctttacatcaaccatttatttcaagtgtagtgtgcttcagagtctgaaagagctattgcagaattggctgttgtggctttctatggacattcacatgaaacctgttacraacagtcctctagagacaactttgggtggatccatgaactgtgtgtctaaactgatccactatgtagggtggctatccactactgcaatgcgcttggagagcaacaatactttcttgctgcactttattttggatttctatgagaaggtgtgtgacatatatataaattatgaccttccattagtggtattgtttcctcctgggatcttctattctgcactcctcagcctggataccagcatcctgaaccagctgtgttttattatgcacagatatcgtaaaaatttgactgccgcaaagaaaaatgagttggtacaaaagacaaaatcagagttcaatttcagcagcaagacttatcaagaatttaattactatttgacatcaatggttggttgcctgtggacgtccaaaccctttgcgaaaggaatatatattgaccctgaaatcctagaaaaaactggagtggctgaatataaaaacagtttaaatgtagtccatcatccttctttcttgagttacgctgtttcctttttgctacaggaaagcccagaagaaaggacagtaaacgtgagctctatycggggaaagaaatggagctggtatttggactatttattttcacaggggttacaaggcttgaaactttttataagaagtagtgttcatcattcttccattcccagagcagagggcataaactgcaacaatcaatattaaatgaatgttgacataaactg

SEQ ID NO: 91119 - DNA, 2289 bp, Homo sapiens
gtggtggaattctaccagactagttcaagagccaatttcattaattcactgtcttacccaatctatcccagaaccaccaaatcaggtctcttggctgttgatgccagtgagctccagaaagatgaggcatacgcaggcagtactagaactatattcaaattaatctctgctggacagttaagcagtccttatctgattttagtttggagttagggttccttctaacactcaatgtcttgttccatctttccactgcatgcagacatctgaatgggactccgagtgccttacatccctgcagccccttcctcttcctacacccccagcagcaaatgaggcacacctgcagacagcagctatctctctgtggacagtggtggccgccgtgcaggctatagagaggaaggtggagatccacagccggcgactcctacacctagaaggtcggacagggacagcagagaagaaactagccagctgtgaaaagacagttaccgagcttgggaaccagctggagggcaagggggccgtgctgggaaccctgctgcaggagtacgggctgctgcagaggcggctggagaacttggagaacctgctgcgcaacaggaacttctggatcctgcggctccctccaggtattaagggagatatcccaaaggtgcctgtggcatttgatgatgtctccatctacttttccactccagagtgggaaaaattagaagaatggcaaaaggaactttacaagaatatcatgaagggcaactacgagtctctcatctccatggattatgctataaatcaacctgatgtcttatctcagattcaaccagaaggggaacataatacagaggaccaggcagggccagaggaaagtgagattcccacagaccccagtgaagagcctggtatttcaacatcagatattctgtcttggattaaacaagaagaagagcctcaggttggggccccaccggagtccaaggagagtgacgtgtacaaaagcacttatgctgatgaagagcttgtcatcaaagctgaaggccttgctagatcctcgttgtgccctgaggttccagtccctttctcttctccaccagcagcagcaaaggatgctttttcagatgtggctttcaaaagccagcagtctacatccatgacaccttttggacgtccagccactgacctgcctgaagcctctgagggacaagtgacttttactcagttgggtagctatcccctcccacctccagttggcgagcaggtgttctcatgccaccactgtggcaagaatctcagccaagacatgttgctgacccaccaatgtagccatgctactgagcaccccttaccctgtgcccagtgccctaagcactttactccacaggcggacctcagcagcacctcccaggaccatgccagcgagacaccccccacctgcccacactgtgccaggacttttactcacccatcaagacttacctaccatcttcgggtccataacagcactgagcgtcctttcccctgtcctgattgccccaagcgctttgctgaccaggctcgactcaccagccaccggagagctcatgcaagcgaaaggcccttccgctgtgcccagtgcggcaggagcttcagcttgaaaatcagcctcctgctccaccagcggggtcatgcacaagagcgccctttctcctgccctcagtgtggcattgacttcaacggccactcggccctgatccgccaccagatgatccacacaggcgagcgtccttacccctgcactgactgcagtaagagcttcatgcgcaaggagcacctgctgaaccaccggcggctgcacacaggcgagcggcccttcagttgtcctcactgtggcaagagcttcatccgcaagcaccacctaatgaaacaccagcgcatccacaccggggagcggccctacccctgctcctactgtggcaggagcttccgctacaaacagacactcaaggaccacctccgttcaggccacaatggaggctgtgggggtgatagtgacccatcaggtcagccacccaacccaccaggtcccctcataactgggcttgaaacttctggcctgggtgtcaacactgaaggtctagagaccaaccagtggtatggggaagggagtggagggggagttttgtaaatccaaatctctgtggcttcatgcttgtatatgctcacagcagggcacaaaatccaagagaaggtctgtgagccccatccaacacccacagtaattataatcttggcacatcaatggaattt

SEQ ID NO: 91120 - DNA, 1295 bp, Homo sapiens
  misc_feature (1)...(1295): n = a,t,c or g
atgcatcctctctacacctcgaggggcagcatcgactgcccagatgagggacgggcctatcagtgcctctctgggccacggcgacttcagaatgcccacactggcctcgacctgactgtgccccagcaccaggaggtacggggcaagatgatgtctggacacgtggagtaccagatcctggtggtgacccgtctggctgcgttcaagtcggccaagcacaggcccgaggatgtcgtccagttcttggtctccaaaaagtacagcgagattgaggagttttaccagaaactgagcagtcgttatgcagcagccagcctccccccactacccaggaaggtcctgtttgttggggagtctgacatccgggagaggagagccgtgttcaatgagatcctgcgctgtgtctccaaggatgccgagttggcaggcagcccagagctgctagagttcttaggtaccagatccccaggggctgcagggctcaccagcagagattcctctgtcctggatggcacagacagtcagacagggaatgatgaagaggctttcgacttttttgaggagcaagaccaagtggcagaagagggtccgcccgtccagagcctgaagggcgaggatgctgaggaatccttggaggaggaggaggcgctggaccctctgggcattatgcgctccaataatcccaagaaacatcccaaagtggccgtgaaagccaagccctcgccccggctcaccatctttgacgaggaggtggaccctgatgaagggctctttggcccgggcaggaagctgtctccacaggacccctcggaggacgtgtcatccgtggaccccctgaagctatttgatgatcctgacctcggcggggccatccccctgggtgactccctcctgctgccggccgcctgtgagagtggagggcccacacccagcctcagccacagggacgcctccaaggaactgttcagagttgaagaggacttggaccagattctgaacctgggagctgagcccaaacccaagccccagcttaagcccaagccaccagtggcagctaagccggtgatacccagaaaaccagctgttccccccaaagcgggcccggctgaagctgtggctgggcagcagaagccgcaggagcagatccaagccatggacgagatggacatcttgcagtacatccaggaccacgatacaccagcccaggccggccccagcctcttctgacccttccatgctggcccctggcccancangcctgtctgtggggacatcggtgtgaagggaagggactg

SEQ ID NO: 91121 - DNA, 2213 bp, Homo sapiens
gttcctgtggccacaaaagtgcttatggatcatacacagggctgcagcttttctgggaggatggccaggaactgctccagcaccagcagctccaggatctgcgcctttgtgtgcacctccggcctcagtcagagaaggtggagctctccttatggacactcttcgtggtggggaagggcgaacccagcgctgtcagggagaaactggggaaggctggcttcgcagctgcttctggtcctggtggccggccaggtgcggagcgcgcctcgacagtcctgaacattctccacttaacggctgagagccgctgggagcctaacgcctgcaaccgagtgagctcgagtccggctggggtcggaccgttggacctccccgttggccctttgttgtacttcttcgcgccctgggctcgcgcaagctttctctgccacgcgttccaacggccgctcaccggcatcgggctgaacacggtgcgcttcacctcggagttcccactccactccaaggatccaacagcgcacaagctgctcttcacgggcaactacctctgcaagcttcacccccggccccgccacgccccgcagggttccctgtctgatttttgccatggaacagagggcaaggacttaccttctgagcataacgtttctgtagaaggagtggcacaggacaggagtcccgaggcaactctgtgcccccagaagacctgcccctgtgacatatgtggcctacgtttgaaagacattttgcatttggctgaacaccagacaacacatcccaggcagaaaccatttgtgtgtgaggcatatgtgaaaggctctgagttcagtgcaaaccttccccggaaacaggtgcagcagaacgtacacaaccctatcagaacggaggagggccaggcttcccctgtaaagacctgcagagaccacacatcagatcagctttccacctgcagggagggtgggaaggactttgtggccacagcagggtttctgcagtgtgaggtcactcccagcgatggggagccgcacgaggccaccgaaggtgtggtggattttcacattgcactaaggcataacaagtgctgtgaatctggggatgccttcaataacaaatccactcttgttcagcaccagagaatccacagcagagaaaggccttatgaatgcagcaaatgtggaatcttcttcacttacgccgctgacctcactcaacaccagaaagttcacaatagaggaaaaccgtatgagtgctgtgaatgtggaaaattcttcagccagcactccagccttgttaaacatcgcagggttcacacgggtgaaagccctcacgtgtgtggtgactgtgggaaattcttcagccgaagctccaacctcattcagcataagagggttcacactggtgaaaagccatatgagtgcagcgactgtgggaagttcttcagccagcgttccaacctcattcatcataagagggttcatacgggcagaagtgcccatgagtgcagtgaatgtgggaaatctttcaactgcaactccagcctaattaaacattggagagttcacactggagaaagaccttacaagtgtaacgaatgtgggaaattcttcagccacattgccagcctcattcaacatcagatagttcacactggcgagcggcctcacgggtgtggtgagtgtgggaaagccttcatccgaagctctgacctcatgaaacatcagcgagttcacactggtgagcggccttatgaatgcaatgaatgtgggaagttatttagccagagctccagcctcaatagccatcggagacttcacactggtgaacggccttaccagtgcagtgaatgtgggaaattctttaaccaaagctccagcctcaataaccaccggagacttcacaccggcgagcggccttatgagtgcagcgaatgtgggaaaaccttcaggcagaggtccaatctgaggcagcacctgaaagttcacaaaccagacaggccttacgaatgcagcgaatgtgggaaagccttcaaccaaaggcctaccctcattcggcatcagaagattcacatcagagaaaggagcatggagaatgtgctccttccctgttcacagcacacaccagagataagctctgagaacagaccttatcagggcgctgtcaactacaagttgaaacttgttcatccaagtacccaccctggggaggttccctag

SEQ ID NO: 91122 - DNA, 772 bp, Homo sapiens
cccacgcgtccgcccacgcgtccgcccacgcgtccggcttcctgcttcgcctccgcgcctcgcgctatgggacagagcccccgatccgccagcaccacctgaggatccagaaaccgccccagcgatggaagaggatcaggagctggagagaaaaatatctggattgaagacctcaatggctgaaggcgagaggaagacagccctggaaatggtccaggcagctggaacagatagacactgtgtgacatttgtattgcacgaggaagaccataccctaggaaattctctacgttacatgatcatgaagaacccggaagtggaattttgtggttacactacgacccatccttcagagagcaaaattaatttacgcattcagactcgaggtacccttccagctgttgagccatttcagagaggcctgaatgagctcatgaatgtctgccaacatgtgcttgacaagtttgaggccagcataaaggactataaggatcaaaaagcaagcagaaatgaatccacattctagtcctttatgcagtatacaaggagaactgtcctgtaggatattctcttcttgatggtgcagaacccagaattagaagtttgtggttacagcatactctgtccttcagaaaggcgtgattctagctgttgaccccttgcagctgttggaatctctgcaagaacctctgtattcttctaataaattccctcttttatttaaactagtttgactggtttctgttccatgcaaccaaatggtccttgagga

SEQ ID NO: 91123 - DNA, 6662 bp, Homo sapiens
acaggcctgccaccctgggaggagtcatcgcggattctggagaagggcgtgacagaggagatttcctttcgggaagtgtagtctggcagcggtgccccggtggtggcggcggcggtgctgctgttgctggtgatcgtgtggtggtgttagcggcgatagtgctttccactgggctttggcttggtagccgctgaaagagaacaacgctgccgctagcggcgggctggcggcgggctccgacgtctgcgccaagacctggctggctgagcccggcgcagcagcagcagccagggcagcgcggcccctactccctgtcaggtcgtagaggcgagcagggaccagctggtcgccggcccctcgggcaagatggggaaccgggagatggaggagctgatcccgctggtgaaccgtctgcaggacgcgttttcggcgctgggacagagctgcctgctggagctgccgcagatcgccgtggtgggcggccagagcgccggcaagagctcggtgctcgagaacttcgtgggcagggactttctccctcgagggtcgggcattgtaacaagacgacctcttgtgctgcagcttgttacttctaaagcagaatatgccgagtttctacattgcaaaggaaagaaatttacagattttgatgaagttcgccttgagattgaagcagaaacagatcgcgtgactggaatgaataaaggcatttcctccatacccattaatttacgagtctattccccacacgtgttaaatctaacccttattgatctacctggaataactaaagtgcctgtgggagatcagccaccagatatcgagtatcagatcagaatgattatgcagttcatcacgagggagaactgtctgattttagctgttactccagccaacactgatcttgcaaactcagatgcgctgaagctagctaaagaagttgatcctcaaggtctgagaaccattggagttatcaccaaactggaccttatggatgaaggaacggatgccagggatgttctagagaacaaactgttgcctcttcgcaggggttacgtgggggtggtaaacagaagccagaaggacatagatgggaagaaggacataaaggcagccatgctggcagagaggaagtttttcctttcccacccggcttacagacatatcgctgaccgaatgggaaccccacacctgcagaaggtccttaatcagcaacttaccaaccacattcgggataccctaccaaacttcaggaacaaactacagggacagttgctctccatagaacatgaagtagaagcctacaaaaatttcaaaccagaagacccaacaaggaagaccaaagcattgctgcagatggttcagcaatttgctgtggactttgagaagagaattgaagggtcaggggatcaagtagataccctggaactctcaggtggtgctaaaatcaatcgtatttttcatgaacgctttccttttgagatagtaaagatggagttcaatgagaaagaattgcgaagagaaataagctatgcaatcaaaaacatacatggtatcaggacagggttgtttactccagacatggcatttgaagcgatagtcaagaaacagattgtaaagttgaaagggccttccttgaagagtgtggatctggtaatacaagaattaatcaacactgtgaagaagtgtaccaaaaaactggcaaacttccccagactctgcgaggaaacggaaaggattgttgctaaccacattcgtgagcgagaagggaagacaaaggaccaggtattgctattgattgacattcaagtctcttacatcaacaccaaccatgaagacttcattggcttcgcaaatgctcagcagaggagcagtcaggttcacaagaaaaccacagttggaaatcaggtgattcgcaaggggtggctcaccatcagcaacattggcatcatgaaaggcggctcgaagggatactggttcgtccttactgcggaaagcttgtcctggtataaagatgatgaggaaaaagaaaagaagtacatgcttcccttggacaacctgaaagttcgggatgtggaaaagagctttatgtctagcaagcacatctttgcactctttaatacagagcaaaggaatgtatacaaagactatcgcttccttgagctggcatgtgattcccaggaggatgtcgacagctggaaggcatctctactaagagctggggtctatcctgacaaatctgtagggaacaacaaagctgaaaatgatgagaatggacaagcagaaaacttttccatggacccacaattggagaggcaagtggagaccattcgcaacctcgtagactcctacatgtccattatcaacaaatgtatccgagatctaattccaaaaacaataatgcaccttatgatcaataacgttaaagatttcataaattccgagctcctagcacagttgtattcttcagaggaccaaaataccctgatggaggaatctgctgagcaggctcagcgccgggatgagatgcttcgaatgtatcaagcactgaaagaagcccttgggataattggggacatcggcacggccaccgtgtccactccggcaccccctccagtggatgactcctggatacagcactctcgcaggtcacctcctccaagccccacaacccaaaggaggccaacactaagtgctcccctcgcaaggcccacatccggccgaggaccagctcctgccattccctctcctggcccccactctggggctcctccagtcccattccgtccaggcccattacctcctttccccagcagcagtgactccttcggagcccctccacaagttccatctaggcctacgagggccccgcccagtgtcccaagccggagaccacccccatcaccaactcgtcccactataatccgcccactagaatcctccctgttagactaaacgaagtgtctggcatggcaattaatcactaatgaattatgcgaaagcaacatatttgataaccgttgcagtaaatcatgagtagtcgcatgtgtggacatcagtaggcaagtaaccagttttactaatgcattcatcgctcatcttcattgctcatggtatgtcaaacctttggggtttgactcagaaactgctaaccttttagaggctttatatgttgtactgaccaaggtaggtttgtatagcagccctatactttggggatcatttgcctaccatgacatatatttgaaattgctttggacaagttttctaggctatctaccaggtagctcattaaacgtaattcttcagatatgagatagtgggcttagacctaagccatacatatttcttttcccacattctgtttaggatgacagtaattctgttgtctaccattaatgctactacctactccataattgcctatttagctcctcttttcttcctttttatttcataagactgctaggaagtgattttttaaaattaggactccttaagaataaacttttccagaagcacgaggtagtttgcaaaggaaaagtctgcactgtttgctctaaagagcttctcctcattccaatgtgttttgcttcatgctagaagcatatgcaacagtgaataaaagcttctttttttgttaatcagtcaataaatttggctaattagtttcagagttcaaggaagaagcaaaatatcacatctctagaagtgttggaaaaaatataatttctttctttacttatattcacctcatggtaggttatattgaaggctgacatggagaatgtttacttttctatttggcatagctaactacactttgatactaactccagttttactattattattttggttggaaaaaaaattcactttttacgtgctaatttgtaatcttgttttgtaagaatttatcctacccttgaaacaggctcagtgtaactgtatatccattctaggctttcttaataaatcttgaggctatgggataatcacatttaaagaatggttcctgaaatgaagtcagtagaaatggcatgggataagagcagagctcacacttttacagttgcagtatttcaaagtccctatccaggtcactccagaaaagggtattgaaacgttgaaatctaaagcaaatttgcaatttcttaagatttctaaaatttaccagaacagtttagcctgggggttaatagttaagtcttgaggctaagttttggactaccaaggaccagatgattcacatgtaggaaacagccagaagccaactggaattttgtgtgctaactgttcccagacagcagagcaagtattcactgagtaggggtgtcccatgacactatttcatattctacagaagtaaatcaggtttcaccaactgaaatgtctccctttgaaagtagcaaacatgatttgtatgttaacttaactttaatttcctgtgtagtttacacccagagcagatactcataaagtataaagtaaaaacttttaaccattattaaacagagaacttgccatgttgagtgccattgtattgaacttattctaaaggcttatgctaacccatttataattggtaaaaatcagaaaatacaagatttacataaaggtcatttcaacttttaaggttaccagtgattgtataaaaacatcacaatcctaaatcctctcgtatctcaccccaaaccccaaactgggggaaaaaaagttaactctttgtgaatggaaccaatgtgcaagatacatactgcatttttaaaatagtgtctcagctaaatggaaaactgttaagcaaacatccatagtaaaacaaataatcttcagtgagatctttttataaaacttcttgtttttaggattccctttgcttcttcctttgaattctctaaaataggcagctaacggattatatacttcagggtttggctttgtgctaaatgtggttttgtgttttgctgtatttcaaaattttccttctgttaaaggaaaatattgtgaataaccactggtgtgttcttagatcagcacaaaccatgtcaaaaaaaattggagatttttttccaattttccttccactgatcttaggcagtaataaacaatggcatttgtcatctttggcacttgcttttagattatagtcccacagttgcactgccccaattgtctacctttgtgggtacatttttgttctttactcctaagttatttctcatagaacccagcctactctagaatttcagcagtgacattggagaatatttttaatttgctgcagtactatgtcatattattagtatgaatctcatttcccaaagggtttgtattctgctaaaaggagatgccaatgttgaatgaagtctgaaactctagtatgtgcatagtttgacgtgcagcatgcacaccaggccttaagatgggaatgtagcttaatgattttctgtttcccataccatttctaatcttttgtgtaattttctcttaactgattgctctgatattgtaaacacaatagatgtagctctatcatgtctagcataatttaaaaaatcagtgtttttaggatttgggaaaataaactgtaaatgtttatttgataggtaaatatagttttattgtcacatgctaaatattgcatgcatattgactaattggaataaccatttactcaattatggacagcttattgaaatagtattgatttagaaaaagtatattgcatttctaaaaaacatctaccaaggttactcgtctgaatattgcttttagccgtgttttataacatagacgagcagtagggtctgtttattagcaaatttcctatttgttccaatacaaactcactttattctaaagtatattaatgaaaccagttcctgtgatgtaactgtaagccttctcgacttagacttaaaaagtggtcacatagattaattttgtgactttttagtatagactgtagccataattctcaaatatgaaatgggacctaataccagtatgtgataaatgttgatgttttctgtgtacaaacacattttctatgcatgtgtctctgtgtatatggcatatacctagtaagtatgtttctgtaagtatgtgtattttatgtccatttgagtaggtaggtaggttttaaaaatactagttaaaatgccacaagcatgagtgtgattgtatgtgcactgtgtgtatatatataaatatatgtatatgtatggttgtaaatatctatgtatacatgtacttagtatgtgtggtatcaggatattttttaaactgtgataatacaacagatagctttgaatgatctgccataacatgtggtaacaatagttcatttctcataacatatatgaggtatacaaaattttctaactccagattgtagtcattttgagaggtacaaagctcataattaccatgacaacatggtaatgtccatagacatttgtatctgaatccacaagaagatctgaatctaagaaggaattacctttgacaatatttttcggtaagaagtaaaacctctggagacctatctttaagatctctaattggaattataaattatttttggattgctgagctgaatcttaaaaagccaagttgatatacataggcatttttcctctatgggagaagtaaaaaaaaaa

SEQ ID NO: 91124 - DNA, 454 bp, Homo sapiens
  misc_feature (1)...(454): n = a,t,c or g
catcgagatcataggcatcngcgnggacntnccgncgncgcgccgccatgatggacaccagccgtgtgcagcctatcaagctggccattgtcatcaaggtcctgggcaggaccggatctcagggacagtgcacgcaggtgcgcgtggaattcatggacgacacgagccgatccatcatccgcagtgtaaaaggccccgtgcgcgagggcgacgtgctcacccttttggagtcagagcgagaagcccggaggctgcgctgagcttggctgctcgctgggtcttggatgtcgggttcgaccacttgggcgaagggaatggtctgtcacagtctgctccttttttttgtccgccacacgtaactgagatgctcctttaaataaagcgtttgtgtttcatgtcttgaagccaacgtgcaacgatgaaagagtacctgtccaaacttattctcttttcg

SEQ ID NO: 91125 - DNA, 451 bp, Homo sapiens
  misc_feature (1)...(451): n = a,t,c or g
catcgagattcatagcacangcggnggaattcagcagcgaagtccacaggtgaaaaaagagctggctaaatcaggagtgctgaccgggtgtttcagaaaagatactttcattaaatattgtgttacacacctgaaaaagatgccccggatttctgcaatcagccctgcttttatgttgttttaatgagattatgcacagacaacaagcagcatgcctgccaaactggaggtgcatgtcatttggcccctgaaacacctggaaatcctagaagatggcatcagatctgtctgttggcaccctttttactgcagacaactaaaggaatgagcataactgaaaaattctgcatgaagtacattattataggatgactataattgtataacgctttctatttttctctgtttttttcccagnacaggttaggctatcttctctcctgaaactata

SEQ ID NO: 91126 - DNA, 1466 bp, Homo sapiens
cagaaggaaatcatttccaataaaactcaaaatttctattaacatttaaattataaaccaaacattggcaacccacatatatatatacacacacacacacatatgtttgctatggacaaatgaagactgtgaggtcatactttcaaatacaactttggaattagtcacaaaaaatcaacatatattctcagaaattgtaccatttcctttggtctacaatccacgctatagggaggttttaattataatattaaattaatgtccccatttacccctaaaagtaggttctagaaaactgactattaggattgaataacaaggctttaatggctcaattttcttatgattatacaaacatataaatcttgaaaaggtaacgccatttagtaaaatccataaaaataacagttttgccacagtgcagagaaaagttcattcagtttgattccccatgccctcgacaagcagctttctgattagagctggaagacacaggctgggtgcagtgggcgaccccgtaggtcccagctactgggggagggctgaggtgggaaggatcacttgagcccaggagtttcccgaacagtctgggggcaacatacccaagaccctgtctctttttttaaacttggaagacataaagtctatacattctacactgaatcatgaatatactacggagagtttgtagaaagtaaactttaaaatcccacactccaacatcatatatgtccataagcaggatttgcaattcacttcatactggaggtaagcaccccagctggggtcctcttgccgcagtggtcaggccgtcagagctgaggcctttcactgcaacaagggaagtagtcttcggtccgaaacaggacgggggcttcgtagccggcttgctgtggcctcgagggagcagacttgctaaagagcgagggcacgttcatcgtgtgcaggagcttcttgaacgccctggggaaggtgcccagctcggcctcggccttggtgacctgctcctccatcctggccacgcggccccccaccatcctcacgaaggcctccagccggtcgatcctgctgtagatgcgccgcatctcggcggccttcgcgtggatgcgcggcacgccctcgctgacgacgtgggacgagtcgccgcgaagcatgtccagcatgcccacgaactcgtccactctggtaagcaggtcctctaggctcgcgtccagggcctcgacctcgggccgcgccccggccccgggcagcaggcaggcggcgtagcccgcagcggcgcggcgaagcagcggcaggtcgcggcccggcgcgccgtcctccgcgccctcgtcctcccacggccccgaggcgctgctgtggctctgggaaacagtgccactgtccccgctccaggcggcgccctgcggctcggcctcttccgcgagcccctccggcagcgctccgccatccgaaaagctaccctccat

SEQ ID NO: 91127 - DNA, 972 bp, Homo sapiens
ttttttttttatttttttatttttttttcacgcttaattcactttatttttcttgtataaaaaccctatgttgtagccacagctggagcctgagtccgctgcacggagactctggtgtgggtcttgacgaggtggtcagtgaactcctgatagggagacttggtgaatacagtctccttccagaggtcgggggtcaggtagctgtaggtcttagaaatggcatcaaaggtggccttggcgaagttgcccagggtggcagtgcagccccgggctgaggtgtagcagtcatcgataccagccatcatgagcagcttcttaggcacaggtgcggagacgatgccagtgcccctgggtgcagggatgaggcgtaccagcacagagccgcagcggcctgtcaccttgcaagggacagtgtggggcttgccgatcttgttcccccagtagcctctgcgcacggggacgatggagagcttggccaggatgatggccccacggatggcggtggccacctccttggagcacttaacacccagaccgacgtggccattgtagtccccgatagcaacaaatgccttgaacctggtgcgctggccggcacgggtctgcttctgcactggcataatcttcaaaacctcatccttgagagaggcccccaggaagaaatcaatgatctctgattccttaatgggcagggagaagagatagatctcctccagggacttgatcttcatgtccttgaccaagcggcccaacttggtgacgggcatccactccttatcctcggccttgcctccgcgagctccgcggcctcggccccggccccgtccacggccgcgaccccggccccgaatgccactgccgaaacctccgcggaagccaccgcggttccccatcccagggccaccagggcctccgggcccccccgctgcaccggcgtcatccgccatttggtgttttgtccccacgcgtccg

SEQ ID NO: 91128 - DNA, 897 bp, Homo sapiens
  misc_feature (1)...(897): n = a,t,c or g
tgaagcctccatcgactccccctcaactttgagactgtagagtcaggtccctaagtccaccccaggggctggaaacctggagttcagggcccagactttggggtccgggagctgatggcccctctctcccggctccgcccgcagactctggctcctccgactacacccgggggaacctagtccgcctggggctggccgggctggtcctcatctccctgggcgcgctggtcacttttgactggcgcagtcagaaccgcgctcctgctggtatccgcccctgagccccaggagcactgcagcccgagacttccaacctgagtggcggagaagctgggaccctgggctggactgtcctttcctgcagccccacagtcctgctggctgagctccgcggaacggtccttagaccccgctgtgccctgtgctgtagcttctttccaggcctttcccaaggagtagctgaaaggaagacgcgattagtggttaagacttccaagccagaagacagagggttcgaatcccagcactgccgtctactcactgtagtagtagcagctacagaaaggtagtagtgagacgtgaagccagctggacttcctgggttgaatggggacctggagaacttttctgtcttacaagaggattgtaaaatggaccaatcagcactctgtaagatggaccaatcagcgctctgtaaaatggaccaatcagcaggacatgggcggggacaataagggaataaaagctggcgagcgcggcaccccaccagagtctgcttccacgcctgtgggagctttgttctctttgctctacacaataaaatcttgcttgctgcttaaaaaaaaaaaaaanaaaaaaaaaaaaaanctcgagggggggcccggtaacccatttcgc

SEQ ID NO: 91129 - DNA, 471 bp, Homo sapiens
gactgtggtggaattcaaagattcttatatgttttaatatataatatgtattaataataaaattttcctctgaaggctacaaatggaaagctagacacacaatatctgagaccaaataagcatatctagattcagctggaactctcgatttatgttgaacttacataggccatattttttgagaatgcccatgagtggcattctaactatctgcataaaagtacagacaggcctcagagagcatacatgcctttcccccaataaccctctcctatgttacaatagagaacataaaaaatgtatatctttgctaaatacatgggacttgtataagtgccactttacatatattcggtcaagggaaagataaaattccatactaatgtgccctagagttctcctgtttcacataataacagcattcggactcaacactggccaagagtgcctagacgaggaatctaccaatga

SEQ ID NO: 91130 - DNA, 1954 bp, Homo sapiens
  misc_feature (1)...(1954): n = a,t,c or g
gcacctcacagatagttatttgttgaaggatatacaaggcctgggtttactctaaggtttctgcacagagaccataacttgtgaggcttctctgaagctcattgcattctatattcattgcctattttctgatccttctggccactgccggtgtgattccccagcaggccctctccatcaatatccctgtcccagaaataggaattgacggtgcacaaataacttcctggaatgcaggaccattcctaagttatcactaacaccctaccaagagactgtatctagagacattaacctgaaatctaggactcagcagcttctctccacagggctccttcagtggtagatgtcccctgtatggtgtggccaccctgaatggctcctccctggccttatcccgtccctcagcaccatccctgtgctactttgtagctggggcctctggcctcttggccctctactgcctcctgcttttgctcttctggatctacagcagctgcatcgaggactcccacagagggtgctataggggctgcgcattgcactggccaatctcaggctatagccgtcttcctggtcttggtgtctgcctgtatccttcgatttggcaccaggtctctctgcaactccatcatctccttgaacactacaattagctgttctgaagcccagaaaattccatggacaccccctggaactgctctgcagttttactccaacctacacaatgctgaaacctcttcttgggtgaatttggtattgtggtgtgtggtcttggtgctccaggtcgtgcagtggaagtctgaagccaccccataccggcctctggagaggggtgaccctgagtggagctctgagacagatgctctcgttgggtcacgcctttcccattcctgaagaataagcggagtgcttcctgcagccgaagactccatgcccaagtgcctgtaatcccccccctcaaggccctgtttatgttgggagtcttagttttcctttcgttggggggtgggggggaaacataatgacaggcccccctccacctcttcctgcagctgtttttgtaccaaaatattatattactgtcttcatcttagtagtgagtttttgatgttaaagtacaactagataggaggaaggagtgaaggctaagcagacatggactgaaacttagaggtactgttaggcagctgccctagggatgactgctcctttatttgttgttaatgaatcttgacctccttgtgtgaccctggttgttactccattctaagattggcgtttttttttgttttttttttttgtaaatagagacaaggtctcgctatgttgcccagcctgggctcgagcagtgctcctgcctcaccctcccaaagtgctgggattacaacagggtgtgaaccaacacacctggctccccaaggttcagtttttatcctcctcttggagaggtgagtgacttgaggtcatttcttcacaagctccggtaggcacccacagtattgtcaaagagttttgtgttagggaagtgtccagttttgtccaagaggaaatagaagcgtcggcctttgactttcagaggtagcatggcagggacttcaccccggtgggccatgcaagatacctgcttcaaaggaactgtgaaatgggcccccaagccaaagggggcatgagtggtgagggtcacctgctgccctccagctcgaagcaccactgagcgcaccaatgcctacgacgaggaggactgcgtggagatggtggcctcgggcggctggaacgacgtggcctgccacaccaccatgtacttcatgtgtgagtttgacaaaaagaacatgtaaacctcaggctggggctgcccattgggggccccacatgtccctgcagggtgnnttccngcnctttgcggtagnctntcgattaatggtctccaattnggttcnnncgggggggcgcg

SEQ ID NO: 91131 - DNA, 794 bp, Homo sapiens
tttttttttttggttatttttttttgaatgaggaagctctcttcatttatttcatatgaggatgaagaagaggattatgtgatcacaggaatgttgcatgcgggataatccaaagctggttatctccaggccctcactctgccaagagatctctctggaagaagcagccagttcacagatgccctggatccctccgtgcccaatcataaaaaagtcatgaccgtccctatcttgccaatctgccaggactccaaggggaaaaagcggataagtatccggtcctggcccagggctagctccttggtgagaaactcaaagaagtgggcgctgtggctgcggttgtcctcggcggtgcccactacgccgatggaggagatggacagctgcgcgcagggctcggtggacccgctcagcgccatggccaggcccggccgtaccgtcacgttcacgcggtccgcaggtttgcccaggatggaggcagcggcggcgcagagtcgtttctccagccccgcgggcactcggttggcgggcaaattcgtgtccagctccaggaacggcatggcgggcagaggaacggaaacagctcctcagatgtccgtgcgctggggcctttccaggacggcggcgcccagtcgtttctgggtcagggcgacgcctggaactgggcagggtccctggcaccgggatcccgaaaagcagacatgcttctccctgtccagaaggttccccttcaccttgcagtcggccccctgcatccgtgtcctcacgaaatcgtcgacccgggaagtccggtc

SEQ ID NO: 91132 - DNA, 2023 bp, Homo sapiens
gcacgaggagaaacaataggacggaaacgccgaggaacccggctgaggcggcagagcatcctggccagaacaagccaaggagccaagacgagagggacacacggacaaacaacagacagaagacgtactggccgctggactccgctgcctcccccatctccccgccatctgcgcccggaggatgagcccagccttcagggccatggatgtggagccccgcgccaaaggcgtccttctggagccctttgtccaccaggtcggggggcactcatgcgtgctccgcttcaatgagacaaccctgtgcaagcccctggtcccaagggaacatcagttctacgagaccctccctgctgagatgcgcaaattcactccccagtacaaaggtaagtcccagctgctggaggggttgccacactggcgaggagatgtgagagatcgtggccatggaaggccctggcagccatccctggagccctcactccctcccactctgtgctttccctccctctcctccttctcctcctcctggccctcagcccagcatctcacaccctcagttttcaatccctggtaagattgctcaattctgttttgttgtgtggatttgagtttgattttggtagaagtgtagttgtgttttatgttcaggtgtctcttgatcacagtaacccatagtcccccactggggggacggtgggggaagactttgggaggattttacccagaatacttgccgcctgctttttgtcctccaggaaaccagaagcccgggtaattaggtaggccggggagcagcgttgagtcagatggaatgcaggagtgggaggcctgtgctgattagcccaagccctttgctgttacagaatgtccccaaaattgctatatgaaagcaacccttcgattcacatatgataattttttatttctttttataatgtattttacaggggacatcagcagccaccagcatggtggggtctttgttggggagtgggggagtcttttgtaaatcaagtaagaatccattaaagaaattaattttaaatgtgcattacctggttacataaaggactctagaacaacttaggttcttttgggactgttgaaacattgtctttaaggacagaatgtactgggtgcctttctctgtactctgaatatgcatgtgtattgcggtggggatgggggagttgggggccctcacttggtccttctctgttgtttttttccaggacaaagccaaaggccccttgttagctggccatccctgccccattttttcccctggtcctttcccctgtggccacagggaagtgtggcctgaataccccaccccggctcctctgcacccagagctgggggccacctcagaagtgtcatctctctctgagcacgcattcccctgcagcagtcgaggactgagcagattgagtgatgctggggcagagaggcctgggaggaaaggtgttcagccagtcgtttgtaaggcgctcgtcggcacctgctgaaacgcccccacctgacagccccatcctcaaagactgtcttaattactcatggcaggttctagagacttaaggggaaaagctgctttcaaggccaccacatgtctgtgctccccaaccagctctatctgccttgtgttcattttgttattttgtgacgtgagactgcaaagaccaataaaaacatattttataagaacaaaaggcctgggtgcctacccgtgtgggggcactgtgggaagcctttgctagggtgtcttgtgctgtgtggtttgttttgtttgcccctttattttgctttgcttacccagtcttcccttactcttggatgcttcttaaccctcaggcaaacctgtgttccccctgtattcaggctctgctttaaagcaagccatgaggctgttggagtttctgtttagggcattaaaaattcccgcaaactataaagagcaatgttttcagtcttttaggattagaagaattacataaaaattaataaacattttcaatgatggaaa

SEQ ID NO: 91133 - DNA, 735 bp, Homo sapiens
cactgtggtggaattcttcccaaccactttcttcttttcctcttggcctgccaattcatctcaatacaaggtctaagtgtccacagctcatctctttcagctgcgtgtctcgtccatggaaacgggagcctctgtgtctcttatgcattgtgtttgataaatggacgactttaacttacttgatgcccagccttccaatttgtctcctaccaaaccaaaagtgctgccttctattagagtccagatattagactgaacagttaatcagcagcaacttaggagtgagtctaggacagcttttgacaatatagttagtaaccagccagcttgcttgccctctaggataaaggaaaagcagagactcttttaaagtgctctcaggcaatgagctctgctccaggataattaagccaccacttgtatctgcaaggctgacttaatgagcttaacccgtgactaacctgcatcctttcaccaattcaaaacacataaaatgagccaccagtgttttacaaagttgaataaagcataagagattagtctgccctcaggggctggaaggggcagaacctgaaaggacactgtgtgctcctgggctggttcgagctgaggctgtgctgtttggaactctgctgtgtttgttgtgtgaagcacagtctgtgtgcttccttttcttgtcccagacctttgctgcttaagctgtggagttggtctggtctgctcactccaacctcc

SEQ ID NO: 91134 - DNA, 735 bp, Homo sapiens
  misc_feature (1)...(735): n = a,t,c or g
ccactgtggtggaattcggcaggggtcctgacgagttcaaactcagcaggaatattgtggtgggcaaggggttctccatgacctcaggagccctagttgctgctactacagacccaggctgagttgccttggtggtcagtgattctcaatgcagcccacgaagtagatgaggagggcagtgtagatgacattgaagaaagagggggcagaaacagcacccgtttgctgatgtcttagataagacttttcctttgtagttgccctctttggcctttgtggacagaatgtccccgacctgtgaagcctgggatgccatgtccttgcctaatgcccagctcatgccatgtgacttgggcagttcccagagccatcattttctctggctgatgactcagcttaccttgagctgagattaatggaacatgccattatgggatggtgtggcacgaagggacagtgggggagggacacctttacagttcttttgcatttggtctaagcatcagaatcataaacagcttcctgaaactccattggcccactccatttcttgctgccttctaaagacccaggatggagatatttatctagcttgttccagagacagtactagtctcttctgagggggaccagagaaatccacggncagaggagtgacaaggccagagaggttgagccaggactagaggacaaggctggcagctgagctgtgacagaggtgactggaaccctttt

SEQ ID NO: 91135 - DNA, 740 bp, Homo sapiens
tactcttttgtaattctaactattctacaaaatgggaatcttattatatgttgaaacaaatggtagttttttgtccttgtcttcagttagtcacctcttaggggtttagcctctcaaaatgcaatgtcatttttagaactgcatcaatttcctgaatttttatgtaaaagatcatgagtgaagctttgagaaggaaaaaaagggaatcccagaagtgggcactggggaattagatggccccataaaaatatgaactaaattcgatgttgacaactttgcatatcctactttcagccatgtggtatatctttgcactacctgtgagacagcctgacgccacacttgaccttcacatggggcatgagtaccttcacctattcctttaagcctttgccaatttcatcagagtccagaccatgaagcagaaacaggacatactcacacacaccttattccaaaggaaaaaacactaccttcctgaaagcaggcagctattttctaagtcttgcgaaagaagaaaataatgatgtccactccattctttccctttcttttacactgttaacttcttaaacatcttgggacctggctggcaagttgggtatagcattgtccaagaggccacattcgtaactgatgtgccctaagtgtatctcaactgcaagagacaggattgaaccaaaaccccttccagatctaaagctgtggtctctgacatcagattcaacgcaatcatcccc

SEQ ID NO: 91136 - DNA, 1017 bp, Homo sapiens
tttttttttttctcatgtgaagagattctttatttgattttcatcacctttcaatgaaagagtgggtcctgtcagcactacgtaaaatatatatcttaagagcattaatttctttttaaatgaaagacagtgaagaaagtctgtgttagaaaaaggcataatagaagcttggttaaatgtaagcaggtttctatcaagtaaagaataaaagtaccattactccattaaaccagtaataaaaacatactattgtggcatgttctcaaaataggttgttcataaaaggtgaaggcttgttaggtccttttcttctttttaggtggaccaaatcaacatggcggtggtatctaaccatcctggggaagaccatgaggtccaaggggaatgaggaaggcatgggttgcctaacctcctatggctcaaaggaggttcctgggtaggaaatacccacccctgttttcccagaaggtaagagagatacataacagtttccagatacaactaacacaagacctgtgagggtcatggctctggccccattaagtctgggtagctgacataactttagttctcttgggttctttctctggtctcagttcccttagcgctgacgatctggcaggaccgtagtcactgggattgggtattccaaggcattgcagtcatccaacaggaataccaaatctctcctgcagaacgagttcatgatggtgtacagcttccgtgctttgtccttcaaggaatctacctgggccactttccaacacgggggcgaggccacaaagtcccgcagcttgtccagcacacagtaattgtgtatgtccaggtacagcctgggcaggtatctcacacatggctccgagggctccgagacctgcaggaggttgaagtcgcgggtgatctcctggctcagggcccgcatgcgggagtagcaggtcgggggagtgggccgcgcggcgggggctcccgccaggagcagcagcagcacgggcagaggcccaggcgtcctcatggtgc

SEQ ID NO: 91137 - DNA, 1146 bp, Homo sapiens
  misc_feature (1)...(1146): n = a,t,c or g
tttgacctcgagaacatcagcacaggcggtggaattcgtttatttttttccatgttagcagcatttttttatagttctttgtttgaactttatattttgaaaaggcaaaatgtaaaatcacaaggcaacttactatttacaaggaacagatcaataaatactaatctaatgcagactaaataaataccaagagtgaaaatatggttccagttggggtttatcaaggaatgcttcctgaataatgtaaatttagagttgttccctgaaccttctcccccaagtatatacgctatccttattaagaagaccttcccacggtggagcaaaaatggcagagtaaagaatgccaaaataataaactggcagaaactggcaggatcaactttattaaaactctggaaactaatgaaaagtttacagtaacctagtgaatgcttaatcaaggggaaaaacacctaaatctctctaagaaagctttgtagtgctttatttatcctggccccatccctcactccctagctcagtggcagtcttgaagacaacagagtacattccaggtataggtttctagtaccagaggaagtggaatggaccttattttcaaagaactgtggtcgtttgttttgacctgtctgttggctttctgaaggactagctcaaagggcttgctttatttcagcttactgaaagaagagagttttcaatttcaaaactctcccagaattgacataactacactctgggtcatttgttaaaaacatttaaaggcaaatgcattagctgctgctgcctggggcaagggataacaggaaggacaaacaatagacaaaccagaaagcttgtgagcaaagtctcgggaattagacactttgaggaataaaggctctaaaaagctcccacatgtttctgggaatcaaggccccacacacagccagagctgggcatatgctcagaaaagacttgagaaagtcctaagctgtcaagtctgcctaaccttcatgttctgtacaagtaggaggagaaggctaaggcagagttgtaaactgtttggctgaatgttgaggtgtgccctagcacccacacagagcccatctgcanatacttttgctttttggggtttgttggtntgnncccaggtgttaaggc

SEQ ID NO: 91138 - DNA, 1665 bp, Homo sapiens
caaggcaatcaagaataatttattatggccttgctaatacaaggttccaaaaaatgactggttttgatataacgtcatggtggctaggtaaaaacatacatgttccagaaatgcacactcaagtgtgcaggagtacaatcacacgctcgggatctgctttcaaattcctcagcagagaaaaaaggggaaaaaaatgttctcacaatcagtaattgctgaaggtccactctgcacccccactgcaacaggcaccagaggaacagcggtcagtcttgggcacgttgctgaatcccatgagtgatggccaattcaggaggcgaagcacccagcaagttccccaccacggcggacatggaacacgcacgagaggcagagacatgaaggacagaaggatggaaggaagtacggaatgcatattttaacataagaattcgcaaagcaatgcagcagccctaaccacaatgagaacgcatcagccttgtattcttagatctcacagcaccctgtactgaccacgtcgctgttcactagcagccttggtactcttctccttggcaattcccagatacagtggagaggtcggtaggacacaggagctggctggcaccgagaggctctgccccatgctggggcactgctgagccctgactagcgcggccgggttgatctccaacacggcaatcttcccgccaaagagggaggccagcaagcacagcaccttttgatccgcagtgcggttcctcagggcacacgatccggccagcaggatgctgaggctctggaaatccttgtaatacaaagcagcttccacttccaggtttgccaggttaaatacgaataagcccactgagcttccgatccacacacatcgggtgttctcagaagaaagacatccacatgcagaatttgggatgagtgagagatcacagggtgcaagtctcagtacaggaaatgttacttcaacctgctctccttttcccagagcacttgtagagggaagctggctttcttctggctggctgcacagcccagacttaacccttcttgtggagaaagtctctgtcttcttccttaggtcaacccgtgccacacgacgataatggtgtccatccatcaaactgaagatccaaagctacaaaagcaaagaagatgcagacatggcgctgcagcaagggtcctgacgcagaagcagcaacaccagaggtggagcagggagggcagacacgtcacaggacgggccctccacggcctgcagaggctcccggcacagctgtctcctgccttcaacatcccctctggaggccctccgtacggcccacggtgtcagagcactttcacacggctggcacatcagctcagggcacatgggcaggatcctactgtgcaggcctccccaagatgctcctctgggaaccccaggccccaggctctctgcacacaccccacagcttcacagccaagagcacgtcccacatgccctgggtgagaagacaaggcaacagcggtcaactttgtcaaaaggaaaaaaaaaatctaagttttcaaaattatctttttcaaattataaaaacagcaactttatccaggctttgtgaaatgaacttaaaaggctcacctaaaaaatgtttgaaaaaggccaacatcttcagaattcctccgctctgg

SEQ ID NO: 91139 - DNA, 358 bp, Homo sapiens
cttctcctcacctccatccattctatgcaccattttttcctagactgtggagctgaccctgtcacttcctgtccttcagtggcctctgggtatagacagacatggtgtgcctccctctctcagctccaacctctctgacattctctccattcgggcccgagtcattcatttgcaaatccgccataacatccccagcagtgctgggtgcagaatcaacttttaataatctccgggaatgtgcgcactctcctgactctgggcctctgctcaggctgtcccatcccagagtctgacctgcatttgcctagccttcatggccacacttaaggtgaccacctctgggcatcttcctggggtc

SEQ ID NO: 91140 - DNA, 1031 bp, Homo sapiens
ggggtccacaatttccagtgcaattaccttacctactttttggctggactcagtactctcattctaccttgtgtgttaggtgttcgtgtactcagtaatgttcggtggtcaaccgatatttactaaatgccccttattgtcaaacactgtgttacttactggggaaagcgaacggtttaaaacatggcccatgatgtcagtaacctctttcttgttttttttctccccaacttggttctgaattcccaggtggtagaaatggccttataattctttggtgttctctgtgaatcctggcttcttgcacatagtagctgctcaagaaatggtcattgagccatattagttgagtaaaccagttttcttctgattgaatttgaacagcaaagatttttagctttcttctttggtatttaaataaaagtaatgttatttgttctatttgccattatattgggatttttggtggtacagaaaggaagatttttcccattacccctaccatgtagtcgttgggcatttgttgtttggaaggcatggtaaattagcacaggtcaggcagtcaattttattgagtacctgtaggcactgtgttggcctcctcatctggctatatagagctaccctggagatcctcatgcatagacaactgtctgactgcaacctctggacaccatcagctgtggctttcatcaagttcccaaaggcatccttgaccccagaggttaagtgaatgaatctcacacctgtctccctgaaagatttctaaaatgtcagtggcatttggacaggttcacagctgctctgatccacagcattttctagaacttccttttacctcgatgggggaggaggaatgcctgtgaacttgagctgaccttcaagacgctgtagggctcttgggcaaattatggacaagacctacattggtaggataggcccagaaattcagcttgctaataaatagcctctggaggagctcacagtcgagtcataacatttggcgtttgcctggactctagccccggccc

SEQ ID NO: 91141 - DNA, 4244 bp, Homo sapiens
ttttttttttttgatttttcttggcttttattagcatgtgttaaaatcatattatccaaacactaccagaagaacatgtattgttctgaataaagtgcttaaagaaaaaaaaatgcaacttattaaattggacattcttttctagttcataaattttggattacaatcagggcacaaaaggagaaacagaatgcagtattagagcgagaagcttagttaagaacttgggtgtagacacaataccatgtccactcttcccacttccttgctgactgaacactgcacctgcataaagcagcaaacagctttgtttcaataaatacatttcccttcattcaaatcagaaaagttaattatagtaaagcatttttaatttgaccatctgtttatacccacaggcaaaatttatcccacagagtttaagtgtgaaagtgttatttcattgggccttcagctttctaatgctatttgggttcaagattgtctcagcaattcattattggtttctttatatttacctagtactatttaataccaacactatagtgttttgtgttaaaaatgccaaccaaggatattttcacagttctagaaacgagtgggcctgaggctttcttcccaataaactaagttttcttttaactgggtttctcacattagcactctgatatctgcacaaaaccaagtcctgttgtgacagattttaaaatcggtgatgttctgaaaaaatagtaacttggaagtctctgtgtttgaatcttgggtggtcatgttgagagcaggaaaaattgcattaaatacatttttaaaacattcatttgcaaccaaacatttaaatcttccaaggaacgtgcagggtggtgatagggcagctgcagtgtgagcaaccccatcaggagtggctggtgggtgggcttggagctccatcagtggcacacactcaccgcaagcttctggaccgcagaccttgcatcctggttgcgaagcctttgaccttcttttagcaaagagaaaaggtaggctgcttctaccttcaaacagtcaagagcaacttctgttgagttcaccttgctgctgacccagaagttggagcaggggccaagctaaggggtgcagaaaggctaacagtacttgctgtaaaaagaagtcatcttcagtcatcctggggagattcccttgcccctctctcaacttgagtgcttttagcttcatgcaggaaagattttagttgcatcttttattaaatttcaatctcgttttacaaaagcataccaactagcagtcctgagcaactagtatgaaatttgctgaatacagctaacagaaagctttctaaactatcctgttctttgtttctttctacaggggtgtctgtagaatattctttagtttcacagtgatatatgcctgtttcaggaagcacaaggtattctgtttctgggaagtgatgacctacttttagtttgagcacaagtttccatgactggttctaaatctggccagatattgttaataccaatgacaggagttagggcaattgggaggctcttggtccccagttcctgtcaagggtaagcccatctgggtcatggctgggctttcactatcagtagttatatttccctttgatgcttcaaaaagcctatggtgaatctgttgcctcactttacttctccatttgacttgaaagcctgagaacttactgaattaggatgaaaaaaggttttgtacctgctaatattgacggcagtaagatgctagcttactattttgcccagcaccatgtatagtgcctgttaatcaggccaactatagccaactttttctttttttttctttttttttatataaagaaaatctatgtaagttgaggttcagaaatgcatatattttttacttacaaatattcatctgaccaaaattcaacataacctttatggaacacttaacaattgtttggttgttaaaaggaacatttcattcaaactgtatataattcaggagaggttttttatacagcaagcaatgcttaaaccctggggaaatctgtagaaaagagattttcacacaaaataaggaaaaggaaaaatctgaggtatccctcacacacacacatccattcattctgggcccatggtacgtggcacatacacacggcatggcctggtgtggttcacacaggacatattcattctcactccacaaagtgggctggcagcatagggcaaaaattggtagggtccaaaagggaaaatgaattgattgttctaataaagagtccgagtagctcagaaaaaaaaaaccaaaacaaaacacaagaagtcttctgaggaaattactacctcaaaaaaatgttctcaagatgaatttgaagaatctaagcctactaaactgcttttgcaaaacagctccctgcagtccaaggtgacttgtgcaaatagaaaggaatccaatgaggctggttcctgtacttccttaaacaaggaggtgggatgctcgcaggtgcccaggggcactcccatcatgccaggtactgctgcagtgccatctttgccttgtcacaaaggtttgaatctggtgactgactcagtttgtgtagaatatctacgatgcccatgtctcgtaatttatcctggcgttcttgtgaaccttcctcttcattccatatgaggtttgatatacaaaacatggctgcaagctgcagtttaacatgtgaatggcccatgtaatacttgattttctgtaggatatcatcattggtcataataagatcttttgctgttgtcccatccgctatgttggctaagatgcacagtgtctgctctttgacctcaatgttatgttccccttctagaataagagtgacggcttgcataatttgctttccatgagtactcattattttatctatatgaggacgagtggagaggagatttctaagaagtcccaatgtcttcatcagcacattcaaatctgaatctgataataaccggaatagctgttcagtactcaagcttcgtaaaatatctgcttttattttttgttcagcctgaaatgccatattcattaaagcccaaattccattcactcgtaaagcaggattttcactctgagttaatccacaaagtagctctacggctcctgattccaaaattggctctttgcttggagaaaattcaagaagaagattacacagcatggaagatgctaccactaggatttcatctggtgcattttgtaaaaccttcattaaaggtttccaaacagcatgatcctggaaactggttcgaagctgctgcacagatctggataaactgtgcaaacatctacaaagaataatcaaaattagcttcacaagaaatcaaaacttttacttttcaaacaaactggctggcattttacaatgactaatgtacacttcaagcatatctacattgttaagtgaactacatcagaccactttatggggtttggaggccaggctctctgttagacaatgttatatactctatgaattcacctgagcagatttttgaggaacatttgtagtctgtgtttactcagtgaaggaccagaaaggaaacaggttaaatatatggcaaaaggtttttattcagaccatttaaagctcatacctgacggcagctaaccgcaccttgacactagactcagacaagccagtcacaattcggtccatcatattttcagtctcaatgatctggagaaaaaggttaatgctgcataaataacaacatgaaggtgacaaacttcactgcttgtaaatgcaagtatgttaacatccattaaaagtttaacgttgtttttggcaagagtttttacctctcaaacaatcatcttgcgctgggggcgggcagctcatcagaaaggtaggtctagcccactaaggacctgccaggctgaatgacaggcgtaaggggcaggttatgttgtttatttttaaagacatttaacacaaaaattaaacggtataagtactgcagaggggttatgtaaatactcttgccactcataacctacacccgtcgggggggcccccagcccccaatcgccttatacgaacgcggacgcgttccctgcccgcctgttctacagggcgcagggacaccacacagtggcgcccggaggcgcgcggcgtcctagcgcgcccgcctcccacggtcgaacgcattggcgccgggcctccccgtcgttcgtcggcgtggcacgctgcctggcgcgggccc

SEQ ID NO: 91142 - DNA, 3368 bp, Homo sapiens
tttcgtgcggctcgcggttcctccaccgcctccgccgccgcatcctccgcttgtgctaccgccgcgggcgctgggccgctctgctggtccggcatgagaccgtgagacgagagacgggtcggggccgccgacatgtttggccgctcgcggagctgggtgggcgggggccatggcaagacttcccgcaacatccactccttggaccacctcaagtatctgtaccacgttttgaccaaaaacaccacagtcacagaacagaaccggaacctgctagtggagaccatccgttccatcactgagatcctgatctggggagatcaaaatgacagctctgtatttgacttcttcctggagaagaatatgtttgttttcttcttgaacatcttgcggcaaaagtcgggccgttacgtgtgcgttcagctgctgcagaccttgaacatcctctttgagaacatcagtcacgagacctcactttattatttgctctcaaataactacgtaaattctatcatcgttcataaatttgacttttctgatgaggagattatggcctattatatatcgttcctgaaaacactttcgttaaaactcaacaaccacactgtccatttcttttataatgagcacaccaatgactttgccctgtacacagaagccatcaagtttttcaaccaccctgaaagcatggttagaattgctgtaagaaccataactttgaatgtctataaagtgtcattggataaccaggccatgctgcactacatccgagataaaactgctgttccttacttctccaatttggtctggttcattgggagccatgtgatcgaactcgatgactgcgtgcagactgatgaggagcatcggaatcggggtaaactgagtgatctggtggcagagcacctagaccacctgcactatctcaatgacatcctgatcatcaactgtgagttcctcaacgatgtgctcactgaccacctgctcaacaggctcttcctgcccctctacgtgtactcactggagaaccaggacaagggaggagaacggccgaaaattagcctgccggtgtctctttatcttctgtcacaggtcttcttaattatacatcatgcaccgctggtgaactcgttagctgaagtcattctgaatggtgatctgtctgagatgtacgctaagactgaacaggatattcagagaagttctgccaagcccagcattcggtgcttcattaaacccaccgagacactcgagcggtcccttgagatgaacaagcacaagggcaagaggcgggtgcaaaagagacccaactacaaaaacgttggggaagaagaagatgaggagaaagggcccaccgaggatgcccaagaagacgccgagaaggctaaaggtacagagggtggttcaaaaggcatcaagacgagtggggagagtgaagagatcgagatggtgatcatggagcgtagcaagctctcagagctggccgccagcacctccgtgcaggagcagaacaccacggacgaggagaaaagcgccgccgccacctgctctgagagcacgcaatggagcagacccttcctggatatggtgtaccacgcgctggacagcccggatgatgattaccatgccctgttcgtgctctgcctcctctatgccatgtctcataataaaggcatggatcctgaaaaattagagcgaatccagctccccgtgccaaatgcggccgagaagaccacctacaaccacccgctagctgaaagactcatcaggatcatgaacaacgctgcccagccagatgggaagatccggctggcgacgctggagctgagctgcctgcttctgaagcagcaagtcctgatgagtgctggctgcatcatgaaggacgtgcacctggcctgcctggagggtgcgagagaagaaagtgttcaccttgtacgacatttttataagggagaagacatttttttggacatgtttgaagatgagtataggagcatgacaatgaagcccatgaacgtggaatatctcatgatggacgcctccatcctgctgcccccaacaggcacgccactgacgggcattgacttcgtgaagcggctgccgtgtggcgatgtggagaagacccggcgggccatccgggtgttcttcatgctgcgttccctgtcactgcaattgcgaggggagcctgagacacagttgccgctgactcgggaggaggacctgatcaagactgatgatgtcctggatctgaataacagcgacttgattgcatgtacagtgatcaccaaggatggcggcatggtccagcgatccctggctgtggatatttaccagatgagtttggtggagcctgatgtgtccaggcttggctggggagtggtcaagtttgcaggcctattgcaggacatgcaggtgactggcgtggaggacgacagccgtgccctgaacatcaccatccacaagcctgcgtccagcccccattccaagcccttccccatcctccaggccaccttcatcttctcagaccacatccgctgcatcatcgccaagcagcgcctggccaaaggccgcatccaggcaaggcgcatgaagatgcagagaatagctgccctcctggacctcccaatccagcccaccactgaagtcctggggtttggactcggctcctccacctccactcagcacctgcctttccgcttctacgaccaggggcgccggggcagcagcgaccccacagtgcagcgctccgtgtttgcatcggtggacaaggtgccaggcttcgccgtggcccagtgcataaacgagcacagctccccgtccctgtcctcacagtccccaccctccgccagcgggagccccagcggcagcgggagcaccagccactgcgactctggaggcaccagctcgtcctccaccccctccacagcccagagtccagcaggtattggccacgtgactcagtgatatggggacatttggagaaccccgtgatccctcaccattaccaaaacccctgacctccaggtcctccttgtcacagcacttgaaggatgctgccgctcaggtgatctgcacatgaagcctctagagattcctctaacttgatgttccctcccaggctgggtcagctcccagatggggaagaattgctcctttttcaggccggtccccaccgaagctgtcactgactgcagagctgatgggcagcaggcgggctgcacctaaacccaccctatcatcacctccacagtcttaggtgtcacaaggaggggtctcccaaggggattgtttgcagtctaggaaaagaatcgcgttcctgctgatttttttttttcctctgtaacataccagttttgtccttaaaaaaaaaa

SEQ ID NO: 91143 - DNA, 804 bp, Homo sapiens
ttttttacagtcaaagttttttttttatttcagaagaatgaggcatcgcttaccaagcagtggttataggaatgattaatatctagtcatcttaagttgcaaaaacacattaagctcctcagaagatgcaaatttttaaaaaatgcaataaagtaataattatattacatacttgtgacttcttgtaagaaatccaaacatggtcgactacttccagaaatacttattgaaacagccaatggggtctgtccttcatagttccgtgtgttcgtgtctgctccgtaattatataacatccgtgcacacagcacatcatccctaagggcagataagtgtaaaggagtctgtccgtcttctaagcgacccaagtttgtgtctgcccctctctgaaggaacattcggcaataagagtgattgcttttgatcacggcgtatcgcaacaggaaaccattctgaatgtcgatgttggcattgtggtccaggaggattttcacacagcttgacctctctcggataatggcgagctgaagcggtgtggtacctttatcactgagtgggtcaacctcagccttgaactccaggaggagccggacaaatgagtccctgccgtagtgggcagccacatggaggtggaaagaaggaaagtgcatttgagaactaagagaaggccaagatgactagaatacagagatcaggttacaaaatcaagttaaagacagttggcaggagccagactatgtagccttgaaggccatgttaagaatgctatagcttttctcttaaaagcagtaaactccaaatttt

SEQ ID NO: 91144 - DNA, 467 bp, Homo sapiens
  misc_feature (1)...(467): n = a,t,c or g
attggaccggttacgtctcggcacagngcggnggaaannnaagangcaagaattatgagactcatatctgaacagctatttgtgaaaagtatctcatggtgaggaggaagttcctcttctctctgttggagcacacgaaatagcattagaaaacggctagtacagaagcagcgtgttgagggaaatcaaatttgggtatatataacgcggctgaggattcatacatagaaaaagcttacttataaaggcactaagttacacgaagctatcagccagatacaggctttcttaatttcttgaaaatggtacatattttttaaagaaataaaataatgctcttgcgctttattttgtacgttattaatatagttggtagtgttaaggaagttcaactcatacctactttggagtggctatcagaaagaagacattactatttattacggcagttcacgagattttctgan

SEQ ID NO: 91145 - DNA, 460 bp, Homo sapiens
  misc_feature (1)...(460): n = a,t,c or g
ntcgagaccactgtccgtgtggtgccattcacgttacacacttatgcatactcatgtacatcatacacacaaacactcgttattctatagcaagtaagatgatgcagagattgattactggggcaaaagaaggttctgccttggtcttcactgcctttcttctgctttccacccatctttcctctctccaaaaacgtaaaaatcctttaatacctacttgcttgtacttgaaattttttaaggggaacaaactttcttcttaaacaaataagaaagtcttaacatggaaatatacacagaaatcttctcagagcattgtatggtcttttaacaagttaaagccatctttatcctttcctatattttaatctgagagagagtgataaggagagaaaagctctggccacctaaaggggactgtcttctacttcgttgtttactatttacttttaattgtgag

SEQ ID NO: 91146 - DNA, 1751 bp, Homo sapiens
gataagagagtatttaagggcatttagatcatgtaaaaatgagaaacaaaaacaatgataataggattgttgtgaggattaagtgatactatccatgaaagcacctaaaagcatgtctaccaccaaatatgagcccaataatgttaacttattattcatatagattttcgggttcaacaagctctagcaggctaccagtttttctagtgatgaggaaagccagacttttcctataatctgtctctgccctgaaaagattccagttttaatgtggctgatgagggtattttccttgactgcttctccccagacttcatcctcatggcccaaagcatccacatgtatgcagccagggtccagtggggcctggtcatgtgcttcctgtcttattttggcacctttgccgtggagttccggcattaccgctatgagattgtttgctctgagtaccaggagaatttcctaagcttctcagaaagcctgtcagaagcttctgaatatcagactgaccaggtgtaaaccatcagtttttccttgctggtgaggtgggtgtgacagtgggggaggggccagtaggacacactcacaggacttgacatagaacctcatttcacacacacacacacacacacattcatggccacatttgccaaatgagcttttcagggcgagttatttctttaatgaaaaagcacaagcccttatgtgtcgaaatacacgctgttacactgaaaatatatgcacgacagagcaagaagcttgtgcatgatcacttcttatccgtccccttcccagcactccctcctcttcccattctctccacatgtctcaagcaccctaccgagtagggcaggccaaatgttccttgggagtaatgccaactcccgacgttgccttcaggtccaaagggcttggaaccagctcgtgaggaagttctgaatctggcactaatattcttgagtggataatagtgtatcatagaataggacggaaattgtattgagatgtgaccctgtgtcgcctgtggaaaggcatagtgagaagaactttcccacgaaagcccccttcatcgttgttcagtggtcggctgtgtggatcccaggagagacatatgccacagactgtgagagcaaagcccgccgctgtgatctggacttgatgcactgtgactgagaatgatttccaaatgtgaatatgtgtagggacgtggtctatcaggcctggaacaagatgggggcagtgaaggtatggtttagtgtttgctttcatagtatgccatgtacaatgttttatatttcatagtttcttttaagtaactaccatgagtctctctaagcctcatggacaaagatgtagaccaaatgcaagagctgagcttgctttgggttcaaccatgatcaaagaaaaactgaggtcacctgcaggcttacgtgggaagctaagaaaatatcacagaaaaatggaaagaaatatggatgtgcagaggtaataaaaagagctgctgctggacatttatcaaagataggcaccttacagtatcttgttgcaagtccaaatcaggggagactttgttaatatgtatcttttgctcaaatttagtagggttttttttttttgggataaggggcttttcaaattgggaattggtaaaacccaattaaaaaaataccctttcttaaaaccaaattgacacagttggcccccctgttagccaacccgcagttcccagttcccacctgctgagagttcaa

SEQ ID NO: 91147 - DNA, 408 bp, Homo sapiens
agaaacatgtgaaacagaagcatgcttttgaataaagggtaatggtatttttatgtattggttattcattttttgtttatttcaaaattggtacacctgcagtactggagcttcaaagacaatgtctccactgtcaatgattaaacacttgtgcaagggagtcagatatgcctggtgctgataataccatggtgggttcagtgcagtcaggatggtgtgaatgaagaacttctagaacactaaggaatatgtaaaatatacccttcttctgaggaagtagagttgacatttgagcttgaaggaccaattggaataaggtttccgaaatatgttatgatgggtgggagtgtggaattgcaagcaaagcaaagagtgtgaccaaactggcaacgttggaaactgatcata

SEQ ID NO: 91148 - DNA, 737 bp, Homo sapiens
ccactgtggtggaattccaaaattctgtattagttacctattgctgcataacaagtgactccaaaattaacaggcttaaaaaaacattaagtttttcatagcttctatggatcaggaattcggaacaacttagctgagaagctttgcaacttatgaggctgtaggcaaaatgttgaccaaggctatataaatctgaagacttgatttaagtagagaatctactaagatgactcattctcatggctgacaggaagcctcggttccttaccatatgcacctctccatagtgctgctttcatatccttatgatatggtatctgggttccccagaacaagtgattcctttggtatggtggggagaagaggcatgagaaagctacaatgcctgctattaactattctgtaaagtgacacatgtcactaagtctagcccacattcaagggaaggagagttagtcttcatcttttgaatcccttcaaagaaactgtagacatactttaactaccacagatagcaacccagagttccaaaacggactgataaacacactgaatgcaaccatgactcagataaggattggaatagatgacttcctaagatatctttcagctcataggaatttaattgtaagacctacctatatgcaacctcgagatactagaacagctctgtatgccctttaaactgctaataaatatgggccaggcacagtggctcatgcctgtatcccagcact

SEQ ID NO: 91149 - DNA, 704 bp, Homo sapiens; identical to SEQ ID NO: 60294

SEQ ID NO: 91150 - DNA, 832 bp, Homo sapiens
cgccgtggaattcggactttggaatgagaagttttctattgagttgtcatatttggaaggataaaggtgccctcttttccctcgatccacatagtagactcctgtgtgcgggcatttgtttggtgtctcacgttgatgcaaatgcagccattgcagagtgagccccgctctgttactggatctccatttgctcaaaagagagcagtgtccccctccaaatctgcatgtctgaaagcattcatgcaggttcattgcatgggtctttgcattttacttagacttagcaaaaatcaggtatagtctttcctgaaaacaaaagtgaccattgtttttaatcaactgcagggtgtttggagttgtgaaatatttaaggtcccgagtccattccagattcaacattgggaaagaatgagaaagctgaagcctggggcaggctctgtctgcagaaaccatgggctatcaccccctctccttagcagcattgtaaacaaacgtcatttgtaaggagcatgtcccaactgagcttgtaattataggggcaagatttgtgtggtggtaggggcatggagctggagactgggggcttccttattggttcatttatcctggcccttctcttttctctcaagtctcagctcttttaagattcagaagataatgcaaaatgcctaagatttctgaaattcttggcttcagagacttgactacataaaagagccaggattttcaggctggccatttcaggatcagccatttcccacttcctgattcatagcttccaggatttgtaatgcctgtagactttttttctctcttgcttaaaggcgccagc

SEQ ID NO: 91151 - DNA, 446 bp, Homo sapiens
aatttgtatttctagcccttgatgtagaactataaagttcagcattcagttgactgttatttccacttggatatctcagaggcacaaactcataaagtccaaaactcacccttcctgatcctaccactgagttgcacaatctacaaagtcttgaattttttcttgaccactctctcccaatttccaatataccgtcaaatcctgttaattgtacctttgaagtacctcagtacagccctctcctctgccatctccaccgtcattactgtagtccaagctacagtactactcacctgcacctgtacaacagcctccccatgtgcctccctcacctgctctgtgcatgtgtatgtgcacatgcagacttacccccacacatgcactccaatcccacagtcttctctacttggcagccccatcgtttttattaacgcaaagctgactgg

SEQ ID NO: 91152 - DNA, 509 bp, Homo sapiens
  misc_feature (1)...(509): n = a,t,c or g
aggtgganacaannntttgannnccttgattccccttccgcagngnggcggaattcggaagaggcaagcactgatttacagtggttcagtgcagcttcaaaaaaaaagggggaaaaagcaatgggacttctggctcaaagtactgctttgcatctcgtcttgcataaatttgcatactgagttcaaagtcgtaaaatagactagggaaatgagtgggatctactgtcactgattgttaacaccactaccttccacctcccctccccccatctggacagaactcccggcactagttctgctaagcagcgctgcctgagtcaccagtcaccactgttcatgaaagaaggagatggggaagcgcctgtctaggagaccaagcagggtgtggcagtgtgcaccctggcctcggaggcagggcctctctgaagggtgtggcccgacagattctggaccagtgaggcaagtggtgttctttctgacgcctggggctgccgttgcccatggtgggc

SEQ ID NO: 91153 - DNA, 1455 bp, Homo sapiens
tttaatcggaagcaaaagcaatacatgtgtatagtttttaaaaatcaaacagtagaaaaaggacatataatgaaaagtaatagaactgtccctccttctcaactcttgcttccccaaatcagaaacacaaacttctacacggtgcttgtttagagattacaccccctttttcaataacatgcctttattactatttcttgacttaatgacatgaggcattttctgctgacttcctgccgcccccctcagctctccttccccctgaatatagtcatatcactaatttttaactcttctgttggctacctggttcaatgaatagcaaagtggaatgctctgattggattttctcatcaccgactccagagtcttgatccatgtgccaatattcaaacagattccctttctcacactttcggcaactgttcaaaaccatgccacatctgaggttgcttcatatgtgaaacataagtttcttgcacagtttttaatgttcttccctgtagtttctttctgtcattttttttcctttgggttgaagaaatgtatgccttccagaacatgttattaatgtcctccagcttattattcaatccatctattgcttagaattcatctcattcaattgggtctattcacttcgtttctaattggggagatttgcctgctgtctgagccattcttgttcagtttatctttccttaagtttttagttacctttccccgtttttttttttttattgcattctgtgcccattgtcatttcctaaagttcgtgctgttttctgttttacggatgcaaaaacttctcagatatttttaaggattttcaaatttttaagctgtattctgttccttcaaatatttccttgagagtcaatttttcattctatcttagacgatttgggttatatttcaggctttccacaaatgctgtttttttctttttttgccacccatttatactaaaagatgaggcaatggaaagaatgagtggcaagtctgcatgcaggagcggagttggtcgctttgctctagggtgggtgagcaggtgggtggaagtcagccatcctgacgaggagcccccaaatgccacaaagttagtggctctaaatatatacctgcaggtggacgttgagaatcaccgaggccagaatatagaagtaaaagaagttcttgcgcagccgccaggccaggtcgaagaaggtgagcagcgtgcgcgtgagcgtcttgcagaaggcgccgtaagagccgcgggtcccctgcgggcgcgacagccgcaccgccaggccagacagggccgccgccgccatggacctgatgctgcctcccacatagtgcccagagcccaaggcctccatcaggctccgctgactcaccgaccgtgggacagagggatggacgcgggaaagtacgggcgggaggcctcctgggctgctgctgatccgagctgcg

SEQ ID NO: 91154 - DNA, 498 bp, Homo sapiens
  misc_feature (1)...(498): n = a,t,c or g
agagctggctcgattccctattccgtgtggcggaattcggaagttggggatttcttgtttccccacttttcccttccatttctgtttgagccttatgtttggcctccgtctccctctgtaggaattgcagctaattaaatattctgcctcttattccagctttactggtggaacataatatggtctaagaagagatttttccagcacgaggccatctctgcaaatcacctgtgaggcagacctgtggcaattttatgactcagctggccaccgggattgtagctgggttctgccgcttgttgaaacctactcagtgctctccttccctaagtaggacaagaccgtatcctgcctttaaggtttatagaataaaaactgaaaactctttggggaagagaatctttctgaacagatagcccagggcattctgaacatcccttatgaagntctctgtttcacttgcgtacgttttgtccttggacctttggtgatgtgggg

SEQ ID NO: 91155 - DNA, 496 bp, Homo sapiens
  misc_feature (1)...(496): n = a,t,c or g
aggnanttnaagggnagaagccnnnnnttttganncccccttgtagatcctctagtccagtgcggtggaattcgaatactttcaaaggaaaagttcaggagatgtataggaactcccctggagttcatctggtctgagcccaagacactgagaagctaaacatcttgatcagggtcaaagggatgtgttctcctatttctaacagctttttttgtgtaccccaaaagaagaggccggaaagggggtgatctcgtgaaagggtaatgagtttggttttgatctgtcgtataatgaaaaaacaagagccttataagcgggctaagttaacctggatttcaattgtcagggtaaggaagctacattttttgttgtcaatattaatgtttctcataatataaaaaatattactcaccagggaatttattttctttattaacgtaccattgagggcaatgggaggaaatgagatttagatttttaaatacgtttccatatt

SEQ ID NO: 91156 - DNA, 430 bp, Homo sapiens
aacccgcgtgcaacctgtcccgactctagccgcctcttcagctcgacatggatcccaactgctactgcgccgacggtgactcctgcacctgcgccggctcctgcaaatgcaaagagtgcaaatgcacctcctgcaaaaaaagctgctgctcctgctgccctgcgggctgtgccaagtgtgcccagggctgcatctgcaaaggggcgacggacaagtgcagctgctgcgcctgatgctgggacagacccgctcccagatgtaaagaacgcgacttccacaaacctggattttttatgtacaaccctgaccgtgaccgtttgctatattcctttttctatgaaataatgagaatgataataaaacagctttgacttgcataaacaccgtgaaatccctgaaagtccaatactaaaccgtccttattactcga

SEQ ID NO: 91157 - DNA, 1574 bp, Homo sapiens
aaatcgctcgaggggagcggcgcggcggcgcgggagtattcctgagctcagtgccacctgattcactgcacttggaaccagatgatgttgggctctttccagaagtcaaatccttcctgggaggatgaagatctgccagctctgaggattctggctgggaagaaaaagagcctcaagctttgaaggccattcccatggtagacagagctgatgtgaaaagtggccatcctgttgccccaggcacatgaccttctgaagtgaccaggctgaaagggaagcaatactcgtgtgatctctcaccccatcactcagggtggcgcaatcacgactcattggctcactgcagcctagacctcccagctggagcaattctcctgcctcagccttctgagtagctgggactacagttggttctaaagagtggtgagtcagaagagacgtcaggcagcaagcgacttgggccatggcctctgacctagacttctcacctccggaggtgcccgagcccactttcctggagaacctgctacggtacggactcttcctgggagccatcttccagctcatctgtgtgctggccatcatcgtacccattcccaagtcccacgaggcggaggctgaaccgtctgagcccagaagtgctgaggtgacgaggaagcccaaggctgctgttccttctgtgaacaagaggcccaagaaagagactaagaagaagcggtagaagaggaggcctgaggagctgggcgggcagggagagggtcttggggacagccctcctgggaatctacattgtgttcccccgcattccaggctcagggtctgaggaggctgtgacgccctatgaccgcagagatctagacagtcgtaacagtccccaggctccagctgggcaatccaccacttcctcttccttctgcttctgtgacggtttagagtcaagggggctgaaacacactgtgagcatagactgtattaggtttgttcagaagccgggtcagctcacagaatcacattttcttgcttagtcatgtgtccctccttgagttgccccctccttgtgggtttacactacattttggagtcattgtctaatgctgacaagcacaccctctcccattatttgtgcactacagatctcctcctgatcagtcacctttgttgctgctgtgtagacagagccaggcctcacctgtttgtttaggccaagatgccatggacatgcagcgttagtgatcccactagctgtgacagccaggcccagaaaatgcctggcgtgagagccagcagacagccaggccagggtaggcagtgcctgcttctgctccatcaggtgcaggggatttggctgaaggcgtgcatatttcctgggcacaaacttcctgagcctctgaaatgggaggctcgtcaatttcagaccaacctcttttcaacccatcatagcacgttcaaggtgtgccttttacttctacctgtacatcccccatcccttcaattctttcattccctgaccagtgagagggttcctgggggaagtatggtgaataaactgacatgcatgcttcagaaaaaaaaaa

SEQ ID NO: 91158 - DNA, 708 bp, Homo sapiens
cttaattaagcccttgcttgctatgtcactttgtttaaaatggtccctctccccttgccattgatggggatgaaatgggctcatttgtcctgcagggaggcgcccagttttgatttggccaattgctccctcagggcaccagtccacctatgcctcatagctgctgtagcttggaaattgtatcaaaagtctggaagagtctgattctttttgttgttactgttggtaagaatgctgccggcccttccacagcccctggtgcccacctgccatgctgccaggccggatctgagagcgctgggttgaggagactcaggccttactaaaccagccacgctcgctcccacagatggagcaccctggcattttccagcaggcgacaggtccgagtgccttgccctactttattctcaggaacttggaggtgcagtgaggggaagtgactggccaagggccacgggagtccagtgacgcgcataccagcgcctcctccccagcagcctggcctggtataaatgggaatcaagccagtgagctgcctggatccatggttaccatagaccaacttcatcctgggcaaatgacaagaatgatgagggagggagagcttcaacaagtgcagtggactcataagccctgctcctcacatgagacctttgtagcttgatagctcgagcgtgtgtgtatgtgcgcgcgtgcacgtgcacg

SEQ ID NO: 91159 - DNA, 1587 bp, Homo sapiens
attaatttgggtacccccagggttttcccctccccgcggttttaaaacccggcccggggattttatttttggggccccaaaaaaaaaatttttccttgccagccccgggacgtaaaatttggttctttaaaaaggcccccccttttttttttttttgaaaaaataaaatttactgtttatttctttgttacacaaaggtggtccaagacatcttagtccatctcctatgtccttttggccataattacacacacaataatggcaagctagattaggagtctagctcagggtcaagtttttccactttaatgactatctctggagctaaagcggcagcaccagcttgttggttctctgcctctgactcagacaacacttcttcctttatttttacaggcttattactggcctcctcctcttcatctgaagactcatcgagctcccattcatcatctatgtccatttcaaatactctcacatgacgaagatttgagcttaacacacaggacacttttcgaaaaccattcccagcaacatactgtgctttcatactttccagtaatctccagtgcttctcgaaatgcatggtacgggtgggaatagcactacactgttcatctagccttgtagaataagtcccagtgaactgatattctgcagaatcttcactgttatatactaaagacaaaggcagctggaccaagagtctatctcttccttcacgtcctacagtgtctttaagaactactgttacagtttcatcatcataaaactgtgcatctaaacaactgtagatgcttcttctgactttttctgttgtggcatatgtaaagctcccaaatttaatagcaattagtccattactcacagattgagaaatatcagtatgtctccttaagatgcacattttataaagtgaatcttctagaatagtaaaaagaagataatgtagatttgaagttttattattccacagaaaaggaaatttgaacaatctacgtgtagaatcctcacttctggtatctctatacaatggaatacagattgcttgattcatcgattttccaattacatctgctggcttttgcaaacactgatcaataatattctccatccgccttttcacaaaatgcaatgattttcgaggataataaggaaacagcaaaggactttctttaaggtggctgctattttgaagaaagtcataccactggtttccttctgtgttagggggtgacacaagatcatcatcttcatctttcaagtactgaccaactctttcaacgttaaagtattttccttttcgattataaaggtctggagcctcattgaaatgttcagtaagaaattcagcaacaaatgtgatatctttctgagtcatcttattcagctcgggaagcacatggtcttctgtcattctcaacattgccacataaagccaccgaaaaaatgctttgaagtttttcatactactatctataacttgaagaagttcatttgccttgagtataaaagaacccacagcagttatagcttcttcgattcctgcagcatctagtccaagaggttcatatttttgcttccatg

SEQ ID NO: 91160 - DNA, 3836 bp, Homo sapiens
  misc_feature (1)...(3836): n = a,t,c or g
ggctcggctcctagagctgccacggccatggccagagcccgcccgccgccgccgccgtcgccgccgccggggcttctgccgctgctccctccgctgctgctgctgccgctgctgctgctgcccgccggctgccgggcgctggaagagaccctcatggacacaaaatgggtaacatctgagttggcgtggacatctcatccagaaagtgggtgggaagaggtgagtggctacgatgaggccatgaatcccatccgcacataccaggtgtgtaatgtgcgcgagtcaagccagaacaactggcttcgcacggggttcatctggcggcgggatgtgcagcgggtctacgtggagctcaagttcactgtgcgtgactgcaacagcatccccaacatccccggctcctgcaaggagaccttcaacctcttctactacgaggctgacagcgatgtggcctcagcctcctcccccttctggatggagaacccctacgtgaaagtggacaccattgcacccgatgagagcttctcgcggctggatgccggccgtgtcaacaccaaggtgcgcagctttgggccactttccaaggctggcttctacctggccttccaggaccagggcgcctgcatgtcgctcatctccgtgcgcgccttctacaagaagtgtgcatccaccaccgcaggcttcgcactcttccccgagaccctcactggggcggagcccacctcgctggtcattgctcctggcacctgcatccctaacgccgtggaggtgtcggtgccactcaagctctactgcaacggcgatggggagtggatggtgcctgtgggtgcctgcacctgtgccaccggccatgagccagctgccaaggagtcccagtgccgcccctgtccccctgggagctacaaggcgaagcagggagaggggccctgcctcccatgtccccccaacagccgtaccacctccccagccgccagcatctgcacctgccacaataacttctaccgtgcagactcggactctgcggacagtgcctgtaccaccgtgccatctccaccccgaggtgtgatctccaatgtgaatgaaacctcactgatcctcgagtggagtgagccccgggacctgggtgtccgggatgacctcctgtacaatgtcatctgcaagaagtgccatggggctggaggggcctcagcctgctcacgctgtgatgacaacgtggagtttgtgcctcggcagctgggcctgtcggagccccgggtccacaccagccatctgctggcccacacgcgctacacctttgaggtgcaggcggtcaacggtgtctcgggcaagagccctctgccgcctcgttatgcggccgtgaatatcaccacaaaccaggctgccccgtctgaagtgcccacactacgcctgcacagcagctcaggcagcagcctcaccctatcctgggcacccccagagcggcccaacggagtcatcctggactacgagatgaagtactttgagaagagcgagggcatcgcctccacagtgaccagccagatgaactccgtgcagctggacgggcttcggcctgacgcccgctatgtggtccaggtccgtgcccgcacagtagctggctatgggcagtacagccgccctgccgagtttgagaccacaagtgagagaggctctggggcccagcagctccaggagcagcttcccctcatcgtgggctccgctacagctgggcttgtcttcgtggtggctgtcgtggtcatcgctatcgtctgcctcaggaagcagcgacacggctctgattcggagtacacggagaagctgcagcagtacattgctcctggaatgaaggtttatattgacccttttacctacgaggaccctaatgaggctgttcgggagtttgccaaggagatcgacgtgtcctgcgtcaagatcgaggaggtgatcggagctggggaatttggggaagtgtgccgtggtcgactgaaacagcctggccgccgagaggtgtttgtggccatcaagacgctgaaggtgggctacaccgagaggcagcggcgggacttcctaagcgaggcctccatcatgggtcagtttgatcaccccaatataatccggctcgagggcgtggtcaccaaaagtcggccagttatgatcctcactgagttcatggaaaactgcgccctggactccttcctccggctcaacgatgggcagttcacggtcatccagctggtgggcatgttgcggggcattgctgccggcatgaagtacctgtccgagatgaactatgtgcaccgcgacctggctgctcgcaacatccttgtcaacagcaacctggtctgcaaagtctcagactttggcctctcccgcttcctggaggatgacccctccgatcctacctacaccagttccctgggcgggaagatccccatccgctggactgccccagaggccatagcctatcggaagttcacttctgctagtgatgtctggagctacggaattgtcatgtgggaggtcatgagctatggagagcgaccctactgggacatgagcaaccaggatgtcatcaatgccgtggagcaggattaccggctgccaccacccatggactgtcccacagcactgcaccagctcatgctggactgctgggtgcgggaccggaacctcaggcccaaattctcccagattgtcaataccctggacaagctcatccgcaatgctgccagcctcaaggtcattgccagcgctcagtctggcatgtcacagcccctcctggaccgcacggtcccagattacacaaccttcacgacagttggtgattggctggatgccatcaagatggggcggtacaaggagagcttcgtcagtgcggggtttgcatcttttgacctggtggcccagatgacggcagaagacctgctccgtattggggtcaccctggccggccaccagaagaagatcctgagcagtatccaggacatgcggctgcagatgaaccagacgctgcctgtgcaggtctgacaccggctcccacggggaccctgaggaccgtgcagggatgccaagcagccggctggactttcggactcttggacttttggatgcctggccttaggctgtggcccagaagctggaagtttgggaaaggcccaagctgggacttctccaggcctgtgttccctccccaggaagtgcgccccaaacctcttcatattgaagatggattaggagagggggtgatgacccctccccaagcccctcagggcccagaccttcctgctctccagcaggggatccccacaacctcacacttgtctgttcttcagtgctggaggtcctggcagggtcaggctggggtaagccggggttccacagggcccagccctggcaggggtctggccccccaggtaggcggagagcagtccctccctcaggaaactggaaggaaggggaactcccccggaaatggggaaaatgtgaacacccacccatccctgaaagcccancttgcaccctcccagtttgcaacagggatttgttcctgggggctgagggccctgtccccccacccccgcccttggtgcctgtccataaaagggcaggcaggggcaggctgaggagttgcccctttgccccccagagactgactctcagagccagagatgggatgtgtgagtgtgtgtgtgtgtgtgtgcgcgcgcgcgcgcgtgtgtgtgtgcacgcactggcctgcacagagagcatgggtgagcgtgtaaaagcttggccctgtgccctacaatggggccagctgggccgacagcagaataaaggcaataagatgaaaaaaaaaa

SEQ ID NO: 91161 - DNA, 1631 bp, Homo sapiens
  misc_feature (1)...(1631): n = a,t,c or g
ggtggaattctctctctgccgggcgcagccggctggtggtggccactgagacaagatgcctagcatcttcgcctatcagagctccgaggtggactggtgtgagagcaacttccagtactcggagctggtggccgagttctacaacacgttctccaatatccccttcttcatcttcgggccactgatgatgctcctgatgcacccgtatgcccagaagcgctcccgctacatttacgttgtctgggtcctcttcatgatcataggcctgttctccatgtatttccacatgacgctcagcttcctgggccagctgctggacgagatcgccatcctgtggctcctgggcagtggctatagcatatggatgccccgctgctatttcccctccttccttggggggaacaggtcccagttcatccgcctggtcttcatcaccactgtggtcagcacccttctgtccttcctgcggcccacggtcaacgcctacgccctcaacagcattgccctgcacattctctacatcgtgtgccaggagtacaggaagaccagcaataaggagcttcggcacctgattgaggtctccgtggttttatgggctgttgctctgaccagctggatcagtgaccgtctgctttgcagcttctggcagaggattcatttcttctatctgcacagcatctggcatgtgctcatcagcatcaccttcccttatggcatggtcaccatggccttggtggatgccaactatgagatgccaggtgaaaccctcaaagtccgctactggcctcgggacagttggcccgtggggctgccctacgtggaaatccggggtgatgacaaggactgctgagacctgccagcctcttgactatccaaccacccaacaacttgcctgtgtcttgagaagatagccccggtcaggacttgcacctgcgggacactcgtggttccttcctctgtttccccttccgtgtcctccttgtcctgcgctgccctgccttgaggcagatgatggactttgtgacatctctgagcagcagcctggtgactgtggggggctgtctcgtgcatctcccctccatgaccccccccatcctctttcatttcctcctctgtgtccacagcctcccagtgaccattgtcacatgagctggtgggactgtgtcaccaggtactggggtgactgaaggatgtggcatctaaatattagcttctannnnnnnnnnnnnnnnnnnnnnnnnnnnnnnnnnnnnnnnnnnnnnnnnnnnnnnnnnnnnnnnnnnnnnnnnnnnnnnnnnnnnnnnnnnnnnnnnnnnnnnnnnnnnnnnnnnnnnnnnnnnnnnnnnnnnnnnnnnnnnnnnnnnnnnnnnnnnnnnnnnnnnnnnnnnnnnnnnnnnnnnnnnnnnnnnnnnnnnnnnnnnnnnnnnnnnnnnnnnnnnnnnnnnnnnnnnnnnnnnnnnnnnnnnnnnnnnnnnnnnnnnnnnnnnnnnnnnnnnnnnnnnnnnnctaataatgaatattacctctaaagccaggnggtctgagaaggccataacttaccgggtttaggggggggattcttattctgactagcccgcccttggggggtaaattaaggattagcggacacc

SEQ ID NO: 91162 - DNA, 1408 bp, Homo sapiens; identical to SEQ ID NO: 59551

SEQ ID NO: 91163 - DNA, 571 bp, Homo sapiens
tatttccatattaaatgttataaagtgaaggtctggctgcattgataatgtgccctctgctgatggaatgtgcttctgccctcttggcaggcttcctgtggatcctaggtgataaaagccgtccagagtatttcttcattatcatcgtcatcttatgtttacattattctccttgtcactgagaactccagaccccagtctataggaaacggttcccacattgttgaaatatggctggtggtacagggagtagttctgaacgctgagcatggcctcatttggaatattttatgcaatgaaagtgccggtgagaatttagacagcaaagcttaccggtatgaagcagaaaaaggcaaaataaagaggcgtatgtatggacattgcattcatgcatttgtgcccaatggtgttgaattctccttacaccttaatgaaagagtaaaaatgttgaggaggacgtggagctgccaattggcaggtgtcagagaaatctacaagcagataaaacaggggctccgagggtgtaaatggtgggatttgaaggaaggtgagtacaaagatgatgctgggg

SEQ ID NO: 91164 - DNA, 1199 bp, Homo sapiens
tttcgtccgcggacgaagaaggcgacggccatgtacttggagcactatctggacagtatcgagaaccttccctgcgaacttcagaggaacttccagctgatgcgagagctggaccagaggacggaagataagaaagcagagattgacatcctggctgcagagtacatctccacggtgaagacgctgtctccagaccagcgcgtggagcgcctgcagaagatccagaacgcctacagcaagtgcaaggaatacagtgacgacaaagtgcagctggccatgcagacctacgagatggtggataaacacattcgaaggcttgatgcagacctggcgcgctttgaagcagatctgaaggacaagatggagggcagtgattttgaaagctccggagggcgagggttaaaaaaaggccggggtcagaaagaaaaaagagggtcccggggccgaggcaggaggacatcagaggaagacacaccaaagaaaaagaagcacaaaggagggtaagaggctttcccctctttttcccaaaagaacgaatacccatagcctgtatcccggatgtaggaacactgatggaagctgacccgagtgaagtgcaccccgtgtgccgggtggtattctgattcttacgctgcgcgcctgtcgtcagcctgtcctcaccgcagcctttgagggggtgccgttgtcaggggcattttcagtgtcgcagggacctgcccaggctttagggctgctgtggtgcggctgggctgcacctggagtcttgattccagtgcctgtcctcttagccacagtgtgtgctgccccactagggacaggaggatggtgagcatcgtgttgttgacagaggccaatgtagaccactctttaagtagctagatttctgtatatctgtcagttattttatgtgtcaacatatagtgtgcatatattcattgttaattatgtggccacatttattaaatagacatgtcatttaacttgaagttttttgagatactttatttaaagcattctcccactgacaccctccctgccaaaggtgttgtataccctccaaagagatcgtagcattacctcagaggagtggcatttagagtaaagagaaaatgctcaaatgccacgtagcctctgtccagatgatctctcagagggagggtcaaagagtaaaagttttgggcacgaatggcgaaacgaaa

SEQ ID NO: 91165 - DNA, 378 bp, Homo sapiens
  misc_feature (1)...(378): n = a,t,c or g
gagaaaagttaccactggattgagttctggttcattttaaaagatgatttaattctatgatatgtgttcaacttgcactaggatagtttttactttcacctttgttccatgcaccgcgcaaatacctgggaacccttgttgcccaactcaagagccagagtcctctgtcatcattttgcctctctcctaagtgacaggactgagtgcagacttggtgtttgtgggtgaggcatgtggactgacaggcaggcttcantttatttagcgagtgtgagccctggcaggaagattctctttctctgcttgccaggttgaggaggcctcattaagcagtttgaacttgtggttttggcgtgtctagtcctggtgcaggtggct

SEQ ID NO: 91166 - DNA, 1202 bp, Homo sapiens
gaatttctcggatcgacccacgcgtccggcagcccgcggcccagggcgttcacaagctctcttagttccgaaaaatcgaggggttccttgccaacttctctggctcctgtctgcctcctctttgttccctggctggggttggggtgctttctggacaagggtgaggggaggggaaggaatctgagccagtcagtgtgcccacactgggggtgctgcaggtcgcgtttcaccctggcacgccctgcctgccccgttacgtggcgatttgtgatggggatcataataaaacttagcctgattagaggcatgtgggaagcatgcccagcacacgtctcagtcccgtccctcggagcaggccaagctcgggcggcaggcagctgccttgcaattctcggagtttcaggaactggacaggggaaggttggcttgcgatgtatttctctgggttcgtttggtgccgggattgagtatttctggtgagacagttgttggagagctcctggggagacaggcattttgtggatggttgcattgttatcccacagggaaaagggtactttgctccaccgacatgatggtaacattgggggacagcacgaagttgctggaacgaccgaccgggatcacttgtagggggacggggcgttataacttggagcctgatgatgactactccctattcacatcgcggaggaagtctagccctggtaaggttgccggtgacttttctgatgtaatcggcggccaataatgtagcccgaaaacttctgttctacaccctagcaacaaggtgcccttacttccagaactccgagttccatcgtttaatagggactatgacctacgggatcgggcgcactttgtaagaactctatcctgcgatgaacagcacctgtaacggcgctgcttttattatactgtgcaaaatgaagcaccggagcaggttatcttcaaagcttgtagaatcgacgatactactgtgataatgtattagttagttaccaccggcgtactttagaatgcatagaactactttcgactgatagtcgtacgcaattctgcaggtactgaatgatggtcgtcagctatgaacgatggaagtacacaatgttaggaggcatgacactatcgcaatgatggtcggtggtcatggctaggaagctacgtaacgcacgaatcgagccaaggaacctggcctagct

SEQ ID NO: 91167 - DNA, 1367 bp, Homo sapiens
actgacactgaagatgaacattctcaccatgtcatggacagtgtccgacaggctaagttggctgttcaaatggatgtccatgatggccgctcctggtatattcttgggaattcatatctttccctttacttctctactggccagaaccctaagatctcccagcaagccctcagtgcctatgcccaagcagagaaagttgacagaaaagcttctagcaatcctgaccttcatctgaacagggcgacgttgcataaatatgaagagagttatggggaggccctggagggcttctctcgggctgcagccctggaccctgcctggccagagccccggcaacgagagcaacaacttctggaattcctggatagattaaccagcctccttgagagtaagggaaaggtgaagaccaaaaagctgcagagcatgctgggaagcttgcgcccagcccatctaggcccttgcagtgatgggcactatcagtcagcctctgggcagaaagtgaccctggagctcaagccactgagtacgcttcagcctggggtgaacagcggtgccgtcatcctgggaaaggtggtatttagcctcaccacagaggagaaagtcccctttacatttggcctggtagattcagatggaccttgctatgcagtgatggtgtacaatatagtgcagagctggggagtgctcattggagactctgtagccattcctgagcccaacctgcggcttcaccgaattcagcacaaaggaaaggactattccttttccagtgttcgagtggagacgcccctcctgctagtggtgaatgggaagcctcagggatccagcagccaggctgttgccacagtggcatcgcgaccacagtgtgaatgacctttgacttgcatgctcaacagggagtggaggagaggagacaaggctctggacagccggtccagccacatccagtgattcagcagggatgggaggaatgttttaaatgaagactttctctttccctgcctgtattacacttcgtatctcttctctctcctctgtcctcatcatgttccagctctctacagggccacatactcttctggcatatctctcctgtctcttccactgctctctatgttttaagcaaagagcatggaattggtagaagtcttgggatcttgccatgggacagagtccccaaggttcctgttgttgcctccttcctaagcctcatatgtatatatcagttcagtatttattgctaaaggagggggcttaattttgtaatggcttttatttttagcaatttttatttttatttttgaactttaggtccttcctcttctttggggctggaacagaattaaatttgtttggaaaaaaaaaaa

SEQ ID NO: 91168 - DNA, 407 bp, Homo sapiens
  misc_feature (1)...(407): n = a,t,c or g
atgcttagcagtgtcccagacctctgctcagtagatgctagtcgcactccctacacccagttgtaacaataagaaatgtctcaagatgggggcagttgtcccccaaggggtagagggaattgcctgtcattgaaagtccctaatttagggaatctagagctacagttccggtttggtcaccactagccatatttggcagtttacattgagattaaaattaaacacaatttaaaattcatttcctcagtcatgctagccacatttcaagtgctcagcagccacatgtggctgatgtctgctacactgggcagcacagatgtggaacatttccatccaaagaaggttccactggacagtgctaagagctggcaattcgtgtttttttttgagaagagncntcctttgac

SEQ ID NO: 91169 - DNA, 613 bp, Homo sapiens
cacctagtttctaaatatctccgaaatccgaattcattgttctacatcctttagcgtgctattttctgttcccgcctctaccggatctattttccatgcttctctgccctttcgttttccgaggctaatgccatggactgcattggctgggcttccttgctgcctgcctttctggtggtcaccaggttgcctagtaggaagtgccagcaggagagtagaacactatagcggggcagagttcactttccgtttgcttgcttgatttttctcttgctccctcactccttgagtgccagagttctgtctcccatgctggtttccttagccatgctcacacttcagtaaatagtcttttcataaatgtctcattttcgtaaatgtcagcattgaaatctcttagggaaatttggattcctgccagaaccctgaatgatagaatcccctttgccaattaagttagattctcggttctggacttttggcgcaaaattatgactggtctttttgggtgcccaatacattctttataccggctttgaagaacctgattttttttttccccaacctggggatggaaccaaccgttttgttttttagaaaaaattttcctttc

SEQ ID NO: 91170 - DNA, 403 bp, Homo sapiens
gaaaataggatggtcccatattgcatggcacgtggtaatgtgacttgagcactgacaccactagagggaactctggggctagtacagtcattgaacagtggcagtagtgtgtaccagccatatgttgaaggctctgaaagggtccttccttctcctctttcaggaaaatcagttcctttcttactccaatcctgtgcccagaaccagaatctactcaggaattagaaacagtttctgcagtaaaggagctaaagcgcaaatgctaccttgtctgatcattatgtcctggtgttcagcgcacttggtctgaacactcatggatttttgtgggacccattgattcctcctaaggtgttcactacatgtggtggtggcagtattataagccttccacatcaactgg

SEQ ID NO: 91171 - DNA, 854 bp, Homo sapiens
tgaacttctgtctgtgtgcacaggctgggagaaagtacagtgtcatgaatgtgagtatgtgtgactgatcatttctgcatgcatgtggtacttgtgattgcacacattataatatcacatctgtatgattcacatctgcagcatatgcaaatcttaactattttgatggatatatttctaatatatatttagtatttttctgccttcttaacaaagttctgtttacatatgacctcttcttgctcatgtattatcattataaatatctttattttgccgatctctgttaaaggaatgcccttagggccacaatggacatagatctgtttgtagctatgctaaatgttcccaaactgtcactcttttaaagctgttatgtctgctttttacaaaatattttttctcctcagtcgtgctttcttacagatgtcagtgggcctcccaattcctctgtctctttgaattttcctgtttctaatctcccctgggctagaaacccagcgagtcaacaccttttagaattgcgtataaataagagtaactggactccagggggtccatatgagtaaattctgagagcctcgctgcatgtcctgtgggctataacctctatgttggcttcctggagatatcttttgcttcgtttttgggtttttgcctgctttaccaggtggaaatggttaatgactaccggctgggggtcctgatgtggcatttaccccccgatggtgtgcgggaacggggagagcaactgttttcccgcctgccgctcccaaatattattattacttaggcccgcccccccggctgggaaatacccaaattcctctccgtcgtcggcggggcgccgaacg

SEQ ID NO: 91172 - DNA, 2455 bp, Homo sapiens
atcatgtagaacctgctttgacattgattcttaattgtatgagttgctcctctgattttagatcacatttgtcctcatcacttggcatatccacattgatattgacacggttttattttagttttagacatatgacaaatcatgccatgtttgaaattgtaagtatattttgtgaagcctgtattcacctttttcagtgtatttctgtcatattccagtcccgagtcacaaagtagaaaacatcaaagcctatactaatacaggcaggaagatacatcttgatgccaacagtgcaggaatgtatggataactttatcatatttacatatgagtgattatgtatcccttttgcttttcagtgtcttctcagaaacaaccagccttgaaggctacaagtgacaagaaagattctgtttcgaatatacccacagaaataaaggatggacaacaatctggaacagtgtcttctcagaaacaaccggcctggaaggctacaagtgtcaagaaagattctgtttcgaatatagccacagaaataaaggatggacaaatacgtgggacagtgtcttctcagagacgaccagccttgaagactacaggtgatgagaaagattctgtttcgaatatagccagagaaataaaggatggagaaaaatctgggacagtgtctcctcagaaacaatcggcccagaaggttatatttaaaaagaaagtttctcttttgaatattgccacaagaataacgggcagttggaaatctggaacagagtatcctgagaatctgcccaccttgaaggctacaattgaaaataaaaattctgttctgaatacagccaccaaaatgaaggatgtacaaacatccacaccagcagaacaagacttagaaatggcatcagagggagagcaaaagaggcttgaagaatatgaaaataaccagccacaggtgaaaaaccaaatacattctagggatgaccttgatgacataattcagtcatctcaaacagtctcagaggacggtgactcgctttgctgtaattgtaagaatgtcatattactcattgatcaacatgaaatgaagtgtaaagattgtgttcacctattgaaaattaaaaatacattttgtttatgtaaaagattaataaaacttaaagataaccactgtgagcaacttagagtaaaaattcgaaaactgaaaaataaggctagtgtactacaaaagagaatatctgaaaaagaagaaataaaatcgcagttaaagcatgaaacacttgaattggaaaaagaactctgtagtttgagatttgccatacagcaagaaaaaaagaaaagaagaaatgttgaagaggtgcaccaaaaagttagggaaaagttaagaatcacagaagagcaatataggatagaagctgatgtgacaaaaccaattaaaccggctctcaaatcagcggaggtggaattgaagacaggaggaaataattcaaatcaggtttctgaaactgatgaaaaagaagacctgctgcatgaaaaccgcttgatgcaagatgaaattgccaggctcaggctggaaaaagacacaataaaaaaccaaaacctggaaaagaaatacttaaaagactttgaaattgtgaaaagaaagcatgaagaccttcaaaaggctctaaaacggaatggggaaacattagcaaaaacgatagcctgttatagtggacagcttgctgctctgacagatgaaaacacaacgctccgttccaaactggagaagcaaagagagagcaggcaaagactggaaacagaaatgcaatcataccattgtagactgaatgctgctcgatgtgatcatgatcaaagtcactcatcaaaaagagatcaagagcttgctttccagggcacacttgagagtaagttcagagtcctcgaaactgagctccattacacaggagaggctctgaaagaaaaggctttggtttttgaacacgtgcaaagtgagctaaagcaaaaacagagtcaaatgaaggacattgaaaaaatgtacaaaagtggatacaatacaatggaaaaatgcatagaaaagcaggaaagattttgtcaactaaaaaaacaaaatatgttgcttcaacagcaactggatgatgctcgcaacaaagctgacaatcaagaaaaagcaatacttaatattcaagccagatgtgatgctagagtacaaaaccttcaagctgagtgcagaaagcaccgtcttttactagaagaagacaataaaatgttggtcaatgaactgaatcattcgaaagaaaaagaatgccaatatgaaaaagagaaagcagaaagagaagtagctgtgagacagcttcaacaaaaacgagatgatgtcttaaacaaaggatcagcaacaaaagctctgctggatgcttcatcgcgtcactgcacctatttagaaaatgggatgcaggattcaaggaag

SEQ ID NO: 91173 - DNA, 743 bp, Homo sapiens
  misc_feature (1)...(743): n = a,t,c or g
ttcaatgctaaatgattttattgaaacttaaagaaatcaaacataactagtagagaaaaatttcagaatgacatggtaaaaaccactggagcccatattttttctgcacagcatattcagatgactaaatccatagtggctttaaaaaattgtttagttctccaccgtgtctccacagaaggaaatgtccacaatccatagtacactggtcgtgtagcacgttcctgagtaaaaaaacaggcttggcctcttgcatctcctcagccatgtatgttggaatcccacgacacatgtttgcaatgttttttccgaacttgctcaggtcatcgactttgtttgggttgactgagtacatcaggcccttgggaggtggtccctncctggtcccttaccctgaagcttcttttccttgaccagtgcatcaagggattgaatggagggcatgacttccttgttcattttgtgcacaatgcatgtcttcttttgaaagagtctggttgcagcaaagccatttccataatcccagatggaattccaggagtcccatccgttgttattgtcaacattggccacattgtgttcattgttgacactcactgactgctgcccacttccagcattgttgttgtcatcattgacgttgatattatagttagctagggcaggagctagaaagactccaagaagtccagcaaagacaattgtgaacttcatcttgtcttcacgaaagcagtggacagagg

SEQ ID NO: 91174 - DNA, 845 bp, Homo sapiens
cggacgcgtgggttcaaccctggatggaggaaattaaagtacagggtgctttgagtacaggagataagacacatgtacaaataattgcaacataaaaagggtagactcagtctccattgtcagaagaggaaattgggaaatataacttagggcagagattccctaaaaccaaacaaggataatactggtccttgatgaggttttcactgtttcagaatgagatgagaataaaaaggactatgaaatgtgtttttatactggcctttatacaatttttatttcctactatttgaagtgaaaatatccttttaaaaataaaaggtggtgaaagtagatggtagagtttttttgtttaatcttcacataaaaagttgggaatctttgaagaggttggttataattaactatgcaacttaaaatgacttaattctggttattaatcttaatgcaggttctggatatgaacaaactataactgagatgtcataaattataatcacaaaaatttttgttgattgctaaacctgctacttttgaaggtcttcagagcttttaaaacgcttaataattataccctttgcctccacaagatggagtaagtaaatagtaaatgttaacttaaaaatgcagttacttttatataaatggctttgctgaaatctgaccattgtaatgggtatatatacaacttcaacactatgaaattacacggcttccttgggtagaaaaagattttctattttaacgggaaacccccctttggtaaaaaaaaagaaaaacacttggggggccattctttattggggataaaaacacaattggacttaaacccgatttttttataa

SEQ ID NO: 91175 - DNA, 1271 bp, Homo sapiens
ttcacaccccggtgactaagctgaagagatttatcatgatgcctgctcttttctgttggccttggtcacttcccatgtgcatgagcatctccatccaaaagtggccttcttctcttagccccggatgggatgtcagtagcccatgtttctaatagaagacccatgccaaagccactttgacaactctccagctcgcaggaatgctgtcggcctctagctaaactgttatggtccactcaacgctgtacactgtgtggccactttcctccgcttcctgtacattgtcaggaggttgtaaggcagcaccaggggctgacctctcaggacttgcagcagcagagcccagctgggtacacctgtctaaaaaccacagcacagcagtagcagctcaatggagacattgttctctgcatcccaaagccaggaattcaaaataaagcttggcttccatgcaaaacattaatgtgcgtgattccttcataaattaaaagctgagaaactaaataaataaataaaagttgctgccccagaatgacctacttcctactacccctggccccactctgcacattctctctactgacgaatggtaatataatatctccctcccaatggtagtataggttgagtatcccttatctgaaatgcttgggaccagaagcatcctgggtttggaatttttttcagattttgcaatgtttgcattatacctactggctgagcatcccaaatccaaaaatccaaatctgaaatgctcaataaacatttccttttgagtgccatgtcagcactcaaaaagttctcgatttgagagtactttgggtttaaggatttaggatgctcaacctgtacgtcctttctgtagaagctgtgacactgaagcataatggccaaagtaatacaacagaccttgcatgggcctcagcacgtccaggacaatcaaatgcaactgatagagaaagcctgaaattaaccgtaaagcagaaagtccacggcagtcacagagtttcacccaggctacaccgtctcagaaggcacctgctgtgattttgtaatgaagcctttaataaactcacacactgtgaaagggagaaggtccctagaaactgaggaccaggaagatgcacaggacaagaggagtgggtaaacacaaaatatataccagcgactggatatatttatatacttatgaatatggtgtctacaatggagaatgggacacagggtttcaagcagtggaaaccccatggcaaacaatcccaaagcttccc

SEQ ID NO: 91176 - DNA, 496 bp, Homo sapiens
tgccattgtcttattgacctaggaaaatgttctcttcctcaatcacattttcaggatctgtcatggaattctgaattatctgaagactagattgctcttcaagcattctgcctgcccgccctgagattctgtaatttgatttattaagaggagtgtaaaagcctcacacacaccttcacactctcatcacacacaatttgtctgctgaatattctgacccaagaccggccagtttgatggagtcattgagttcattaaagttgtttctctggctgggcgggtatgagtggaaacagcttttctgtagggtagtttggtgataggtgacaaacacctttaaaacacatgtagccttcaacacacgcatgccatttctagaaatctatcattaaaaatttttcccgatgcattgttgaatgagaaaaagcaagttataataggcatgtgtcaggatgacactgacttggttagcatactgcatgaaaaagcctggaga

SEQ ID NO: 91177 - DNA, 463 bp, Homo sapiens
tagaattcagcggccgcttaattctagaagtccaaatcactcattgtttgtgaaagctgagctcacagcaaaacaagccaccatgaagctgtcggtgtgtctcctgctggtcacgctggccctctgctgctaccaggccaatgccgagttctgcccagctcttgtttctgagctgttagacttcttcttcattagtgaacctctgttcaagttaagtcttgccaaatttgatgcccctccggaagctgttgcagccaagttaggagtgaagagatgcacggatcagatgtcccttcagaaacgaagcctcattgcggaagtcctggtgaaaatattgaagaaatgtagtgtgtgacatgtaaaaactttcatcctggtttccactgtctttcaatgacaccctgatcttcactgcagaatgtaaagatttcaacgtcttgctttaataaatcacttgctctcc

SEQ ID NO: 91178 - DNA, 831 bp, Homo sapiens
tgtttttccctgacgagtcaaaggccccacgttcccctcttccattgccaaaggtggcgacaaaaccccgcacacaccagcccagcagtgatggggtgagtcatttacgagctccggaccatccaaggtcttcaggttcaaggagctggtgactcagtgcagccaccccgtccagggctccaaattcctctttgtcaagtgtgcagatctgtatatgctaaatgtctgtttactagagctaaacaaagaagtcaatgcaggcaaacaaaatctgtaggaaacacattgtttcagccagtctctgggacagcaaacaatagaaggcaaaagcctatgcagagaacttggtaaagagaaactgccttggagttcccaaacctgcagacccttgattgtgttggcagctcgaggggatgagagagcctctaaagaggccaggcgtgtctgagagggcctctctgaatgaccagcgcccaaagggcgtggaggatgtggctgtacacgtgtggcccgggcaggtttccggtgaacactccctccctaaccgcgccggcgccaccccaggtcctggtgctatctgacagtgtgagcttacttacgaaagcccggtctgctattcagtcacttctaggcgggtcctgttattattattaacaaagataagattacgactaataataacactcatgccatttaaatgcatttcatcctatcgcttcagccatgctctctgaggtagggtagagttcaaattccacatttgtgctccgacgaaatcgtcgacccgggaagtccggtccgatgatcttcgtatcgaacttctattggggg

SEQ ID NO: 91179 - DNA, 2012 bp, Homo sapiens; identical to SEQ ID NO: 59065

SEQ ID NO: 91180 - DNA, 666 bp, Homo sapiens
tttcgtaaaaatgttgacgactaacaagcatcaggaaacctttctttccaattcagtcattacagcaggggttgatgctttctcgccgttaatggggtgcacgctcctggccgctggctgcagtattatttttcttgctttattgacgggcgttgtttttgtttgattggatttgagttttgaaaaagagcgtctagacaacgatatgtcagtggcaggaggatgatggacttaggtactaggaaaaggagagaaacctagacgggaaaaaacgggttctttcctacagctgttactgttggtggaacgtgtctggtcttagcacctagctgctgggatggaagaggctgccagcggggaacggctccagggccggtgtcagcccgggccgatgacactatcccgcacccagcccctcatcgtggaggagcgcgggtggcacgaaacgccgcgctgccactatttttcataaccttcaatctgccctgacgctgatgatccactcattaatgccctgggagcttcactctataacggcgaaaggaggatatgcatagcttactttaaaaccccttttccaagcgctgggctttttacccaccttttgttctctaacggtcttgcgaggaacaaaaagactgtggttctcaaacttatgggtaaaaa

SEQ ID NO: 91181 - DNA, 413 bp, Homo sapiens
cacggattgattagggactgctctccacactcccatggacccctgagtaagacaccaacaagtacttgttgatggtctagcttgaaaggcactgtgcgaagagctgggaactcagaaaagggccagatgacgcttctgtctttaaggagtttgtcctttattatgctcatggtccaaaggctctgctaggatgggtacgaagaactccttttcctgttccacgattgtccatgctgtcagggctgctgctgtcatattctgtaaaagctgctcatgcacccattgctggcaaggacttagagaagctggagctctcatcactcatgggactgtgggtcactgccattgctttggagctcctttctagtctccactacaactgaacctttagtaaatggacaccctgcacgaaa

SEQ ID NO: 91182 - DNA, 4353 bp, Homo sapiens
ttgcaggatgtgagtttgaatctatggaatgtctacagcaagatggatcctatgtctctggagagtttgctttcagatgatttggtggcttttgaacatcagtggactagcttcttcgctaattttgacacagaaattcctttcctgctagaactttcagaatctcaggcgggtgagtgtggtggtgccaggaattctactgggcaccagttaatagacgtaggaataattatccacatccctaaccggcagccatttgttctctttgggtaatcactccacacgagaaaacctgaatgctggcaactttaacttcccttctgaaggacatctggtacgaagcactggtcccggcgggagctttgccaagcacatggtagcccagtgtgtctcaccaaagggacctcttgcttgttcgagaacatacttttttggagctactcatgttccttacttgggtggtgacagcaagctgcccaagaaaactgaacaaattaggctattgtcccagatatatgctgctgttattgaggctgttttggctggcattgcatgttatgctaaaacttccagtctaacaaaggccaaggaggtagcagagcaaactctgggatctgggttagattcctttgagttgattccgtttaaggcagccctgcgctccaagatgacttttcatatacatgctgtgaataatcagggaagaattgtaccgctggacagtgaagatagcttatcctttgtgaagacggcttgtatggccgtctatgacattcctgacttactgggaggcaatggttgtttaggatctgtggttttctctgaatcatttttgacttctcagatcttagttaaagaaaaggatggcactgttaccacagaaaccagctccgtagtcctgactgctgctgtacccagattctgctcctggctggtggaagataatgaagtaaaattgtctgagaaaacccaccaagcagtgaggggggatgagtctttcctgggcacttatctaacaggaggagaaggagcatatctttattccagcaatctacagtcctggcctgaggaagggaatgttcatttcttctctagtggccttctgttttctcactgtcgtcatggaagtatcatcatttccaaggatcacatgaattccatttccttctatgatggggattccaccagtactgttgctgctcttctcatagacttcaaaagctcattgcttcctcacctcccagttcatttccatggatcaagcaattttctgatgattgcccttttccccaaatcgaagatataccaagcattttactcagaggtcttctccctctggaaacagcaggataactcagggatctctttaaaagtgatccaggaagatggattatctgtggaacaaaagagattgcactccagtgcacagaagctcttcagtgccctgagccagcctgctggggagaaacggagttccctaaagttactctcagccaaactcccagagctggactggtttctccagcatttcgccatcagcagcattagccaggagcctgtgatgcggacccatcttcctgtgctgctgcagcaagctgaaatcaacactactcacagaatagaaagtgacaaggtaattatcagcattgtaaccggcctcccaggctgtcacgctagcgagctctgtgcttttctggtcactctgcataaggaatgtggcagatggatggtgtatcgccaaatcatggacagctctgaatgttttcatgctgcacacttccagagatacctttccagtgccctagaggcccagcagaaccgctctgcgcgccagtcagcctacatccgcaagaagaccagactgctggtggtgttacaaggctacacagatgttattgatgttgtccaggccctgcagacccacccagactcaaatgtcaaggcctccttcaccattggtgccatcacagcatgtgtggagcccatgagctgctacatggagcacagatttctctttcctaaatgtcttgaccagtgttcacaaggcctggtgagtaacgtggtattcaccagtcacaccacggagcagcggcaccctctccttgttcagctgcagagcctcatcagggctgccaatcctgctgcagccttcattcttgcagaaaatgggattgtcaccaggaatgaagacattgagctgattctctcagaaaacagtttttcaagtcctgagatgctacgatctcgatatttaatgtatcctggctggtatgaaggtaaattgaatgctggatcagtctatcccctaatggttcagatctgcgtatggtttggccgtcccttggagaagactcgctttgtggccaaatgtaaagcaattcagtcctccatcaagccaagtcccttctccggaaacatctaccacatcctgggcaaagtgaagttttcagactctgagaggaccatggaggtctgctacaacacactggccaactccttgagcatcatgccagttttggaaggacccacaccaccaccagactccaaaagcgtatctcaagacagcagcgggcagcaggagtgctaccttgtgttcatcggctgctccctgaaggaagacagcatcaaggactggctgcggcagtcagctaagcagaagcctcagaggaaagccctgaagaccagggggatgctgacgcaacaggagatcaggagcatccacgtaaaacgccacttggaacccctacctgcaggctacttttataatggcacccaatttgttaacttctttggtgacaaaactgattttcacccactcatggaccagttcatgaatgactacgtggaagaagccaaccgggaaattgagaagtataaccaggagctggaacagcaggagtatcatgacctctttgagctgaagccctagaggaaggctgggcccgtacgtcctgcagaatgtccaccttggagatggacgaacgggtgtcttaacctcagctctcctggaggcctctcccttaaggggctgtctttgttctccttggcctgtgtgggctggcttgagtgcatgttgtctttattccctgtatagcgctgaagagcatcacctgcaccattgattttgggggtcgggggaatactcaaggatgagcagatggggcctgcccgtctacgtgtgcaactggcagtccaggagctctgggtttctgataacaggatctcctttgggctcttgaggttggggagaagcattaggattacacagaggagctactgggacttagaaggaaccctggctgcctgaactgtggccgtgtctgggaggcgaggccacgacaggcctcaagcctcagatgctgctccacgagagccatcttccccagtggagtgcctgcctcccctgctaggcccgtttccctgaaggagctggccgtactggccgtgggcccagtcctgggaggagcagcacagccttgcccaggcccagtccacagagccagcagcttgggttgagatgaatgatgtgttcacaaatgaggggatttcccttctggactaaactgaaggagaggcttgttgctttccagaggtgtgtggctcttaagttgacatcagcttttccccttgtgggtggttctttagctctcctgtcacaccattcgggtgtcctaatgtagggacaagagcaagcctgctgctcaggccccctggcgaggcttcacctcactgtggaagggggcgtcctgcagctggttagtcttaggcctggtggctgatcacttgtggggtcagtctccagcacccagcgctcccacaagccttgccaaggaaggcctgcttttcagccacaaacttcaggaaactcatccccccgctccccaaagtgttgttgctggccctgggcttgtgtggctcctgaggattgggaatttcaaataattgcaatacctgagttagaattccttctaatggcatcgttttaagctggaccataaagcagaggggaattacaagtgtgtcccatgcctgaccttcataattggtgtgggggacaggggagtcacagccactgatatttaggtgatgtctcttaggacttcagtgcctcagctgcctgaactgtaaatgttttctgaatttcacatatttttttttgcatgccttaggaagaagcacataggtaaaaccagcagtttccagtaatatagggggtttttgagcaaggcccctggagcagcggagagacaagatggagcacatgtagtctgtgtgcctggtcacacagaggcctgcatgcaagtagcaaagcagctctcaagggcttgtcagtaaaatatattaaaaaaaaaa

SEQ ID NO: 91183 - DNA, 1014 bp, Homo sapiens; identical to SEQ ID NO: 59660

SEQ ID NO: 91184 - DNA, 1419 bp, Homo sapiens; identical to SEQ ID NO: 60176

SEQ ID NO: 91185 - DNA, 664 bp, Homo sapiens
tttcgtgggaaattggggcaaaacgcggagcgctccaggctcctacgggctgtgcggtgccagggctcgactgctgagcgtcgtgggctccgagagggacgcgggcggagggcagagtgggttcatgatatgaattgtaaaattggcgactgcgtaatgtaaaacacttaacaattgcttagatttcctttgggaaataacttgcttttaaattgtaaacaaattacaaacaaactgctagtgcttctggatcttcttaccgaaatggctgattcaggaggatgcggggtgagtgcactattgttcctgcctcgagatcctggctgtgaatcaccaacgagccgtgagtttggcttgaaagtgatttttaggttttggaacgggtttggggtggaatggcattaattgcgggagacagggaaggtaaaaaaaaaatcctctttcgtgagggctttaaactgctccgagccatctgattatcaaggtggtttaacactactctggtgttctcactattgttaatttctcactggcctttttaccaccattctgttagagaatctaatatttgcaagggcaaatggcggttttaatggaaatctgtctaaacccatggaaagaattgggaaatttccgtggcttcttcggctgcaacccctcgtga

SEQ ID NO: 91186 - DNA, 1963 bp, Homo sapiens
ggaattcgcccgccggagggtgtttatcgcggctagagagatgtcgctgctgcggtcgctgcgcgtgtttctggtcgcgcggaccgggagctacccggctgggtctcttctgcgtcagtcgccccagccaaggcacacattttatgctgggccccgtctgtctgcctcggcctccagcaaggagctcctcatgaagctgcggcggaaaacaggctactcctttgtaaattgcaagaaagctctggagacttgtggcggggacctcaaacaggcagagatctggctccacaaggaggcccagaaggagggctggagcaaagctgccaagctccaagggaggaagaccaaagaaggcctgattgggctgttgcaggaaggaaacacaactgtattagtagaggtaaactgtgagacagattttgtttctagaaatttaaaatttcaactgttggtccagcaagtagcccttggaaccatgatgcattgtcagaccctaaaggatcaaccctctgcatacagtaaaggtttcttgaattcctctgagctttctggacttccagctgggcctgacagagaaggctcactcaaggatcagttggctttagcaattggaaaactgggagaaaacatgattcttaaacgagctgcatgggtgaaggtgccatctgggttctacgttggctcttatgtccacggagcaatgcagagtccctcacttcacaagctggtgctggggaagtatggggccctggtcatctgtgagacgtctgaacagaaaacaaaccttgaagacgttggccgccgccttgggcagcatgtggtgggcatggcccccctctctgttggctccctggacgatgagcctgggggagaggcagagactaagatgctgtcccagccgtatttgctggatccctccattaccttggggcagtatgtgcagcctcagggggtgtcggtagtagactttgtgcggtttgaatgtggagaaggtgaagaggcagcagaaactgaataggttccagagacttttggcccaggaggaatatttacttttagctctggacatcattacaaaaaggaatatttcccaaacctcttcagaccgagaatgcatgggtaaaattattaaatagttgtataataaaaataattttttccttgtttgcgtaatactggatttagcttttctgtgcctttcaaaaacaacaggtgggccttattgacgtgatagtgtcgtggagaacaggcatcaacaatactgctgctcccttcaacatagatttattatggtatttctgaaatttctaacttatatgttctgtcttacaccttttatgacatagaactcttttgttctgtttttgctttgcgacactgtgaaccgtgcttctgcctcggaacctccctagttatattacttgtgccacatggatttctttaggattattgattcaaacctagagttgtctggaaaatgtgggttctcttctttgtgattgtctgtagtatgctttgaaggtgctctgcagtggtagacacactggttctggcctcatttaatgaaattaataacacatgcccctatttctcttttggatgatgtgtgggtgggtgggtactgaggtttcctggccagctgtaaggcagattttgacattcttgtgccagaaacagaaattagagtagtccagttacccagagagctcacttaacattgcctctttacttccccagtactgaaacatttcttcaagtattaacataaaattaccgtaacaagcagacccagaatactgaaaataactccatttgttcattataggtatcttttatttgaaaagtgaaaaatgctttggacacattacagatctgggtatttggattttgcctatggagtgcatatatgatttcaatgatttacaggctaaatagattttagaaataatcatcttaaaattga

SEQ ID NO: 91187 - DNA, 1851 bp, Homo sapiens
ggaattccagagtctggggtccctggactgagccatcagctgggtcactgagacccatggcaaggaaacaaaataggaattccaaggaactgggcctagttcccctcacagatgacaccagccacgccgggcctccagggccagggagggcactgctggagtgtgaccacctgaggagtggggtgccaggtggaaggagaagaaaggactggtcctgctcgctcctcgtggcctccctcgcgggcgccttcggctcctccttcctctacggctacaacctgtcggtggtgaatgcccccaccccgtacatcaaggccttttacaatgagtcatgggaaagaaggcatggacgtccaatagacccagacactctgactctgctctggtctgtgactgtgtccatattcgccatcggtggacttgtggggacattaattgtgaagatgattggaaaggttcttgggaggaagcacactttgctggccaataatgggtttgcaatttctgctgcattgctgatggcctgctcgctccaggcaggagcctttgaaatgctcatcgtgggacgcttcatcatgggcatagatggaggcgtcgccctcagtgtgctccccatgtacctcagtgagatctcacccaaggagatccgtggctctctggggcaggtgactgccatctttatctgcattggcgtgttcactgggcagcttctgggcctgcccgagctgctgggaaaggagagtacctggccatacctgtttggagtgattgtggtccctgccgttgtccagctgctgagccttccctttctcccggacagcccacgctacctgctcttggagaagcacaacgaggcaagagctgtgaaagccttccaaacgttcttgggtaaagcagacgtttcccaagaggtagaggaggtcctggctgagagccgcgtgcagaggagcatccgcctggtgtccgtgctggagctgctgagagctccctacgtccgctggcaggtggtcaccgtgattgtcaccatggcctgctaccagctctgtggcctcaatgcaatttggttctataccaacagcatctttggaaaagctgggatccctccggcaaagatcccatacgtcaccttgagtacagggggcatcgagactttggctgccgtcttctctggtttggtcattgagcacctgggacggagacccctcctcattggtggctttgggctcatgggcctcttctttgggaccctcaccatcacgctgaccctgcaggaccacgccccctgggtcccctacctgagtatcgtgggcattctggccatcatcgcctctttctgcagtgggccaggtggcatcccgttcatcttgactggtgagttcttccagcaatctcagcggccggctgccttcatcattgcaggcaccgtcaactggctctccaactttgctgttgggctcctcttcccattcattcagaaaagtctggacacctactgtttcctagtctttgctacaatttgtatcacaggtgctatctacctgtattttgtgctgcctgagaccaaaaacagaacctatgcagaaatcagccaggcattttccaaaaggaacaaagcatacccaccagaagagaaaatcgactcagctgtcactgatggtaagataaatggaaggccttaacaagtttcctcctccacgttggacaattatgtcaaaaacaggattgtctacatggatgatctcacttttcaggaaacttaaaatttacccattattgggaagcttaaatgaattgaagctatgcaagtcttttatattattaaatatttaaaagtaaacctgtactaatcta

SEQ ID NO: 91188 - DNA, 892 bp, Homo sapiens; identical to SEQ ID NO: 59043

SEQ ID NO: 91189 - DNA, 5345 bp, Homo sapiens
tggcccggtgccaatcgcctttcaaagagcccctctatgattaatcgcaatgcattattgataatcataattatagcaggacacatgcgcgctgcgcccggggccggggagccggggagggggcgggcgggccggcgggcggggggagccgccgccgccgccgccgctcgatttccgtaattttgagaagatttttttttagtaattttttattctgccccagctgatgtttgagccagcatgtcgcggaggaagcaagcgaagcctcaacatttccaatccgaccccgaagtggcctcgctcccccggcgagatggagacacagaaaagggtcaaccgagtcgccctactaagagcaaggatgcccacgtctgtggccggtgctgtgccgagttctttgaattatcagatcttctgctccacaagaagaactgtactaaaaatcaattagttttaatcgtaaatgaaaatccagcctccccacccgaaaccttctcccccagcccccctcctgataatcctgatgaacaaatgaatgacacagttaacaaaacagatcaagtggactgcagcgacctttcagaacacaacggacttgacagggaagagtccatggaggtggaggccccggttgctaacaaaagcggcagcggcacttccagcggcagccacagcagtaccgccccaagcagcagcagcagcagcagcagcagcagcggcggcggcggcagctcctccacaggtacctcagcgatcacaacctctctacctcaactcggggacctgacaacactgggcaacttctccgtaatcaacagcaacgtcatcatcgagaacctccagagcaccaaggtggcggtggcccagttctcccaggaagcgaggtgcggcggggcctctgggggcaagctggccgtcccagccctcatggaacaactcctagctctgcagcagcagcagatccaccagctgcaattgatcgaacagattcgtcaccaaatattgctgttggcttctcagaatgcagacttgccaacatcttctagtccttctcaaggtactttacgaacatctgccaaccccttgtccacgctaagttcccatttatctcagcagctggcagcagcagctggattggcacagagcctcgccagccaatctgccagcattagtggtgtgaaacagctacccccaatccagctacctcagagcagttctggcaacaccatcattccatccaacagcggctcttctcccaatatgaacatattggcagcggcagttaccaccccgtcctctgaaaaagtggcttcaagtgctggggcctcccatgtcagcaacccagcggtctcatcatcgtcctcaccagcttttgcaataagcagtttattaagtcctgcgtctaatccacttctacctcagcaagcctccgctaactcggttttccccagccctttgcccaacatcggaacaactgcagaggatttaaactccttgtctgccttggcccagcaaagaaaaagcaagccaccaaatgtcactgcctttgaagcgaaaagtacttccgatgaggcattcttcaaacacaagtgcaggttctgcgcgaaggtctttgggagtgacagtgccttgcagatccacttgcgttcccataccggagagaggccattcaagtgcaacatctgcgggaacaggttctccaccaaggggaatctgaaagtccactttcagcgccacaaagagaaataccctcatatccagatgaacccctatcctgtgcctgagcatttggacaatatccccacgagtactggcatcccatatggcatgtccatccctccagagaagccagtcaccagctggctagacaccaaaccagtcctgcctactctgaccacttcagtcggcctgccgttgcccccaaccctcccaagcctcatacccttcatcaagacggaagagccagcccccatccccatcagccattctgccaccagccccccaggctcagtcaaaagtgactccgggggccctgagtcagccacaagaaacctaggtgggctcccagaggaagccgaagggtccactctgccaccctctggtggcaaaagcgaagagagtggcatggtcaccaactcagtcccgacggcgagcagtagcgtcctgagctccccagcggcagactgcggccccgcgggcagtgccaccaccttcaccaaccctttgttgccgctcatgtccgagcagttcaaggccaagtttccttttgggggactcctggactcagctcaggcatcagagacgtccaagcttcagcaactggtagaaaacattgacaagaaggccactgaccccaatgagtgcatcatctgccaccgggttctcagctgccagagcgccttgaaaatgcactacaggacacacactggggagaggccctttaagtgtaagatctgtggccgggctttcaccacgaaagggaatcttaaaacccactacagtgtccatcgtgctatgcccccgctcagagtccagcatttctgccccatctgccagaagaagttcacgaacgctgtggtcctgcagcagcacatccgaatgcatatgggaggccagatccccaacaccccagtccccgacagctactctgagtccatggagtctgacacaggttcctttgatgagaaaaattttgatgacctagacaacttctctgatgaaaacatggaagactgtcctgagggcagcatccctgatacacctaagtctgcagacgcctcccaagacagcttatcctcttcgcctttgcccctcgagatgtcgagcatcgctgctttggaaaatcagatgaagatgatcaatgctggcctggcagagcagctacaggccagcctgaagtcagtggagaatgggtccatcgagggggatgtcctgaccaatgattcatcctcagtgggtggtgacatggaaagccaaagtgctggcagcccagccatctcagagtctacctcttccatgcaggctctgtccccgtccaacagcacgcaggagttccacaagtcacccagcattgaggagaaaccacagagagcggtcccaagcgagtttgccaatggtttgtctcccaccccagtgaatggtggggctttggatttgacatctagtcacgcagagaaaatcatcaaagaagattctttggggatcctcttcccttttagagaccggggtaaatttaaaaacactgcttgtgacatttgtggcaaaacatttgcttgtcagagtgccttggacattcactatagaagtcataccaaagagagaccatttatttgcacagtttgcaatcgtggcttttccacaaagggtaatttgaagcagcacatgttgacacatcagatgcgagatctgccatcccagctctttgagcccagttccaaccttggccccaatcagaactcagcggtgattcccgccaactcgttgtcatctctcatcaagacagaggtcaacggcttcgtgcatgtttctcctcaggacagtaaggacacccccaccagtcacgtcccgtctgggcctctgtcttcctctgccacatccccagttctgctccctgctctgcccaggagaactcccaagcagcactactgcaacacatgtggcaaaaccttctcctcatcgagtgccctgcagattcacgagagaactcacactggagagaaaccctttgcttgcactatttgtggaagagctttcacgactaaaggcaatcttaaggtacacatgggcactcacatgtggaatagcacccctgcacgacggggtcggcggctctctgtggatggccccatgacatttctaggaggcaatcccgtcaagttcccagaaatgttccagaaggatttggcggcaagatcaggaagtggggatccttccagcttctggaatcagtatgcagcagcgctctccaacgggctggcgatgaaggccaacgagatctccgtcattcagaacggtggcatccctccaattcctggaagcctcggcagtgggaacagctcacctattagtgggctgacgggaaacctggagaggctccagaactcagagcccaatgctcccctggccggcctggagaaaatggcaagcagtgagaacggaaccaacttccgcttcacccgcttcgtggaggacagcaaggagatcgtcacgagttaaagcagctcgggctggagacatagcattcattcctgttcagaatgcgacctatggtggcctcctactccttgccccccaccccgccccgccccttccttctgttccccagatctatgaactacaacattatgaagacattcttttgtaccttgttcaactttagagttctaagaaagcttatttattagcgatataaccttgctttgcaaacagaatgcaagcgttaactttggtcttctgtattttggactaaatactaattgactagagtgctgtaaacttgctgtaacatttatggcaattgcaagttgccctgctaggcagttgtaatctggcattaacttattttctatatccagtttaatatgaatctggtgttgatgcaatgcctcagtgatgcattagatctctaataaagtctgtatatacatgtacactttgatcctgctggaaaattttatcagcaaacacattgtctaatctttcaaaacagatttaaggaaaggactgaaagtacagactgaacagtgtggttctttgaaaggtttggttttttaatttttattctaaaattcaaccttttttttgtcgatttaaccatttccattttgaactgctatttgtattgtgctttttacttgagtcgtcttcaatgttaataagtttctgtacagtaataagcacgcagaattctttagagaaaaagaaaacaagcgttgttttggtagttgaaactgagacgtaacattttgccttgtaggtatattcacgatagaaaatgtgtgctggaatttcacaatgctgctaagtatagcatcttgaacaaccttcagtggagaaaatgtagatgctcttgtatatacaataagaaatatcactttcattcaaatgtacatatgttccttacaagagcaaatgcttcttcttgatcaagagagcaggtatagtgtttgtttattttgtcttaggtatggaagaaaaaaattggactgttacatgcactttcttggaaagttgaaaggaaagggggggtccaatttctttaacatttaatacttactaacaacagagatactgtaattttactcaagtaatcaaatacattttttttgcaacagataaaaaaaaaa

SEQ ID NO: 91190 - DNA, 1060 bp, Homo sapiens
gtttggggttcggctgccgggaagaggcgcgggtagaagcgggggctctcctcagagctcgacgcatttttactttccctctcatttctctgaccgaagctgggtgtcgggctttcgcctctagcgactggtggaattgcctgcatccgggccccgggcttcccggcggcggcggcggcggcggcggcggccagggacaagggatggggatctggcctcttccttgctttcccgccctcagtacccgagctgtctccttcccggggacccgctgggagcgctgccgctgcgggctcgagaaatgggagcctcggatatctccggagcgtttggataatgtgacagttggaatgcagtgatgtcgactctttgcccaccgccatctccagctgttgccaagacagagattgctttaagtggcaaatcacctttattagcagctacttttgcttactgggacaatattcttggtcctagagtaaggcacatttgggctccaaagacagaacaggaaagacaagaaaatgtccagaagattatcttagaaggcacagagagaatggaagatcagggtcagagtattattccaatgcttactggagaagtgattcctgtaatggaactgctttcatctatgaaatcacacagtgttcctgaagaaatagatatagctgatacagtactcaatgatgatgatattggtgacagctgtcatgaaggctttcttctcaagtaagaatttttcttttcataaaagctggatgaagcagataccatcttatgctcacctatgacaagatttggaagaaagaaaataacagactgtctacttagattgttctagggacaacattacgtatttgaactgttgcttaaatttgtgttatttttcactcattatatttctatatatatttggtgttattccatttgctatttaaagaaaccgagtttccatcccagacaagaaatcatggccccttgcttgattctggtttcttgttttacttctcattaaagctaacagaatcctttcatattaagttgcactgtagatgag

SEQ ID NO: 91191 - DNA, 1609 bp, Homo sapiens; identical to SEQ ID NO: 59274

SEQ ID NO: 91192 - DNA, 2652 bp, Homo sapiens
gcagggtctaagtattccgtctgcaaaactggcaggccaccaacggccgcgtcccagggcggcctgaaggatgctgataaccgggagccccgccctgggttcggctatcccgggcaccccgggccggcggggcgaggctctccaattgctgggccagagcgggacccttcctttccgcaccctcctgggtatctccggtcttcaggcctccttcggagagccctgctccgagcccattgggcttccaatcttggcctgcctagcgccgagcagccaatcagaaggcagtcctcccgagggggcgggacgagggggtggtgctgattggctgagcctgaagtcgccacggactcggggcaacaggcagatttgcctgctgagggtggagacccacgagccgaggcctcctgcagtgttctgcacagcaaaccgcacgctatggctgacagccgggatcccgccagcgaccagatgcagcactggaaggagcagcgggccgcgcagaaagctgatgtcctgaccactggagctggtaacccagtaggagacaaacttaatgttattacagtagggccccgtgggccccttcttgttcaggatgtggttttcactgatgaaatggctcattttgaccgagagagaattcctgagagagttgtgcatgctaaaggagcaggggcctttggctactttgaggtcacacatgacattaccaaatactccaaggcaaaggtatttgagcatattggaaagaagactcccatcgcagttcggttctccactgttgctggagaatcgggttcagctgacacagttcgggaccctcgtgggtttgcagtgaaattttacacagaagatggtaactgggatctcgttggaaataacacccccattttcttcatcagggatcccatattgtttccatcttttatccacagccaaaagagaaatcctcagacacatctgaaggatccggacatggtctgggacttctggagcctacgtcctgagtctctgcatcaggtttctttcttgttcagtgatcgggggattccagatggacatcgccacatgaatggatatggatcacatactttcaagctggttaatgcaaatggggaggcagtttattgcaaattccattataagactgaccagggcatcaaaaacctttctgttgaagatgcggcgagactttcccaggaagatcctgactatggcatccgggatctttttaacgccattgccacaggaaagtacccctcctggactttttacatccaggtcatgacatttaatcaggcagaaacttttccatttaatccattcgatctcaccaaggtttggcctcacaaggactaccctctcatcccagttggtaaactggtcttaaaccggaatccagttaattactttgctgaggttgaacagatagccttcgacccaagcaacatgccacctggcattgaggccagtcctgacaaaatgcttcagggccgcctttttgcctatcctgacactcaccgccatcgcctgggacccaattatcttcatatacctgtgaactgtccctaccgtgctcgagtggccaactaccagcgtgacggcccgatgtgcatgcaggacaatcagggtggtgctccaaattactaccccaacagctttggtgctccggaacaacagccttctgccttggagcacagcatccaatattctggagaagtgcggagattcaacactgccaatgatgataacgttactcaggtgcgggcattctatgtgaacgtgctgaatgaggaacagaggaaacgtctgtgtgagaacattgccggccacctgaaggatgcacaaattttcatccagaagaaagcggtcaagaacttcactgaggtccaccctgactacgggagccacatccaggctcttctggacaagtacaatgctgagaagcctaagaatgcgattcacacctttgtgcagtccggatctcacttggcggcaagggagaaggcaaatctgtgaggccggggccctgcacctgtgcagcgaagcttagcgttcatccgtgtaacccgctcatcactggatgaagattctcctgtgctagatgtgcaaatgcaagctagtggcttcaaaatagagaatcccactttctatagcagattgtgtaacaattttaatgctatttccccaggggaaaatgaaggttaggatttaacagtcatttaaaaaaaaaatttgttttgacggatgattggattattcatttaaaatgattagaaggcaagtttctagctagaaatatgattttatttgacaaaatttgttgaaattatgtatgtttacatatcacctcatggcctattatattaaaatatggctataaatatataaaaagaaaagataaagatgatctactcagaaatttttatttttctaaggttctcataggaaaagtacatttaatacagcagtgtcatcagaagataacttgagcaccgtcatggcttaatgtttattcctgataataattgatcaaattcatttttttcactggagttacattaatgttaattcagcactgatttcacaacagatcaatttgtaattgcttacatttttacaataaataatctgtacgtaaaaaaaaaa

SEQ ID NO: 91193 - DNA, 5778 bp, Homo sapiens
gaaaaccatcactgcccttgccttctcccctgatggcaagtacttggtcactggagagagtgggcacatgcctgccgtgcgggtttgggacgtggcagagcacagccaggtggccgagctgcaggagcacaagtatggtgtggcttgtgtggccttctctcctagcgccaagtacattgtctctgtgggctaccagcatgacatgatcgtcaacgtgtgggcctggaagaaaaacattgtggtggcctccaacaaggtgtccagtcgggtgacagcagtgtccttctctgaggattgcagctactttgtcactgcaggcaaccgacacatcaaattctggtatctcgatgacagcaagacctcaaaggtgaatgccactgtgcccttgctgggccgctcagggctgctgggagagctacggaacaacctattcactgatgtggcctgtggcagaggaaaaaaggcggacagtaccttctgcatcacgtcctcagggctgctgtgcgagttcagtgatcgaaggcttttggacaagtgggtggagctgagggtctaccccgaggtgaaggatagtaaccaggcctgcctgccccccagttcctttattacctgctcctcagacaacaccatccgcctgtggaacacagagagctccggggtgcatggctccaccctccaccgaaacatcctcagcagtgacctcattaaaatcatctatgtggatgggaacacccaggccctgctggacacagagctgcctggaggagacaaagctgatgcatccctgttggatccccgcgtgggcatccgctcggtgtgtgtcagccccaatggacagcatctagcatcaggggaccgtatgggcacacttagggtgcacgaacttcagtccctgagtgagatgctgaaggtggaggcccatgactctgagattctgtgcctggagtattctaagccagacacaggtctgaaactgctagcatcggcgagccgggaccggctgatccatgtgctggatgccgggcgggagtacagcctacagcagacgctggacgaacactcatcctccatcactgctgtcaagtttgcagccagtgatgggcaagtccgcatgatcagctgtggagcagacaagagcatctacttccgcactgcgcagaagtctggagatggagtgcagttcacacggacacaccacgtggtgcggaagacgaccctctatgacatggatgtggagcccagctggaagtacacggctatcggctgccaggaccgaaatattcggatatttaacatcagcagtggaaagcagaagaagctgtttaaagggtcacagggtgaggacggcacactcattaaggtgcagacagacccctcagggatctacattgccaccagctgttctgacaagaatctctccatttttgacttctcctcaggcgagtgcgtggccaccatgtttggccactcagagattgtcactggcatgaaatttagtaatgattgtaaacatctcatctctgtgtctggggacagctgcatatttgtgtggcgcctgagctctgagatgaccatcagcatgaggcagcgtctggccgagttgcgccagcgtcagcggggcggcaagcagcaaggaccatcctctccccaaagggcttctggacccaaccggcaccaggccccatcaatgctgtctcctggaccggctctctcatcagacagtgacaaggagggagaagatgaggggactgaagaagaacttccagcactgcccgtccttgccaagagtaccaagaaggcactggcctcggtccccagcccagctttgccccgaagcctgtcccactgggagatgagtcgggcacaggagtccgtggggttcctggacccagctcctgcagccaacccaggacccagaagaagagggcgctgggttcagccaggtgtggaactgagcgttagatccatgctggatctgcggcagctggaaacactggccccaagcctgcaggaccctagccaggactcgctggccatcatcccatctggtcccaggaagcatgggcaggaggcccttgagacttcactcactagccagaatgaaaagccccctcggcctcaggcttcccaaccttgttcctatccccatattatccgattattgtcacaagaggaaggggtctttgcccaagatctggaacctgcacccattgaagatggtattgtctacccggagccgagtgacaaccccaccatggataccagtgagttccaagtgcaggctccagcccggggaactctgggaagagtgtacccaggcagcaggagctcagaaaagcacagccctgacagtgcctgctctgtggattacagcagcagctgcctttccagcccggagcaccccactgaagactctgagagcacggagcccctcagtgtggatggcatctcctcagaccttgaagagccagctgagggtgatgaagaagaggaagaagaggagggaggcatgggcccctatgggctacaggagggcagcccccagactccagaccaggagcagtttctaaaacagcactttgagactctggccagtggagctgctccaggggccccagtgcaggtcccagagaggtcagagtctcggagtatctcttcacgattcctgttgcaagtacagacccgcccactcagggaaccatccccatcctcctcaagcctggcactgatgtcgagaccagcccaggtgccacaggcatctggtgagcagccgagaggcaatggtgccaatccccctggagcacccccggaggtggaaccgtcctctggcaaccccagcccccagcaggcagcctctgtgctgttgccacgatgccgtctcaaccctgacagcagctgggctcccaagagagtggccacagccagccccttttctggactccagaaggcccagtctgtgcacagtctggtgccacaggaaagacatgaggccagtctgcaggccccttcaccaggcgcactgctgtctcgggagatcgaagctcaggatggtctgggctccctgcccccagctgatggccgtccgtctcggcctcactcctatcagaaccccaccaccagttccatggccaagatatcccgcagtatctctgttggggagaacctgggcctggtggctgaacctcaagctcatgcccccatccgagtctcaccactcagcaagctggccctgcccagccgggctcacctggtcctggacatccccaaaccactgcctgaccgtcctaccctggctgcattctctcctgtcaccaaaggccgggcccctggcgaggcagaaaagcctggcttcccggtgggcctaggaaaagctcacagtacaactgagagatgggcctgtttgggggagggcaccactcccaagcctaggacagagtgccaggctcatcctgggcccagcagcccctgtgcccagcaactgccagtcagcagcctcttccaaggccctgaaaacttgcagcccccaccccctgagaagactcccaaccccatggaatgcaccaagccaggggcagccctgagccaggactcagagccagcggtgagcctggagcagtgtgagcagctggtggcagagctccgcggcagcgtgcgccaggcagtgcggctctaccactcggtggctggctgcaagatgccctcagcagagcaaagtcggattgcccagctcctcagagacaccttctcttcagtgcgacaggagctggaagctgtggctggggcagtgctgtccagcccaggcagcagccctggggctgtgggagccgagcagacacaggccctgctggagcaatactcagaactgttgcttcgagccgtggaacggcgtatggaacgcaaactctgagttctggaagcctgtcccaagtgaatgaatgctccagcgattccaaactgcagcccctctgcccctcaccaaaacctgcggggctgcttggagtggaaagcagggagcagtgttcagaggcaaagcagccttcccagccgctcctcgtggggggcctgtatttattaatttatttccctgactgttgcctcacttccttggaactcctgcctccacagcccctccagtggcagggacaggtcttgggtctttgtcatcttggtgctgtgagaggtaggagggcagcctgccccatctaggaatctgggaagggctggccctctcttagaagccatttgaaattactgcagggattagctccctgtggtggagcatacacagggtactctggggtcgaggtgagaggtgatgtggtattcagtgcccgtcagccaactgtgggccttcacctctacctgcacttcccctctcacaccagctgcactcccgtggctgccagagcagggtggttttccccaatacctggagctcagaaaggcagagccatctggccctccagggtgtccccagccatcaggagacttgagttggtatttggacctgagcccgcacattccactcccattctccctccaagaggggcccagcattgtatttccctgtgaccccttactctcctggccagaacttgagccagctgtgggatgttgctgcaggacagtaagccctcacctgggcaaacatgaagctctggcctcctttcctcagccccttgttcttccctgtcctccaccctggaccccagccggctgctggagcccagaggccaccttctccctgcatcctgaatgatgcttagtcagaagcctgtgttggaacatccctcgtttacggggcgctggcctacctcctgaggacctcagccacagatgagatcacacgcatgcacgtgcacacatgtacacacacacacctacctgcacagcacgctgttgagtgttggttgctagagtatccggctggctgctgtgtgcctggtttcctcacatcctgcctcagcttcaccaccctggcttatgtggcacacctatcagggagcagaaaaggggtgcagtacactaagtgaacccagattctggattcttggtgtccacagcctagctgatacgagatagcccataggacacctggtttaggtagaaggagcctcctcaaaggcagtgctgggcacccacgggtgtgctggatactggagtttgagaggagggaggtgctggggccaaaggagacactagaaaagtggtagatgggacaggtaagtggcagaggtgaggggataagttagaatgtaaaagggcagtaattaggggtgagggaaaggagataggggaccctaggaggtagagtgggaccatgtcgtgaggcagttgaagagttgaggaaaggtttttctgggccctactgctcccctctgctgcaggtaagtcagagcagctttaccacagcttcaggccacgagagccccttcacccgccctgctgcgccataggcagaggcttataaagaaatgggttctgggccaggtgtggtggctcaagcctgtaatcccagcactttgggaggccgaggcgggtggatcacctgaggttaggagttcgagatcagcctggccaacatggtgaaaccctgtctctactaaaaataaaaaaattagctgggcgtggtggtgggcgcctgtaatcccagctactcgggaggtttaggcaggagaatcgcttgaaccctggaggtggaggtggaggttgcagtgagccgagatcgcgccattgcactccaacctaggtgacaaagctacacgccatctcaaaaaa

SEQ ID NO: 91194 - DNA, 601 bp, Homo sapiens
cgaattcccgggtcgacctattgcatcaacaaagctcccatagagaaaagggttcaacctcttcagagttttgttttatttctaataatacaaaaatgagaggcgtgaataacaaccttaggttttatttagctggaatccccaaaattaacaaagaggcatttagcgaagcagatgaagaagaggtatttaatgattaatgattctcccagtctcttgactaagttgctgagtaaattgggcaaccttacaaattctttcgtccttaatgtttttaaatgtagcatggctagaggaaagatcataggcataataaatcagtaaacctggaatagtgcctgactcaagcatgtctactttgtgatgttgaaccaacccctttaccccatcaaggctgaggtttccaaaattccacgagtgtacagtgctaggtttggggagctttttgtttgttgagcataacaaacaacttttaaagtctaaataattagaaaagaccttattagttatgcatgtatctgttaattgagaatatacatacaaaaacatcctgaattctacaggtatttaaatttaattttaatcttctcaatcataaaag

SEQ ID NO: 91195 - DNA, 574 bp, Homo sapiens
ctccaggtcggaatgcctcttggtgatctccaaaaaattcaaagactttgacttctttgtcaaacgtcagactcttccaaaaccaggtgatacccatagacgtgatgttgaggggttgggaataaaagatattgcagaatatggtgacattgtcattcaggggtgtgatctgagtcccccctgccatcatctctactttcagatcaccttcggtcgtcagcgcccacagcagaatcaggagcgccgcgcacgtggaggcggcagccctccacgtcatcgccgcggctgctgttgtgtaatttttttcgccgagtgggagcaggcggcccggtagaaaccaagggcagggggagacctctgttgcgtaaagagttgacggagacacagccgggatttccagccggcgcttttgcacatcccacttcttcagatcccttcggcaactgcgaagtcgcctggatttcccaggttcgccctgcaggaagccaggcgcgtgtccagccccacccgcgccgcactttagcccgaagaagggcgccggccggggaatcctccctcgcacgaaatcgtcgcg

SEQ ID NO: 91196 - DNA, 2210 bp, Homo sapiens; identical to SEQ ID NO: 59029

SEQ ID NO: 91197 - DNA, 4677 bp, Homo sapiens
gaaattggtttttcctcggccaataatctgtttctttaaaaaaagaaaaattcgttacctattgccactgacctggctacttcagagttcggagggaaatagcgtctccgtaccctcgccccacctgggctgctcctcggaccgccgctcgtcccagactccaggaggcgccaccaggcctcgctgaccccgctccatatctccgggagccctcagctggtcggccgcggcgaccggaagctccggactgaggtactggttccgcccgccgctcttccagccgagactcggcagcggcggtcggagcggctgccacgccgcacctgcccgcgagggggcgcgccaggcccaggccgcagccgactgccgcgctctctgcccccgccctccgccatccccggactgcgctcacctgtctgggccgctggcctgggaggcgggggccggcgggagccaagccgaggaaagggcggagcggctctccgggcgcgtcatcggagcaccatggcggagctaggagctggcggcgacggccacaggggcggcgacggcgcagtgcgaagcgaaacagcacccgacagctacaaagtgcaagataagaaaaatgcctccagccgccctgcctctgcaatttcaggacaaaataacaaccactcaggaaataaaccagaccctccgcctgtgttacgtgttgatgaccggcagcggctggcccgggagcgacgtgaggaacgggagaaacagctagctgcaagagaaatagtgtggttagaaagagaagagcgagccaggcagcactacgagaagcacctggaagagcggaagaagaggttggaggagcagaggcagaaggaggagcggaggagggctgctgtggaggagaagcggaggcagagacttgaggaggacaaagaacgccacgaagctgttgtacggcgcacaatggaaaggagccagaagccaaaacagaagcataaccgttggtcgtggggaggctctctccatgggagccctagcatccacagtgcagatccagacaggcggtcagtttccaccatgaatctttcgaaatatgttgatcccgtcattagcaagcggctctcctcttcatctgcaactttactaaattctccagatagagctcgccgcctgcagctcagcccatgggagagcagcgttgttaacagactcctgacgcccacacattcgttcctggccagaagtaaaagcacagctgccttgtctggagaagcagttatccccatttgtcctcgttcagcatcttgcagccccatcatcatgccctacaaagctgcacactctagaaattcgatggatcgaccaaaactctttgtaacaccacctgagggctcttctcgcaggaggatcattcatggcacagcgagctataaaaaagaaagagagagagaaaatgtactcttcctcacatctggcacccgaagggctgtatctccatctaatcccaaagcaagacaaccagctcgctcccgactttggcttccgtccaagtctcttcctcatttgcctggcacacccagaccgacatcctccttgccacccggctcagtcaaagctgctcctgctcaggtccggcccccatcccccggcaacatccgccctgtcaagagggaagtcaaagtggagcctgagaagaaagatcctgagaaggaacctcagaaagttgccaatgagccctcactaaagggcagagcacctttagtgaaggtagaagaagccacagttgaagagcggacacctgctgaaccagaagttggccctgctgctccagccatggccccagctccagcctcggccccagctccagcctcggccccagctccagccccggtccccaccccagccatggtctcagccccgtcatccactgtgaatgccagtgcttctgttaagacttctgcaggcaccaccgacccagaggaggccacaaggcttctagctgagaagaggcggctggcccgagagcagagagaaaaggaagaaagggagaggagggagcaggaagagcttgaaagacaaaagagagaggaattggctcaacgtgtggctgaagagaggacgactcgccgtgaggaggagtcgcgcaggctggaagccgagcaggcccgggagaaggaggagcagctgcagcggcaggcggaggagcgggcgctgcgcgagtgggaggaggcagagcgcgcccagaggcagaaagaagaagaagctcgcgttcgtgaagaagcagagagggtccggcaggaacgagagaagcatttccagagagaagagcaagagcgcctggagagaaagaagcgacttgaggagattatgaaaagaaccaggagaacagaagctacagataagaaaaccagtgatcagagaaacggtgatatagccaagggagctctcactggaggaacagaggtgtctgcacttccatgtacaacaaacgctccgggaaatggaaagccagttggcagcccacatgtggttacctcacaccagtcaaaagtgacagtggagagcactcccgatttggaaaaacaaccaaatgaaaatggtgtatctgttcagaatgaaaattttgaagaaattataaacttacccattggatctaaaccatccagattagatgtcaccaacagtgagagcccagaaattcctttgaatccaattttggcctttgatgatgaagggacacttgggcccctgcctcaggtagatggtgttcagacacagcagactgcagaagttatatgagtgtttcttctgaagaaccaaagctgaaatttaatgagaatttctacaattaatggaattcctttcctgctataaaggagcatcccctccacccgttttctagagttcttgaccatcattttgaaaagatttattaaaactagctaaagacaacagactggatagcttttctaataattttcatcaataggaaaaaagaaatacgtctcattcttcaatactttaaaatggctttttccagtgtgctccttcttagcaatcaatatttttctgcattctttaaaagacaagagaatttggttataaaagaaatgggctgactaggcatgatttttttggtcttaaaagcttaacatgtaaaattggcaaaaaaaattttttaccttttataatacttgaaaaataagtacctctttgttctacaagtagaatgaataggagaagagtttaagcctgtttttttaaaatattattgcaaagagctctatttgtagaagcaaattataggcagattaccaggttcttataaatacagcttgtacatggacattctgcaaacccagctgtcacatttttcttgcaactccttttgcaaaagcagactaaaatgttttaaaatgtgaaaaaacattattttttcaaagcaagaaaataatttactgccctcttacataatgtatttataaagtttttccagataaactaatcaaataaattagaataatgtgacaacattacaaatttaatttgttagctgcattccttctgatgttaccacgatagaatgttactgatgattcagggctatttctgaagtctgtatgttgctgctgtccccagtgatggtggacttatctttgccttacctgatcacaaattatgttggggaaaataaagatttaatatttctttaaatagaaaaagaatttggttttgctcgtttaagagcaatgagaaaatgatggaatgttgactgtgtttggcacacaggacacggaccttcatggaagtccttgctctgcgtggcatctgtcagcttttcacctttcattcttattcttcacttttgctgctgagcctagctgtacaaacttgcactttcatttgctaatataaattcagttttattttaccattttagagactactaatgattaaatgtagaaggagagggtgcacatgtttttatgtggagtgtttaaaagataaatttataccactgtaatgtgcagcttttattaaaagagaaattggttgaactgctaggttgaatgagagacttcatcctattggacttttttttttaatcccaggcatatggtctttagtaatggcttgtaaatttgtgaaaacattgaatttgggggttttccctgtttttcagttgtccatgtacacatagtcattatattagaaaagaaaattattataacaaacttgtttaatttgtttaaatccacatagcatgaaacaccaaaaaaaaatgtttgacatagttttacttttagctttctcatatgttataacttcactcagattgattcttgagtcttcagattgtccttcatttaactcagtgacattttcctagcctcctgttgattaagcatataggatagccttatttaaaatttagagcagtaggtgtattttggctgtttttctttttcatgtgtgtttttaaactttagtcatcattagcaaacggaaagccttctaagtaatcaagttttaattagaagtggtgcaaaattcttaattatattgtgttaaagagcagcgctgccagagaatgaccctgacctttacaatggctggcttgctttttggccagcactggaaaaatctatatttacttgcagaccttaaggaggtcttcagtattcaccctacattaag

SEQ ID NO: 91198 - DNA, 4884 bp, Homo sapiens
ttttttttttttctcttttctgggtctataaaagcccaggtttattcccatttgctacaacagattcccttctaataaaatgcactggcaaggtgaccagtgagtgacccaatgtctggttgggaaatctctctctgaacttcttgctgttggacctaaaatggggatgtaaattggatcacagctggcttggcattgaaaaaaatacatacccaacaaacaattacaacttctttatatggcagtttttactgggggtctaatactctctttactgtctcaagtggaagtccaaacaaatttcatttttgtagtaaaaaatctttatttccaaaatgatttgttagccaaaagaactataaaccacctaacaagactttggtaagaaagagacttgatgcttcttataaattccccattgcaaacaaaaaataacaatccaacaagagtcatgttacccattcttagccattaacctggttttaagtctccaaaatcaggattttaaaatgtacccaactgggaccaaatacaaacatgagacactagggtggcttgtccttgattaggaatcaccagcttaaggaactttatcatgggctgagagttagatagatagcttagaacaacattgcaaaagtgggtgcttctacatgaggacttttttccccccaagtagaaaaataattaaatcttgtgtttctttatattgtgctttttttgggagaaagcaattcatttaaggatttaaaacatgttggatacaaaggtagttcagagatgtaataatggtccctccaagaacaagggagcaaaagccctatcttttattgaaaatgatggaggtggaggacaatataaaaaagaaccttctgaacacttacttagcttaaagacatgaaagacccagtgagtttttattgaatagtctctcttgtgttaaaagtacatattcaggactatactatgttgtatttggaaatattctgatgtgtttaatacaaattcgtagtgtattcagagcattgtatgtgtctcaccaatggtacacatttggattaagcagtaataaggcctataaaagaagaaatgaaacaatagttttcaacaataaatgcaggaagaaaaactgctgatggacccaactgagaaaatgtccttttacactatcccttggtggtcagtctccctgaatctggtgtgcttataattgctgggaaggcagtgtaaacctgtggccattcctatgcatgtctgggaggaccacagccctggtgtggagcactgacaggtttgactttccaccagaattgcttgctcagcttaatcccataatattcctttcccttagatttgttttctgtctcggtaactttttctctctgcatataaaatttcatgactaaaataactttaaagtacagagattgtattttgttgaaggaatgcattgggggggctttgggcagacttagcaaaatgtttgtatagcaaaaatgttttcttgctaaaaactgatttgcaaacttgaacgtctagatgtgtgtaggaagattttaaaatttaggcaaattggtctctaaagagaccaattttgcttcctttgtcttggttccaataaggatttagtaccaaaaagttcagaaggctggcttcccagaagaattgtacatactcctctgaacccccaaaagcaagggaaaaatacactctaagcttattatttatctcaggtgtaaaaactagctaccttatatttaaataaagcagccataatttatttatttatttttgttgggggggcatcaggaaccaatatcaggggtgagacaaatgtattccgaatttctcagtgaaagaacaaaagccacccaacatcaatgctcctcttcaagtctaccagctctgtttttccccaggaactattgatgactgaggagacttgaaaagagacctaaagttccactaagaagagatgggcaaacaatggtttcattgaacaggccaaagatgagaatgtggggaatctgctgtcttcatctgtgaatgtttcctacctgccgcaccctgggactcaggcatagtcacttccagacatggttgcctctccatgtggagtaggtcaaagtctccgtcctccctggccaggtggaagctccagagggacatgtttcagcttagtacaaggtggctgacactactcctctgcaggaagaggctggctggaggtgagggcgccccactcagcctgtacccatcaagaagtattcagaaaggatgtctctggcatccacaagactactgggcgaaccacactgcaaaaatgaaaactagcgtacacaatttaaattgtcttaaacaagcaaataatccagccattggtgactctggaatctagagtgcagccctggggaactcgtacccttgctaacaaggatgaacattgcatgctctgatctccttcttgtctttgcagctggtaaactgggagcttttgaatctcttctttacagtcatgtaacgttcctgaattccacctccgcacagtttggtgcattctgaccaggccgtccatgggcgcatcctacaacctgggaactgctccccttcagactcttccttcagctgctcactccgccggctctctcgggcctccctccagcgtagcttttggatggatggatttcgaaggcattttcggatgcggcacttttttcgctgcacagtctctgggcagggtgcacctccaaactgaggctccatttggatcatccgggttcgaatcacgtggcctttcccacatgacttgttacattccgaccactgggaccactcggtgagctcacagtcaatggggcattcagggagcatgcacttctccacctgctccagatcctcattgcagtctccaagttctgccagagacttgagcatccgctgtcgggttcgcatgcccttcccgcaggtcacgctgcagtcactccactcggaccatggggacagcaagcatgggatggtgtggcactctggcatcatgcacttctctgcctgtgatgtctcggctttgcacatggagccatctgcggggttcatcttgatcatgcggtaccgcttcttcatgcccatgccgcaggtggcgctgcactcgtcccactcgccccactcggtcatcaggcagctgctgggagagcactcctcgttgaccgtgcacttctccgtttcctcagtgggcagcgtgcacacggagccgtcctccgggaactgcttcacatacctctcccgggacctcatgcccatgccgcaggagatgctgcagggcgaccaggtgatccactcggacatggtgcaggtggagccgtcttcgtcactgcagccagggcccatgcagggctggaagtcctgggtgtcagggcaggggacgctgaggtccagctgtgctttcagcatgcgctgtcgcatcctcttgcctttgtcacaggtggaggagctgcaggcggaccatggggaccagttggagtagatgcaggtttcaggggtgtcatcttcatctttctcttctggagccaggtcagctacaatatcatcgacattgtcaggtacaatattgcattgttcacccttccgtgcgattctctcgatgacaactctggctacttgagtgatggacccaccctctgggtcatagaaaggactctgaggatggtccaggctggtcaggggccggattttctcctggggaatggtgggtttgttgggtgactcataggtcaccccgctgtcggtgccagcgtcccagggaatcaggtcttgcaccaccttctggacccagccacattccttggtgcacagatcttctgcagataagcctacgttccagtcgggactagggcccatcatggtcaggaaggacattaaatggcgcgttctgtccacggaaaattcagctgaaggtgctgctctcacgttgagaggctgccaggctggccattgggctttggctttgatgacggtgaggacctcatcactctgttgtcgaatttcttcctccattttcacgggtgagcccaattctgcaacttgtttgacgccttcgctggcatatcctccatattcccacagtacataattcttggagtgggatcctccgatgatcgcagaccagtggttggcccgacgagggtaatcctttgggtgtgtcttctcggaccaattcccataaaatgtgagtctgtacttggcagttccgcaggcacagcagtctaagatgggtttgtcagtcaccccatcaaatgtggaatcttgttcacaaagtttcttggtcagagagccctcatcttgaaaataaataatgcgtttttgtacgatgctggccttcagaatcacgcagcctgttcccgctggtggtgctatccaaaacacctggatccgggtcctcctccgtggagtgctttcagtgactgcaacagggcaattgctcataaactgagtttcttcttcgtctatgatctggaaggtcccagcatggtcttcttccttatcaccctctctgttctctctgagggcaattaatgtgaatcctctgaagtaggagggaggagcagctgaaagtgttacgcggtagctggttcccggcttgtagaagtcggggtcgccctccacgcggaggctgaactcggtgtagccctcgcgccgcgtgccctgggcgcgcaggatacggctacagtagccctctgacttgggcactttgtccagggtctcgtcggagaaggccagcgccgcggccaggggcagcgccagggccagcagtgccggagtccggctcagcttcaggggcgccggggacagcctcatcttcgcagcccccaactttgtgccgcggccgct

SEQ ID NO: 91199 - DNA, 631 bp, Homo sapiens
tttcgttggggctttaatttgctatttgctgatgactaaatagggagctttttacgtatttattggccatttgaatatgctccgttttgttaagtctttaagagtttgcccccctacctttttaaagttggattcttgtgttttttccttattgactgtgagagttctctatattctctgatatgagtcttttgatatatatatatattctaaatatctttttccaacctggaaataactatactccatacctaggaaaatattattttggaagaatctaattttgaaagcctttgagttttggtacatttctaaacacttagcttgcggatcaagaatgtcagcaacagatgtaaagatttctcttgtataaaatttcggccttagtggttactttaaaaaaccagaaggtgtttttttctcttaaacatacttgtcaaattatttccatacttcttatgagatgttttagcattttgcgctgggatttatttaatgcaattaacatataggccttaagtgattaccggcctatggcaaatgatctttctgttagaggaggcaaaggggccttcaaggtacgtttccgggaatggccaaacgggcaaacgggcacaagtaaaaaagccca

SEQ ID NO: 91200 - DNA, 2835 bp, Homo sapiens
cgacccacgcgtccgaggaggcggcggcggcggcggcggcacacagccggttgttgagccgcttagccacctcgtgtatgcagagaccatgtgtgtctgatctgctgggatcctatagctggaacaggagggtcacgcagcacaatgccagctctgcccctggaccaactccagatcacccacaaggacccgaagacaggaaagctgaggacttcaccagcgctgcaccccgagcagaaggcagaccggtattttgtgttatacaaaccgccccctaaagacaacattcccgccctagtggaggagtacctggaacgcgccaccttcgtagccaatgacctcgactggctcctggccttgcctcacgataaattctggtgccaggtgatctttgacgagactctacagaagtgcctggactcctacctgcgctatgtcccccgcaaattcgacgagggggtggcctcagcccctgaggttgttgacatgcagaagcgcctccatcgaagtgtttttctcaccttcctccgcatgtccactcacaaggaatccaaagatcacttcatttccccttctgcgtttggagaaatcctctacaataacttcctctttgacattccaaagatcctggacctctgcgtgctctttggaaaaggcaactcaccactgctccagaagatgataggaaacatctttacacagcagccaagttactacagtgacctggatgaaaccctgcctaccatccttcaggtcttcagcaatatcctccagcactgtggtttgcaaggggacggggccaataccacaccccagaagcttgaggagaggggccgattgacccccagtgacatgcctctcctggaattaaaggacattgttctctacctttgtgatacctgcaccacactttgggcctttctggatatcttccctttggcttgccagaccttccagaagcacgacttttgttacagactagcttccttctacgaagcagcaattcccgaaatggagtctgcaattaagaagaggaggcttgaagatagcaagcttcttggtgacctgtggcagaggctctcccattccaggaagaagctaatggagattttccacatcatcctgaaccagatctgcctccttcccatcctagaaagcagctgtgacaacattcagggcttcatcgaagagttccttcagatcttcagctccttgctgcaggagaagaggttcctccgggactatgatgcactcttccccgtggccgaagacatcagcttgctgcagcaggcctcatcagtcttggacgagacgcggactgcctacatcctccaggcagtcgagagtgcatgggaaggggtggacagacggaaagccacagatgctaaagacccatcggtgattgaggagcctaatggggagcctaacggggtcacggtgacagcagaggcagtcagtcaagcatcatcacatccggagaactcggaggaagaggagtgcatgggagcagccgcggctgtgggccctgccatgtgtggggtggaactggactctctcatctcccaagtgaaggacctgctgccagaccttggtgagggcttcatcctggcctgcctggagtactaccactacgacccagagcaggtgatcaacaatatcctggaggagcggctggcccccaccctcagccagctggaccgcaacctagacagagaaatgaaaccagaccctacacccctgctgacgtctcgccacaacgtcttccagaatgacgagtttgatgtgttcagcagggactcagtagacctgagccgggtgcacaagggcaagagcaccaggaaggaggaaaacacgcggagtttgctgaacgacaagcgtgcagtggcggcacagcggcagcgctacgagcagtacagcgtggtggtggaggaggtgccactgcagccaggcgagagcctgccctaccacagtgtctactacgaggatgagtacgatgacacatacgatggcaaccaggtgggcgccaatgatgcagactctgatgacgagctcatcagccgcaggccattcaccatccctcaggtgctgagaaccaaagtgcctagagaagggcaggaggaggatgacgacgatgaggaagacgatgctgacgaggaggctcccaagcccgaccattttgttcaggaccctgcagtgctgagagagaaggcagaagccaggcgcatggcctttctcgccaagaaagggtaccggcatgacagctcaacagcagtggccggcagcccccgaggccatgggcagagccgcgagacaacccaggaacgcaggaagaaggaagccaacaaggcgacaagagccaaccacaaccggagaaccatggccgaccgcaagaggagcaaaggcatgatcccatcctgagacctggtgcagggccagtggggaggcagcggcaccagactcaccaggccgcgctcccatcgcctggggcctcctcactaggggccccaagttcaactcaacccctcaacagcctcagctttgcagcccctgagaaggccgcctctcatctaccagccagccatgagcgccttcctgcagaacacacagtgccttatgccacagccgaagaatccgtggggccggcaagcaggcaccttcccccagctgcgctagcgggaaagagatggggatggagtcccaaggcaagcgccccaaacctcgggccacaagacaccacttcccctttaccctggacagcaggaaacctgtatattcaaaaacacaaaaagtcctgctaataaaatttttgaccctttcaaatgaaaaaaaaaaaaa

SEQ ID NO: 91201 - DNA, 396 bp, Homo sapiens
ttggagaagcccgttcaccgcctccagctgctgctctcctcgacatggaccctgagacctgcccctgcccttctggtggctcctgcacctgcgcggactcctgcaagtgcgagggatgcaaatgcacctcctgcaagaagagctgctgctcctgctgccctgcggagtgtgagaagtgtgccaaggactgtgtgtgcaaaggcggagaggcagctgaggcagaagcagagaagtgcagctgctgccagtgagaaggcacccctccgtgtggagcacgtggagatagtgccaggtggctcagtgccacctatgcctgtggtgaagtgtggctggtgtccccttcccctgctgaccttggaggaatgacaataaatcccatgaacagcaaaaaaaaaa

SEQ ID NO: 91202 - DNA, 1568 bp, Homo sapiens
tttcgtgagaaaggttgtgatggcggctatagctgcatccgaggtgagttccacccaccgtacaccgggggttttgttggtgagggttccggggagcggcctggagagaggtggaggcgaagtctagtttcgcttcagggaggctcagacactgtggggtcaagtcggcggtggaggccctaggcccagcctgtggggaccggcggggactcggcctgggcagtcctgggagaagctgagccggctctgcctgaagccagttctccttgtcgcaggtgctggtggacagcgcggaggaggggtccctcgctgcggcggcggagctggccgctcagaagcgcgaacagagactgcgcaaattccgggagctgcacctgatgcggaatgaagctcgtaaattaaatcaccaggaagttgtggaagaagataaaagactaaaattacctgcaaattgggaagccaaaaaagctcgtttggagtgggaactaaaggaagaggaaaagaaaaaggaatgtgcggcaagaggagaagactatgagaaagtgaagttgctggagatcagtgcagaagatgcagaaagatgggagaggaaaaagaagaggaaaaaccctgatctgggattttcagattatgctgctgcccagttacgccagtatcatcggttgaccaagcagatcaaacctgacatggaaacatatgagagactgagagaaaaacatggagaagagtttttcccaacatccaatagtcttcttcatggaacacatgtgccttccacagaggaaattgacaggatggtcatagatctggaaaaacagattgaaaaacgagacaaatatagccggagacgtccttataatgatgatgcagatatcgactacattaatgaaaggaatgccaaattcaacaagaaagctgaaagattctatgggaaatacacagctgaaattaaacagaatttggaaagaggaacagctgtctaatcccttcaagaactgtttatagaagcttgagaatggggtaaaaatttctgctagcaaaatcaagttctttttgaaattttatcagtaatccagaatttagtagtccatgccttctcactcagcatttagaaataaaaatgtggtttcttaaacgtatatcctttcatgtatatttccacatttttgtgcttggatataagatgtatttcttgtagtgaagttgttttgtaatctactttgtatacattctaattatattatttttctatgtattttaaatgtatatggctgtttaatctttgaagcattttgggcttaagattgccagcagcacacatcagatgcagtcattgttgctatcagtgtggaatttgatagagtctagactcgggccacttggagttgtgtactccaaagctaaggacagtgatgaggaagatggcagtggccaccggaggactggagcagtccctcctcatggcggcctgtgaccaaggtcggggaggagtggagctatccttccatgatctgatcatgtacagttccctttttaaaaagcaataaatgcttgggattagaatttct

SEQ ID NO: 91203 - DNA, 1700 bp, Homo sapiens
  misc_feature (1)...(1700): n = a,t,c or g
tttcgtctgagacccagaagggcctgcgctcagctgctctggcaccccgctgcagggatggcctcctgggctaagggcaggagctacctggcgcctggtttgctgcagggccaagtggccatcgtcaccggcggggccacgggcatcggaaaagccatcgtgaaggagctcctggagctggggagtaatgtggtcattgcatcccgtaagttggagagattgaagtctgcggcagatgaactgcaggccaacctacctcccacaaagcaggcacgagtcattcccatacaatgcaacatccggaatgaggaggaggtgaataatttggtcaaatctaccttagatacttttggtaagatcaatttcttggtgaacaatggaggaggccagtttctttcccctgctgaacacatcagttctaagggatggcacgctgtgcttgagaccaacctgacgggtaccttctacatgtgcaaagcagtttacagctcctggatgaaaaagcatggaggatctatcgtcaatatcattgtccctactaaagctggatttccattagctgtgcattctggagctgcaagagcaggtgtttacaacctcaccaaatctttagcttttgaatgggcctgcagtggaatacggatcaattgtgttgcccctggagttatttattcccagactgctgtggagaactatggttcctggggacaaagcttctttgaagggtcttttcagaaaatccccgctaaacgaattggtgttcctgaggaggtctcctctgtggtctgcttcctactgtctcctgcagcttccttcatcactggacagtcggtggatgtggatgggggccggagtctctatactcactcgtatgaggtaccagatcatgacaactggcccaagggagcaggggacctttctgttgtcaaaaagatgaaggagacctttaaggagaaagctaagctctgagctgaggaaacaaggtgtcctccatcccccagtgccttcacatcttgaggatatgcttctgtactttttaaaagcttatagttggtatggaaaacatttttcttatttttaagtgttattaattatatctatggaaaaactattcctgaaatatatacagtcttatgtcccaatcagagtcttttaacctatgatttaaaaatgtataagtaacagaaattaacatattttaatgactttactttttatttctaagaaaagtatttgaaaaatggaataattttaaatcaatgataattctagggatcatgaactcccagaagattttattatttaattgtaaaggtagaggccagacgcagtggctcacgcctgtaattccagcactttgggaggccgaggtaggcgggtcagttgaggtcgggagttcaagaccaggctggccaacatggtaaaaccctgtctctactgaaaaacaacaaaaacaaaaacacaaattggtcgggtgtggtggcgcacacctgtggtcccgggtacttgggaggctgaggcaggaggatcgcttgaacccgggaagcggaggttgcagtgagctgagatcatgctactgcagtccagcctgggctacagagtgagactgcatctcataaaaaacccanaaaacaaaaacaaacaacaacgacaaaattatgaaggtagaggataaacctanattggtgtcgaattaagat

SEQ ID NO: 91204 - DNA, 7455 bp, Homo sapiens
tttcgtggttctggctcccggccgcgccgcagccctgcccagtctctctcccccagcccggagggctcctccgcgccgcacgtgagcgcgcccgccaacagggccactgccgcgatacttttctgctgtgagaatgtaagatggatccagaagagcaggagctcttaaatgattacagatacagaagctactcttcagtgattgaaaaggctttgagaaattttgagtcctcgagtgaatgggcggatctcatatcttcacttggcaaactcaacaaggctcttcagagtaacctgaggtactccttgttgccaagacggctcctcatcagcaaaagattagctcagtgtttgcaccctgccctgcccagtggtgtccacttaaaagctctggaaacctacgagattatctttaaaatcgtggggaccaaatggctggccaaggacttgtttctgtacagctgcgggttatttcctctcctggcacacgcggcggtgtcggtgaggccggtgctgctcaccctgtacgagaagtacttcctcccactgcagaagctgctcctgcccagtctgcaggccttcatcgtgggcctgctgcccggccttgaagagggctccgagatctccgacagaacggatgctctgctcctgagactgtcgctggtggttggcaaagaggtgttttacaccgccctctgggggagcgtcctggccagcccgtccatccgcctccctgcctcagtcttcgtggtgggccacatcaacagggatgcccccggccgggagcagaagtacatgctggggaccaatcaccaactcacggtgaagtctttgcgtgcctccctgttggactcaaatgttcttgtgcaaagaaataatctggaaatcgttctgtttttcttcccattttatacctgtctggattccaatgagagagccatccccctcctcagatctgacatcgtgcgcattctctcagccgccacccagaccctactgagaagggacatgtccctgaacagaagactgtatgcatggttactaggctcagacataaaaggaaataccgttgtgccagaatctgaaatctcaaattcttatgaagaccagtcgtcttatttttttgaaaaatactccaaggatcttttagttgagggtttggctgagatattgcatcagaagttcatagatgctgacgtggaggaacgccatcatgcatacctgaagccttttcgcgtcctcatcagtctgcttgacaagccagaaatagggcctcaagtggttgggaatttgtttctcgaagtcatcagggccttttattcttactgcagagatgcccttggctctgatcttaaacttagctacacccagagtggaaattcgctgataagtgcaatcaaggaaaacagaaatgcctctgagattgtcaaaacggtaaatttgctgataacttctctaagcacagactttctctgggattatatgacaaggtgttttgaggaatgctttagaccagtgaagcagcgttacagcgtgaggaacagcgtcagccctccccccacggtctcggagctctgcgccctcctggtcttcctgctggatgtcattcctttggaactttactctgaggtgcatacccagtatctccctcaggtgctcggctgcctggtgcagcctcttgctgaggacatggaggccttaagtttacctgaactcacgcatgccttgaagacgtgtttcaaggtgctcagcaaagtccagatgcctccttcctacctcgacacggagtccaccagcggaacctcgagtccagtaaaaggtgaaaacggcaaaataattttggaaacaaaggcagtgattcccggtgacgaagatgcttcgtttccccctctgaagtctgaggacagtgggatcgggctcagtgcctcgtcaccggagctctctgagcacttgagggttcctcgagtttctctggaaagggacgacgtttggaagaagggcgggagcatgcagaggacgtttctttgcatccaagagctaatcgccaactttgccagcaagaacatttttggagtacagctgacagcgtcaggagaagaaagcaagtccgaggagcctgcagggaagagggacagggatgggacgcagagcctggcagccaatgattccagcaggaagaactcttgggagcccaagcccatcactgtgcctcagttcaagcagatgctgtcagacttgttcacagcacgagggtctccattcaagacaaaaagttcagagtcaccatcgtcttcgcccagcagccctgccaggaaaaacgggggagaatgggatgttgagaaggtggtcattgacctggggggttccagggaggaacgcagggaggcctttgccgccgcctgccacctgctgctggattgtgccactttccctgtctacctgtccgaggaagagaccgagcagctctgtgcaacgctcttccagctgccaggagccggtgattccagttttccatcttggctgaagtccctcatgactatttgctgctgtgtgactgactgctacctccagaacgtggccatttccactctgctggaagtgataaaccattcccagtccctggcgcttgtcattgaagacaagatgaaacgctataagagctctggacacaaccctttttttggcaagctgcagatggtgacggttcctcccattgctccagggatattgaaagtcattgcagagaaaacagatttctatcagagggtggctcgcgtgctttggaatcagctgaacaaagagacccgggagcatcacgtcacctgcgtagaattgttctaccggctgcactgcctggcccctacggccaacatctgcgaggacatcatctgccatgccctcctggaccctgacaagggaacaaggctggaagctctgtttagattttccgtgatctggcatctgacaagagagatccaaggcagtcgagtaacatctcacaatcgctcctttgataggtccttgtttgtcgtgctggacagcctggcctgcacggatggtgccatcggtgcggcagcccagggctggctggtgcgtgcgctctccctcggggacgtggctcgcatcctcgaacccgtgctcctgctgctgctgcagccaaaaacccagagaacctccatccactgcctcaagcaggagaactcggccgatgacttgcaccgttggtttaacaggaagaaaacctctttcagagaggcatgcgcagtgcccgagcctcaggagagcggctctgaagagcacctgcctctgagccagttcaccacagtggaccgtgaagccatttgggccgaagtggagaaggagcccgagaagtacccgctgcgaggcgagctgagcgaggaagagctgccctactacgtggagcttccagacaggacggcccacggcgccccggacagcagcgagcacaccgagtctgcagatacaagctccggccacacggacagcgagaacacgtcctccttctcctccccttcccacgacctgcaggagctgagcaacgaagagaactgctgtgcacccatccacatggggggcagggcgtaccccaagcgctcggccctgctggcggccttccagtcagaaagcttcaaggctggggccaagttaagcctggtgcgggtggactcggacaagacgcaggcttctgagtcgttctccagcgacgaggaggcggacttggagctccaggccctcaccacatccaggctgctaaagcagcagcgggaaaggcaggaggccgtcgaggccttgttcaagcacatcctgctctacctgcagccctacgactctcggcgggtcctctatgccttctcggtgctggaggctgtgctcaaaaccaaccctaaggaattcatcgaggctgtgtccaggactagcatggataccagctccaccgcgcacctcaacctcatctccaacctcctcgctcgccaccaggaggccctcattggccagagtttctacggaaagctccagacccaggtccccaacgtgtgcccccactctctgctcctggagctgctcacctacctctgcctgagcttcctgcgctcctactacccttgctatttgaaggtctcgcaccgagacattctcggcaaccgggacgtgcaggtcaaaagtgtcgaggttttgatcaggataatgatgcagctggtctcagtggccaagtcttcggaagggaagaacgtggagttcatccacagcttgctgcagaggtgcaaagttcaggagtttgtcctgctctccctgtcggcgtccatgtacacgagccagaagcgctacgggctggccaccgcccaccacggcagggccctgccagaggacagcctctttgaggagagtctcattaacttgggtcaggaccagatctggagtgagcacccgctgcagattgagctgctgaagctgctgcaggtgctgattgtcttggaacaccacctgggtcgggcccatgaggaggcggaaaaccagcccgacctgtcccgggagtggcagagagccctgaacttccagcaggccatcagcgccctgcagtacgtgcagccccaccccctcacctcccagggtcttctggtctctgcggtggtgaggggtctgcagcccgcctacggttacggcatgcatccggcctgggtgagcttggtcacgcattccttgccctacttcggaaagtccctgggctggacggtgacaccctttgttgtccagatttgcaaaaacttggatgacttggtcaagcagtatgaaagcgaatctgtgaagctctctgtcagcacaacctccaagagggaaaacatttctccagattatccactcacccttctagaaggtctaacgaccattagtcatttttgtcttttggaacaagccaaccaaaacaaaaagaccatggctgcaggtgatcctgccaacttgaggaatgccagaaatgccattttggaagagctgcctcgaactgttaacaccatggcccttctctggaatgttctcggaaaggaggagactcaaaagagacctgtcgatctcctaggggccgcgaagggatcctcttccgtttactttaaaaccaccaaaaccataagacaaaaaattttagacttcttaaaccccttgacggcccatcttggggttcagttgacagcggctgttgcggcagtgtggagcagaaagaaagcccagcgtcacagtaagatgaagattatcccaacggcaagtgcatcccagctaacccttgtcgacttggtgtgtgcactcagcaccctgcagactgacacgctgctgcacctggtgaaggaggtggtgaagaggccaccccaagtcaaagggggtgatgagaaatcgcccctagtggacattcctgtgttgcagttttgctatgcttttctccaaaggctcccagtaccagccttgcaagagaacttttcttcactgttgggagtattgaaagagtctgtacagttgaatctagccccacctgggtattttctgcttctcagcatgctgaatgactttgtaacaagaactcccaacctggaaaacaagaaggaccaaaaagacctgcaggaaatcactcagaaaatcctagaagctgtggggaacattgccggctcttccttggagcaaaccagctggctaagcagaaacctggaagtgaaggcccaacctcaggcctctctagaagaatctgatgctgaggaggacctgtatgatgctgctgcagcttcagcaatggtgtcttcatccgccccgtcggtgtacagcgtgcaagccctctctctcctggcagaggtactggcttccctcctggacatggtttatcgaagtgatgagaaggagaaagctgtgccgttaatctcccgtctgctttactatgtttttccatacttacgcaaccacagtgcctacaatgctcccagcttccgggctggcgctcagctgctgagctccctgagtggctatgcctacacaaagcgagcctggaggaaggaggtcctggggctgtttctcgaccccgctttctttcagatggatacttcctgtgttcattggaagtccattattgaccatcttttgactcatgagaaaacaatgtttaaggatttaatgaacatgcagagcagttctttgaaactattctcaagttttgaacagaaagccatgctgttaaagcgccaggcttttgctgtcttcagtggagaacttgatcaataccacctttaccttccactgatacaagaacgcctgacagacaatctcagagttggacagacatccatagttgctgctcagatgtttctttttttcagagttttgctgctaagaatatctcctcaacatttgacttcattgtggccaataatggtctctgaattgattcagacattcacacagcttgaagaagatctaaaagatgaagatgagtcattgagaagcaccaacaaagtaaacagaacgaaagtttcagtcccggatgcaaatggaccctcagtgggggagataccccagagtgaactcatcttgtatttatcagcttgcaaattcttggacacagcgctttcttttccacctgacaagatgccattatttcaaatttataggtgggcatttattccagaagtggacacagagggccctgccttcctgtcggatgtagaggagaatcaccaagaatgcaaaccccacactgtcaggattctagaacttctaaaattaaagtttggggaaatcagtagctctgatgagatcaccatgaagagtgaattcccgcttctgcgccaacattctgtttccagcatcaggcagttgatgccattcttcatgactctaaatggtgcatttaagacccagagacagctgcctgctgatagcccaggaactccattcttggactttcctgtcacagatagcccaaggatcttaaaacaactggaagaatgcatcgaatatgattttctggaacatccagaatgttaaccatgtgagagagaatatgtttaatccatgtattggtactttactgaaaaccaggttatattctaaagaagaaagaaggcaggatagtgcttttgaacaagcctatttccattttgaaagtagatttcaggctaggtgcggtggctcacacctgtaatctcagcactttgggagggcaagccagccagatcacttgaggtcaggagttcgagaccagcctgaccaacatggtgagaccctgtctctactaaaaatacaaaaattagctgggtgtggtggcggcgcctgtaatcccagctacttgggaggctaaggcatgagaattgcttgaacccaggaggtggaggctgcagtgagccgagatcacgacactgcactccagctgtgtgacagaatgagaccatctccaaaaaaaaaa

SEQ ID NO: 91205 - DNA, 6621 bp, Homo sapiens
tttcgtcagagagtcggggaaggctcctgtgacgtttgatgacatcactgtgtacttactccaggaggaatgggtgctgctgagccagcaacagaaggagctctgtggttccaacaagctggtggcaccactgggaccaactgttgccaatcctgagctgttccgcaagttcggacgagggccagagccatggcttggcagcgtccagggccagaggagccttctggagcatcacccaggaaaaaaacagatgggctacatgggagaaatggaggtgcaaggtcccaccagggagagtggacagtccctcccgcctcagaagaaagcctacctttcccacctcagtacaggcagtggacacatcgagggagactgggccggaagaaacaggaaacttctgaagccccggtccatccagaagtcgtggtttgtgcagtttccgtggctgatcatgaatgaggagcagacggctctgttctgctctgcttgccgagaatacccctccatcagggacaaacggtcaagactaatagaaggttatacaggaccattcaaggtggagactctcaaataccacgcgaagagcaaggcccacatgttctgtgtcaatgccttggcagcgagggaccccatctgggcagcccggttccggagcatcagagacccacctggagatgttctggccagcccggagccgctcttcactgcagattgccccatattctaccccccagggcctctgggaggatttgatagcatggctgagctcctgccaagttcaagagctgaactagaggaccctgggggggatggagcaattcctgcaatgtatctagactgcatttcagatttgaggcaaaaagaaatcactgatggcatccacagctcctcagacattaatattttatataatgatgcagtagaatcctgcattcaggacccttctgcagaggggctgtcggaggaggttcctgtggtgtttgaggagctgccggtggtgttcgaggatgtggcagtgtatttcacccgggaggagtggggcatgctagacaagcggcagaaggagctgtacagagacgtgatgcggatgaactacgagctgttggcatccttgggacctgctgctgccaagccagacttgatctccaaactggagcggagggctgcaccctggatcaaggacccaaatgggccaaagtgggggaaaggtcgtcctccagggaacaagaagatggtggcagtgagagaggcagacacacaggcctcggctgcagactccgcgttgcttccaggctctcccgtggaggcccgtgcctcctgctgcagttccagcatttgtgaggaaggagatggacctaggagaatcaagaggacatacaggccccgttccattcagaggtcatggtttgggcagttcccatggttagtaattgaccccaaagagaccaaactcttctgctcagcctgcatagaaagacctaatctccatgataaatcatctcggttagtcagaggttacacggggccttttaaagtggagactttaaaataccatgaagtcagcaaagcgcacaggctctgtgtcaacacggttgaaatcaaggaagacacccctcacactgccctcgttccagagatctccagcgacctcatggccaacatggagcactttttcaatgccgcctactccattgcataccactcaaggcccctgaatgactttgagaagatcctgcagctcctccaaagcacggggaccgtgatattaggcaagtaccgcaatcgcacggcgtgcactcagttcatcaagtacatctcagagaccctgaagagggagatcctggaggacgtgcggaactcgccctgtgtgagcgtgctgctggacagctccaccgacgcctccgagcaggcctgcgtggggatttacatccgctacttcaagcagatggaggtgaaagagtcctacatcactctggcccctctctacagtgagacagcagatgggtacttcgagaccatcgtttctgccctggatgagctggacatccccttccggaagcctggctgggtggtggggctggggacggatggctcagccatgttgagctgcagaggaggccttgtggaaaagttccaggaggtcatcccgcagctgctccctgtccactgcgtggcccaccggctgcacctggctgtggtggacgcctgcgggagcatcgatctggtgaagaagtgtgaccggcacatccgcaccgtcttcaagttttatcagtcctcaaacaagaggctgaacgagctgcaggaaggtgcggcgcctctggagcaggagatcatccgcctgaaggatctgaatgcggtccgctgggtggccagcaggaggcgcacgctgcacgcgctgctcgtgagctggcccgccctggccaggcacctccagagggtggcagaggctgggggccagattgggcaccgggccaaagggatgctgaagctcatgcgcggcttccactttgtcaagttctgccacttcctgttggacttcctgagcatctacaggcctctgtccgaggtgtgccagaaggagatcgtgctgattacagaggtgaacgccacgctgggccgcgcctacgtggcactggagagcctccgtcaccaggcagggcccaaagaggaagaattcaacgccagcttcaaggatgggcggctccacggcatctgcttggacaaactggaggtagcggaacagcggttccaggcggatagggagaggacagtcctgacggggattgagtacctccagcagaggtttgacgcagaccgacccccacagctgaagaacatggaggtgtttgacaccatggcctggccaagtgggattgaacttgccagttttgggaatgatgacattctcaacctggccaggtatttcgagtgctccctcccaacaggatacagtgaggaagctctgctggaggagtggctgggcctgaaaaccattgcccagcacctcccgttctccatgctttgcaaaaacgccctggcccagcactgccgcttccccctgctaagcaagctcatggccgtggtggtctgtgtgcccatctccacctcttgctgtgagcgggggttcaaggccatgaaccgaatcaggaccgatgagaggaccaagctctccaacgaggtgctcaacatgctcatgatgacagctgtgaacggtgtggccgtcacggagtacgacccccagcccgccatccagcactggtacctgacctcctcaggccggcgtttcagccatgtctacacctgtgcccaggtgccagcccgctcccctgcaagcgccaggctcaggaaggaggagatgggagccctctatgtggaggagcccaggacccagaagccacccatcctgccctccagggaagcagcggaggttctgaaggactgcatcatggagcctcccgagagactcctgtatccccacaccagccaggaggcccccgggatgtcctgagggacagggagtccttgggactgccttggagacgcctctgtgatcactgggacaggctctgcagattctaggctgccctaggatcttctgctggtggcgatggtctctaagcaccaggaagtgggcagtggcatcccagagcagcaggggtatcaggaggtgcatgacctgtttcctgaggccccactcagcacagccatgcctcacagcacacaaatgtgccagaaggttctatatctcaagttcatttttaaggtgctgcagaaaataaccccatcatgaaaggtttcagcccctgagttttggtggcaagaggagtgtcctggtaggggagactgttggacatccctggggaatgttccagggaggctgcccacagtctaagtgggaatgggaaagaccaccttgttagagggggaggttgcccctgctctagggacagctggcctggctgcaagagcccccagaggcattgttctgggacttcctaccctggctcccacagcagaagcagtgaggccgtggtctcgtgcggaactctacctcttcccagggcttcctttagggcgaaacaatcacaagccctttgcacagagcacccaagaaagttctcttcctgcagctccagatggtggagctgggctcttctggcagggggtctggtgcttcccggagagccgagccgcgtttaacccgtggcatgcccggcccggtttacccaggagaggatgggacgaagttggagttgggaggcttgggatgcagccccagctctgctgcaggcagtggtctgattaatcccttcctctttgtgcctcagtttccctctccatgaagtggcagcagagatccaagtgcctgctgactccccatctgccctaggattagtgaatgagagcctcgagctccctgaaagacctctggctgcagtgtggacttagctgccatctgccccatcctcgtccttagtgggacaggtaggaatttgtctccaaagtccttgttgtaggagttgctctctgaatgcaccatctgcacgacaggctagtccactcttctctgagctgccctggggactctgcaccaggatctccagggcccactgagacatccccgaatgggcgctcagtgacaagggctttgaacaacctcctccagggactttgggcctgctctagcttcagaaccacagaaccaccgccctagaggcacagaggggcttctggcactgctaggttcacaccctcctcgcccatcttccttccacctaaagtgaagcacttttccttccaagggcagctccgtcttggcaggctcaggaggccgcttatcaggaggaggatgattttgtctaggttctgccttccttaaccatgggcaggaaatgaggcaagtcagcaggcagggtttctctgccctgcctgatacttgttttaaacaggcaggaagtgggcgccatccatcccagcttgcttgctgcctggctcaggcaggtcctgtgctgtgctgcaggcccctgtgggtgggccctttctccatagtctgccgcttcccattcccagggtagatgctggcatctgagcacctgagtacccttcctattcccagggtagaagctgctgtctgagtacccttcccattcccagggtagatgctggcgtccgagcccctccccggtaccgcaggtaccctggtaccccacctgccctttcatccccaccccagtacttagccttagcactgttgctttcgtgtcattttcagttctagtcaggaattcctttcttgctttctgcctttgacctgtggaaatgtctcccagccctgtgggtctggcggtcagagggaccccacaggcctgtggtgcgggagctctgggaggtgttactatctgcgtggctaaggcacacacaggcctccttctccccatcaccgtctccatgggcgttcaggaacttgcccaggtcaggcactgtggatgtgaactcgtggaaagggagggagaaaggcttttttaggtggggctatagcctctgccctacccacagggattccacatcaaggtgctgttccagcacacatgcttcctgcggcctcttcatccttgaagaatccctcagagcaggaggccatcctgtgagcagccgtgagtgggtctctgtgggagtagttctggagctgaggtggaagctaggggaagcaactcgccctctccacgtcagcatcagcgtgctccgaggacaccggccagtgccttccttaggtggtgggaaaggggggtccctgtgcagcggggccactgagaatgctgtttgtcataaaatttgcactacccgatttctcaaggggcacaggcctgctccgttcccctttgtcagccaatggccaagaaggaagaagatgactgccatcttattcctgaacttcctcattcgggacccccgtggaaacacagtgagcatccttatcagaggccctggcccaggctggcccctttgctttgtttggagaggctggctgagtttcagcccctagtgctggagacccccttgttggagaggcttcctgtttatgcctcacaagaagaaaaaccacagggctctgggaggggaagaagcatgcactcccgctttggctggagtcccagcgcttgtcgccaccctcctccttgcctgtagtcttgacagcatccgtatgtacgtgtcctggcatttcccctccctctccctgatgactgatacccaccgggtctgacattccaagtaaccagtatgtaactggtagtttgatcccaatagccatagcgactccaggtgggagtgaggggagcccagccccctgtcctggaagataccttagagtatgtgaccgcgctccagacccttgcttctctctcctgcagaggatgagtttctagggtgctaagtacctatcagaacagtgtggaggggcgggtccctcatacaggtgtgtgcttagccaaatacagtaactgtgactggcccagggatgttctctcctctattttcaaagatgaaaggaggttttaaaaaccatgtttgattcctaaccttttgctacctgaataaagcagagtctatttcaacacaaaa

SEQ ID NO: 91206 - DNA, 399 bp, Homo sapiens
tttcgtcctggggccattttgcctgaagagagtcctgtgcgccatatgtgggttctgactcgtttcctccacagtgaacttgctgactgagaaggcaccttggaactctctggcctggactgttaccagttacgtcttcctcaagttcctccaggggggtggcactggcagtacaggtatgagagactccgccctcaccctgctaggtataggtccctcccacaggcattccctcagcatccgcctctcccagcattcctccccagcccccatgtactctcagacctttcacatcctggtgctgggctgacgtccctcagctcccaggccctactgaggcgtcccccggctccctgcaggcttcgtgagcaacctgcgcacctttctgtggatgcgggg

SEQ ID NO: 91207 - DNA, 2104 bp, Homo sapiens
cctccgccgcctcctcctcctccggcagccgcggcagcaggacccaccctgccccccaccccaccctctgtcggctccggctgcggctccagcctcgactattattttatttattttgggtcgtgcacaagcctcagtgcctgcagtccgcgcctcctcggcccgcgggcgcctcctcccttggctccggagccccagaccccggccaccctcgattcgacaaccccagacccctgccagctgccgcgagtctccgctgctggaatcttgttagcggctgtctttttggagggttctggtttcccgacatttttgtttccagcccaggagaggatatcgtgattttccccccttgagcccaggctctgctctctgggggggtggggggcgctccaagccggggagccgtgccagccgagtcgtgcgggctgtggcagggaaggggccaccatgggatgtactctgagcgcagaggagagagccgccctcgagcggagcaaggcgattgagaaaaacctcaaagaggatggcatcagcgccgccaaagacgtgaaattactcctgctcggggctggagaatcaggaaaaagcaccattgtgaagcagatgaagatcatccatgaagatggcttctccggagaagacgtgaaacagtacaagcctgttgtctacagcaacactatccagtccctggcagccatcgtccgggccatggacactttgggcatcgaatatggtgataaggagagaaaggctgacgccaagatggtgtgtgatgtggtgagtcggatggaagacaccgagcccttctctgcagagctgctttctgccatgatgcggctctggggcgactcaggaatccaagagtgcttcaaccggtcccgggagtatcagctcaacgactctgccaaatactacctggacagcctggatcggattggggccgccgactaccagcccaccgagcaggacatcctccgaaccagggtcaaaaccactggcatcgtagaaacccacttcacattcaagaacctccacttcaggctgtttgacgtcggaggccagcgatctgaacgcaagaagtggatccattgcttcgaggacgtcacggccatcattttctgtgtcgcgctcagcggctatgaccaggtgctccacgaagacgaaaccacgaaccgcatgcacgaatccctgaagctttttgacagcatctgcaacaacaaatggttcacagacacgtccatcatcctgtttcttaacaagaaggacatatttgaagagaagatcaagaagtccccgctcaccatctgctttcctgaatatacaggccccagcgccttcacagaagccgtggcttacatccaggcccagtacgagagcaagaacaagtcagcccacaaagagatctacagccacgtcacctgcgccacggacaccaacaacatccagtttgtctttgatgctgtgacggacgtcatcatcgccaaaaacctgcggggctgtggactctactgagcccagccgccctgcccggcacccttgccctgcctggcctgccgcccccccttccttggaaccaggctccaccactctcagaccactctttgcacttgaggaagaagacctcagaggctggcaccaagggagggaggagggagcatcctccacccgcaccccccaacagaacttgtggtaacgcaggggcggggcggggctgctgagtgcatgctgcaaggccaggagactccacgctcacagcctctgtgtcatctctgagtgcttgatcgggaagctggggggacagggcagggcccagatgggcacaccctgcacctgatgactcactggaagcctcggagtgtcctcctgtcatcttgggtggtgcaggggcgcagatggccctgcagcagggtgctggcagggtggggtcataggagccatccttcagctttgcctggggtctctggtggagggcagttccgtcaacaaaagccagggaaggggccaccatgggatgtactctgagcgcagaggagagagccgccctcgagcggagcaaggcgattgagaaaaacctcaaagaggatggcatcagcgccgccaa

SEQ ID NO: 91208 - DNA, 1688 bp, Homo sapiens
cagaatatttaaaatacaaagattgcctgttttcaaacactattgaataagagggtgagatatttcttaacaacaacaacaacaaaaaaaaacaggttgttttgaatgtgatgagccagccaggagatagaatactacctgcccttagggttgggggctgtccccacaaaacttgatacttcagaaaccctttttattgacccacaagcagatatttgaattacttcttactttattgctccaggattctggatgggctgcatttactgtgtgaaggataaaaatcattagcctggattctgatttctataaattgccattaaaagctttttttcccctaagaactgaaatgtgctcaccagccaaaacattttaacttgtaaattttgagggcagttaaccaaacctgtgactaatcatatctcctcctaccccccatttccaaggacatttgttactcagatacttgttatactaatacttgaacttgtaccttatggtatttgctatcttttaactagtcatgatattcttatactttagttacacttttggaatttgatacaaggttgagtggggtgtgtgggtgtatgtatgagtgaaacagttctcaaaagaatgtaagaaaaaccatccttataaaattgtgacttttcaaaaacatagtctttgtcatttatagaattaacaagctgctcagggtatattttatagctgtagcactgatatctgcattaataaatactgtcgaaacacaatggacctaagtataaaacttccctgaaaaatcatctaatacttttattattaatatcagtggcaaaggtttaagcctgaggaaaaaagcgtacctctacgtattgacaactttgagttctgtagataacaagcagatttgggtctcctgtgattggctaatggtctccatctcccagcagacttaattcaggttttgcttctgctacatcccgccagtaaggaagcagcaaaggtagagaagagacctttttctctatcaaaggccagagatgcgagaacaaaaattcattcccctttggagacaaatgtagtccatctgataaataagatgagaagtcctggctgtcctgcatcagggtccacaggtcaagtacgtcagtcccacagtcttgggccacttgtaaacacgcattggcatattcaccaacaacagagttcaggcgatttagtttgcaaccttgtatgatgcactgttcttcccaggctgtttcacaaagtggggtcggcgtgatgagaatgactcgattctcagggatgtccacggacttcaggtactgcaccatgctctttaggttcgcagcgtactcctccaggggaatgtgctgcttgggattctcatcttttagtgcactgtcattggccccaaagaaaattgtaactgctactgggatgtccaaactgtttcctttcctgattaatcttggaaggataattttggcccacctggtattgtaacctgaaaatccacgattcagaacatcacattttctgaccagcctgtcagccagcgatgctccccatccaccctgctggaaggaaaactgggtgatggagtccccgaagagcaacaagcgaggccagagcagggcactcccgcagcccgcggcctcgcacagcgccatggagcacgaaatcgtcgacccgggaat

SEQ ID NO: 91209 - DNA, 548 bp, Homo sapiens
ggcccgcccgcgcgtggtgctcaagcgcctcggctcgcagcgcgagctggcgcagctcggaccagagcatctgcaagcgggccaccggccggccccgctgcgacctgctgcaggccatgccccggaccgagttcgcgcgcctcaacggcgacgtgcgtctgctcacgcccgaggcagtggagggctggtcggacctggtgcactgcccctcgcagcgccttctcgaccgcctggtgcgccgctacgcggagaccaaggactcgggcagcttcctgcttcgcaacctcaaggactcggagcgcatgcagctgctgctgaccctggccttcaaccccgagccgctggtgctacagagttttccgtctgatgaaggttggccatttgcaaagtatcttggagcttgtggaagaatggtggctgtaaattatgttggagaagaactgtggagttactttaatgcgccatgggaaaaacgagttgacctcgcttggcaattaatggaaatagcagaacagcttacaaacaatgactgtgaatttgcactctac

SEQ ID NO: 91210 - DNA, 1210 bp, Homo sapiens
tttcgtgcgggtgccacctcccgggacgctgcccacgttgtccccggtcgcgatcaaacaaataatagaagtctgttgaagctttgtcctgacctatcctggaagtagaagaatactctggagaaaggagcattgtaagcacaaagaataagattcctcaatcctgagagagagaattaaagtctaactctccaaatgtctactctaatgtgatgctgggattgaattttcctaggactccgtttcaaggttaattcgaaagtcttgtggaagatctggaagaaacaggtattaagtcatgatgcaggaatctgcgacagagacaataagcaacagttcaatgaatcaaaatggaatgagcactctaagcagccaattagatgctggcagcagagatggaagatcaagtggtgacaccagctctgaagtaagcacagtagaactgctgcatctgcaacaacagcaggctctccaggcagcaagacaacttcttttacagcagcaaacaagtggattgaaatctcctaagagcagtgataaacagagaccactgcaggtgcctgtgtcagtggccatgatgactccccaggtgatcacccctcagcaaatgcagcagatccttcagcaacaagtcctgtctcctcagcagctacaagcccttctccaacaacagcaggctgtcatgctgcagcagcaacatctacaagagttttacaagaaacagcaagagcagttacatcttcagcttttgcagcagcagcagcaacagcagcagcagcaacaacagcagcaacaacagcagcagcaacaacaacaacaacagcagcaacaacagcagcagcagcagcaacagcagcagcagcagcaacagcatcctggaaagcaagcgaaagagcagcagcagcagcagcagcagcaacagcaattggcagcccagcagcttgtcttccagcagcagcttctccagatgcaacaactccagcagcagcagcatctgctcagccttcagcgtcagggactcatctccattccacctggccaggcagcacttcctgtccaatcgctgcctcaagctggcttaagtcctgctgagattcagcagttatggaaagaagtgactggagttcacagtatggaagacaatggcattaaacatggagggctagaggaattccccgtccaagggcccgctgcagtctgtgcaggtctt

SEQ ID NO: 91211 - DNA, 1986 bp, Homo sapiens
tcggggagagagtgtaatatggcgaagacctacgattacctgttcaagctgctgctgatcggggactcgggggtggggaagacctgtgtcctgttccgcttctccgaggacgccttcaactccacttttatctccaccataggaattgactttaaaattaggaccatagagctcgatggcaagagaattaaactgcagatatgggacacagccggtcaggaacggtttcggacgatcacaacggcctactacaggggtgcaatgggcatcatgctggtctacgacatcaccaacgagaagtccttcgacaacatccggaactggattcgcaacattgaggagcacgcctctgcagacgtcgaaaagatgatactcgggaacaagtgtgatgtgaatgacaagagacaagtttccaaggaacggggagaaaagctggccctcgactatggaatcaagttcatggagaccagcgcgaaggccaacatcaatgtggaaaatgcatttttcactctcgccagagatatcaaagcaaaaatggacaaaaaattggaaggcaacagcccccaggggagcaaccagggagtcaaaatcacaccggaccagcagaagaggagcagctttttccgatgtgttcttctgtgaggaacaccgccttactctgagcctcgctcagcccagctgactgtgcctgttctgagtgagcccctcactcagccggggccctcccacctccaacgccccgcccacgccgcggccaccgggcccacggccaccagaatgcaattgagaaatcgtttattttagtaactgtctgatctttttcaactttggagatggaataagttaaaaatttgctatttttcctgtaacatctgctgaacgggcccacccacacgttgtatattcagagagagagagggagtcaaggtgtgaccgtcgaccacagccagtgtcaggcctctgcctctgggcctttgctttgtggcctcactgcaacacaaagctccaccaggaggctggttcacgtcccctaccacggaagcgaggtcccagaaggccagcggtggttccaggagcaacagctcccaaaccctgagcaaggcaaccgatcgccaggaccaggaagcatcacccaggagatttggcgcccacttccacctcttctctcagttttggacaagtgacaaaccattttgccccctcactcttcttttttaactgttaaaccaaaggaaagcacaaatgaaggaaatcctgtgtaaagcattgagaaggaaagaagcctggagcagcctctcctgtccacagccaggggttaggtctgcaggcccgtctgcggtccccatcgagcatcaaggggacgctgtgtgtgctgcaagtgaccccgaaaacaaccacagccgtcacatggtcctcctgaagttggggcaccctcctctcagcaccaaaatggcccccactccttcgtgtcctcccgctatctccaaatcggacgttctttctagctgagatttttatttttccacatctgtagtgccatgaagcgattctgtctttgacttccaatggcaaacctgggtgatcgggaacaagcacgttgtacccttggctggacatggccaagacacaaggcattccacggcggcaagctgaccgcacagcagtctggcttgattttcagccgtcatcattgggttctgttttgacagctctgctgtcccatagggactgcgactgggaccaggtcaaccacgccaggggggtgtcaccagccttttctttttttctttcttttttttttttcccccctaagctgctgtcaatccaaaccattggcatcatcgtttcttttgacatctaacaccaacctatcagcaatagtctgctctccccgggaatctctaacatgctctgtttacatcgataaatgcacttaaggaaaacaaacaaattaaagctcatcttaaagtccaaaaaaaaaaaaaa

SEQ ID NO: 91212 - DNA, 634 bp, Homo sapiens
tttcgtggtggcatttgagaacagttttatggtttggttttcattggctatgactgtcttgaaatgttccgaaagaccatttacacgggttgcataagggtggagtatttccaccgtaattaccttacgtggtactaatttaaagcactctggccactggtggataatattctgtgaaaatgtgcgcatgctgtagcagtggattgcgtctgggtagttaaaaatgctttgaagtcgaaatgagatatgtgcccaaggtgcttgaacaggcaggcgctaagtttgtttttcattgctgatgataacctaaatgtgtttttgaattcttgccattgctgaaattaaagcctggaagtaataagtcaccagaaaaaaattagattatatgagcaacatgcactaagcattgaaattatattataaatattaaaaccaatgatcttgttaggattaaaacaaatatttaaactggctacacgtactatccatgccgatctctttatgttgaagtgtcccggaaacgggatgtatggaaccattttttgaactatgaaaacaatcattttcaatcttataaatgactccttgcttttatttttgcttgtaacaaaggacaatttagcaatcttgacat

SEQ ID NO: 91213 - DNA, 2310 bp, Homo sapiens
aaattaaaggatgttcttgaagaattccatggtaatggtgtgcttgcaaagtataatcctgaagggacaatagattttgaaggtttcaaactattcatgaagacattcctggaagccgagcttcctgatgatttcactgcacaccttttcatgtcatttagcaacaagtttcctcattctagtccaatggtaaaaagtaagcctgctctcctatcaggcggtctgagaatgaataaaggtgccatcacccctccccggactacttctcctgcaaatacgtgttccccagaagtaatccatctgaaggacattgtctgttacctgtctctgcttgaaagaggaagacctgaggataagcttgagtttatgtttcgcctttatgacacggatgggaatggcttcctggacagctcggagctagaaaatatcatcagtcagatgatgcatgttgcagaataccttgagtgggatgtcactgaacttaatccaatcctccatgaaatgatggaagaaattgactatgatcatgatggaaccgtgtctctggaggaatggattcaaggaggaatgacaacgattccacttcttgtgctcctgggcttagaaaataacgtgaaggatgatggacagcacgtgtggcgactgaagcactttaacaaacctgcctattgcaacctttgcctgaacatgctgattggcgtggggaagcagggcctctgctgttccttctgcaagtacacagtccatgagcgctgtgtggctcgagcacctccctcttgcatcaagacctatgtgaagtccaaaaggaacactgatgtcatgcaccattactgggttgaaggtaactgcccaaccaagtgtgataagtgccacaaaactgttaaatgttaccagggcctgacaggactgcattgtgtttggtgtcagatcacactgcataataaatgtgcttctcatctaaaacctgaatgtgactgtggacctttgaaggaccatattttaccacccacaacaatctgtccagtggtactgcagactctgcccacttcaggagtttcagttcctgaggaaagacaatcaacagtgaaaaaggaaaagagtggttcccagcagccaaacaaagtgattgacaagaataaaatgcaaagagccaactctgttactgtagatggacaaggcctgcaggtcactcctgtgcctggtactcacccacttttagtttttgtgaaccccaaaagtggtggaaaacaaggagaacgaatttacagaaaattccagtatctattaaatcctcgtcaggtttacagtctttctggaaatggaccaatgccagggttaaactttttccgtgatgttcctgacttcagagtgttagcctgtggtggagatggaaccgtgggctgggttttggattgcatagaaaaggccaatgtaggcaagcatcctccagttgcgattctgcctcttgggactggcaatgatctagcaagatgcctgcgatggggaggaggttacgaaggtgagaatctgatgaaaattctaaaagacattgaaaacagcacagaaatcatgttggacaggtggaagtttgaagtcatacctaatgacaaagatgagaaaggagacccagtgccttacagtatcatcaataattacttttccattggcgtggatgcctccattgcacacagattccacatcatgagagaaaaacacccagagaaattcaacagtagaatgaagaacaaattttggtattttgagtttggcacatctgaaactttctcagccacctgcaagaagctacatgaatctgtagaaatagaatgtgatggagtacagatagatttaataaacatctctctggaaggaattgctattttgaatataccaagcatgcatggaggatccaatctttggggagagtctaagaaaagacgaagccatcgacgaatagagaaaaaagggtctgacaaaaggaccaccgtcacagatgccaaagagttgaagtttgcaagtcaagatctcagtgaccagctgctggaggtggtcggcttggaaggagccatggagatggggcaaatatacacaggcctgaaaagtgctggccggcggctggctcagtgctcctgcgtggtcatcaggacgagcaagtctctgccaatgcaaattgatggggagccatggatgcagaccccatgcacaataaaaattacacacaagaaccaagccccaatgctgatgggcccgcctccaaaaaccggtttattctgctccctcgtcaaaaggacaagaaaccgaagcaaggaa

SEQ ID NO: 91214 - DNA, 437 bp, Homo sapiens
atcttattgttcggttcagtgtttcagctgacgcgaaccccatgtggcctcaaagcttgccgcctgtgttcctgggacagtcggtcctgttcctttttatgaacttgaaggagtgcatagaaaccaaaactgaggcctggaaggagacagtggatcctcccctgcagagcctgatcacaataaccagggctagagagcagtgtttgacaatgcagatacttgcctgtttttctaaataaagggaacatcaaaaactagcagaggatagaggaaacttgggatccctctgccctgtgaaggaggagggaggatggtgtatccatgtgaaagaaagtgccagaatgtcaggggtcccagccattgtctgtacaatataggcccctttctccccccaggagattagcagtgcagagttttggaaagttccttaagccttt

SEQ ID NO: 91215 - DNA, 1797 bp, Homo sapiens
tcggcacgagccgcggcgccggcactgcagctggggctgagaagccaggacggcccgagaactgacagacggagtgacagacggactgaccatggccgaccagccaaaacccatcagcccgctcaagaacctgctggccggcggctttggcggcgtgtgcctggtgttcgtcggtcaccctctggacacggtcaaggtccgactgcagacacagccaccgagtttgcctggacaacctcccatgtactctgggacctttgactgtttccggaagactctttttagagagggcatcacggggctatatcggggaatggctgcccctatcatcggggtcactcccatgtttgccgtgtgcttctttgggtttggtttggggaagaaactacaacagaaacacccagaagatgtgctcagctatccccagctttttgcagctgggatgttatctggcgtattcaccacaggaatcatgactcctggagaacggatcaagtgcttattacagattcaggcttcttcaggagaaagcaagtacactggtaccttggactgtgcaaagaagctgtaccaggagtttgggatccgaggcatctacaaagggactgtgcttacccttatgcgagatgtcccagctagtggaatgtatttcatgacatatgaatggctgaaaaatatcttcactccggagggaaagagggtcagtgagctcagtgcccctcggatcttggtggctgggggcattgcagggatcttcaactgggctgtggcaatccccccagatgtgctcaagtctcgattccagactgcacctcctgggaaatatcctaatggtttcagagatgtgctgagggagctgatccgggatgaaggagtcacatccttgtacaaagggttcaatgcagtgatgatccgagccttcccagccaatgcggcctgtttccttggctttgaagttgccatgaagttccttaattgggccacccccaacttgtgaggctgaaggctgctcaagttcacttctggatgctggaagctgtcgttgaggagaaggagtagtaagcagaactaagcagtcttggagggcaaggggaggggaatggtgagatccgagccctgtgcatggacttggtgagactgttgccttaatgacatcctgcaccgtgtataacttagtgtgtcattttgaaacttgaattcattcttatcaatttaagggatcttaaaaggatttggaaatggaacaagtagcttccagaccagatactacctgtggcaagaatgctgcctaccagttaactgctggtcctaccacagtcaaagtattcctcattaaagagagaatctcaggttctcactggaggcactgtgcatattttcaaccagatcaccaggagctgagatcttcttcagtccctagccaggaatacccatttgatttccagggtgccatctaatcctgggctgtacatgtggatatggacttgaggcccacctctgtgtccaagtggattgagcatatatgcctaggaggagatagactgttaatcgttggattttgatttttttttttttatgcctgcaaataatcaaaagtaaaactggagtagcctaattttctgggagcagggggagaactttccctcctacacagtgaggacagtcccacgtctgctgggataacgtgagaaagcccagggtgtaggaaggccctttttacatactcttttctcatgaagacgctcactattttacacaataaacaataaacgttgtttctaatttttaaaaaaaaaa

SEQ ID NO: 91216 - DNA, 413 bp, Homo sapiens
tgtttgtcccctaagtattatcttaacctttggacagagagagcattttagaaacacaagccagatcatgtcacttgtctgttcttgttctcatcctactccaaggaaagcctgagtcttaaaatggcctataaagccatatatgatccgactattatctatctgattccatctgctcttctactcttcattcactctgcttcagacacattgtactactgtgtgaaagacacatgcttgcataagctccccttttttgctctttttcttcctgctgtgctgaatatccatatgactaggttcttatcttccttcagcagagagaaaaccatttttctttcaggtatttacttatatgtcaccttcacaagaagtctttctgggctatcttctgtaaaatttcaacaaccgca

SEQ ID NO: 91217 - DNA, 2528 bp, Homo sapiens
cgataatggcggatatggaggatctcttcgggagcgacgccgacagcgaagctgagcgtaaagattctgattctggatctgactcagattctgatcaagagaatgctgcctctggcagtaatgcctctggaagtgaaagtgatcaggatgaaagaggtgattcaggacaaccaagtaataaggaactgtttggagatgacagtgaggacgagggagcttcacatcatagtggtagtgataatcactctgaaagatcagacaatagatcagaagcttctgagcgttctgaccatgaggacaatgacccctcagatgtagatcagcacagtggatcagaagcccctaatgatgatgaagacgaaggtcatagatcggatggagggagccatcattcagaagcagaaggttctgaaaaagcacattcagatgatgaaaaatggggcagagaagataaaagtgaccagtcagatgatgaaaagatacaaaattctgatgatgaggagagggcacaaggatctgatgaagataagctgcagaattctgacgatgatgagaaaatgcagaacacagatgatgaggagaggcctcagctttccgatgatgagagacaacagctatctgaggaggaaaaggctaattctgatgatgaacggccggtagcttctgataatgatgatgagaaacagaattctgatgatgaagaacaaccacagctgtctgatgaagagaaaatgcaaaattctgatgatgaaaggccacaggcctcagatgaagaacacaggcattcagatgatgaagaggaacaggatcataaatcagaatctgcaagaggcagtgatagtgaagatgaagttttacgaatgaaacgcaagaatgcgattgcatctgattcagaagcggatagtgacactgaggtgccaaaagataatagtggaaccatggatttatttggaggtgcagatgatatctcttcagggagtgatggagaagacaaaccacctactccaggacagcctgttgatgaaaatggattgcctcaggatcaacaggaagaggagccaattcctgagaccagaatagaagtagaaatacccaaagtaaacactgatttaggaaacgacttatattttgttaaactgcccaactttctcagtgtagagcccagaccttttgatcctcagtattatgaagatgaatttgaagatgaagaaatgctggatgaagaaggtagaaccaggttaaaattaaaggtagaaaatactataagatggaggatacgccgagatgaagaaggaaatgaaattaaagaaagcaatgctcggatagtcaagtggtcagatggaagcatgtccctgcatttaggcaatgaagtgtttgatgtgtacaaagccccactgcagggcgaccacaatcatctttttataagacaaggtactggtctacagggacaagcagtctttaaaacgaaactcaccttcagacctcactctacggacagtgccacacatagaaagatgactctgtcacttgcagataggtgttcaaagacacagaagattagaatcttgccaatggctggtcgtgatcctgaatgccaacgcacagaaatgattaagaaagaagaagaacgtttgagggcttccatacgtagggaatctcagcagcgccgaatgagagagaaacagcaccagcgggggctgagcgccagttacctggaacctgatcgatacgatgaggaggaggaaggcgaggagtccatcagcttggctgccattaaaaaccgatataaagggggcattcgagaggaacgagccagaatctattcatcagacagtgatgagggatcagaagaagataaagctcaaagattactcaaagcaaagaaacttaccagtgatgaggtaagaccaaatttattcaattctaggggtttatcctgtactcaggagccaactgctttgaatgaagagctcacagatcaggcaggcacaaattagttgtctacacacgtcactgaaatccagtgagataaatgcagtaacaagacagagtgatccagaggaggatctgatacctgtgcttagagaggtcttagaaggctgcatggaggataagacttcttgctgggtgttgaagagtgatcagaagcttgctggtcaaactgtcctgtctctggtaggtcactccggatagatggaaaggcctataatactttgcatatggagtctgcaaaaatcgtgaccatctttatgttccccatgtcacactggtccactgcattgatgacattatgctgatggtatctgatctgatgagtaggaaataactccttgctttgacttccaattttttccagatgaagagactcattgttagttctctaattgtcccttctggcatctgcatctctctctggaaactgagatttcatattccttctcttctcctctctctgactgcaatcggggatattctttgtaaaagactgacgttgccacctgcctctcctcacttccactgcactccca

SEQ ID NO: 91218 - DNA, 392 bp, Homo sapiens
ctgaagctgaagtcctctaatcacagatctaatgcagaggattaatgaaaccaagcaggtagggaacgttgctttctaggaatgctactgacattttgattgacagagacattcactgtgcctcccctcttttccctaaaggagtttggcaattttttcctcctccattataagaaggaagtttctgtttctgatcaaatggaatttgtcaatggatgggacattatgattattattagtgacatattgacaatcattggatcaattctaaaaatggaaatccaagctaaggtaatttttttcctaatcatgctattgttagtgtcagatttgcactaatgggaatgtatttttccagaatgtaagaattttcagaatgaattgtttcttcc

SEQ ID NO: 91219 - DNA, 1122 bp, Homo sapiens
  misc_feature (1)...(1122): n = a,t,c or g
actgagcactttgctccagatgtgccgttgttccagatgtaatcgtgagcaaaagcagaaaagatccccgcctacatgggtttacaactagtgggagttacagactaaaagcaaatagagacataaatgcaaagtcacaagttactgtaaaggctgataattatgtaaatttttttttgttgtttaaacttttcatgtaaggcctcctttcatggattaggtgccatcatttaaggggaatatcagttatttctttaatgatctgaaatgtttacatttttagcggcaaaaggagagaagactaaaaagaaagaaaatttgcaaggagatcagaaaagattgcttgctgtctttgcaaagttcagtatcttagtgtaatgggtacaggcctagcccgctttgtacagtaagttggctgacgttttccacgatggtctttattagtagtttaggagagaaacacattagagaattatgacatctaacaagccttataaaatgtttgtaaaagttttcattcagtcagtcttaaaactgaaacttaattntagtttttatataaatagttcgtatataatcatttgtattttcagaatttgagaattaataaaatttgaatatagtaagtgtatggcacttacagtttatcactgatagatgtgatgatgtaaaatgtacatcgaagaaaagactataacaatttgtaaattgattttccctaactaatggaaaccaagaggcaaaaggagagaagtcttgaaatagactgacattactcttaacttttttatgttggctttaaaaaatgttatgtcttacgggatgaaccacccggctaatgccaatgctatattaaattataattctgccttcctttattgtctcattgacgcagcaagcagcaccttgcgtctacgactacttttacctcctcttatgacgaccatttcatttcattctccttatttataagtaccgaacaatcgtctaatacaccctatgtttctcttaatatgtcgatagtcctcatactggagctagactgatgctactcacgtatcaaggacggcataccacgcacaacaagatccgggtattctcgtgcatctcttttatgactct

SEQ ID NO: 91220 - DNA, 1094 bp, Homo sapiens
  misc_feature (1)...(1094): n = a,t,c or g
atatcccaaaagtagtttatttcatttttgattcttttgactttgagcaggtttatctttaagattattttgcttggggtcctatggcattggttgtttataggtttggttttgcaaagttagggctctgtggggggtctacttcctgccagactgtagattgcaaagttatggacttgggtctgaatggccaggtttcccttgggcaaggacaactgagagtataacattttccaattcaattatgttttaaaagggaagagggaggaagcagaatcttcattacaacaaaataaacatgatgattattagcagtgatagaatactaaataaggtatgtcatgatagtaagattttaagaaagccaaacgtcagagtaaaattccatatcttacttaacaattttgaggcatgatttttatctagttgtaccctctgagctcagagaagaattttatcacctaaccctctacagcagtttcaacatagatgcaccccacccttccccaatttgctcttccacagactgtacctgatgggacaagctttccgtcaggtagcaggaggaactaaatttactcttcctgccttgggcttgagaacagttatcttcctgggtcatgtagtatcaaaaggaagatcatagaccttgccaggagcaagcggctatttttacaaccataanaaaaactcccatctgatttttttgtctttactaaaagttttcattgtatgcaatttctgatctaccttgagatggatgggtcacgcgaaacttcacgggctgctttagaatcttcctttctccttttacggctttgtggaacccttttacaaagattaatactcataccactagtctcgcctcacaaccatgcctctcggcaaatccgacatcggtcgcaagttccgagaaaacaaaattcggcgcgtctctcgcaacatccctctgcctccccctagcgcacccccaactttctactaacgcagccgcttgttgctcctgcctctcttataccatccgtgagcccatcgttacccgtatgttctctctacttcctagcccgcgatgctatatccttcactccgcttcc

SEQ ID NO: 91221 - DNA, 1107 bp, Homo sapiens
ccaggagacagcaaaaactataatgaatgtatccggcacgagaccatcagagttgcagtctgtgacatgatggaaggaaagtgtccctgtcctgaacccctacggtatgtgtcaagcgggcttgcttggtattcctttcgggcatttgggtagttggcatctttggggcagagtacagtgttgggtaccagagggagatagagaagaaggaaagatgtggttcctgcttttaaagaacaagtggctgagggttacccaagaggaagttcagagagctactctgttgttggagaatgccatgcctttgggagaggcagtccacacgctcagggagcttccagtttgatgaaggcttggacgtacttttttccggccaaatgtgtagagtacttcataataagactcatttcttagtgctgaagttatttttaagtgccaaaactggatgagcaacgtcagggttaaataaataaacttctaggagaattttgagtaaggtttgggattggggatggctgatgaaaaacaatggaggtggagcaagtcatgagttgaacttgaaattcacatcgggagtattgggctcgggggaggctcaacccctgaatacctagcacctttcggaggctgatgccggaagaatcactggatccgcaacatgtccactctagccctggccacccaggagaaccccatctcgtgccgcaattgttatacatacgccggtgctaacagccaccctttcttcaataccatgcctctctcttacctgacgcgcgatgactatctagctgtctataatgtccgatgcgccacctagtcgtctacaaccgacacgcactcttcatccgggtgcgtgaatcgacctccgttcagtacactacccagcgtctaatgctgcctattcttatattccccttctgacacgtatgtctctcgggctccctactgctctctctccctacatcgtatccaaactctactcctttcagaccatcgtacccggtcgcttggaactagtcatgatctccgcagtatccttgtagcgcccctgctctgcgacgcctcccatatctactgcgaccggtgcccgtctgatcgaacccc

SEQ ID NO: 91222 - DNA, 1083 bp, Homo sapiens
attcattttgcccagaaagttcctgcttcagagctgaaggtaagtacattttccactaattcctcagcttgctaagtgcttttggaccatgaatagagcagctaggaacaaatctgagaagaggtactattcagaattcctccaaatagctcatctttttaattatgggctttcatccttcctaagggagtttattatttttctaattaaactactacaatgaaggctattacctttttgtctagctaaaacaatctttcctattaatgaatttattggcttctctagtactcttcaaattgtcattgagctctattcaaggactacagccagttttttcctaatagaattaggggtgaaacaaatcatgcttctattatcacttctggagttagcccttcacctgatcagcttgtctaggtgtaagagtgcgggggttttagcgccacaaagacgtgggcatgcggcagcttcctgaacctcaggcattggtgtctaagcaactccaccatccacacgtgtgacgttacagttctgggagatgcacgcacactttctgtggctttctcaaccactagctcagtcagcctccaccttcctaggcagcaacacggggtgcaggataaacaataactaaaagcatactgattatcacatactcctgcaaagtgtttgcacccagaaagcatgcagtcactgccatcatgaggggctcacacctttctttggctggctctgtcggggggcacatgttacctataaaagaggcccaggcattcgattaaacagctcttctttataattcagtttgcctaaactggcttcaaaaaactgtccccaatacttacttaccccccccccttctactccccatatacccacttcccgggccccttggaaactacttctacatgcttgccaaagtcaaaagggtaggattggcagtggttccagggggcccaacgccagcctggacgaaacagaggagagcgtctctctgatctctcaccccgctccgcgggtgcggacggtcgtcgcagatgtcacacgacgctcgcaacgacgcggccgcatctggtcgcg

SEQ ID NO: 91223 - DNA, 402 bp, Homo sapiens
cagcttcagtttaagtttaggtgccaatctggcttgagtatattacaggaagcttgtgtgttttttcctacaaagagcagtaaagaattcacagatgagtgcatggatctaaaatgccagattatagttacgcttgttttctttttcaaacaagaccatgacctttgtatcattgtagcctatcactgccaagacattgtttttgctcagggtaacattttatttcttgtcaaactatcttctgatttagatagctattttaggaatactatgcttgattttaacagtggttcattctattgtgaaattttgtttaaaggtaataaagataataaaatttgaataacttaaaaaaacacattgtcattttgaaataggtatctaacacctaccaattcattt

SEQ ID NO: 91224 - DNA, 994 bp, Homo sapiens
cggtggaattctgtcttcccgcgtccgccgattcctcctccttggtcgccgcgtccttggctggcgtcagaaaaatggctacaaacttcctagcacatgagaagatctggttcgacaagttcaaatatgacgacgcagaaaggagattctacgagcagatgaacgggcctgtggcaggtgcctcccgccaggagaacggcgccagcgtgatcctccgtgacattgcgagagccagagagaacatccagaaatccctggctggaagctcaggccccggggcctccagcggcaccagcggagaccacggtgagctcgtcgtccggattgccagtctggaagtggagaaccagagtctgcgtggcgtggtacaggagctgcagcaggccatctccaagctggaggcccggctgaacgtgctggagaagagctcgcctggccaccgggccacggccccacagacccagcacgtatctcccatgcgccaagtggagcccccagccaagaagccagccacaccagcagaggatgacgaggatgatgacattgacctgtttggcagtgacaatgaggaggaggacaaggaggcggcacagctgcgggaggagcggctacggcagtacgcggagaagaaggccaagaagcctgcactggtggccaagtcctccatcctgctggatgtcaagccttgggatgatgagacggacatggcccagctggaggcctgtgtgcgctctatccagctggacgggctggtctggggggcttccaagctggtgcccgtgggctacggtatccggaagctacagattcagtgtgtggtggaggacgacaaggtggggacagacttgctggaggaggagatcaccaagtttgaggagcacgtgcagagtgtcgatatcgcagctttcaacaagatctgaagcctgagtgtgtgtacgtgcgcgcgtgcgtgaggccctgccacgattaaagactgagaccggcaaaaaaaaaa

SEQ ID NO: 91225 - DNA, 2712 bp, Homo sapiens; identical to SEQ ID NO: 58965

SEQ ID NO: 91226 - DNA, 686 bp, Homo sapiens
gaggatctgattgacttgggttatatatttgtgaactagatgccagggaacagagagagggaatttctgttactgtcagttcctgtagtgggaaaaggtgactgcctttccccgtcttataatttcctccaaataggaaaggtattcacatgtgatacgtgtatatgtatctatatccctgacctgtttactgagttctagattcagttaatccactaattcttcccacctggacatctaaatgactagtgtgcacttaaaactgatatcgccattctcagtgactactcccaacctgcattccctaatttatagtgccagttgccctagccagaaaattaggagtcagtctcaattcctcctttcttgttgtacttgtcatatctatttgacttgtgagttctctagattttacctctaccttgacttcttatattttgtctctctgccctatatcatattgtcagcatttttctctgtggtttcaggggacttgttattgggctccctggctatagttcaactctcctccaatctgtccattcagctgccaagatactttcgctaactaccaattctaatcattttctttctcctgctcagaattcttccatttcttgtggggtaaaacttaagctattttatttgtctggtctctgactatgtgggtatctcatatcacttcc

SEQ ID NO: 91227 - DNA, 5810 bp, Homo sapiens
ctgaggactgactggggttctgagactccctgtcccggaccgcagcgttaaaaggatctgaacaaagtctgctcaaatctcctgctgtgaaccagcagaatttttgaacaggtttcttcacatataaaaatctattgtaaaaatacggaaaagaatggcagcggaaacgcagacactgaactttgggcctgaatggctccgagctctgtccagtggtgggagtattacatcccctcctctttctccagcattgccgaagtataaattagcagattatcgttacggcagagaagaaatgttagcacttttccttaaagacaacaagataccttcagaccttctggataaagaatttctgcctatcctccaggaggaaccccttccaccattggctctggtaccctttacagaagaagaacagagaaacttttccatgtctgtaaatagtgctgctgtcctgcgattgacaggacgaggaggaggaggaacagtggtgggggctcctagaggtcgaagttcttcaagagggcgaggcagaggcagaggtgaatgtggtttctaccaaagaagttttgatgaagtagagggtgtttttggtcgaggaggtggcagagaaatgcatagatcgcagagctgggaggaaaggggtgacagacgttttgaaaaaccaggacgaaaagatgtagggagaccaaattttgaggaaggtggaccaacatcagtagggagaaagcatgaatttatacgctcagaaagtgaaaattggcgcatctttagagaggaacaaaatggagaagatgaagatggaggttggcgactagctggatcaaggagggatggagagaggtggcgacctcacagtcctgatggccctcgttctgcaggctggcgggaacacatggaacgacgtcggaggtttgagtttgattttcgagatagagatgatgaacggggttaccgaagggttcgctctggcagtgggagcatagatgatgacagggatagcttgcccgaatggtgcttagaggatgctgaagaagaaatgggtacatttgactcatctggagcattcctttctctaaaaaaagtacagaaagagcctattccagaagagcaggagatggacttccggcctgtggacgaaggggaggagtgctctgactctgagggtagccataatgaagaggccaaagaacccgataagacaaataagaaagaaggagagaaaacagatagagtaggagttgaagctagtgaggaaactccccagacctcatcatcatctgctagaccaggtactccttcagaccatcagtctcaggaagcatcacagtttgagaggaaagatgaaccaaaaactgagcaaacggaaaaagctgaagaggagactcggatggaaaatagtctaccagccaaagtgcccagcagaggggatgaaatggttgctgatgtccagcagcccctgtcgcagattccttcagatacagcctctcctcttctcatacttccacctcctgttcccaatcctagtcctactctccggccagttgaaacaccagttgtaggtgctcctggtatgggcagtgtttccacagaacctgatgatgaagaaggtctcaaacatttggagcagcaagctgagaaaatggtggcttatctccaagacagtgcactagatgatgaaagattggcatcaaaactgcaagagcacagagctaaaggagtgtcgattccattgatgcatgaagcaatgcagaagtggtattacaaagatcctcagggagaaattcaaggtcccttcaataatcaggagatggcagaatggtttcaggcgggctattttactatgtctttattggtgaagagagcgtgtgatgaaagcttccaacctcttggcgatatcatgaaaatgtggggaagggttcccttttctccaggtccagctccccctcctcatatgggagagctggaccaggaacgactgaccaggcagcaagaactcacagccttataccagatgcagcacctgcagtaccagcagtttttaatacaacaacaatatgcacaggttttggcccaacagcagaaagcagcactgtcttcccagcagcagcagcagttggcacttcttcttcaacagtttcagaccttgaagatgagaatatctgatcagaacatcattccctcagtaactaggtctgtgtccgtgccagatactggctctatctgggagcttcagccaacagcttcacagcctacagtttgggaaggtggtagtgtatgggatcttcctctggacaccacgacaccaggccctgccctggaacagcttcagcagctagagaaggccaaagctgcaaagctagagcaagagagaagagaggcagaaatgagggcaaaacgggaagaggaagagcgaaagaggcaggaagaactccgaagacgacagaagggaattcttcggcgacagcaggaagaagaaaggaaaaggcgagaggaagaagaacttgcccgaaggaaacaggaagaggctctgcgtcgccagcgggagcaagaaattgcattaaggcgacagcgagaagaggaagaaagacagcagcaagaagaagctcttagaagactggaagagaggagaagagaagaggaagaaaggcggaagcaggaagaattgttacgcaaacaggaagaggaggctgcaaaatgggcccgggaagaagaagaagcccagcgtcgattagaggagaaccggctgcggatggaagaggaggcagccagactccggcatgaggaagaagaacggaagagaaaggagctggaggtccagcggcagaaggagttaatgcgccagaggcagcagcagcaagaggctctccggaggttgcagcagcagcagcagcaacaacagctggcgcagatgaagcttccttcttcttcaacgtggggccagcagtccaatacaacagcatgtcagtcccaggccacgctgtcgttggctgaaatccaaaaactagaggaagaacgagaacggcagcttcgagaagagcaaaggcgccagcagagggagttgatgaaagctcttcagcagcagcagcaacagcaacagcagaaactctcaggttgggggaatgtcagcaaaccttcaggtaccacgaaatctcttctggagatccagcaggaagaggccaggcaaatgcaaaagcagcagcagcagcagcagcaacaccagcaaccaaacagagctcgtaacaatacgcattccaacctgcacaccagcattgggaattctgtttggggctctataaatactggtcctcctaaccagtgggcatctgacctagtcagtagtatttggagtaatgctgacactaaaaactccaacatgggattctgggatgatgcagtgaaagaggtgggacctaggaattcaacaaataaaaataaaaacaacgccagtctcagtaaatctgtaggtgtgtctaaccggcagaataagaaagtagaagaagaagaaaagttgctgaagctctttcagggagtaaataaagcccaagatggatttacgcagtggtgtgaacagatgcttcatgcccttaatacggcaaataacttggatgttcccacatttgtttctttcctgaaagaagtagaatctccttatgaggtccatgattatatcagggcctatttaggagatacttctgaggccaaggagtttgccaagcagttccttgagcgccgtgccaaacagaaagccaaccagcagcgtcagcagcagcagctgccgcagcagcagcagcagccgccacagcagccgccacagcagccacaacagcaggactctgtgtgggggatgaaccacagtacactccattcagtatttcagaccaatcaaagcaacaaccaacaatccaattttgaggctgtgcagagtggcaagaagaagaaaaagcagaagatggtccgagcagatcccagtttattaggattttcagtcaatgcatcatcggagcgactcaacatgggtgaaatcgagacgttggatgactactgagcacctgccagtggactggccatccctctcctgtctgccgactatggagtctccacctttggacacaacacttactcaccatttactctttatcactctgcaacaaatcacagaaccgatcatctcaggctttttcttctggccctttgtgtccaagattctttaatccatttttgttggtgaacatctcagactatagataagtggactggaccctgtgtcttgggggtggcagttgggattactccccaacaaggctgattttaggcagcatgtgttcactgtgctgtgatttcatctactgtctcccagaaagtgtgttgggatcggccattagcagcttgctttctcttgtcactttttttcttctattttggtttttcttcttctttttccccccatcagggcaaatggtctaactggtgcaatcatgaagagagttaatggttaacagacattggccaataacaaaacaccccatggactgtgactcgagtatccaacaggcagtcagagctctcccggtctgaaagttgcattgccactgctaactttgggattgcatcagagaggccctgagtggggttgagatgaggttggtttggtttgatgttacacactcctcacctgttctttctgagtgtcctttctctgaaaggatttatgtttttcttcgttagatagtgacttctgagcaagctgatctcccctggcatgctccaacctgattggacaaaggaagctctatggcctgggagagagactattcttaatttttctttcttacaaaaactgatttttcccataaatatttttacttcagaggactaggaccattttgttttgggcccttctgctgaaaatttgtctcgtttaagaggcagctagaatctttaccatatgtatgaatttgtataatttcatttttggatagggataaacttttgcttctgataaaagcctggaatttcatctggtcctcagagcattgcgtgtgtgtcttgctgtagcccggaaaaggttttgtgtaaagattctgggatggcaagttgtttgccttttctgaaaagagaacatacagaacctgtccatctttaagaccttcatccatggaatctactatacaggaggatgcagtgggctggaggggatgggcgaaaatgggagcaggaagcctggcctggcttctggtcatggcctcctaaaaccttaaacttcaagtagaaatgtactcaagccctatttataaacaaatacttttcctgcctccaccaaacccctacagaacatcacctggaattgccactcacactgggttggagtcattgggcagctgtgcctgtgcgagaggtgctgtggtctgggcagcccctggaaaagcacctttgctgcctgtcattgttgcctgaagaaggctggagttgctctgagagcagtttgggtttggagtattatatttggcttctatttttattattttggatcaccattctccctatcccttcttgcctccctcccttctaaacatgtgtaataactatacagagactgctacaaaattgtatatagtttttggatcaaatagcatgaggggagaggaaaccattaaaaattggggctcctactctcctttgctttgtaaattcaaaagttgggggtgggtaagagggatagttaaaatgtttacaaaactttaggctccctcgggaacttttgccagtgtggaggaaaataaaaaagaaattaaataaaaaaaaaa

SEQ ID NO: 91228 - DNA, 408 bp, Homo sapiens
accaatacgatgaagggaaatgataaggtgacattatccctgagctaaaagtcaccgaatctgtgacaaggtatgggctagtcaacttgtggagctctccagcccccttctcaatgaagattttaaggcaaactagaattgcattacatttagtgattatttttcctcaaagaccaacgacttcaatgggagatagaagagtctgtggatcacttgcttttattctcttcctatagctgtgaaaattgattcaagaaattgccaacattccactttaatcagggtagaaaccaagagttgggtgtagtttatccattgagatgctctatgcattggcaatgccatcatttaaaaacatcatggagactgtttttagtcatatggacaaatccaagcaggctgccttcc

SEQ ID NO: 91229 - DNA, 442 bp, Homo sapiens
  misc_feature (1)...(442): n = a,t,c or g
aatgtctgncttatgcctagncgtacngncnnnncncntnnnnnnnnnggnncgacccagtcgttcgatttacatttaccttttcacttgttttttcttttctaaatggacattaaactcattgagggaggttataatgttacaatatgtttggaaccccagggacttaatcatacttcttaaacatgtatgtttagagttgtatcagctttcctcttttacacttatttatgcaaagccattacagctacatctttatccacgctcatgtgatgatggggaacattattttattttgaagttatttattaaggattcatagtcacctatcatatcatctaagttcattaaagtgaccttctcacttcaaaagccaaagacacagttgatctctgccccggcactctgttattataagcctcattgatttaacaaatgtatt

SEQ ID NO: 91230 - DNA, 2349 bp, Homo sapiens
gcctgagtgccacagccagggcctctgctctgtacacagaccgggcaaggtcccccaggccaggatgtcaggcctggtgttggggcagcgggatgagcctgcaggccaccggctcagccaagaggagatcctggggagcacacggctggtcagccaagggctagaggccctacgcagtgaacaccaggccgtgctgcaaagcctgtcccagaccattgagtgtctgcagcagggaggccatgaggaagggctggtgcatgagaaggcccggcagcttcgccgttctatggaaaacattgagctcgggctgagtgaggcccaggtgatgctggctctagccagccacctgagcacagtggagtcggagaaacagaagctgcgggctcaggtgcggcggctatgccaggagaaccagtggctgcgggatgagctggctggcacccagcagcggctacagcgcagtgaacaggctgtggctcagctggaggaggaaaagaagcacctggagttcctggggcagctgcggcagtatgatgaggatggacatacctcggaggagaaagaaggcgatgccaccaaggattccctggatgacctctttcctaatgaggaggaagaggaccccagcaatggcttgtcccgtggtcaaggtgctacagcagctcagcagggtggatatgagatcccagcaaggttgcggacgttgcacaacctggtgatccagtacgcagcccaaggtcgctatgaggtggccgtgccactctgtaagcaggcactagaggacctggagcgcacatcaggccgtggccaccctgatgtcgccaccatgctcaacatccttgctttggtgtatcgtgaccagaataagtataaggaagctgcccacctgctgaatgatgcccttagcatccgggagagcaccttgggacctgaccatcctgctgtggctgccacactcaacaatttggctgtgctctatggcaaaaggggcaagtacaaggaggcagagcctctgtgccagcgggcactggagattcgagaaaaggtcctgggcacgaatcatccagatgtggcaaaacagctgaacaacctggccctcttgtgccaaaaccagggcaagtatgaggccgtggaacgctactaccagcgagcactggccatctacgaggggcagctggggccggacaaccctaatgtagcccggaccaagaacaacctggcttcctgttacctgaaacagggcaaatatgctgaggctgagacactatacaaagagatcctgacccgtgcccatgtacaggagtttgggtctgtggatgatgaccacaagcccatctggatgcatgcagaggagcgggaggaaatgagcaaaagccggcaccatgagggtgggacaccctatgctgagtatggaggctggtacaaggcctgcaaagtgagcagccccacagtgaacactactctgagaaacctgggagctctgtataggcgccagggaaagctggaggctgctgagaccctggaggaatgtgccctgcggtcccggagacagggcactgaccctatcagccagacgaaggtggcagagctgcttggggagagtgatggtagaaggacctcccaggagggccctggagacagtgtgaaattcgagggaggtgaagatgcttctgtggctgtggagtggtccggggatggcagtgggaccctgcagaggagtggctctcttggcaagatccgggatgtgctccgcagaagcagtgaactcttggtgaggaagctccaggggactgagcctcggccctccagcagcaacatgaagcgagcagcctccttgaactatctgaaccaacctagtgcagcacccctccaggtctcccggggcctcagtgccagcaccatggacctctcttcaagcagctgacattcaacccggcccccaggtctgctgggtccccccacccccacagccctcacagcattccccattgctcctggctcttccccacccctaggtgggacagtgaaggggagcagtttaaccagaagattgctgctgcccttagggtctcagctccctcctcaggaatccctcttaggaaggaccctcaggacaccctctctgcaccctgtggtcctctagagtagctagctctgaggccccaaggtgggtacaaagcaggtatggccctcagagatgcagcctgctgctggcttttcagtcagagggttgggggctggccagccaagctgccttgccctggccgctcttactccctccctctgctgtctcacttcaggtccatgtatttcacttttcttaaataaaagaatcaggtaaaaaaaaaa

SEQ ID NO: 91231 - DNA, 1464 bp, Homo sapiens; identical to SEQ ID NO: 59272

SEQ ID NO: 91232 - DNA, 3015 bp, Homo sapiens; identical to SEQ ID NO: 59579

SEQ ID NO: 91233 - DNA, 795 bp, Homo sapiens
agacactgtggtggaattcctagcgttggccccctggtcccactttctctcttaacttgtcttttctcattcctttgtctccaccggacttcgtcacccccatgacctggtgttgggtccgatcaccccaacaactggaatacggaagggaataagaagaggattccttcctaattgctagcttctgttagcagtagctgatgccatggcccctgctgccagctctcaatcttcacctgagccaggtggcacccctttgagaaatagggtactaccccttcacctccttcacctgccaatctgggcttcctctgtggaggtcccaacacccactggtctgtgtcctcttctcagaggtcccagcaccaaccgcaccagccacaggactcctcttctcggtggtacaaccagcagcttccaggcccagccacatatccagagcttggggatcaggtatagagagccaatcccctgggaacccatgcattagtcccagggggcctctcctccaagcgcctacattctggaaaagcctcaagtttctacagtcatgatacctgggaaactcagtgctcccttttggatttttcttagcccttccacacctatgtaaatctgcatgaaatttccactgtttgaatagaatggcattccctggtgacccctaactgatacgctgaggtttccagggcccctcatcccaataaactcaagggggacacgaatggtgcgtgaaattggaaacaaatcttcactgcttagaagacaacacgtccagccggccaaaatagattc

SEQ ID NO: 91234 - DNA, 1565 bp, Homo sapiens; identical to SEQ ID NO: 60090
  misc_feature (1)...(1565): n = a,t,c or g

SEQ ID NO: 91235 - DNA, 387 bp, Homo sapiens
accgggtctcagatcttggtcaccgacaggctatgttatgtgcacttatgtaggagctcagctctggcagcaggacgtggtggaaagggcactgctgagacctagctggctctgcgatggattcactgtgtttctgagatgtgcttctttgctgacactgctgacagctggatacagctacactgagaaacacgagacccgagtcctgtctgctttggctttacgggtggcgacggatgtgtaaaagaaacacaaacacaaacaaggcaaagcttgtcctctgcctaaggagatgcgatgtccagctgcactgaacaccctgcccattattcagagctacattccaatgatgttctaccccaagaatatgctagagggacccaacca

SEQ ID NO: 91236 - DNA, 1679 bp, Homo sapiens
tttcgtgcgtccccggcccaaccatggcgtcctccgcggccggctgcgtggtgatcgttggcaggaagtctgaaacagcagttggagtgtagtggttaagaggaaggactcaggagtcagattgcttggcttcatctcatagatccataacttatcacccttgtggacttaattcctccatgcctcagtttatcacttatgtaggcttaattcctccatgcctcagtttccctacatataaaatggaaatactaataacacttatcttgtagggttgttgtaaagattaacatagtggagtcattgggcgaagctgggccatgctgtttgccagtggaggcttccaggtgaaactctatgacattgagcaacagcagataaggaatgccctggaaaacatcagaaaggagatgaagttgctggagcaggcaggttctctgaaaggctccctgagtgtggaagagcagctgtcactcatcagtggttgtcccaatatccaagaagcagtagagggtgccatgcacattcaggaatgtgttccagaagatctagaactgaagaagaagatttttgctcagttagattccatcattgatgatcgagtgatcttaagcagttccacttcttgtctcatgccttccaagttgtttgctggcttggtccatgtgaagcaatgcatcgtggctcatcctgtgaatccgccatactacatcccgctggttgagctggtcccccacccggagacggcccctacgacagtggacagaacccacgccctgatgaagaagattggacagtgccccatgcgagtccagaaggaggtggccggcttcgttctgaaccgcctgcaatatgcaatcatcagcgaggcctggcggctagtggaggaaggaatcgtgtctcctagtgacctggaccttgtcatgtcagaagggttgggcatgcggtatgcattcattggacccctggaaaccatgcatctcaatgcagaaggtatgttaagctactgcgacagatacagcgaaggcataaaacatgtcctacagacttttggacccattccagagttttccagggccactgctgagaaggttaaccaggacatgtgcatgaaggtccctgatgacccggagcacttagctgccaggaggcagtggagggacgagtgcctcatgagactcgccaagttgaagagtcaagtgcagccccagtgaatttcttgtaatgcagcttccactcctctcattggaggccctatttgggaacactgcaagcccttaatcagccctctgtgacataggtagcagcccacggagatcctaagctggctgtcttgtgtgcagcctgagtggggtggtgcaggccggtagtctgcccgtcactttggatcatagccctgggcctggcggcacagcagcacttgcgttctcggggctgtcgatttcctgccacctgggcagataacctggagatttccaccttttcttttcagcttgattgcatttgactatattttacagccagtgattgtagtttcatgttaatatgtggcaaaatatttttgtaattattttctaatccctttctgagtactctggggccctgcatttatgaggcacctaccttcattttgctaacgcttattctgaataaaagtttttgattccttaaaaaaaaaa

SEQ ID NO: 91237 - DNA, 2009 bp, Homo sapiens; identical to SEQ ID NO: 59736

SEQ ID NO: 91238 - DNA, 435 bp, Homo sapiens
agctatttatccctaggtcctttcctcctgcacgtcagctttgagccccgagctggtgcttctgctctctgagacatggcaggcctgatgaccatagtaaccagccttctgttccttggtgtctgtgcccaccacatcatccctacgggctctgtggtcctcccctctccctgctgcatgttctttgtttccaagagaattcctgagaaccgagtggtcagctaccagctgtccagcaggagcacatgcctcaaggcaggagtgatcttcaccaccaagaagggccagcagttctgtggcgaccccaagcaggagtgggtccagaggtacatgaagaacctggacgccaagcagaagaaggcttcccctagggccagggcagtggctgtcaagggccctgtccagagatatcctggcaaccaaaccacctgctaa

SEQ ID NO: 91239 - DNA, 623 bp, Homo sapiens
taaatatgtgcgacctagatgttggaaattaattatctctgaaagggttatcattgtggacacttgcttaatttgtaagatatttgctactcttgattgatttagtctttttctgactttagacaacttgaagtaattgagaatattagttcctttgttggaataacaaaatagaatgccagggaaatgaccttaggcagagataataattttaatttaaccaaagtaatcaaaacaataacaataatcagcaatttcttttattgtttttcactgttttgcatggcacatgttgaatactgaaactctgccttaggttatttgtgcactaacatcaacttcccttttaacgtcttgacatgatgtccaaggtctactgatggccccactggagagcctccttccagggaactgatccctgaagatctacctattaaggaatagcccagtcagagcaacagcgagttggctggtcagcctggtagttggctcagtacgtgaagaggctcttgatgcaaatttggagaatcattaccatcaggtcacagaaggaccccgggcaaggcaatacaagggtctcgatttatgcttatgtgtttgggagacaaaaaggattccaaggg

SEQ ID NO: 91240 - DNA, 4746 bp, Homo sapiens; identical to SEQ ID NO: 59784
  misc_feature (1)...(4746): n = a,t,c or g

SEQ ID NO: 91241 - DNA, 2093 bp, Homo sapiens; identical to SEQ ID NO: 59596

SEQ ID NO: 91242 - DNA, 2652 bp, Homo sapiens
gacgatttcgtgaggcctccataaccgccagattgaaaactgactgttcaagactgtctaaatcctacttctggatgactgtgcagtcagaattctcctgaagattgggttaatttcagctcagaaaagcagaaacgatacccttggtactggactggaagaaaactacgaagtgagagagccatgaagattcaaaaaaagctgactggctgcagcaggctgatgcttctgtgtctttctctggagctgctgttggaagctggggctgggaatattcactactcagtgccggaagagacagacaaaggttccttcgtaggcaacatcgccaaggacctagggctgcaaccccaggagctggcagatggcggagtccgcatcgtctccagaggtaggatgccgcttttcgctctgaatcctagaagtggcagcttgatcaccgcgcgcaggatagaccgggaggagctctgcgctcagagcatgccgtgtctcgtgagttttaatatccttgttgaggataaaatgaagctttttcctgttgaagtagaaataattgatattaatgacaacactccccaattccagttagaggaactggagtttaaaatgaatgaaataacgactccaggtaccagagtctcattgccttttgggcaagaccttgatgtgggtatgaactcactccagagctaccaactcagctctaaccctcatttctccctggatgtgcaacagggagccgatgggcctcaacatccagagatggtgctgcagagtcccttagacagagaagaagaagctgtccaccacctcatcctcacagcttctgatgggggtgaaccagtccgttcagggaccctcagaatttacattcaggtggtggatgcaaatgacaatcctccagcatttactcaggcacaataccatataaatgtccccgaaaacgtgccgctgggtactcagctgctcatggtaaatgccactgaccctgatgagggagccaatggggaagtaacgtactcctttcacaatgtagaccacagagtggcccaaatatttcgtttagattcttacacaggagaaatatcaaataaagaaccactagatttcgaagaatacaaaatgtattcaatggaagttcaagcccaggatggtgcggggctcatggctaaagttaaggtactgatcaaagttttggatgtaaatgataatgccccagaagtgaccatcacctctgtcaccactgcagttccagaaaactttcctcctgggaccataattgctcttatcagtgtgcatgaccaggactcaggagacaatggctacaccacatgtttcattcctggaaatttaccctttaaattggaaaagttagttgataattattaccgtttagtgactgaaagaacactggacagagaacttatctctgggtacaacatcacaataacagcaatagaccaaggaactccagctctatctactgaaactcacatttcactactagtgacagatatcaatgacaactccccagtcttccatcaggactcctactctgcctacattcccgaaaacaaccccagaggagcctccatcttctctgtgagggcccacgacttggacagcaatgagaatgcacaaatcacttactccctaatagaggacactatccagggggcacccctatctgcctacctctccatcaactccgacactggggtcctgtatgcgctgcgatccttcgactatgagcagttccgggacatgcaactgaaagtgatggcgcgggacagtggggatccgcccctcagcagcaacgtgtctctcagcctattcctgctggaccagaacgacaacgcgcccgagatcctgtaccccgccctccccacagacggttccactggcgtggagctggcgcctcgctccgcagagcccggctacctggtgaccaaggtggtggcggtggacagagactcgggccagaacgcctggctgtcctaccgcctgctcaaggccagcgagccgggactcttctcggtgggtctgcacacgggcgaggtgcgcacggcgcgagccctgctggacagagacgcgctcaagcagagcctcgtggtggccgtccaggaccacggccagccccctctctccgccactgtcacgctcaccgtggccgtggccgacaggatccccgacatcctggccgacctgggcagcctcgagccctccgccaaacccaacgattcggacctcactctgtacctggtggtggcggaggccgcggtctcctgcgtcttcctggccttcgtcatcgtgctgctggcgcacaggctgcggcgctggcacaagtcacgcctgctgcaggcttcgggaggtggcttagcgagtacgcccggctcgcactttgtgggcgtggacggggttcgggctttcctgcagacctattcccacgaggtctccctcactgcggactcgcggaagagccacctgattttcccccagcccaactatgcggacacactcatcagccaggagagctgtgagaaaaagggttttctatcagcaccccagtctttacttgaagacaaaaaggaaccattttctcaggtaaacttttgtgatgaatgtatcagctatctagagaaaaataattct

SEQ ID NO: 91243 - DNA, 4675 bp, Homo sapiens
ccacctgataaccaaaaacttggcttgttggaagccttattaaagattggtgattggcaacatgcacagaacattatggatcagatgcctccatactatgcagcttcacacaagctaatagcccttgctatttgcaagctcattcatataactattgagcctctctaccgaagtgtcacttcatgggccgtggaccatgcaggcttcttagagagtgacccctgtgactccacagtggggcacctgctgagcagagttggagttcctaaaggtgctaaaggctcacctgttaatgctttgcaaaacaagagagcaccaaaacaagctgagagctttgaagatttgaggagagacgtgttcaatatgttctgttaccttggtcctcacctttctcacgatcccattttatttgcaaaagtggtgcgcataggcaagtcatttatgaaggagtttcagtctgatggaagcaaacaagaagataaagaaaaaacggaagttatccttagctgtttgcttagcattactgaccaggtactacttccatctctttctttgatggactgcaatgcttgtatgtctgaggaactatggggaatgtttaaaacatttccatatcagcatagatatcgtctgtatggccagtggaagaatgaaacttataacagtcacccacttttagtaaaagttaaagctcaaacaatagacagagccaaatatatcatgaagcgcctaaccaaggaaaatgtgaagccttctggaagacaaattgggaagttgagccacagcaatccaaccattttgtttgattatgtatgttttgagatcttgtcacaaatacagaagtatgataacttaataacacctgtagtagattcattgaaatacctcacttcactgaattatgatgtcttggcctgtatcctttcaaattgtatcattgaagctttagctaatccagaaaaggaaagaatgaaacatgatgacacaaccatctcaagctggcttcagagtctggctagtttctgtggtgcagtttttcgtaaatatccaattgatcttgctggtcttcttcagtatgttgccaatcagctaaaggcgggcaaaagttttgacctgcttatattgaaagaagtggtacaaaaaatggcaggaatagaaattacagaggaaatgacaatggagcaactagaggctatgactggtggagagcagctaaaagctgagggtggttattttggtcagatcagaaacactaaaaaatcctctcagagattaaaggatgctctattggaccatgatcttgcccttcctctctgtctgcttatggctcagcagagaaatggggtaatctttcaggaaggtggagagaaacatttgaaacttgtgggaaagctctatgaccagtgtcatgataccctggtgcagtttggtgggtttttagcatctaatctgagcacagaagattatataaagcgagtgccttcaattgatgtactctgtaatgaatttcatacaccccatgatgcagcatttttcctgtctaggccaatgtatgcccatcatatttcgtcaaagtatgatgaacttaaaaaatcagaaaagggaagtaaacagcaacataaagttcataagtacattacatcatgtgagatggtgatggcgcctgtccatgaagcagtggtctccttacatgtttccaaagtctgggatgacatcagccctcaattctatgctacattctggtcattgacaatgtatgaccttgcagttccacacaccagctatgaacgagaagtcaataaacttaaagtccagatgaaagcaattgatgacaatcaggaaatgcccccaaataaaaagaaaaaagagaaggagcgctgtactgcccttcaggacaagcttcttgaagaagaaaagaaacagatggaacatgtacagagagttctacagagattgaaactggaaaaggacaactggcttttagcaaaatctaccaaaaatgagaccatcacaaaatttctacagctgtgtatatttcctcgatgtattttttcagcaattgatgctgtttactgtgctcgttttgttgaattggtacatcaacagaaaactccaaatttttccacacttctttgctatgatcgagttttctctgacataatttacacagttgcaagctgtactgaaaatgaagccagtcgatacggaaggtttctttgctgcatgttagagactgtgaccaggtggcatagtgatagagccacatatgaaaaggaatgtggaaactatccaggattccttaccatattacgggcaactggatttgatggtggaaataaggctgatcaattagactatgaaaattttcgacatgttgtacataaatggcattacaaactaaccaaggcatcggtacattgccttgaaacaggcgaatatactcacatcaggaatatcttgattgtgctaacaaaaatacttccttggtacccaaaagttttgaatctgggtcaagctttggaaagaagagtacacaaaatctgccaagaagaaaaagagaagaggccagatctatatgcattggctatgggctactctgggcagttgaaaagtagaaagtcatacatgatacctgaaaatgagtttcatcacaaagacccccctccgaggaatgcagttgccagtgtgcaaaatgggcctggtggtgggccttcttcatcatcaataggaagtgcatctaaatcggatgaaagcagtactgaggagactgataaatcaagggagagatctcagtgtggtgtgaaagctgttaataaagcttctagtaccacacctaaagggaattcaagcaatggaaatagtggctctaacagcaacaaagctgttaaagaaaatgacaaagaaaaagggaaagagaaagaaaaagagaaaaaagaaaagactccagctactactccagaggccagggtacttggtaaagatggtaaagaaaaaccaaaggaagagcggccaaataaagatgaaaaagcaagagagaccaaggaaagaacgccgaagtctgacaaagagaaagaaaaattcaagaaggaagaaaaagctaaagatgagaaatttaagaccactgtccccaacgcagaatcaaaatcaactcaagaaagggaaagagagaaggagccatccagagaaagagatatagcaaaggaaatgaaatcaaaggaaaatgttaaaggaggagaaaaaacaccagtttctgggtccttgaaatcacctgttcccagatcagatattccagagcctgaaagggaacaaaaacgccgcaaaattgatactcacccttctccatcacattcctccacagtaaaggacagtctcatcgaactcaaggaatcttcagcaaagctctacattaatcatactcctccaccactgtccaagagtaaggagagagaaatggacaagaaagatttggacaagtcaagggaaagatccagagaaagagagaaaaaagatgaaaaggacaggaaagagcggaaaagggatcactcaaacaacgaccgtgaagtgccaccggacttaaccaagagacgtaaagaggagaatggaacaatgggggtttcaaaacataaaagtgaaagtccttgtgaatctccttatccaaatgagaaagacaaggaaaaaaataagtcaaaatcttcaggcaaagaaaaaggcagtgattcatttaaatctgagaagatggataaaatctcctccggtggcaaaaaggagtccaggcatgataaagaaaagatagaaaagaaagagaaacgggacagttcaggaggaaaggaagagaagaaacatcataagtcctcggacaagcacagataatgaagactttccatcaaggtgagatcggactggaactgttcggctgcgaccagaaatttattttcctgagtaaattgccgagaattaagaatgaagagggccatttgcatctccttaaattattcagttacctgctttattgctccatgtggaaaacttaaaattgttaagttgtgcattactgtattttaacttgttgcttagtttctacatgtttattttcagtaatggctgaaagtgttaactgttccatacttttagcacaatgtgctgcataaggttacctgtgtacagagttttactttagattaactaaatattgcctgggttcagtttttatttccattctgaaatgcttcctttttattgtttgaaactgaaaataaacaattgttgaacccttttgattttacctcattttaaaactgttttaatttattatttggcttgttcttaatattagtcactaaaagcagtgggagcattgtcttatgaaatgcttaggaatcattttatatagtacatgtacaacattaaacgtgtttaaaaaagaaaaaggtaccagcgatcacttgtcccttgccattttttcttgtaattatgttagacaaatcttggcggcggggggatcaaaacataattgttttaattctacagctgtaggagctttgtattgctgaactttcatctggaaaagtttcacagtgacatttttaaaagagaatttttttatctgccgaattctaccagtgtaaccttttttctaaataaacaatagttttctcaaatggttgtaaaaaaaaaa

SEQ ID NO: 91244 - DNA, 1463 bp, Homo sapiens; identical to SEQ ID NO: 59019

SEQ ID NO: 91245 - DNA, 412 bp, Homo sapiens
tttttattcccttaaaaataaaaaaaagattttgaatagaagatattatgaagatttctcaagaagttcctaaatcttaaactttccatgctgtctttaaaaatcttttttttatttttaagggaataaaaattttaaaaattaagagatatacagatgactttttaagggtccttctttccagcacattttttttaaaaactcaggttagaataaaaatgtcataaagggcactaaaagtaacatttgggtttcactccatatctagaagaatttagctcacaaaacaatttttgtgtgttttgagtaactgatgcataagtgcaatgaataattttcctgcttcactgttatttttaatttaacctggcaaattaagtgagacttgaacaaaattttgttcatcttgaag

SEQ ID NO: 91246 - DNA, 1708 bp, Homo sapiens
accttttgtagaccatagtacatgcggtggaattccggggagaggccatcacttgaagatgctgagtcttctgctccttctcctgggactaggtatgagccttgtcttttgaggagtctggggttaatgttaacactgggtggaaagactttctctccagagagtctgaagccaccagacagaagatgaaggggatatgttagattaaagaaccataacagagtaattgttggcacaataaaaaggaggcagttccctggggtcctttgggagctgaggtggtattggagaaataaagcagagaccttcctgcctggggagatgtctggaccccagcttgtcggtcctcatgaatatctctctgggactaggctctgtgttcagtgctgtcatctctcaaaagccaagcagggatatctgtcaacgtggaacctccctgacgatccagtgtcaagtcgatagccaagtcaccatgatgttctggtaccgtcagcaacctggacagagcctgacactgatcgcaactgcaaatcagggctctgaggccacatatgagagtggatttgtcattgacaagtttcccatcagccgcccaaacctaacattctcaactctgactgtgagcaacatgagccctgaagacagcagcatatatctctgcagcgccggacgacagggaacctacgagcagtacttcgggccgggcaccaggctcacggtcacagaggacctgaaaaacgtgttcccacccgaggtcgctgtgtttgagccatcagaagcagagatctcccacacccaaaaggccacactggtgtgcctggccacaggcttctaccccgaccacgtggagctgagctggtgggtgaatgggaaggaggtgcacagtggggtcagcacagacccgcagcccctcaaggagcagcccgccctcaatgactccagatactgcctgagcagccgcctgagggtctcggccaccttctggcagaacccccgcaaccacttccgctgtcaagtccagttctacgggctctcggagaatgacgagtggacccaggatagggccaaacctgtcacccagatcgtcagcgccgaggcctggggtagagcagactgtggcttcacctccgagtcttaccagcaaggggtcctgtctgccaccatcctctatgagatcttgctagggaaggccaccttgtatgccgtgctggtcagtgccctcgtgctgatggccatggtcaagagaaaggattccagaggctagctccaaaaccatcccaggtcattcttcatcctcacccaggattctcctgtacctgctcccaatctgtgttcctaaaagtgattctcactctgcttctcatctcctacttacatgaatacttctctcttttttctgtttccctgaagattgagctcccaacccccaagtacgaaataggctaaaccaataaaaaattgtgtgttgggcctggttgcatttcaggagtgtctgtggagttctgctcatcactgacctatcttctgatttagggaaagcagcattcccttggacatctgaagtgacagccctctttctctccacccaatgctgctttctcctgttcatcctgatggaagtcctcaaacaccatttccatacccaggcattctgggtccccactggagggttagtctgaagggcaatggctgggctttggaaaaccag

SEQ ID NO: 91247 - DNA, 1916 bp, Homo sapiens; identical to SEQ ID NO: 59527

SEQ ID NO: 91248 - DNA, 6641 bp, Homo sapiens; identical to SEQ ID NO: 58653

SEQ ID NO: 91249 - DNA, 1131 bp, Homo sapiens
  misc_feature (1)...(1131): n = a,t,c or g
atggtgaaggtcgtgccggccacgcgaggaaatctgcctcgctcacaactcacaggcacacatcaacactgccaaccgagggagcccaaaatcaccgcaagcgaaaggctccggcggcggccacgggccacagcccgcctccgcgcacacgcagcccctcccgagcctccactcgccgtcttcgccccgccttcggaccggaaggagttgttggcgcttccggtggcctgcgaccccgtaattgcctcggtgatgtcgtgggttcaagcagcctccttgatccagggccctggagacaaaggggacgtgtttgacgaagaagcagacgagtcgctcctggcgcagcgggaatggcagagtaacatgcaaagacgagtcaaagaaggttatagagatggaatagatgctggcaaagcagttactcttcaacagggcttcaatcaaggttataagaaaggtgcagaagtcattttaaactatggacgactccgaggaacattgagtgctttgctctcctggtgtcaccttcataataataattcaactttgatcaataaaataaacaatcttctggatgcagttggccagtgtgaagagtatgtgctcaaacatctgaaatcaatcactccaccgtcccatgttgtagatttattggactccattgaggatatggacctttgtcatgtagttccagctgagaaaaagattgatgaagctaaagatgaaagactctgtgaaaataatgctgagtttaacaaaaactgtagcaagagccatagtgggatagattgttcatatgtagaatgttgtagaacacaggagcatgcacattcaggaaaacccaagccccacatggattttggaacagacagccagttttagttaaacagctgggcctatcagtagatgtattacaacacctcaaacaactataaaattaccttcccttttctaatgaaaataatgttcagaacatttggtttccctaccaatcgaaatttgtactggttttctgcatcaaaccacctcaactgtagggttaccccntttatggaagtttgaaattancacactattgttcttcaaaattacacaccctattaaatgtaatataagcctttaaaaaaaaaa

SEQ ID NO: 91250 - DNA, 4377 bp, Homo sapiens; identical to SEQ ID NO: 58811

SEQ ID NO: 91251 - DNA, 1184 bp, Homo sapiens
  misc_feature (1)...(1184): n = a,t,c or g
tttttttatgttgggattttcaaatttattccaacatgctaattcttttttttttaaaaaatatcctcaggctgaacactcagccagagctgtaataaaggcaattattatacttgtaaaaacttctcattcacagtacagatgtaatttacaacaaaggtcacacacatcaatactgagcatttttccttttgtacgtcagactctgtgctttagacctgcgtggatttttgttttttttttttgtttgtttctgttttgttttttcttttgcactgatatataccataccaacattgcaagatgcaaagtgtggaaactggagtttaaataaaattacaaggcaaaactaccccatcccaagtgcggttgctgtacatatctacagtacaatttttggaatgtattgccatttaagaacatagaaactttctacagacaatttcacatacagaatacgtacaccttttagaaaaaaaggcaaatatttatcttacagagagcattgtattttacatttgcctgcacgtttcttttttctgtttcttttctttctttctttttttacatactaggatttattaaagtgaccataaggtgcccgaagcgggttttctaatggaaagcagactggattcacaacacagaagcagaattggtggaacaggctttcggggacctttcttcccctggtcacacgggcagatccggtccccaaggacaggtgctcagccaggacttttgctttaagaaggatttgtctggagaaaggactagagagaaatccagctcagatgtattgctcattcctcttcagaaggactgggtgggaatggagcaggggctagaggaatctggaagctaattcttttaggctttttccaacagagggaagcagagggacttctgggtctggaagttggagcttacggaggcgacagtgcaggcagctggctgctgtcgggctcctggagggttgcaggggttgagcccagagtgagagccacaggtgcgggcgggagcagagaggagtggggttactacccaggatggccctgagattgccaagggtgaagggcatcgtggagcgcaggcctggggggcaaggactcaccaaccaaaggcaaggttcggctctgaaaccgaattccgccacactggactagggtctcaatggnctcaat

SEQ ID NO: 91252 - DNA, 1211 bp, Homo sapiens
gagagcgcacggtggagccgccagttgagaaggactctgatccggctcagctttccaatcagctgcggaaggagccacgctttcgggggttgcaagatggcggccaccagtggaactgatgagccggtttccggggagttggtgtctgtggcacatgcgctttctctcccagcagagtcgtatggcaacgatcctgacattgagatggcttgggccatgagagcaatgcagcatgctgaagtctattacaagctgatttcatcagttgacccacagttcctgaaactcaccaaagtagatgaccaaatttactctgagttccggaaaaattttgagacccttaggatagatgtgttggacccagaagaactcaagtcagaatcagccaaagagaagtggaggccattctgcttgaagtttaatgggattgttgaagacttcaactatggtactttgctgcgactagattgttctcagggctacactgaggaaaacaccatctttgcccccaggatacaattctttgccattgaaattgctcggaaccgggaaggctataacaaagctgtttatatcagtgttcaggacaaagaaggagagaaaggagtcaacaatggaggagaaaaaagagctgacagtggagaagaagagaacaccaagaatggaggagagaaaggagctgatagtggagaagaaaaagaggaaggaatcaacagagaagacaaaactgacaaaggaggagaaaaagggaaagaagctgacaaagaaatcaacaaaagtggtgaaaaagctatgtaaggtatacagggaacagcactctagaagctatgactcaattgagactacaagtaccacggtgctacttgcacagacccctttggttaaatgtaaattcttgtacaattgaaggatacgcagaaggacatctttctagtctaacagtcaggagctgctctggtcattcccttgtatgaactggtctaaagactgttagtggggtgttagttgatttttcctggtatactgtttcttggctgacactactggtcaagtaagaaatttgtaaataactttcttttggttcttattatctatatctgtgactgactttaaaaaggtatttgacacttgaaatttttttcaaatatgtaatctcatccccatgtcttatataagataatttactcctgtttcttactgaaaaaaaaaaa

SEQ ID NO: 91253 - DNA, 1389 bp, Homo sapiens
aggtgcggcgacgttactgcgtagcgccagctcggccgcacgtaaggccgcggaagcggagcaggtttggttgcacttacaccggtacttaagcgcggaccggcgtgtccttggacttagagagtggggacgtccggcttcggagcgggagtgttcgttgtgccagcgactaaaaagagaattaaatatgggtgatgttgagaaaggcaagaagatttttattatgaagtgttcccagtgccacaccgttgaaaagggaggcaagcacaagactgggccaaatctccatggtctctttgggcggaagacaggtcaggcccctggatactcttacacagccgccaataagaacaaaggcatcatctggggagaggatacactgatggagtatttggagaatcccaagaagtacatccctggaacaaaaatgatctttgtcggcattaagaagaaggaagaaagggcagacttaatagcttatctcaaaaaagctactaatgagtaataattggccactgccttatttattacaaaacagaaatgtctcatgacttttttatgtgtaccatcctttaatagatctcatacaccagaattcagatcatgaatgactgacagaatattttgttgggcagtcctgatttaaaactaagactggcttgtggttaaatgaatatgttcagtttttgaattttaatagtaactccaattcagtaaatggtatcactgtttaccccttttaaagatatgattagacttcgttagtaatgttcaacttttcacaaagatggtgagtgccatcttaaaacttactggagattggttttatatttagatttatataactggttatgtgaatatatttaaatactggggaaattgcttcactgtcttagaaccaagcaagattcacctgtgttttgtgttcatgttcatttgcctcttaaaggcaagggttgaagataaataaggtagcaatgtctatagttttggccttaactatgccaatctaattataattccctgtatttaaaatggtttcttttacttattgaaaggcattttagtgtggtttatgtgtaatattaaagattattcaacacctctcacatcttacagatctataaggtcacatgcttttaaaatagtagcaagttaaacttcactcttgaattctttacaatctaagtcaaactaagttataatttaggattgtctttaaacagccattcagaaacaaaactgtagaactgtgtatttgattgggaatggtgcttttgccaacttaaaaggattaaagtaacggagatatacacaaattttaaaattatgtgtgatcacaagactaaagataattaaaaagaaaaccacagatcatgaaaaaaaaaa

SEQ ID NO: 91254 - DNA, 585 bp, Homo sapiens
ggaattccttggtgtcaagcaatatgggtgaatcaaaaggaataatgtcccctcccttagtccttctttccagagataaacactgttaagagtattatgtttcctttcagatctttcctgtgcacatgtaggtatttgtatgtgtatatgcatagtgtctgcatttgtttgcttttctgtttgcaaaaatgaggccatgctttgtgttttcatctcagagacattatagtagcttgtgtctgacacacagcctattttcccttgtctctgagcctgattcctcattggtaaattggggatcgttattatggcatctaatttaggatgtaggtatgagcatttggtgtattaatatggctggaatagtaaacattccataaatattaactattcttatgtattggttgacagcctttttgacttaatagtatcagtgacgtccttccctgtgagaatcatatagttgctataccatattccatagtatagttacattacattctattaagcaatgctctgttgatggtcatttagatttttaattcacttttattttttgagaccccatctcagggaaaaaaaaaa

SEQ ID NO: 91255 - DNA, 1386 bp, Homo sapiens
gcggccgctgccattgcccggagatggccggcagagccgccgagacgccgaagagcccgccgcccgcgcgaggtgtagacggggcactgccttcagagcaggtcctgccagcctcgctggagaggatgccctcgtgtccgtgatgggctgtgggacaagcaaggtccttcccgagccacccaaggatgtccagctggatctggtcaagaaggtggagcccttcagtggcactaagagtgacgtgtacaagcacttcatcacagaggtggacagtgttggccctgtcaaagccgggttcccagcagcaagtcagtatgcacacccctgcccccggtcccccgactgctggccacacggagcctccctcagaaccaccacgcagggccagggtagctaagtacagggccaagtttgacccacgtgttacagctaagtatgacatcaaggccctaattggccgaggcagcttcagccgagtggtacgtgtagagcaccgggcaacccggcagccgtatgccatcaagatgattgagaccaagtaccgggaggggcgggaggtgtgtgagtcggagctgcgtgtgctgcgtcgggtgcgtcatgccaacatcatccagctggtggaggtgttcgagacacaggagcgggtgtacatggtgatggagctggccactggtggagagctctttgaccgcatcattgccaagggctccttcaccgagcgtgacgccacgcgggtgctgcagatggtgctggatggcgtccggtatctgcatgcactgggcatcacacaccgagacctcaaacctgagaatctgctctactaccatccgggcactgactccaagatcatcatcaccgacttcggcctggccagtgctcgcaagaagggtgatgactgcttgatgaagaccacctgtggcacgcctgagtacattgccccagaagtcctggtccgcaagccatacaccaactcagtggacatgtgggcgctgggcgtcattgcctacatcctactcagtggcaccatgccgtttgaggatgacaaccgtacccggctgtaccggcagatcctcaggggcaagtacagttactctggggagccctggcctagtgtgtccaacctggccaaggacttcattgaccgcctgctgacagtggaccctggagcccgtatgactgcactgcaggccctgaggcacccgtgggtggtgagcatggctgcctcttcatccatgaagaacctgcaccgctccatatcccaaaacctccttaaacgtgcctcctcgcgctgccagagcaccaaatctgcccagtccacgcgttccagccgctccacacgctccaataagtcacgccgtgtgcgggaacgggagctgcgggagctct

SEQ ID NO: 91256 - DNA, 2068 bp, Homo sapiens
ccgccaggtggaacggcaggtgggttcaggtaccagcctggccgggacccggctgtgggaccaacgcttccggtgagcgacagaggcagctccccagggcctggagacccgtggggcggactctgggatctgagcctatcgccctggcctggagcccccctttgtacctattccccattcccctaccgagctgggcagttagccagcccactccaactctcggaaccatgtttgcagacttggattatgacatcgaagaggataaactcggaatcccgactgtgcctgggaaggtgaccctgcagaaggatgctcagaacctgatcgggatcagcattggaggaggggcccagtactgtccctgcctctatatcgtccaggtatttgacaacaccccagcagccttggacggcacagtggcagctggcgatgagatcaccggtgtcaatggcaggtcaatcaaagggaaaactaaggtggaggtggcgaagatgattcaggaggtgaagggggaggtgaccatccactacaacaagctgcaggcggaccccaagcagggcatgtccctggacattgtgttgaagaaagtcaagcaccggctggtggagaacatgagttcagggaccgcagatgctctgggcctgagccgggccatcctgtgcaatgatgggcttgtcaagaggctagaggagctggagcggaccgctgagctatacaaagggatgacggaacacaccaagaacctcctacgggccttttatgagctgtcgcagactcaccggggtaatggcatcccccaaagctgtgcctttggggacgtgttctccgtgatcggggtgcgggagccccagccagctgcgagcgaggcttttgtgaagttcgccgatgcccaccgcagcatcgagaagttcggcattcggcttctgaaaaccatcaagccgatgctgacggatctgaacacgtacctcaacaaagccatcccggacactcgcctcaccatcaagaagtacctggacgtgaagtttgagtacctgtcgtactgcctgaaggtgaaggagatggatgacgaggaatacagctgcattgccctaggcgagcccctttaccgggtgagcaccggcaactatgagtaccgcctgatcctgcgctgccgccaggaggcgcgcgcccgcttctcccagatgcgcaaggatgtgctggagaagatggagctgctggaccagaagcacgtccaggacatcgtgttccagctgcagcgcctcgtgtccaccatgtccaagtactacaacgactgctacgcagtgctgcgggatgccgacgtcttccccatcgaggtagacctggcgcacaccacattggcctatggcctcaaccaggaggagttcacagatggggaggaggaggaggaggaggaagacacggcagctggggagccgtccagggatacacgaggggctgctgggcccttggacaagggtggaagctggtgtgactcctgagtgccccgcggctgtggtgccgggggcagggtgcgtgggaggacggagcctgggagcggggcggggccgccgcgcaagggggcgacgcataaaggcctgctggcttggggcgcctgcctccctgctcctctgtcctcgcacagcgaacctgggctcctgcccaggacaggcaccagggtcatggcctgggacctggacactggcccctccaccctccctcccctcccggctccccggccagagggagagcttggtctctggacctgccttaggaaggagagggagggcaggaaggaaaagaaaggacttggaggtggcaggagtccgagccctgctccttgtgggcgctcacactgcccccggagcctgctgggagtggggccagccgtggacagctgaggttggggtcaatgcctcctgggcacccttgcctcgccccagaccggcccgtccagtccccatcacacctcggcggcctttatttattctgttcccccagctcggccacttctctgaaggagggctgggttctgggcctgtatcgaataaacacaaacctggatggcgca

SEQ ID NO: 91257 - DNA, 1220 bp, Homo sapiens; identical to SEQ ID NO: 58803

SEQ ID NO: 91258 - DNA, 1345 bp, Homo sapiens
cagcaaggccttaaaggctactgagtgcgccggccgttccgtgtccagaacctcccctactcctccgccttctcttccttggccgcccaccgccaagttccgactccggttttcgcctttgcaaagcctaaggaggaggttaggaacagccgcgcccccctccctgcggccgccgccccctgcctctcggctctgctccctgccgcgtgcgcctgggccgtgcgccccggcaggcgccagccatgtcgatgctgccgtcgtttggctttacgcaggagcaagtggcgtgcgtgtgcgaggttctgcagcaaggcggaaacctggagcgcctgggcaggttcctgtggtcactgcccgcctgcgaccacctgcacaagaacgagagcgtactcaaggccaaggcggtggtcgccttccaccgcggcaacttccgtgagctctacaagatcctggagagccaccagttctcgcctcacaaccaccccaaactgcagcaactgtggctgaaggcgcattacgtggaggccgagaagctgcgcggccgacccctgggcgccgtgggcaaatatcgggtgcgccaaaaatttccactgccgcgcaccatctgggacggcgaggagaccagctactgcttcaaggagaagtcgaggggtgtcctgcgggagtggtacgcgcacaatccctacccatcgccgcgtgagaagcgggagctggccgaggccaccggcctcaccaccacccaggtcagcaactggtttaagaaccggaggcaaagagaccgggccgcggaggccaaggaaagggagaacaccgaaaacaataactcctcctccaacaagcagaaccaactctctcctctggaagggggcaagccgctcatgtccagctcagaagaggaattctcacctccccaaagtccagaccagaactcggtccttctgctgcagggcaatatgggccacgccaggagctcaaactattctctcccgggcttaacagcctcgcagcccagtcacggcctgcagacccaccagcatcagctccaagactctctgctcggccccctcacctccagtctggtggacttggggtcctaagtggggagggactggggcctcgaagggattcctggagcagcaaccactgcagcgactagggacacttgtaaatagaaatcaggaacatttttgcagcttgtttctggagttgtttgcgcataaaggaatggtggactttcacaaatatctttttaaaaatcaaaaccaacagcgatctcaagcttaatgtcctgttctctccaactctttacaaataagaattttccttcccaatgcagagatcaggg

SEQ ID NO: 91259 - DNA, 1777 bp, Homo sapiens
tactttcattagtgctcatttattatttatgtagaaaagtttaaaatgctcccaatgagttcatcagttatcaagctcacatgagttaggacacaatcacctttggtttttcatctcataataagtcagcaaaagttgacatttatcttactagacatttcccattagccctaactgaaacagatatcaaacaccctagattctcttcagtgcaaagtatctggagtcacagcaattttagagacaagctagtgcaatctagtaattttcatagtcgcagaaactgaggcctagaagtgatttgtacatgtgagcagctagaaccaggacaagaactccagaacctgggaccacgtgagagtaaaaagaaagggcaccgagtacaggaacaacaactgacacatttcaggtggaaaaaacaagtcacataactgaaaaccaaaatcacagttacataactattttatattagcttcctacatataaagtataaaaactcagctatacatgttatgaaattgtacaaacttacacttgtttatggcctaaaatttgtataaggacacacttatacagatttcataaacaatggccatttttagaaaaagttatatttgtccctgaacataatattcataatttgctttcaaaacaaactcgaagtaaggattggactttaagcttccaagctgatccgcttgtagcaggtctttcacctccggtaagtactcactgagctgaatgccatcttttaaaagtttctgtaagatcttcacaaatatactgtctttagatacttcaattggatcatctttgccatcagaactggaccagttatctctctgaagagctttgcaaaggatttccagttttagatcatttatatttatatcttcttcctcatcaatatattccaacaagtccaaagctttcttgaaatcatattcattagctcttctattttcttcacagatatatagaccaatgagttgtggtgcagtcaatactggcatcgcactgagatttagctgtttctccgccagcagctgttcaggtagggtctcctgatgcagtagaaagcgctcctgctcagccatttcttcaattttttcttgtagcatatcctctgaaaagtctgaagctaatgcagccaatttactcaagccaagaagggttttcttctttgcaaagtaacgagtttccatatttgccaaacccagaagtgttgcatgagccttttctaattcttggctattaatttcatgtaaccagctgagatgttcatgagcttgcaaaaaatttgccaactgtccatgctgagaaatggaatccataggtgcatccctcaagacttgctcctcatgctccagtaagcactcacagatggtatctacttgggatacctccctgaaaaagacatctgcaggagtcaggttggatgggatttcatactccctcttgttcaaagcaatcaatatggctgtgttgacaaggtcagaaagccgggagtggtggttcttgagaacaatggcggctgacagcttttcggcatgctcacagagcaacagtcgagtggccatcggtgtccctctaactggaaaactgcctagacgtccaaataagccaacttgatgaataaagtccataagaaaagagtgagctttcatcttgtcttctagctggtgaaggataatcagtgacgtattgctgaacccaggtgcttcctcagggacagactcagccccccgtgggtcagatgctgggtagtcctcgtgcc

SEQ ID NO: 91260 - DNA, 630 bp, Homo sapiens
  misc_feature (1)...(630): n = a,t,c or g
aggagaagagttgctgcagctccttccctgctttggnngnggaggggaggcggggtaagtttggtgggaaactctgtaatttccttttttactttcacagcaatagtgcagaatccagaatggatgtcctctttgtagccatctttgctgtgccacttatcctgggacaagaatatgaggatgaagaaagactgggagaggatgaatattatcaggtggtctattattatacagtcacccccagttatgatgactttagtgcagatttcaccattgattactccatatttgagtcagaggacaggctgaacaggttggataaggacataacagaagcaatagagactaccattagtcttgaaacagcacgtgcagaccatccgaagcctgtaactgtgaaaccagtaacaacggaacctcagagtccaagatctgaagcgatgccgtgtccagttttgcgaagtcctattccccttcctcctgtccgtgtgcctttgttcaggtggggatgtatttcatgtaagaaggtgggaagaaggctgcttatgactctttggatgggagtctggcaagaggaaattggaagataaaataaataataagtgaaataatctggttaaaaaaaaaaaa

SEQ ID NO: 91261 - DNA, 419 bp, Homo sapiens
  misc_feature (1)...(419): n = a,t,c or g
cccacgcgtccgctcagacccgcagcaaagacgaggggcggccaggcagttcacagccaccgttcctgtcttgtttgctctgactcattctgagcccggcctgctctcagggtggtccttgcagagtggatgtgccccctggcccccacaagggtctgtggggtttgcctgtgttgggaaatgtcaacagagccaccggccggtgaagctggtgatgctgccaagctctgttcctgggacttgtgtccctcctggcgaaagggagccagcaaaaaggtttttttctggaaaacctccccttctggagtgagtccaggggagccccttggccttgactgaaaaccactaatgagcccagatgaaaagttctggtcagcctagaattttccctttgttctttccctcccatgcccccagcn

SEQ ID NO: 91262 - DNA, 422 bp, Homo sapiens
cccacgcgtccgggttatctgaaggcaaatgtagatatgactgggacttccctggtgcctcgttagcagctgatgacttgtctaagttcatccggtggaaactgctccatgtctgttatatgggtggctgttgtagaactaatgaacaaggaattgagtgagcagttttaatacaataaaggatggatgccttgcttggtgcacagacaatgacatctcagtaattttattccaattggcagaacgctaaatccctttcatttgtttcacatcttcttactaacctttctgctaaatgctccatttcagtatcctccaaagtgtttgttttgagaccatgtatgtttatgtcctctttcctctcatggaaaccacctgtagcagcaaccagtggagctgctgcaaacatttgtttttgataa

SEQ ID NO: 91263 - DNA, 549 bp, Homo sapiens
tctctaagtgaaaaatttgcatactagtgcttgttataaaggataatgcaaaaataaacttgggaactttgcattatgaattttatttttatatctacataagcatgagggaaagaactgtattttcagataattaaatccagaagagttacaaattttcattcgtcccaaagattttgtctgggtatttcttccttagctgtcgtcttgcagacaccatcgaagcatagatgatgcagccccaggagattaaaacgatggcaagcagcaacactgaataaatccagtccagcgtgcgacgacttactggcttcatggtaaggaggcggcagcagtccgcgggagctggcgggagctgcgggccttacagtaacctcccaggcggtggctgccaggcgccagcagccatcttttagccgggcacgagcgcccgcccactcgcttcgtgcagcgctgtcgctggcctcttccgcccggagttggggggcggtatcacgtgatcgggggccttgcccgcccgccataatgtatcagtcaagcaacaagtgt

SEQ ID NO: 91264 - DNA, 1181 bp, Homo sapiens
gagccggggagggagggagcgaggttctgacaccggcggtggctgcctggcctttccatgagcccgcggcggaccctcccgcgccccctctcgctctgcctctccctctgcctctgcctctgcctggccgcggctctgggaagtgcgcagtccgggtcgtgtagggataaaaagaactgtaaggtggtcttttcccagcaggaactgaggaagcggctaacacccctgcagtaccatgtcactcaggagaaagggaccgaaagtgcctttgaaggagaatacacacatcacaaagatcctggaatatataaatgtgttgtttgtggaactccattgtttaagtcagaaaccaaatttgactccggttcaggttggccttcattccacgatgtgatcaattctgaggcaatcacattcacagatgacttttcctatgggatgcacagggtggaaacaagctgctctcagtgtggtgctcaccttgggcacatttttgatgatgggcctcgtccaactgggaaaagatactgcataaattcggctgccttgtcttttacacctgcggatagcagtggcaccgccgagggaggcagtggggtcgccagcccggcccaggcagacaaagcggagctctagagtaatggagagtgatggaaacaaagtgtacttaatgcacagcttattaaaaaaatcaaaattgttatcttaatagatatattttttcaaaaactataagggcagttttgtgctattgatattttttcttcttttgcttaaacagaagccctggccatccatgtattttgcaattgactagatcaagaactgtttatagctttagcaaatggagacagctttgtgaaacttcttcacaagccacttataccctttggcattcttttctttgagcacatggcttcttttgcagtttttccccctttgattcagaagcagagggttcatggtcttcaaacatgaaaatagagatctcctctgcagtgtagagaccagagctgggcagtgcagggcatggagacctgcaagacacatggccttgaggcctttgcacagacccacctaagataaggatggagtgatgttttaatgagactgttcagctttgtggaaagtttgagctaaggtcattttttttttttctcactgaaagggtgtgaaggtct

SEQ ID NO: 91265 - DNA, 608 bp, Homo sapiens
tgggagatcagggaagtacacttgaaataccaacatcccaaaatgttaaatgtgtatatattataggttattttcttattacaaataaagttttaaaattgacacctctttgtttttaaaaaggcaatgaaacaatacaaaagtagaacttgtaaaaaaaagaagtggaatttcctctgccaaaggatatacatgtttaaaactttgaaagtcattgtcataaagcttgaactgcttcaatctcctgttctgggtttataggagtgcctaaaccaatacttgggctcagagaattttagagatttagatgcatttcagatgcacccttacatttgagttattcatgtgagaattttagcctttttcagtcactgcaaaataaaaagcattgagtgaacatgaagaatgtagacctgattattcctatgtgtagatttttaaagttttttaagatttttataagagcattattaactagctatctgatttttttttcatggaatctatacctacttgtgttagtttcctaaggctgccataacaaagtacccactagatggcttaaacaatagaaaaggattattttcttaatttctgaagggctggcc

SEQ ID NO: 91266 - DNA, 1649 bp, Homo sapiens; identical to SEQ ID NO: 59017

SEQ ID NO: 91267 - DNA, 614 bp, Homo sapiens
aaactctacagtgcttttaaatgatactggttttcttagacacagtaatctacatgcatgtaaaactgttatttgttttatgtgtggtgtgcatacgcacatacatatatatatgacaaatagtatattctgtttttatgtaggacttattatagaatgtatatgcattttcacatctttacaataacaccagtcttgacccagctggttagcaaccaccagccttgtttattattttatgaatgaagagagcatcagatgcagtgacttgcccgaggtcacccagtagtagaagggctgtttgtcatttagcattatgatcattatttatatttcaactaattattatttgagcctattttgtgtcaggcactggggcactgagctgaggtctgggaataaggtattaagatgtagctcagcagaaatttagaaagacatacataaggaaacaaaagggtttctaacttatcctgaccacagttttcagcagaaccaattcattactgtctgggctttttaaaaaggaggccattaagaaaattgaggcccgtcctggggggctcatggcctggaatccccagcactttggaaagggccaaggtgggttggaa

SEQ ID NO: 91268 - DNA, 375 bp, Homo sapiens
gtgacttctgtgggatgaaggactctgggtctttacttgggaagggaaaacatgaagtggaatggggttttaggattcttgaaaggttgccatgggaaaggaagattagatttgaccacagggttagagctaggacaagtgggtgaaagaccccagatagttcggtgccatatggcaaagagcttcctcttagtcttagctgccacaaaatggctttgtgccatgggaggttgatatcaagagctgtgaaggatctgagatttttaccctacttgcagcctgaaaaggtgtcctgccaatttattggatgttggtggaagactcgagaaaagggccagttcccctcgtccccgcatcccacaaaggtgatgagga

SEQ ID NO: 91269 - DNA, 614 bp, Homo sapiens
gttgcttatttgttattttgaagtcagaaaaagggtattatgaaaatgctacctttattcagttatgtgactaaaacttatatttgagagaattaagaaattacccttgcttttagggcaagcaaagatagattaagcgagattgcaaggcaactgaacctcatttatttttttcagtactggtctgtgtttctgcttgtattagaattaaaaagaatctgaacaaatgcttaaaacaatttctctagtttctttgatggtgttagcagatgcttcatattttaatggattatataaattgtgagcattagaaaagcagtgaagaggaatggaactagatcacatttagcatgattatcattatactcatccagtcagaggaaaaatagaccagtcctacatattatgggtctactaaaaatgcaactttgtcaaggacattttttgtttccataatggttctgtaggtacttcagcacaatggaaaatggtgtgggcacagctattaaatatattcccagggaaagatacctttagttcctttgccgaagggcactttataaacttttccgggtataaattggggggatgccccccccatttccctttccctc

SEQ ID NO: 91270 - DNA, 2565 bp, Homo sapiens; identical to SEQ ID NO: 60233

SEQ ID NO: 91271 - DNA, 428 bp, Homo sapiens
aatatatgtacagtcgaaataattttctatagtcatattcccgtttatttccctaaattttttacttacgatttgttatcctttctacaacaataaatatgtattgaagatattctaagcctatagcaccaggttaacatttattttcttaggagcatgaaagtgttcaaaataggtgcctttcccatttataaaaatgttgactggagtatggtttgtacattattctcaggatatgcagtgagtactatatggctttcacattttaaggacctgtcagccagcctctggctcctggtcccattctaggggtagaatttatgatggatctgagtaggggtttcatctgttggagcgtctgtcatgtctttgtgatgtgaataaactgtagaaaacttattttgcattcagagagtaggtgacttacc

SEQ ID NO: 91272 - DNA, 3931 bp, Homo sapiens
ttttttttttttggcaatataacatgtctattttattttaaaaaacaaaacccaaaccacctgaccccttccccaggaggctcttgacgaaactctagggaagggcctggctccagccaagcaggggacagtcagaagatgtcaacatggatgccaggctggtgggctccgcccttctccaagccccccatccaccccctttgctcctcggtgctacaggcactgccgggttgaggggacaggcagggcaggactgtgggcatgcagagcctcctggcagccagggagggctgcccgcccccctgcatctggcgaggcaggcagctgtgtgcgcagtgatggagctaggaggaggaaacatgcgcagacaccccgtgttcccgcttccccacgtggccaggagagtgttcaaacacgaacaaggatggctgggcactcagggccccagcccccaacccaggagaggaagaggggggtcccgccctcctggttcttttgttcgtccttagatggatggtgttctcggtgccactcggcagaaattctgcagactgaggcggaggcccgggaggagggcgtgcatccgcagagcccacagggctcggaccctctgcccccagcgacctccattcgctacctgtcgggcaggatgcccaggggtgccgggcacctgatctggatccctggagtggagggaccctgtcttaagccacactcggtggttctgccgcccagggcaggggtggactgtaggctcccgacagcatgacaacagccgtgacagtgtgcctgccggctggcgtgccttcctttcctgcccaccagggacgccaaccagctctgcctcagcaccaggggtctcgggaggctcggccgcggcagagactgtcgctccgctgccaggcgctgtggatgaggctcaaggcatcctcgaatttcttcttgttggaggcttcctggatcgccgtgtgggggaggtccacctgatagatggttttccacccagagttcagtgcagacagcaatcggtccagttcagaagtgcagctcaggtagatgacccagggcgggaggagctgctggctgtcctgggagaactccaagacgcagtactccttgcccggctcggtggagacggcgctgatgtcgcccagcttggctgtgcccaaagagcggaagaagctggtctggcaatcctcatggcacgtaaagaggcggtcatccgtgaggaccaggcagcagggtatgcaggggctgggagctacgccctgggggatgacccctttggacacagcctggcagagatgctgcatccactcggccatctcggcctcgctctcggcacttagctccaggcagggcggatcggagagaatgacctggaaggcgtggggccgatccgtggtgttggctctccggcagccaccgcactgctccccccccatgttcaccgagagcagagggatgacgtcggtgcggtccgggtactggtagaggatcccgttgctgagcaccacgaagcacgtcttccagtgttccttgcccaggtaggaggtgcccgccttgtagtgcagcatgccttctttggtgatggtgccctcggggggtgagcagtggcagggcgtggggcccagggactcgtctgtggggtcctcccagtgcacaaggccgtagaagcgcacggtgacagcagatgcctcacacttcgattcttgggccacaaatttggccagtgccagcttctccatggtggcatccgtcaggatgctggggtagggaggttctcgacagcctttgatcatggctgacttcaaagaagccaaaaagaactcagccagcgccacatcagccgtgtccagcagaaactgcttcctgcggttggtgcacaccagcttcaccgtctgctggtcaaggccaaccgacacatagtcaagttcattgtaagaaacggcctcttccaccaggtatggcttctctgtggcccctttccggagcaggtagacatagcagtctgtgagcagcacgtacagcagctgcaggttgccctccatgtgcccggtgctcatccggatcattttgaacagctgctcttcgttttctcggaacacgtggatcatgagcaggagcaggtgattgttgtctactctgaactccgaggaatggaccatctccgaagggctcccctgtccctcatccaccccagaatcctcagcgctactcagacacgggctgggctggtctcgcttgagctggcagagaacctcctgggtcccaggctctggctcagacacaggcccctccctgaccagggacagctgggcctccagctcctgagcctccctcgtggtatcctctaggggccgaggcgtctgtccctctcctcctcctccctcttcttcttggccagcagcctcagggctactaggaacatgcagcggttggccaagccctgcagggtcatggtggccgccacctgatgtaacagtgcttggactctcgacggtaaagcggtagaagtccattggggctgaaagcccctcactaaagtcgcaaagcggcggcctctccggggcatccccgggagagccggtccgaaaggactggtctgggggctcagcacgggagcaccaggtgctggggtccagctgcccgttgagctggtcgataaccttgctcaggggctgccccaagcgctccatggaggtgtccttcatctcagggatcagcaggcccggctcggagcgctcgctgctctccgtggtgctgctcggcccctctccctcctcctggggggaggcaagcatagtgtctggcgagtcccgcccaaggcttgggctgccgttgcggctgtcaccgtccccctgcttggcacatttcttctggctgcaggcggggtggagtggacttgcctcctcatctgatctgctctttttcttcttgccaattttcttcttcttggtgaccctgatgacctcgagctccgtgcaggcatccggcgggtccagggcctgggcctcctccttctcctgagaggtggtgtgcacgggggtggtgtcagaggaggacacagtctctgccggctcctcgttgaaggggttctggcgctgggtggggctcctggtggaggccttgctgctggtcaggtcggaggctgtggagcggggaccactgaccgtgtctgtgaggtctccatcttcccagtctgtgctgggtacagacggcactgctggaaacacatctccaaaatcataatcctcactagatggggcaatcgcactgtcatcccactccaggttggtggaggtgacggagttgaaagagttgagggacagactgtctgagccgtggaccgagctgggaaggcggtcttcaaagtccagcaggtactgaggtttgtagtagtcgggcatgtagggggccaggtctaggtaaggggcatccagatccagctcgaaacgaatgaactctagcccggacaccaaggtcaggaagagcgtcaggtgatcgtggctgcagaccagggcattcttgacgtagtacttatgcagcaggcccaggttctcctggaacaaccgcaggtagctctccaaggagttctcgttgagggccaggtacagccaggcacggctgcgccccaggttggtggccacgtgctgcagcacctcgatctgcttgatggcctctctccgagtaaaatgcaccacgagcacccagtagccagaggagaggtcttgcagtccgtacagcagggcgtggtccaggtgctcacacagacgctgtaggaccttgtcatggttccggatggcagggatctcatcctcacatgcagcaaaatagctctgcaacttcttcaccgacagcgagatgttctccaggatccggtccttcacctcccccggctccatggcgctgccaccgtcgccgcacgaaa

SEQ ID NO: 91273 - DNA, 884 bp, Homo sapiens
cggacgcgtgggcgacccacgcgtccgtccacgctttcgcctttgtggtatagaaatatgtcataaaagcttcagcaaatctaatatattggatagatagctgaaatctgcatatttcaaataactgaatatacagatattctacaaattgtctttaaaatgattacaacttatgttgaaattggtgacgaggcatttccaaattaatctcataaatagtattggttaatcattaatatttgataggtaaacataatattcagaatatatttccacagtaaattttgggacttaactaaagaaaaaaattaacacttattaactcgttctcttaccaattaccatataaattggagtattattctaaagttaatatggtttgtcttttaaatacaaagttgtattattccttctacatgttatacttacataatcccaatttttatctaaggaaaacattccctcagtttaaatctaattttatttttttcaaaattagacaaagatgagagtttaatatccatgctttgttttccaaaaacctttagttttgttgtctaaaattaagaactcaacaaagatctcttgtaataattcaacatattccctggctattaactaatttccaagcctgaactgtcagtaaatgttgcacatagcctggaatagtccataacatctgtattagctaatattctgtaaaactaaaaaaaaacaatatccaagaaatgtaaaaaataattatgtttaagaattctattaggggttctgagaagggcttaactgcatttcatctcctttggggggaggctattattttcatcccacttttttaaggaaacttttcattcccggtggcaaggaagcctaacccccaactcggg

SEQ ID NO: 91274 - DNA, 3179 bp, Homo sapiens; identical to SEQ ID NO: 58978

SEQ ID NO: 91275 - DNA, 569 bp, Homo sapiens
ataataactacttaccatgtgccaggttcttctgcaggcactttacatagataattttatttaatcttcatagcaaacttagggagtagatgctagtattatcccaagtttacagaggaggcaactgagtcacagtaagctgaaatgacatgctccaggttgcagaatgatcataaagcagagccaaaattaggcaccagtgtcttttggtgtcaggaatctctgcttttgtgcttttctgtctcatgaaaatatcagagtggctctctctattgggtctcattattgcatgccattgtgggttcttctgactgtgtgtcacctttcacaaggagcatttcctacactgtgaaagtgcacatgacaattttatgtacttcttgttgaaatccttgtcttccttatgctgcccattggtgcttcacactattttcttcctcatcccacttccgcagcttgtagctcctgcctgagctttggaagtgaaagccaaagttccacctcgatgcaggtgataaaacaaaacaaacaaacaaagaaaatccaagaaggctagttctagatcgcga

SEQ ID NO: 91276 - DNA, 386 bp, Homo sapiens
tagggtgtcttcgcagtatggtcagccaatagaaatattctggaatacaggatgcgggtgagggaatttataggcattgtggtgtcagtagtgataattctagtcgatctgtgatgcagatggatgtatatggtggctggtggtttacacagcactataaacccgcctgcgtgccatatgaatggctaatttattagctttcaaataaaaatgtagcaaactcagaaaggcaggccacagtgcagtctaacacaaagaatcagatgagctcaaagcaaataaccttcatattttttattttatgctccataagtgggattccagtactgcagatgggaactttttttttctcccttctctatctgcacgttgatttctgggcaggc

SEQ ID NO: 91277 - DNA, 870 bp, Homo sapiens
aattaaaatgtgcttttttaaattcccatggactttattcttaagacacagaaataaacaataaagataacaaatacaccttaatagcaaatccacttaagacatattcttatactccaattttattttatattttatgatattttctaaacaacccctgtggcagttcgaattattgttccactttttaagacttcaaaatttcagaaggtttaaaaagagattaactatttgtagcctacatatgaacacaacttccttctctgtatgacaacattaaatgtgtgtgtgcgttcttcacatacagcctaagttgttcctatcatctagttcacatttggcgaacaaagctgagtagagacaagtagagaccctaccaccagctgatctgctaccaaaagatcagcaacttacactatagagataattcacaggagacaattttagaatcccataaagctaagcaatgtagggctttgcgggggaggccatttctagttgcttaatggcttatcttcaaacattgtcctcagtggggtgccctgctatcttggatctgagataaagatgctctagccaattgcttgaggatgtgtgctgcgaggagcatttgaccaaagatcccatcttcaggcgtccctcaggctaataagaaaaagccccagaacaaaccgttaacatttttcttcagttggcagggagtttatatacagaatatattttttaaaatttagtaaaccgggggcagaagggtttaccacacaaaaaaaaaaaggggcggcggggttaagagaccagctttacaccgcgggagggcaggaaaaatttttttaggggccccaaatcaatccccggcggggtttaaagggc

SEQ ID NO: 91278 - DNA, 1910 bp, Homo sapiens
atagcaccgcctgcaggaattcggcacgagcgcgtccgccccgcgagcacagagcctcgcctttgccgatccgccgcccgtccacacccgccgccagctcaccatggatgatgatatcgccgcgctcgtcgtcgacaacggctccggcatgtgcaaggccggcttcgcgggcgacgatgccccccgggccgtcttcccctccatcgtggggcgccccaggcaccagggcgtgatggtgggcatgggtcagaaggattcctatgtgggcgacgaggcccagagcaagagaggcatcctcaccctgaagtaccccatcgagcacggcatcgtcaccaactgggacgacatggagaaaatctggcaccacaccttctacaatgagctgcgtgtggctcccgaggagcaccccgtgctgctgaccgaggcccccctgaaccccaaggccaaccgcgagaagatgacccagatcatgtttgagaccttcaacaccccagccatgtacgttgctatccaggctgtgctatccctgtacgcctctggccgtaccactggcatcgtgatggactccggtgacggggtcacccacactgtgcccatctacgaggggtatgccctcccccatgccatcctgcgtctggacctggctggccgggacctgactgactacctcatgaagatcctcaccgagcgcggctacagcttcaccaccacggccgagcgggaaatcgtgcgtgacattaaggagaagctgtgctacgtcgccctggacttcgagcaagagatggccacggctgcttccagctcctccctggagaagagctacgagctgcctgacggccaggtcatcaccattggcaatgagcggttccgctgccctgaggcactcttccagccttccttcctgggcatggagtcctgtggcatccacgaaactaccttcaactccatcatgaagtgtgacgtggacatccgcaaagacctgtacgccaacacagtgctgtctggcggcaccaccatgtaccctggcattgccgacaggatgcagaaggagatcactgccctggcacccagcacaatgaagatcaagatcattgctcctcctgagcgcaagtactccgtgtggatcggcggctccatcctggcctcgctgtccaccttccagcagatgtggatcagcaagcaggagtatgacgagtccggcccctccatcggtccacccgcaaaatgcttcctaggcgggactattgactttagttgcggttacaccctttctttggacaaaaccttaactttgcgcaggaaaacaaggatgaggattgggcatggcctttatttgttttttttgttttgttttgggttttttttttttttttgggcttgacttcagggatttaaaaaactgggaacgggtggaagggtgacaggcagtcggttggggagcgaggcattccccccaaagtttcacaaatgtgggcccgaaggacttttggattggcacattgtttgtttttttttaaattagtccatttccaaatatggagatgcgttgtttacagggaagtcccttggccatcctaaaaagccaccccactttctctcttaagggagaatgggcccagtccttttcccaaggtccccacaggggagggtgatagcattgcttttcgtgttaaattatggtaaatgcaaaaattttttttaaatcttcgcctttaaaaacttttttattttgttttattttgaatgatgagccttcgtgcccccccttccccctttttttgtcccccaacttgagatgtatgaaggcttttggtctccctggggagtgggtgggagggcagccaggggcttaccttgtacacttgacttgagaccagttgcatgctaagtgcacaaccttaaaaaaaaaa

SEQ ID NO: 91279 - DNA, 4470 bp, Homo sapiens
atggggctgctgctcatgatcctggcgtcggccgtgctgggttccttcctcacgctcctcgcccagttcttcctgctgtaccgcagacagcccgagccgccggcggacgaggccgcccgcgcgggcgagggcttccgctacatcaagccagtgccgggcctgctcctaagggagtacctttatggcggcggccgggatgaggagccctccggagcggcccctgagggcggcgcgacccccaccgcggcccccgagacccccgccccgccgacgcgggagacttgctacttcctcaacgccaccatcctattcctgttccgggagttgcgggacaccgcgctgacccgccgctgggtcaccaagaagatcaaggtggagttcgaggagctgctgcagaccaagacggccgggcgcctgctggaggggctgagcctgcgggacgtgttcctgggcgagacggtgcccttcatcaagaccatccggctcgtgcggccagtcgtgccctcggccaccggggagcccgatggccctgaaggggaggcgctgcccgccgcctgccccgaggagctggccttcgaggcggaggtggagtacaacgggggcttccacctggccatcgacgtggacctggtcttcggcaagtccgcctacttgtttgtcaagctgtcccgcgtggtgggaaggctgcgcttggtctttacgcgcgtgcccttcacccactggttcttctccttcgtggaagacccgctgatcgacttcgaggtgcgctcccagtttgaagggcggcccatgccccagctcacctccatcatcgtcaaccagctcaagaagatcatcaagcgcaagcacaccctaccgaattacaagatcaggtttaagccgttttttccataccagaccttgcaaggatttgaagaagatgaagagcatatccatatacaacaatgggcacttactgaaggccgtcttaaagttacgttgttagaatgtagcaggttactcatttttggatcctatgacagagaggcaaatgttcattgcacacttgagttaagcagtagtgtttgggaagaaaaacagaggagttctattaagacgggtacaatctccctcacagctgttttcatgggctggcatcgagtgtctgaggcttttccaggcttatggtacaagctgttggtggatcttccattctggggtctggaggatggtggccctcttctcacagttccacttaggcagtgccctggttgaattaataaaaggaaatttacaaagtgttggacttacacttcgtcttgtccagtcaactgatgggtatgctgggcacgtcatcattgaaactgtggctccaaactcgcctgctgcaattgcagatcttcagcggggagatcgacttatcgccattggaggtgtgaaaatcacatcaacactgcaagtgttgaagcttatcaagcaggctggtgaccgagtcctggtgtactatgaaaggcctgttggccagagtaatcaaggtgcagtgctgcaagataactttggccagttggaagaaaactttttgtcaagctcatgccaatcgggttatgaagaggaagctgccgggttgacagtagatactgaaagtagagagctggattctgaatttgaagacttggcaagtgatgtcagagcacaaaatgagttcaaagatgaggcacaatcattaagtcatagtcccaaacgtgttccaacaacactttctattaaaccccttggagctatatcaccagttttaaaccggtaaattaggctggtaggaagttcacccactaccaccggaaaatttcagtccaaagatgggaaataaacctccacccctaaaaacttctgagataacagacccagcacaagtgtcaaaaccaacccaaggatctgctttcaaaccacctgtgccaccacgaccacaagcgaaagttcctttgccttccgccgatgctccaaatcaggcagaaccagatgttctcgttgaaaagccagagaaggtggtgccacctcctcttgtagataaatctgctgaaaagcaagcaaaaaatgtggatgccatagacgatgcagctgcacctaagcaatttttagcaaagcaagaagtggccaaagatgtcacttcagaaacttcctgccctactaaggacagttcggacgaccgtcaaacatgggaatcatcagaaattctttatcgtaataagctaggaaaatggacaagaaccagagcatcctgtttgtttgacatagaagcctgtcacaggtacttaaacattgcattgtggtgcagggatcctttcaagttgggaggtctcatctgtttggggcatgttagtttaaaacttgaagatgtggctttaggatgcctagctacatcaaacacggaatacctttccaaattgagactggaagccccctcacctaaggctatagtcactagaaccgcactacgcaatctgagtatgcaaaagggattcaatgacaaattttgctatggtgacattactattcacttcaaatatttgaaagaaggagaatcagaccaccatgtagttactaacgtagaaaaagaaaaagaaccccatttggttgaagaagtttctgttctccctaaagaggagcaatttgttggacagatgggtttaacagaaaacaaacacagttttcaggatactcagttccagaacccaacatgggtgtgactactgtaagaaaaaagtttggactaaagcagcttccccagtgttatgtttttgtggcttatgtttgccataaaaaatgtcaagaaaagtgtctagctgagacttctgtttgtggagcaactgataggcgaatagacaggacactgaaaaaccttaggctggaaggacaggaaaccctcttaggcctgcctcctcgtgttgatgctgaagctagcaagtcagtcaataaaacaacaggtttgacaaggcatattatcaatactagttctcgtttattaaatttgcgtcaagtctctaaaactcgcctttctgaaccaggaaccgatctcgtagaaccttcaccaaaacacacacccaacacgtcagacaacgaaggcagtgacacggaggtctgtggtccaaacagtccttctaaacggggaaacagcacaggaataaagttagtgagaaaagagggtggtctggatgacagtgttttcattgcagttaaagaaattggtcgtgatctgtacaggggcttgcctacagaggaaaggatccagaaactagagttcatgttggataagctacagaatgaaattgatcaggagttggaacacaataattcccttgttagagaagaaaaagagacaactgatacaaggaaaaaatcacttctttctgctgccttagctaaatcaggtgaaaggctacaagctctaacacttcttatgattcactacagagcaggcattgaagatatagaaactttagaaagtctgtctttagaccagcactccaaaaaaataagcaagtacacagatgatacagaagaagaccttgataatgaaataagccaactaatagactctcagccattcagcagcatatcagatgacttatttggcccatccgagtctgtgtagcagacaggtctatttaaactttcaaatgaacagggtaaagttgcatctaaagtaccacagatacaaccatgtttaaatcctcgtatgcactctggcctgcttctccagttacttgcttgtgtaagaacaaaaatgagaaaggttgttttccagtaaaaacatgaccagcttactaattggttgttttggattgcatttatagctatgcttttttgggtttatactgggaatttatttttactaaattatttaacttttctaattatgtaattatgtaagctagcttttcatgtttatgtatgtatggtgtccccttgtgttattttttcttccttcttggtttttgaattagtggttaaatagaaatactgtcctggattccttaaaatattttcatttcccatcatggttataacaaatttgcctgcatgcccaaactgacaacagcaatcactgagggaacaggttttgaatctttcttttgtgttatgaagtttatcgtctctacttgcttgagatttttgttattttgggggtttgggggtgctttttgttttgtttttgccaaatgtaacatgaaagcagatgctgcacctttagtctgttatgctgatttagtaaaaaaaaattttttacatatattgcttgctttcgatgcttctgtgaaacttttttctaaagcttttgtgcagctgtatggtaaaaatatggtgattaatttgaagagcttacattgaaagacaatgtaataggaaataaatgcagattgcgagtggtcaagaatcttgtagagaggataacaagacttaattactgaacaacagcaacatagcattttgaag

SEQ ID NO: 91280 - DNA, 381 bp, Homo sapiens
attaaacgaggcatgtcttgctgccagatttgctaatagataccttgataagcgtttgagtaaacagtaatgaaaacaggtaggtctgcaagagatgaagaaaacctgaaaataaccttggtcttaataaatagtttaggagtaacctggatgctagttgagtttctcaagtaggaaactcggttgaagtatcacaagatttttccccccagcataagtgctcctccaacatagcctattttcttagttaatctgaaagcaaaaatgccctaatgagaatactagcgttccaaagatagatacgttaaggaaaaatcgacggtgtcactaatgaatgagacttggacagatattctgacttaagagcggagaaatcattgt

SEQ ID NO: 91281 - DNA, 371 bp, Homo sapiens
cggacgcgtgggctttaaaaaaatatgtaattgcaaggatagaaggtctacctagattatattattagattaaaaattaagttttaaaatggtatttaaaatataattcagtagacacaaagctatataatataatatatatacataaatacactcataaagcctggaaagatgtacaccaaatgttacacatgttggtggctaactcctgttaaggattttggggtaatggttaatttatccttcttgcttatatttatttcataaaccttctatgataaacgcataccacatttagtataagaaataaaaatgtaaatattttcactaagctatcattcaagtataaatgaagattgtagacctgcact

SEQ ID NO: 91282 - DNA, 2036 bp, Homo sapiens; identical to SEQ ID NO: 59607
  misc_feature (1)...(2036): n = a,t,c or g

SEQ ID NO: 91283 - DNA, 386 bp, Homo sapiens
cccaaagcacagctctgctaggttcgccacagccaaccatgtctgctgtgacggattggggatatcagaagctaaacagagtaaattacaattgctaccataagtggctactctggatggggtggtggatggcgggcggagggtggtggcctaaatcacaacctaaatgtgatttctgttccctggtgagggccggctcacccttcaacatggatctcagtgtatctgcataactcaaaatccaggtctagtttttccttaatcctggaggtactggggcgtcctgcaccttactttgccctgtccataggttccctcttttcttgatcatagacaaaattacccctgacatggagagaaactctttttatatcggctggaggggg

SEQ ID NO: 91284 - DNA, 970 bp, Homo sapiens; identical to SEQ ID NO: 76849

SEQ ID NO: 91285 - DNA, 1221 bp, Homo sapiens
cccacgcgtccgcaaatactggttaactgcgtttgcagctagaagttaggctctgattcactgttttgtattttctaaaagggttatatgtaatttgaaagatagacctgccaagacgtgagatctgtgttctccttggttagagctaacatttttggtgaggaaagcactgcaggagcaggctggcacagagaagaggacatgcggaaggagctccagctctccctgtcagtcaccttgctgcttgtctgtggcttcctctaccagttcaccctgaagtccagctgcctcttctgcttgccttctttcaagtcccaccaggggctggaagccctcctgagccacagacgtggcattgtgtttctagagacctcagagagaatggagccaccccatttggtctcctgttccgtagagtctgctgccaagatttatcctgagtggcctgtggtgttctttatgaagggtcttactgattccacaccgatgccctcaaactccacatacccagctttttccttcctgtcagcaatagacaacgttttcctcttccctttggatatgaaaaggctgcttgaagacacaccattgttttcatggtacaatcaaatcaacgccagcgcagagagaaactggctccacatcagctcggatgcatcccgcctggccatcatctggaaatacggtggcatctacatggacaccgatgtcatctccatcaggcccatccctgaggagaactttttggctgcgcaggcttctcggtactctagtaatggaatatttgggttcctcccccaccacccctttttgtgggaatgcatggaaaactttgttgaacactataattcagccatttggggcaaccaaggccctgagttgatgacaaggatgttgagggtatggtgtaaacttgaagacttccaggaggtgagcgacctcaggtgtctgaacatatccttcttacacccccaaagattttaccccatctcctatcgagagtggaggcgctactatgaagtgtgggatacagagccaagcttcaatgtctcttatgccctgcatttgtggaaccacatgaaccaggaggggcgggctgtgattagaggaagcaacacactggtggaaaatctctatcgcaagcactgtcccaggacttacagggacctgattaaaggcccagaggggtcagtgactggggagctgggtccaggtaacaaa

SEQ ID NO: 91286 - DNA, 631 bp, Homo sapiens
tccaaggcgttcccagtgtcccccagagtcctcattaattacctggagaattaccaaggggttcttggacaggatgagagcctccttccactgcaactcaccacccctcatgacacttggatgacgaaaaacagcacttgatgaggaaatcaactgcctcttcattcttccccaggccttcacaatgaacagaaagctgcagtttcctcctctgtattctttctccactcccactcgcctcatgtaccccactgacccaggtatgagaaacccagcctgcaccttctatagcaccacatgcctagactgaggaaagatccacaaatgccactcttcttcgaatagcctaccttcatgaagtctcaccaacccgctgaatatggactccaacggtgccctaggggatggtggagccaccagatggaaggagcctggtgatcccgagaaggagagatgcctcgctgacctgaacatctttccagaactgttaaatgaagcctgcaggacaccagctgacagtggaaggactgaggaaggttgtataattttgtgcaaggtccaccacaaatccagctgaagaactgctccaaagtttaggtcatggcaagaacaagactggatcactccatgc

SEQ ID NO: 91287 - DNA, 1611 bp, Homo sapiens; identical to SEQ ID NO: 59532

SEQ ID NO: 91288 - DNA, 2613 bp, Homo sapiens
atggttgctgtacgggctgctggcccacgagaaggggccagccaggatgaagcgggcacagtttgggcccccatgactggctgcccttgccagtgccgcccaggacccagctggctgctggtggacaccctggagcctgagacagcgtacccagttcagcgtcctggcccagaacaagctgggaaccagcgccttcagatgaagcgggcacagtttgggccccatgactggctgtccttgccagtgccgccaggacccagctggctgctggtggacaccctggagcctgagacagcgtaccagttcagcgtcctggcccagaacaagctgggaaccagcgccttcagtgaggtggtcactgtgaacactttagcattccctattacaactccagaacccctggtgctggtcaccccaccgaggtgcctcatagccaatcggactcagcagggtgtgctcctgtcctggcttccgcctgccaaccacagctttcccatcgaccgctacatcatggagttccgtgtcgcagagcgctgggagttgctcgacgatggcatccccggcaccgaaggagagttctttgccaaggatctgtcacaggacacgtggtatgagttccgggttctggccgtcatgcaggatctcatcagcgagcccagcaacatcgccggcgtctccagcacagacatcttcccgcagccggacctgaccgaggatgggctggcgcggcctgtgctggcgggaatcgtagctaccatctgcttcttggcagctgccatcctgttcagcaccctggctgcctgctttgtcaacaagcagcgcaagcgtaagctcaagcgcaaaaaagaccctccactctccatcacccactgcaggaagagcctggagtctcccttgtcctctggcaaggtgagccccgagagcatccgcacgctccgagcgccgtcagaatcctccgacgaccagggccagcccgcggccaagaggatgctgagccccacccgtgagaaggagctgtcgctgtacaagaagaccaagcgggccatcagcagcaagaagtacagcgtggccaaggcagaggccgaggcagaggccaccacgcccatcgagctcatcagcagaggccctgacggccgcttcgtgatggaccctgccgagatggagccctcgctgaagagcaggcgcatcgagggcttccccttcgccgaggagacggacatgtaccccgagttccgccagtcggacgaggagaacgaggacccactggtgcccacatctgtggccgccctgaagtcccagctcacccctctgtcatccagccaggagtcctacctgccaccaccagcatacagccctcggttccagccccgcgggctggagggccccggtggcctggaaggtcggcttcaggccacaggccaggcccggccccctgccccccggcccttccaccatggccagtattatgggtacctcagcagcagcagccctggggaggtggagccgcccccgttctacgtgccagaagtgggcagccccctgagctccgtcatgtcgtccccgcccctgcccaccgaggggccctttggccaccccaccatccccgaggagaatggagagaatgcatccaacagcacgctgcccttgactcagacacctacaggagggcgctcccctgagccctggggccggccagaattccccttcggggggctggagaccccagcgatgatgttcccccaccagctgccaccctgtgatgtgcccgagagtctgcagcccaaggccggcctcccccgaggactgccccccacctccctgcaggtgcccgcggcctacccgggcatcctgtctctggaggcaccgaagggttgggcaggcaagtcgcccggcaggggccctgtcccagcgccccccgccgccaagtggcaggacagacctatgcaacctctggtaagccaagggcagctgcgacatacaagccaaggcatgggcatacctgtgctgccttaccccgagccggctgagccgggggcgcacggcggccccagcacatttggcctggacacccggtggtatgagccccagccccggccccggcctagccctcggcaggccaggcgcgccgagcccagtttacatcaagtggtgctacagccctcccggctctcacctctgacccaaagccccctcagctcccgcaccggctcccctgagctcgccgcccgtgcccggcctcgcccgggcctcctgcagcaggcagagatgtcagagatcaccctgcagccgccggctgcagtcagcttttctcgaaagtctacgccgtccacaggctccccctcccagagcagccgcagtgggagtcccagctaccggcccgccatgggcttcaccactctggccaccggctacccttcccctccacccggccccgcccctgctgggcctggggacagcttggacgtgtttggacagacgccttcccctcgaaggacgggggaggaattgctccgaccggagaccccaccacccacgttacctactttagggaagctgcggagagacagaccagctcccgcgaccagcccgcctgagagagcactctctaaactg

SEQ ID NO: 91289 - DNA, 1779 bp, Homo sapiens
tccctccccccactcccccctcccccgcccgccggggcaggggagcgccacgaattgaccaagtgaagctacaactttgcgacataaattttggggtctcgaaccatgtcgctgaccaacacaaagacggggttttcggtcaaggacatcttagacctgccggacaccaacgatgaggagggctctgtggccgaaggtccggaggaagagaacgaggggcccgagccagccaagagggccgggccgctggggcagggcgccctggacgcggtgcagagcctgcccctgaagaaccccttctacgacagcagcgacaacccgtacacgcgctggctggccagcaccgagggccttcagtactccctgcacggtctggctgccggggcgccccctcaggactcaagctccaagtccccggagccctcggccgacgagtcaccggacaatgacaaggagaccccgggcggcgggggggacgccggcaagaagcgaaagcggcgagtgcttttctccaaggcgcagacctacgagctggagcggcgctttcggcagcagcggtacctgtcggcgcccgagcgcgaacacctggccagcctcatccgcctcacgcccacgcaggtcaagatctggttccagaaccaccgctacaagatgaagcgcgcccgggccgagaaaggtatggaggtgacgcccctgccctcgccgcgccgggtggccgtgcccgtcttggtcagggacggcaaaccatgtcacgcgctcaaagcccaggacctggcagccgccaccttccaggcgggcattcccttttctgcctacagcgcgcagtcgctgcagcacatgcagtacaacgcccagtacagctcggccagcaccccccagtacccgacagcacaccccctggtccaggcccagcagtggacttggtgagcgccgccccaacgagactcgcggccccaggcccaggccccaccccggcggcggtggcggcgaggaggcctcggtccttatggtggttattattattattataattattattatggagtcgagttgactctcggctccactagggaggcgccgggaggttgcctgcgtctccttggagtggcagattccacccacccagctctgcccatgcctctccttctgaaccttgggagagggctgaactctacgccgtgtttacagaatgtttgcgcagcttcgcttctttgcctctccccggggggaccaaaccgtcccagcgttaatgtcgtcacttgaaaacgagaaaaagaccgaccccccacccctgctttcgtgcattttgtaaaatatgtttgtgtgagtagcgatattgtcagccgtcttctaaagcaagtggagaacactttaaaaatacagagaatctcttcctttttttaaaaaaaaaataagaaaatgctaaatatttatggccatgtaaacgttctgacaactggtggcagatttcgcttttcgttgtaaatatcggtggtgattgttgccaaaatgaccttcaggaccggcctgtttcccgtctgggtccaactcctttctttgtggcttgtttgggtttgttttttgttttgtttttgtttttgcgttttcccctgctttcttcctttctctttttattttattgtgcaaacatttctcaaatatggaaaagaaaaccctgtaggcagggagccctctgccctgtcctccgggccttcagccccgaacttggagctcagctattcggcgcggttccccaacagcgccgggcgcagaaagctt

SEQ ID NO: 91290 - DNA, 3738 bp, Homo sapiens; identical to SEQ ID NO: 59291

SEQ ID NO: 91291 - DNA, 695 bp, Homo sapiens; identical to SEQ ID NO: 58867

SEQ ID NO: 91292 - DNA, 476 bp, Homo sapiens
  misc_feature (1)...(476): n = a,t,c or g
cgggagnnannaattgaagctgtcgttggaggctctgcgccggaattaccgggncgacccacgcgtgcgcacattacaggcttgatgcactagaaggaaactagagatttttccttattttgcgggaaacggacacatggaggaaagtgatgcctccaagctggccctggtcggggagtctgtggcagagccaggaccaaagccgagtcccctgattttaggatcttttgcccagtgtgagatgccctggaaaagcacatttcagtttagctgcttcttggtttgtctgagaaaaagcctatattaagtttgcgaaggagtggctgctgctagttttattacgagaaatgcctggatgcagagtaattttatctgtcggcttctggatactgtcttggcagagggccactgtggctttctctctctggggctggggtttggtttaacaaccgtttatgtggagccccagacgcagg

SEQ ID NO: 91293 - DNA, 638 bp, Homo sapiens
  misc_feature (1)...(638): n = a,t,c or g
cggacgcgtgggttttaaacaaaaggcaggaagagcccgtgtgttagaaagctgtggtggaagcaaagaacactgacgtttgaaaaatgaaaacttgatttcaaatctggaacttgcaacttgcttgctgtgtgatcttggctaaatctctgtttctctaactttaagttactttgtaaaatggagaagatatttcctaatttatggattgagagaataaaataatatatgcaagcaatgtttcataaactgaaagtcactaatatacacagaatatgtctcatctctgtgctaagggacaatatgagcaaatggttgtctttgtgtaagcatttaaaaacaagagtattttcaaagcgagctttaattgtaactctgctgtaataaaccttgaatctttcatctttgttgctggacttaaacatataattatactgttaaaaaaagaggagttgggccaggcacaatggntcacacctataatcctaacactttgcgaggccgaaacaggnagataattgagcccaggtgttcgaaacccagctaagccgcttgggccttctattccctaaggaaannnccccccacccaatttggaataacaaatgcccgccccgcccccattataaacgccccct

SEQ ID NO: 91294 - DNA, 402 bp, Homo sapiens
cttgaaggagcccttataaataaagtgaaaagaaaacctggcctgaaacaactgccaaatcccaattagggaacaaggttgggaggagagaggagggggcaggatctgaccaggttgtaattcagtaactgatgtctctaattgatcactgagaggaagaagcaggaatggccttctcagtcagcattcatggtggcaggagaatccaggatctgttccttgaccttcttgttctggaaatgagacttcagccctgttcatcctttggctcccacactacctactggactctccttgccacctgttgctgctgattgctcacccccatttctaagacactgacaggaaggaagggtgtctcccagctggcagcataggtttcattttagcatccgaaaagct

SEQ ID NO: 91295 - DNA, 4646 bp, Homo sapiens
  misc_feature (1)...(4646): n = a,t,c or g
gaattcccttgcggccgcaggaatttttttttttttttttttttcaaatatatacatttttaatatttgaaatatttacataatggaaccacatcagggttcgagggtaagaacagtgttttcaaatgtcctctccaggtgtgtttaaaaaaaaaaaaaatccagtaatccaaagctcacattatgctttttctaacaggccaatctttacctttcttttaaataagtacctcagacatgggaacagttgcatctaatttgtgtgaaaagctgtttaaaacttcttacgttttcaggtaattttactccctggtgaaattctgatctacaacgaagaaagccccaggaatttctctaagcacatcatcagtacatttttaaacactaatgagccaaggtaaaacaagatataaaccttctacaagacaaaaatgaaaacaaatagttagtggttggtaactgccttgaatgatttacctttatccttaaataacatgtaaacttacaaattgccgagcagaatacctatcatgtttgtaaaactctcactgtctgtcaatttgcctaattttatttcatttttttgttttgttttaaagggggttttcacttacactttttggtatgatgaattttttgttaaataaacagatacaatagaattaaactaaggaccaattagtgcaaaaatgcattaaatacagctctccaggatttttagggatatgcctcatttctgagcaataaaattaaaaggaaaaatcactatgatccacattcctttaaaagagaagctgaagcagccatcttattaataagaaaaccccatccagttagcaaaccacattgctcacgacacgagaacaccatgctctgggaaactaataacctaattataacagacatttcaggttggaacagtaccacttttcctttacaattctattctttagttgggaaatgttttaaggaccccaccaaagcaaattagggaaaagaaagacttttacacatacattcacaaacacattcatacagaaatacagtaggaatggattgtctgctaatttttgcattccaattttaaactccatgccttcacaagggcttgccatttctgatgaaaagagagtgggggtggtaatagtttatgactggtgttttcaattaaaattgttcatgttggttcctatacagtacatttcaatattaagtgcaattctgcaaaataattggggagtcgttttaatatttacaagaaacaaatcagcagaacaagattatatcagataggctgtgtacagtagctgcggcttataaaacataccagtaatttgtacctggtgagtataaagagaaccaaggattcagatgactttacaaccaagggagtacacagggcaacaacaaattagaggaccaaaaaattcacattttctacaaaaaaaaaaaattacagatctcacaatgtcttcmaagacaaagaaaaattcmaagtccttaaaagggtggcaaagaagaaatctgaaatggaactctaaatataaaaagttttacttcacaagaccaattttcttggcttctgtttcatatatcaataatctccacattttgactataaaaacttctgcttcttcatcaagtaccatggcaacatcatctaaaatgctctggggtgnactatgagccataaccttagaacaaacnaaatcaactaatgtagcttcttcttcacctatatattctatgattttcttattaatccatggtctaattcgacgttccatcagtatagaatccacaatagaccaatccaggggataagcgaagagctcaggtttggctgtagggattttctcaatgagactcttaatgtgtttacgcttttcttcagtgtttacagtgcctttggttgcatttttatcatcttcaccataatccaagggaaccagtttcctttttcggggtacgtcatcactgtcttcatcctcaaatttgttaaagacactatctacaggtagtttctttctcttcacagaattaggctgaccaggactattggaagcacccagtttaagacttagtcctatttttggcctatgctcctcaggttgctgttgatctggtgagttttcatgaggaataataataccacagggagactcatccccaggagtgttaggtgttgcattgccactggcagaggaaacagatggagcagagctgatgggcctcagagtaggtttcagacaaggcttttgctctggctcctcttcctcttccatgggttcttctcgtttttcttctttttcttgcttttcttcttcctcctcttctgattctggctcttgctttatttgtggctgcctgcgcctctcagcctcttgttccatcctctggagctctgcatctggatctggatgcccttctgccagaaggcgctgcctgatttcctcaagctcctccttctctctcttcctatctcgttcatctgcttccatttccttttctctatcacgcaaccttttctgaagagcacttcctctgtaatatttggggtcatctctatcatcatcatagtcttctaagaattcttttagtcgtttagcttctttggccatttctcttcttctttcttcttctctttcagcttctttctcatattcccgggttttctttcgttctctgatttcccaattcttaaggcgctcttgataagcagcttctttctctcggagttttctttcaagttttcttcgttcgtatgcatcttcttcatcttcttctcggtcccgttttttgtctttttctctttctcgctcccgttccctctctcgctctctctctcgctcccgttctcgttctcgctctcgttctctctctctctctctttcccgctctcgttccctttcacgatctctgcttttttctcttgatcgactgcgatccttattacgatctgagctcctttctctatcccggtcacgatctctctctcgatcccgatctcggtctctctcttttgtccggtcacggtccctatcccgttctcgttcccgctcccgttctttctccttttctcgttcacgttctctttccctttctcgttcccgttctcgcctttctcgttccctttcacgctccctctctctttctctccgttctttctcaatttcctgtctttctttttcctttttgcctttctcttcttccagtttcttatgtgtgtctctgaatttgctgatctctcgagatatcaggtctcttttgtcttcttccatttctatagcatttatatcctccttagtgatgagtggataagggatcagtggggccactggaaatctgcggaaaatgacgcacgcagctgactttgtcttctccgcacgactgttacagaggtctccagagccttctctctcctgtgcaaaatggcaactcttaaggaaaaactcattgcaccagttgcggaagaagaggcaacagttccaaacaataagatcactgtagtgggtgttggacaagttggtatggcgtgtgctatcagcattctgggaaagtctctggctgatgaacttgctcttgtggatgttttggaagataagcttaaaggagaaatgatggatctgcagcatgggagcttatttcttcagacacctaaaattgtggcagataaagattattctgtgaccgccaattctaagattgtagtggtaactgcaggagtccgtcagcaagaaggggagagtcggctcaatctggtgcagagaaatgttaatgtcttcaaattcattattcctcagatcgtcaagtacagtcctgattgcatcataattgtggtttccaacccagtggacattcttacgtatgttacctggaaactaagtggattacccaaacaccgcgtgattggaagtggatgtaatctggattctgctagatttcgctaccttatggctgaaaaacttggcattcatcccagcagctgccatggatggattttgggggaacatggcgactcaagtgtggctgtgtggagtggtgtgaatgtggcaggtgtttctctccaggaattgaatccagaaatgggaactgacaatgatagtgaaaattggaaggaagtgcataagatggtggttgaaagtgcctatgaagtcatcaagctaaaaggatataccaactgggctattggattaagtgtggctgatcttattgaatccatgttgaaaaatctatccaggattcatcccgtgtcaacaatggtaaaggggatgtatggcattgagaatgaagtcttcctgagccttccatgtatcctcaatgcccggggattaaccagcgttatcaaccagaagctaaaggatgatgaggttgctcagctcaagaaaagtgcagataccctgtgggacatccagaaggacctaaaagacctgtgactagtgagctctaggctgtagaaatttaaaaactacaatgtgattaactcgagcctttagttttcatccatgtacatggatcacagtttgctttgatcttcttcaatatgtgaatttgggctcacagaatcaaagcctatgcttggtttaatgcttgcaatctgagctcttgaacaaataaaattaactattgtagtgtgaaaaaaaaaa

SEQ ID NO: 91296 - DNA, 384 bp, Homo sapiens
  misc_feature (1)...(384): n = a,t,c or g
ttcaagtttgaagctaatgtcatttcagtctcatttggaggcttcagagatttcactagtttctccacaaagaccactataaagactgtatttccctgagtctggggcacaagactccagtcatcagctctcccacccagggaaagtcccaaaccaactgctggcctgcccaagaaagaaaccaaattcatacaacctccgaaactgagattgaaaccaagattggcccatctcaaggagcatccttcgcatatctcacatgcacgtgacactgagcctcagcccagncttacccttccttcctctgtgtctctcatgtctccccatcacccttcttgccttcccttttttgtctttcaatgtcccattcttcctctttaattt

SEQ ID NO: 91297 - DNA, 885 bp, Homo sapiens
gtttgtgctggaattcgcgacccttgttcaacgccgttggcgaagccagctgctggaggtgccgagaatctgagtttcggtaagcagccaggtctggaaactaatattttaaaaatgactacaccaaacaagacacctcctggtgctgaccccaagcagttggaaaggactggaacagtacgggaaattgggtcacaagctgtttggtcactctcatcttgcaaaccaggatttggagtggatcagttacgagatgacaatctagaaacttattggcaatcagatggttcccagcctcatttagtgaacatccaattcagaagaaaaacaacagtgaagacattatgtatttatgcagactacaaatctgatgaaagctatactccaagcaagatctcagtcagagtaggaaataattttcacaaccttcaagaaattcggcaacttgagttggtggaaccaagtggctggattcatgttcccttaactgacaatcataagaagccaactcgtacattcatgatacagattgctgttctagccaatcaccagaatggaagagacacccatatgagacaaattaaaatatacacaccagtagaagagagctccattggtaaatttcctagatgtacaactatagatttcatgatgtatcgttcaataaggtgactttaaaatgagacgaaaatcattaaacgtatctttgttttatcctgtatttaaataatatatcatgtacctttattgaacaaggcatccgttatatctaattttgtatatgtttaaaaatattttattgtaactttgacaaataaatttggggtcatattatctttattttctttaacatgtaataaagctcacatattttacattactaaa

SEQ ID NO: 91298 - DNA, 636 bp, Homo sapiens
tatttttcctgctgcagatccatagtagaggataatgaaatcaatttaatggaaaccagcattttttattaatatactacaaaatatcagagtacatggtccatggtaaggatatttcagtgatatgtactgtacatatgtgtgggtgtgtgtactgcgttgtaagataaaacgtatttcttacagtgggtggcatccaagtttaaaagccagctgccttaaggaatctattctgtgtgaggacaggtgattaaaactagattacttaaatgtaagcaatacactgaattgtattatttgtttgtcactgaattaacttggctttcttccaagagttgagatttctgacaagcacagatttgtcaaaataaagtagaacaactcaagcgtttttgcttctgctccaagggaatattttgttttttttaaacaggttgcttagaccccctgttttgcacccccctatatattgtaatttggaaccagatagcttggcgaggaaacactttttcctgtttgagcacctcctgctccctttcctatgacctcacctgtttaaaatgtgagaaaagggtggtgctttaatgaagtattctgttgcacaaacctaacatgacatctcatttccgtcttggc

SEQ ID NO: 91299 - DNA, 404 bp, Homo sapiens
cggacgcgtgggcggacgcgtgggcaggcttactcagtactgacaggagcaggaggcacacaggaaggaatgaggtgcttgtcattccagtcactgacaaacgaaattataatttgtacagttaggcccagcatcaccaagtagagtctaaaagggtggatttggagctgacaaacagtagtttaatatctgttaccacctactcctttgactactcagtatatccacacacttgtacaaacatttgaatttcatgtgacaacaacaacaactttatagtttctccttgaaagatgaatttcttcataaaatcaaagttcaaactttataaagggcttcataataaataccttaggctttcatggtcacttatgatctttatcacatattcttattgttatttg

SEQ ID NO: 91300 - DNA, 477 bp, Homo sapiens
  misc_feature (1)...(477): n = a,t,c or g
nattagaatcatagctatgacaaacccgntcggnactaccgggtcgacccacgcgtncgtccacgcgtccgnctcattttatatattttttattatagagaatagtaagagatatgtggtaggtactcaacttgctgatattttgaaatttattttttggaaagtgttattcattttccaaactgtagtggtcactagataaatatctacttgtgtttatctttcctgaaaaaaataagctgggatattagaagtttcaaaatggttgatattataacaactatggtgtttcttgaggagaagggaggggttgttaagatgtggttaagatgtgtgcacataatcatctgaagtgatttttcaaatgtaagtgctagggttctgaaagtaattcgtttgaggtgtgccacaggagaatcttttcctgaagaaaagttctaactattgttcacacaacttttgtctaagaataactag

SEQ ID NO: 91301 - DNA, 640 bp, Homo sapiens
  misc_feature (1)...(640): n = a,t,c or g
ctgggattgcctctgcacgccatgtggatctgccatgcgtctctggagggtgtgattctgggtggtgggcctggccctttcctggctgggggctgctgtctgctccacagacaggaccctgggagtgtccgtgcacatgtggcactgtggactcatgtgagcctttctgaaggacgcgtttccagaagtaggactgctagtgcagagagcaagcacattttattcatgcttccaggaggtcttggcacgcccctctcgaggggagcctgtgggcagtgcactggctggggggcgtgctgaaggccaggcctgcttcctcactgccgggagatgggcaccatgagccctgcactgagtcacactcccctgtgcagggcattctgggaaatattgaaatcaaaaggggcgggggagtccccttttgatttgtgtntggntctctgtccctctatttctctcttttgaatctaaagcttttaatttgcccaaagaatacacatccctgataactgacagacccagcattaccctagacctggaattccaatttggggaggaatatgacctgaccaggaaaaaacctggccttgctctcgcccttcctttgttaaaatcccaaggctggcagctgagaaacaga

SEQ ID NO: 91302 - DNA, 1219 bp, Homo sapiens
ccgaaccacgcgtccgtcctttgggcgctcgctcctctcctacttggataactgtggtaattctagagctaatacatgccgacgggcgctgacccccttcgcgggggggatgcgtgcatttatcagatcaaaaccaacccggtcagcccctctccggccccggccggggggcgggcgccggcggctttggtgactctagataacctcgggccgatcgcacgccccccgtggcggcgacgacccattcgaacgtctgccctatcaactttcgatggtagtcgccgtgcctaccatggtgaccacgggtgacggggaatcagggttcgattccggagagggagcctgagaaacggctaccacatccaaggaaggcagcaggcgcgcaaattacccactcccgacccggggaggtagtgacgaaaaaaaacagtacaggactgttttgaggccctgtaagaggaatgagtccactgtaaaaactttaacgaggatttattggagggcatgactggagccaggagccgcgggaattccagctcctacctctccaggctcattgccgcggagcgtgagagggagctggaagagtgccagcgaaaccacgagggtgatgaggacgacagccacgtccgggcccagcaggcctgcattgaggccaagcacgacaagtacatggcggacatggacgagcttttttctcaggtggatgagaagaggaagaagcgagacatccccgactacctgtgtggcaagatcagctttgagctgatgcgggagccgtgcatcacgcccagtggcatcacctacgaccgcaaggacatcgaggagcacctgcagcgtgtgggtcattttgaccccgtgacccggagccccctgacccaggaacagctcatccccaacttggctatgaaggaggttattgacgcattcatctctgagaatggctgggtggaggactactgaggttccctgccctacctggcgtcctggtccaggggagccctggcagaagcccccggcccctatacatagtttatgttcctggccaccccgaccgcttcccccaagttctgctgttggactctggactgtttcccctctcagcatcgcttttgctgggccgtgatcgtccccctttgtgggctggaaaagcaggtgagggtgggctgggctgaggccattgccgccactatctgtgtaataaaatccgtgagcacga

SEQ ID NO: 91303 - DNA, 1901 bp, Homo sapiens
atgacttcgaaagaggaaagcaggaggcagcagcccacagctggtcctgcagggcagggaaagttaccctcgccctccgagccacaactccccacgccgccaactcggtctttacatcattttcgacgccccctaagtccctcccgagaggcgcaggcgcacatcgccccttctagcgaactacatctcccacaatcccaatcggccggaccacctccgctcggggcggggacggaggtggagctggtggtccccggtcgggacgaaggctcccgaggtgccctgcctgggtcctccggggtaaagttcgtttggcggaagattgtccgttttcctgtatcagaccaggtacgtaccttgtccataagtcgtcttatgagaagacttcttgagatgatgcagactctcgtgcagtttataatcggctggaggtcattgctaggaagaactctgggtacaataatgaatacaatgtatgtgatgatggctcagatcttaagatctcacctgataaaggctacagtgattcctaatcgagtgaaaatgcttccatattttggtatcattagaaatagaatgatgtcaacccataaatccaaaaagaagatcagagaatattatagactgctgaacgtggaggaaggatgctctgcagatgaagtcagggaatcttttcataagcttgccaagcaatatcatcctgacagtggctctaatactgctgattctgcaacatttataaggattgaaaaagcttatagaaaggtgctctcccatgtgatagaacaaacaaatgccagtcagagtaaaggtgaagaagaagaagatgtagaaaaattcaaatataaaacaccccaacaccgacattatttaagttttgaaggtattggttttgggactccaactcaacgagagaagcattataggcaatttagggcagaccgtgctgctgaacaagtgatggaatatcaaaagcagaaactacaaagccagtattttcctgatagtgtaattgttaaaaatataagacagagcaaacagcaaaagataacgcaagctatagaacgtttagtggaggacctcattcaagaatccatggcaaaaggagactttgacaatctcagtgggaaaggaaaacctctgaaaaagttttctgactgttcttacattgatcccatgactcacaacctgaaccgaatactgatcgataatggataccaaccagaatggatccttaagcaaaaggaaataagcgatactattgagcaactcagagaggcaattttagtgtctaggaaaaaacttgggaatccaatgacaccaactgaaaagaaacagtggaaccatgtttgtgagcagtttcaagaaaacatcagaaaattaaacaagcgaattaatgattttaatttaattgttcccatcctgaccaggcaaaaagtccattttgatgctcagaaagaaattgtcagagcccagaaaatatacgagacccttataaaaacaaaagaagtcacagatagaaacccaaataaccttgatcaaggagaaggagagaaaacacctgaaatcaagaaaggttttttaaacctgatggatctggtggaaatttattaaaatacgatcattttgatgtttactatcataaatcattcttagttccactgacactttacatggaaaatgagatttattgctataatacaagaatttaagaattgtgccattgtacttatcacaaaactaatcacatagccaatgatgtgtgagtgagaaacctatcaggtttgtcctgaggatatagcaagaaaagaaaataactgaaactcctttttttttgagacggcgtctcgctcgtgtcacccaggctgggagtggcaatgggcgcgatctgggctcactgc

SEQ ID NO: 91304 - DNA, 3086 bp, Homo sapiens
  misc_feature (1)...(3086): n = a,t,c or g
tttcgtcaccgctgcggctgcctcagctactgccgcagtcgccgcggaattcggcgagtagaaccgctgaggcgggcgcgggcccgggtggggccaaggttccggccactctgcagaatggagataatcaggagcaattttaagagtaatcttcacaaagtgtaccaggccatagaggaggccgacttcttcgccatcgatggggagttttcaggaatcagtgatggaccttcagtctctgcattaacaaatggttttgacactccagaagagaggtatcagaagcttaaaaagcattccatggactttttgctatttcagtttggcctttgcacttttaagtatgactacacagattcaaagtatataacgaagtcatttaacttctatgttttcccgaaacccttcaatagatcctcaccagatgtcaaatttgtttgtcagagctccagcattgactttctagcaagccagggatttgattttaataaaggttttcgaaagggaattccatatttaaatcaggaagaagaaagacagttaagagagcagtatgatgaaaaacgttcacaggcgaatggtgcaggagctctgtcctatgtatctcctaacacttcaaaatgtcctgtcacgattcctgaggatcaaaagaagtttattgaccaagtggtagagaaaatagaggatttattacaaagtgaagaaaacaagaacttggatttagagccatgtaccgggttccaaagaaaactaatttatcagactttgagctggaagtatccgaaaggcattcatgttgagactttagaaactgaaaagaaggagcgatatatagttatcagcaaagtagatgaagaagaacgcaaaagaagagagcagcagaaacatgccaaagaacaggaggagctgaatgatgctgtgggattttctagagtcattcacgccattgctaattcgggaaaacttgttattggacacaatatgctcttggacgtcatgcacacagttcatcagttctactgccctctgcctgcggacttaagtgagtttaaagagatgacaacatgtgttttccccagactcttggatactaaattgatggccagcacacaaccttttaaggatatcattaacaacacatcccttgcggaattggaaaagcggttaaaagagacacctttcaaccctcctaaagttgaaagtgccgaaggttttccaagttatgacacagcctctgaacaactccacgaggcaggctacgatgcctacatcacagggctgtgcttcatctccatggccaattacctaggttcttttctcagccctccaaaaattcatgtgtctgccagatcaaaactcattgaacctttttttaacaagttatttcttatgagggtcatggatatcccctatctaaacttggaaggaccagacttgcagcctaaacgtgatcatgttctccatgtgacattccccaaagaatggaaaaccagcgacctttaccagcttttcagtgcctttggtaacattcagatatcctggattgatgacacatcagcatttgtttcccttagccagcccgagcaagtaaagattgctgtcaataccagcaaatatgcagaaagctatcggatccaaacctatgctgaatatatggggagaaaacaggaagagaagcagatcaaaagaaagtggactgaagatagctggaaggaggctgacagcaaacggttaaacccccagtgcataccctacaccctgcagaatcactattaccgcaacaatagttttacagctcccagcacagtaggaaagagaaatttgagtcctagtcaagaggaagctggcctggaggacggagtgtcaggggagatttccgacactgagcttgagcagaccgattcctgtgcagagcccctctcagagggaaggaaaaaggccaagaaattaaaaagaatgaagaaggagctttctccagcaggaagcatctcgaagaacagccctgccacactctttgaagttcctgacacatggtaaccaagacctgagggcagcaaaccgctggtgctgtcgctgtgagcaagagccggctggcacatttggaagccgcactgtatttaacttaatcaaatgtggtatgggaggggttggaaaccaagttgtctcctgggggggagaaaacaggttttatttttgtggctgtggttttttcccctttttaatctaactgcctgttgacattgacactcatcacggttgtaggctgtcatgaatgtgtacgtgcttaaccagtgaattccgtgttgctcttgtgaggcctttcctgtcatgacccagtgtgcttaagaacctgcctgatggggagtgtcggctgtgaaatctgcaaaaagagctgacattccagctgctgtgatcatgaatttgggggtgtactgtcctgcctgtgcatcttctcgcactgagattttgaggcagttgcagccctcggttagtctcccagtggaaaaatcggttgtgcctccctgcttcccaccatagctgcctgaaaacatgacgctctcaagcttgtccttccttcaggaagatgtccactcatgccccaccccatgagagggcttnccccgtattccccctggccctttggggcatatttaatgtagagttccctttctccctaagaccgtgagttttctccatggggggatgtaccgagtaaaaaaggttaacttctagttcttatgccgtggcgctgtgttcactttcccagagtctctgttcgtttgtttggatggcggtctcggggtacggcagcagtgtgtgcgtacggtgtctgtgtgtgtgtgtgtgtgtgtgtgtgtgtgtgtgtgtgtgtgtgtgtgtgaaatcgtgcaaatctacaacatgtcccagcccattctccgttgaaacagatcacagcaacgacaaacgctcatggcgctgctttgctccacccgcttcagatagatcattgttagatatttcacatttttgtatggtggaaataaaaatgaaaaatgtatttccaaaagatgaaaattaaaaacattttcataggaaaaaaaaaa

SEQ ID NO: 91305 - DNA, 640 bp, Homo sapiens
atatctactataatgtacagtgtatattcgttttatgtgatcagatgttaacagcacaaataatcttggactttagcagcataatacattctgcacaaaatacaataaaaatcttctctctttgttattatatgtgtaaagctaggaaaggatagcgaataggatctgaactcttattctaaggctctgtaagagcaaaacagagagacaggacccgttgaaaaaaccatgaagctgttgatattttctttgtttgttttttactcttcaacttgtttgctacatttcctttcttccatggctaaccatcctctagctcttttcccctctgtccctcccaccacataaccttcttataatacttctgcataaaatgaaccaacaaaattgttcacagtaaatgtttataaaatatttgtaatggtagaattatacgcataggtaggagatacagttttgtgtgatatcatctgctctgtgtcctttaaaaatattactggatgacaacctgccatacccaaagtaatgagttcatactattccaccctcctctttagtttttcctcatttacgaggtaccaccagcaattccccagactgagaatctttgaacctaatggattcttttgacttttgtaat

SEQ ID NO: 91306 - DNA, 1543 bp, Homo sapiens; identical to SEQ ID NO: 59968

SEQ ID NO: 91307 - DNA, 1855 bp, Homo sapiens; identical to SEQ ID NO: 59773

SEQ ID NO: 91308 - DNA, 408 bp, Homo sapiens
  misc_feature (1)...(408): n = a,t,c or g
nggtaagaaaaaccaagtgtaataaaatgttaacagtggaatccaggcagtaggcattaggggtcttcagagaaaattctttaagctctgctgtatgtttttaaacatttctcagtaaaatggaaaaagaaatgttactctcctttcaagttaacaatagaattcaagcccctccaagataaggccttggatggccccagtcctctgcacttgtctactccgtcagtactgcctttcccgatgtcacagggttttgaagggcaaagtgagagatcacatgataaagtgttctgtaaacatcaaagctgctatggcagcagaaagcaaaaatgttgaacaaattgtccncacatatggaggtaaaaatggaagaaagggaagcattagagaaatgttggaatttagcgc

SEQ ID NO: 91309 - DNA, 422 bp, Homo sapiens
  misc_feature (1)...(422): n = a,t,c or g
cttcatttccagcaacacttatgaatttgcagtgatttttctcacattgctactaccattttggtgaccagaggagtactacccattctccccaacattgcaacaactcttttttttcctcctagattctgacatggggtctcggcctgagtctatgggatgtagaaaaaacacagtgccaaggccagcatctccaacagaagcaggtactgacccccaaaccttcttacacacttgggtgtctgaatgcagagactaaatgggtgcaccaagagtttaatcaatgaacggatgtattgacatcactctattctgtatccatggactctcctttaatcttttaacccaattatccagctcataaatatgggaagctcctcagatgggccattgtcacaagaaagaaggcanaatcactgcaa

SEQ ID NO: 91310 - DNA, 635 bp, Homo sapiens
  misc_feature (1)...(635): n = a,t,c or g
ccttttttcagatgatttcactgctttatcataggtgctataaaacaaactagatgactgcagcaatcttgctgaactgactctcagctggtaattagttcttgacaaatggattatagaccctattcactccccatatatagtcatgctgcgttaatttttaattatgcgttttatggaatgacagagaaaattataattaatttatggctttttgggtttctttttctctaacattttgaatcagaagtcacagataatttccagggatacggatgaaactggttttgttgcagtgttttcctacaagtatttcttaaggaggaaaaattaagcctgtggggagtaaatatttcacacatgtcttgcctccttccaagctgcgaaatgaaagtaagaagtaattagtcatttacatgtgctgtggacccaacccagctttgactttgcatctggtctggttgcacactggagcaaatgttctgtataggcctttaggagtggaaggtattgagtaccagagcgccctagagctctgngctgcgtccactgacaatcttagctgacctgcctgtcatcctgcgctgtgcattacacataccctggggacttggaaaactccccctgccacaccc

SEQ ID NO: 91311 - DNA, 3547 bp, Homo sapiens
gtagatcttgccaatttgtacatccgaactggagccaagaacatgcccactgtgttcctgctgacagatgcccaggttctagatgagagcttcctcgtgctgattaatgacttgctggcatcaggagaaatcccagatctgttcagcgatgaagatgtggacaagataatttctggaattcataatgaagttcatgctctgggcatggtagactccagggaaaactgttggaaattctttatggccagggtgcgactacagctcaaaatagccatctcgacggcttcatccatgagagaggcactcttcacccctcctgcagcacattctgacacatgcactaatgagaaacaagaaacactctaacaactggcttgcccagcactggttccagagctctatcattttgtgtttctctccagttggtcgcacgctgagagttagagctcggaagttcccagccatagttaactgcacggctattgactggtttcatgcgtggccgcaggaggctctggtctccgtcagcaggaggttcattgaggaaaccaagggaattgagccagtgcacaaagactctattagccttttcatggcacatgttcacaccactgtaaatgaaatgagtaccagatattaccagaatgagagaagacacaactataccaccccaaagagttttctagaacaaatatcactgtttaagaacctgttgaagaagaagcaaaatgaggtatccgagaaaaaagaacgcctggtgaacggcatccaaaagctaaaaaccacagcctctcaggtgggagatctaaaagccagacttgcctctcaagaagccgagctgcaactgagaaatcatgatgccgaagctctgatcacaaagatcggccttcagacggagaaagtgagccgggaaaagaccatcgctgatgctgaggagcgaaaggtgacagccattcagactgaagtgttccagaaacagagagaatgtgaagctgacttactcaaggctgagcctgcactggtggctgctacagctgcactcaatacactcaacagggtcaacctcagtgagctgaaagcctttcccaaccctcccatcgcagttaccaatgttactgcagccgtgatggtccttctggctcctcggggaagagtgcccaaagaccgaagttggaaagcagctaaagtcttcatgggaaaggttgatgattttttgcaagcattaattaactatgacaaagagcacattccagagaactgtctaaaagtggtgaatgaacactatttgaaagacccagagtttaatccaaacctgattcgaaccaaatcttttgcagcagctggcctgtgtgcctgggtcatcaacatcattaaattctatgaggtatactgtgatgtggagccaaaacgccaagcattagcccaagcaaacttagaactggctgcagctactgaaaaactagaggctatcaggaaaaagcttgtggtgagtgcaaactatgacattgaaaagtcagagaagattcgctggggtcaatccattaagtcctttgaagctcaagagaagacactctgtggagatgttcttctcacggcggcatttgtgtcttacgtcggacccttcacaaggcagtatcgccaggagctggtgcactgcaagtgggttccctttcttcaacagaaggtttccattccactaaccgaaggcctggacttgatatccatgttgacggatgatgctacaattgccgcctggaataacgaaggactgcccagtgacagaatgtccaccgaaaatgccgctatcctaacacactgtgagcgctggcctctggtgatagatccccagcaacagggaattaagtggatcaagaataagtatggaatggacctgaaagtcacacatttgggccagaaagggtttttgaatgccattgaaactgctttggcctttggtgatgtcatcttaattgaaaatctcgaggaaacgatagatccagtcctggatccactacttggcaggaacacaattaaaaaaggaaagtatatcaggattggagataaagaatgtgaatttaacaagaactttcgccttatccttcacacaaaattggcaaatcctcactataagccggaattacaagctcagacaactctcctcaatttcacagtcacagaagatggtctagaagcccagctgctggcagaggttgtcagtattgaaaggccagatttggagaaacttaagttggtattgacaaagcaccaaaatgattttaaaattgagctcaagtatctggaagacgatctccttttgcgcctttctgcggcagagggaagctttctggatgacaccaaactggtagagagattggaggcaacaaagaccaccgtggcagagatagagcacaaggtaattgaagccaaagaaaatgaaagaaaaatcaacgaggcccgagaatgttacagaccagtggcagcaagagcatctcttctttattttgttattaatgacctccaaaaaatcaaccccctctaccaattctctttgaaggcttttaacgtgctgttccacagagcgatcgagcaggctgacaaggtggaagacatgcagggacgcatctctatcctgatggagagcatcacccatgctgtcttcctctacaccagccaggcgctgtttgagaaggacaagctcaccttcctgtcccagatggcttttcagattttgttgagaaagaaagagatagaccctcttgaattggatttcctgcttcgattcacagttgaacacactcatctgagtcccgttgacttcctaacttctcagtcatggagtgctatcaaggcaattgccgtcatggaagaatttcgaggcatagaccgagatgtggaaggatctgccaagcagtggaggaagtgggtagaatccgagtgtccagaaaaagaaaaattacctcaagaatggaagaagaaaagtttaatacagaagctgattcttctgagagcaatgcgccctgacagaatgacgtatgctctcaggaattttgtagaggaaaaactgggtgcgaagtatgtggagaggaccagattggacttagttaaagcattcgaagaaagcagcccagccacccccatattcttcatcctgtctccgggggtagatgcccttaaagacctggagattcttggtaaaagacttggctttacaattgactctggaaaattccacaatgtgtctttaggacaaggtcaggagacggtggcagaagtggccctggagaaagcttccaaaggaggacactgggtcatcctccagaatgttcatttggtagccaagtggctaggaaccttggagaagctccttgaaagattcagccaaggaagccacagagattacagggttttcatgagtgctgagtctgcacctacaccagatgagcatatcatccctcaaggactcctggaaaattccattaagatcactaatgaacccccaacagggatgctggccaatttgcatgccgccctgtacaactttgatcag

SEQ ID NO: 91312 - DNA, 1430 bp, Homo sapiens
  misc_feature (1)...(1430): n = a,t,c or g
cccacgcgtccgcggacgcgtgggcgcgcgggagctgggaggctgcgagatccctaccgcagtagccgcctctgccgccgcggagcttcccgaacctcttcagccgcccggagccgctcccggagcccggccgtagaggctgcaatcgcagccgggagcccgcagcccgcgccccgagcccgccgccgccctttgagggcgccccaggccgcgccatggtgaaggtgacgttcaactccgctctggcccagaaggaggccaagaaggacgagcccaagagcggcgaggaggcgctcatcatcccccccgacgccgtcgcggtggactgcaaggacccagatgatgtggtaccagttggccaaagaagagcctggtgttggtgcatgtgctttggactagcatttatgcttgcaggtgttattctaggaggagcatacttgtacaaatattttgcacttcaaccagatgacgtgtactactgtggaataaagtacatcaaagatgatgtcatcttaaatgagccctctgcagatgccccagctgctctctaccagacaattgaagaaaatattaaaatctttgaagaagaagaagttgaatttatcagtgtgcctgtcccagagtttgcagatagtgatcctgccaacattgttcatgactttaacaagaaacttacagcctatttagatcttaacctggataagtgctatgtgatccctctgaacacttccattgttatgccacccagaaacctactggagttacttattaacatcaaggctggaacctatttgcctcagtcctatctgattcatgagcacatggttattactgatcgcattgaaaacattgatcacctgggtttctttatttatcgactgtgtcatgacaaggaaacttacaaactgcaacgcagagaaactattaaaggtattcagaaacgtgaagccagcaattgtttcgcaattcggcattttgaaaacaaatttgccgtggaaactttaatttgttcttgaacagtcaagaaaaacattattgaggaaaattaatatcacagcataaccccaccctttacattttgtgcagtgattattttttaaagtcttctttcatgtaagtagcaaacagggctttactatcttttcatctcattaattctattaaaaccattaccttaaaatttttttctttcgaagtgtggtgtcttttatatttgaattagtaactgtatgaagtcatagataatagtacatgtcaccttaggtagtaggaagaattacaatttctttaaatcatttatctggatttttatgttttattagcattttcaagaagacggattatctagagaataatcatatatatgcatacgtaaaaatggaccacagtgacttatttggangttgtaagttgcctcctacctaagttgg

SEQ ID NO: 91313 - DNA, 937 bp, Homo sapiens
cccacgcgtccgctcaaagaccctccaagctctgatattctttaacttgatatgactctgcttcatttatttagcaaatactgactgaatacctactactcatcaggagcggggctgggtgccttcattttcttatttctcaaatgacagaaaataatacctgctctatctgattcatttatcctaatgagcttatagacaagaatatgctttagaagtccatcactatagaaatgcacagcagtattctcataataagagaatccctttctttaatttgttatgctaaaattttctctagcaattttgtcatcttgcattacatgcagctaaacaagcttttcttctttctgccaaaacagcatctattaacaacatgctggtaagacacagccaaaaccagaaaaatttttactttactttggccctcccctaacccaccttttcatctccaccatagatttttcccttccttataaaaaaggaaatattagcagccattttgtaaattctgcactccagcctgggcaacagagcgagactccatctcagagaaaaggggacatactgaggagaattaaacgggggcgcccggtttaaggggaccgtgcctaggacccccggtcgggcgaaataaaaatttttttttatggggccaccttaaattcagtcgcgcggcgccggtttttcaacagaagcaggcgggcggaaaattgcagtaatcaccgactacatgctatcaccaaactcgccggggacacaggcgcaagcgagccccacggggcccgggtcccaacaaaaaatggcctcggagaacctcttcaacggcgcaaccattccgctcgccgtgggcacaactcgcccggccgtctcaaactgtcatgcgcgcggactttcgagaaataggggtccgaacaccttctccatctatgaagcg

SEQ ID NO: 91314 - DNA, 403 bp, Homo sapiens
ccttatagcctctcaacttcttgcttgggatctccaacctcaccgcggctcgaaatggaccccaactgctcctgcgccactggtggctcctgcacctgcactggctcctgcaaatgcaaagagtgcaaatgcaactcctgcaagaagagtgagtgcggggccatctccaggaatctggggctgagccaagtcagaggcaggaaaccagagctgggcatggaggagtaggccaatgatccatttcccacatccccttccccagcaactgattcaggatcagagccagatctttagacgtgatggattcccaagtttcgttcttaaaatagacaaactgaggccaagagagtgcaccagcctgccaagcacagacatgacacctaaggactttcctcccctaagt

SEQ ID NO: 91315 - DNA, 747 bp, Homo sapiens
cactttcattttatgtaatgaagtaagaaaaaacactgtcaatcatgctatgccatgccaccagaatgaaagcattctgatttcagaaattctcaaatgttaaaagaaaatgggcattttataatttgtgaaatattagtgagttagagcagagcttgacggcactggccctaagggtccttcttcttcctttggaagaatgaaactgggggctatgcaattcagggaagaataaaggaaaaacaggtaattggcagaggaggttggctgacttagaggtatggaaaagacaaaacaaaggagggaaaaagagaggtatgtatgatggggaggagttcagagccactgaaaattttctctggccctaacaggaaaacgagttaccccacaagccagggttttatcatctggtacgtggagatatccatcagcattgtcattggttttcatttgtttgtttttaattctcaagtttaaaaaaaaatttaaaatttaaatgtgtctcaaccaccagaaactatagtgagatttctctgtaataaataggaaagaaggagactgatccagtccttgttaaaaaaaaaaaaaggaggaatctgattccccacttactttgttttttttttttttcacaaaggaacaggggcccttttatcctggtttaaggtgagtaaaatggagaaaggttctttggcccccaaccttctggctaaaaaaatggcccacgttttacaaaaaaagcgtgat

SEQ ID NO: 91316 - DNA, 5250 bp, Homo sapiens
gtgagcaacagggctgtttatttcacctgggtgcaggcgggctgagtccaaaaagagagtcagcaaagggtgattatcattagttcttataggtttgggataggtgtacaaagtacattctcaagggcgggggaagaatatatggtatcagttagcgtggggcaggaacaaatcacaatggtggaatgtcatcagttaaggctactttcacttcttttgtggatcttcagttgcttcaggtcatctggatgtacacgtgcaggtcacaggggatttgatggcttagcttggactcagaggcctgacactcctatccgatttgaaattggcaagatgttccttgggctggttggtctgaggacctgagatcataggtggatctcctcacagagtgagggtgaggacaggggactggtctcctgaaggagtcctcctgtcccgggtcttcggcaccaaatgtcacacgtgtccgtgtgaagagaccaccaaaaggctttgcgtgagcaataaagctgtttatttcacccgggcgaatggcagcaccgtgggaccctgccttgaccgcccccgcccttcggcggcctctcccagcagccggcaggctcttgggcgcgccaacagaggggcgcggctgcggctgtagtcgcagccagttcccgttccgggcccgcgaggcagccgccccggtcctgcccctccctcgcgctactgcgggagcagcgtcctcccgggccacggcgcttcccggccccggcgtccccggaccatggcgctctccgggctcttctctagctctcagcggctgcgaagtctgtaaacctggtggccaacatctcagttataagaaatgcacatctccgctcaaggtcccctgggacagtgcaaggaaagaaagaagcctgcggtgaaagtgacactgagtgattgtaagtcaggagactttccttcggtttctgcctttgatggcaagaggtggagattgtggcggcgattacagaaaacgtctgggaagacaagttgctgtttttatgggaatcgcaggcttggaagagacagaagcaattccagaaataaattggaaattgaagatttaaacaatgttgttttaaaatattctaacttcaaagaatgatgccagaaacttaaaaaggggctgcgcagagtagcaggggccctggagggcgcggcctgaatcctgattgcccttctgctgagaggacacacgcagctgaagatgaatttgggaaaagtagccgcttgctactttaactatggaagagcagggccacagtgagatggaaataatcccatcagagtctcacccccacattcaattactgaaaagcaatcgggaacttctggtcactcacatccgcaatactcagtgtctggtggacaacttgctgaagaatgactacttctcggccgaagatgcggagattgtgtgtgcctgccccacccagcctgacaaggtccgcaaaattctggacctggtacagagcaagggcgaggaggtgtccgagttcttcctctacttgctccagcaactcgcagatgcctacgtggacctcaggccttggctgctggagatcggcttctccccttccctgctcactcagagcaaagtcgtggtcaacactgacccagtgagcaggtatacccagcagctgcgacaccatctgggccgtgactccaagttcgtgctgtgctatgcccagaaggaggagctgctgctggaggagatctacatggacaccatcatggagctggttggcttcagcaatgagagcctgggcagcctgaacagcctggcctgcctcctggaccacaccaccggcatcctcaatgagcagggtgagaccatcttcatcctgggtgatgctggggtgggcaagtccatgctgctacagcggctgcagagcctctgggccacgggccggctagacgcaggggtcaaattcttcttccactttcgctgccgcatgttcagctgcttcaaggaaagtgacaggctgtgtctgcaggacctgctcttcaagcactactgctacccagagcgggaccccgaggaggtgtttgccttcctgctgcgcttcccccacgtggccctcttcaccttcgatggcctggacgagctgcactcggacttggacctgagccgcgtgcctgacagctcctgcccctgggagcctgcccaccccctggtcttgctggccaacctgctcagtgggaagctgctcaagggggctagcaagctgctcacagcccgcacaggcatcgaggtcccgcgccagttcctgcggaagaaggtgcttctccggggcttctcccccagccacctgcgcgcctatgccaggaggatgttccccgagcgggccctgcaggaccgcctgctgagccagctggaggccaaccccaacctctgcagcctgtgctctgtgcccctcttctgctggatcatcttccggtgcttccagcacttccgtgctgcctttgaaggctcaccacagctgcccgactgcacgatgaccctgacagatgtcttcctcctggtcactgaggtccatctgaacaggatgcagcccagcagcctggtgcagcggaacacacgcagcccagtggagaccctccacgccggccgggacactctgtgctcgctggggcaggtggcccaccggggcatggagaagagcctctttgtcttcacccaggaggaggtgcaggcctccgggctgcaggagagagacatgcagctgggcttcctgcgggctttgccggagctgggccccgggggtgaccagcagtcctatgagtttttccacctcaccctccaggccttctttacagccttcttcctcgtgctggacgacagggtgggcactcaggagctgctcaggttcttccaggagtggatgccccctgcgggggcagcgaccacgtcctgctatcctcccttcctcccgttccagtgcctgcagggcagtggtccggcgcgggaagacctcttcaagaacaaggatcacttccagttcaccaacctcttcctgtgcgggctgttgtccaaagccaaacagaaactcctgcggcatctggtgcccgcggcagccctgaggagaaagcgcaaggccctgtgggcacacctgttttccagcctgcggggctacctgaatagcctgccccgcgttcaggtcgaaagcttcaaccaggtgcaggccatgcccacgttcatctggatgctgcgctgcatctacgagacacagagccagaaggtggggcagctggcggccaggggcatctgcgccaactacctcaagctgacctactgcaacgcctgctcggccgactgcagcgccctctccttcgtcctgcatcacttccccaagcggctggccctagacctagacaacaacaatctcaacgactacggcgtgcgggagctgcagccctgcttcagccgcctcactgttctcagactcagcgtaaaccagatcactgacggtggggtaaaggtgctaagcgaagagctgaccaaatacaaaattgtgacctatttgggtttatacaacaaccagatcaccgatgtcggagccaggtacgtcaccaaaatcctggatgaatgcaaaggcctcacgcatcttaaactgggaaaaaacaaaataacaagtgaaggagggaagtatctcgccctggctgtgaagaacagcaaatcaatctctgaggttgggatgtggggcaatcaagttggggatgaaggagcaaaagccttcgcagaggctctgcggaaccaccccagcttgaccaccctgagtcttgcgtccaacggcatctccacagaaggaggaaagagccttgcgagggccctgcagcagaacacgtctctagaaatactgtggctgacccaaaatgaactcaacgatgaagtggcagagagtttggcagaaatgttgaaagtcaaccagacgttaaagcatttatggcttatccagaatcagatcacagctaaggggactgcccagctggcagatgcgttacagagcaacactggcataacagagatttgcctaaatggaaacctgataaaaccagaggaggccaaagtctatgaagatgagaagcggattatctgtttctgagaggatgctttcctgttcatggggtttttgccctggagcctcagcagcaaatgccactctgggcagtcttttgtgtcagtgtcttaaaggggcctgcgcaggcgggactatcaggagtccactgcctccatgatgcaagccagcttcctgtgcagaaggtctggtcggcaaactccctaagtacccgctacaattctgcagaaaaagaatgtgtcttgcgagctgttgtagttacagtaaatacactgtgaagagactttattgcctattataattatttttatctgaagctagaggaataaagctgtgagcaaacagaggaggccagcctcacctcattccaacacctgccatagggaccaacgggagcgagttggtcaccgctcttttcattgaagagttgaggatgtggcacaaagttggtgccaagcttcttgaataaaacgtgtttgatggattagtattatacctgaaatattttcttccttctcagcactttcccatgtattgatactggtcccacttcacagctggagacaccggagtatgtgcagtgtgggatttgactcctccaaggttttgtggaaagttaatgtcaaggaaaggatgcaccacgggcttttaattttaatcctggagtctcactgtctgctggcaaagatagagaatgccctcagctcttagctggtctaagaatgacgatgccttcaaaatgctgcttccactcagggcttctcctctgctaggctaccctcctctagaaggctgagtaccatgggctacagtgtctggccttgggaagaagtgattctgtccctccaaagaaatagggcatggcttgcccctgtggccctggcatccaaatggctgcttttgtctcccttacctcgtgaagaggggaagtctcttcctgcctcccaagcagctgaagggtgactaaacgggcgccaagactcaggggatcggctgggaactgggccagcagagcatgttggacaccccccaccatggtgggcttgtggtggctgctccatgagggtgggggtgatactactagatcacttgtcctcttgccagctcatttgttaataaaatactgaaaacactaaaaaaaaaa

SEQ ID NO: 91317 - DNA, 425 bp, Homo sapiens
aacatagttaataacataaggcataaaagaatgataaatttatgttagctcaaccatttactaagggtcaaggatgtcctcactgtttaaaaaaacttaaacgctagtaggaaagacagaaatacagcatctatttataataccttttgatacatgtgaaaattaagaagtttgtttcagtactttagaaatacaatgagggaatatccgatctagcctggtccaggaaaagggaagaagactgaggcagcaggaaaggctatcaggaagtaaaccctcagggaagtgtgaagacttaagcaggttaatgttaactggcagagaccaggtagataaagacatggctttatttatttttgttttactgtttcagatagcatgccaccagtagaaagaatattagaggttattatctacatgactat

SEQ ID NO: 91318 - DNA, 1634 bp, Homo sapiens
cggacgcgtgggtttttttttcgccggaaatcccggaagtgacagctttgggggtttgctgctggctctgactcccgtcctgcgatgggttgcgacgggggaacaatccccaagaggcatgaactggtgaaggggccgaagaaggttgagaaggtcgacaaagatgctgaattagtggcccaatggaactattgtactctaagtcaggaaatattaagacgaccaatagttgcctgtgaacttggcagactttataacaaagatgccgtcattgaatttctcttggacaaatctgcagaaaaggctcttgggaaggcagcatctcacattaaaagcattaagaatgtgacagagctgaagctttctgataatcctgcctgggaaggggataaaggaaacactaaaggtgacaagcacgatgacctccagcgggcgcgtttcatctgccccgttgtgggcctggagatgaacggccgacacaggttctgcttccttcggtgctgcggctgtgtgttttctgagcgagccttgaaagagataaaagcggaagtttgccacacgtgtggggctgccttccaggaggatgatgtcatcgtgctcaatggcaccaaggaggatgtggacgtgctgaagacaaggatggaggagagaaggctgagagcgaagctggaaaagaaaacaaagaaacccaaggcagcagagtctgtttcaaaaccagatgtcagtgaagaagccccagggccatcaaaagttaagacagggaagcctgaagaagccagccttgattctagagagaagaaaaccaacttggctcccaaaagcacagcaatgaatgagagctcttctggaaaagctgggaagcctccgtgtggagccacaaagaggtccatcgctgacagtgaagaatcggaggcctacaagtccctctttaccactcacagctccgccaagcgctccaaggaggagtctgcccactgggtcacccacacgtcctactgcttctgaagcccgcactgccaccgctcctgccccagaaggttgtttagtttccacgtaggcaggtcgctttgtgcctctgagtgcgctgctgtgtgttctctctatagttctgtgtcataaagctgtcctggccagccttcaagctggtgtggccactcttgatgtgaggcgtgtcggttccaggggggacatgggaggggctgcacagtggcccgaggtcatgcttgcttccacctgcaggtgcatttggtcctttccatggccaggaagccctgtgggctgcactttttatgcttgcagtaacaagagactccagagtcctcaccggtgcagagttggcacatattaattaactaaaattctaatgatcttgctaccagcaataaatcaagtaggccaagtgaaactgggctttaaaaaggatggatttcaaatacactgtgcccactagaagcttcgaagggcctcgtccctctgctacagccctgggaggagccaggatccttgttggtctagctaaatactgttaggggagtgtgccccatctcatcatttcgaagatagcagagtcatagttgggcacccagtgattgggttcaaaaataaagctggtctgcctcttctcaaaaaaaaaa

SEQ ID NO: 91319 - DNA, 2553 bp, Homo sapiens; identical to SEQ ID NO: 58665

SEQ ID NO: 91320 - DNA, 836 bp, Homo sapiens; identical to SEQ ID NO: 77228

SEQ ID NO: 91321 - DNA, 1977 bp, Homo sapiens
ttttttttttttcttttgaatggatctttttatttctaattttataagatgcaacatctcaccccgttgacacggttagtttgcatgcacacacagagcggccagccgccccgagcctgtgggcaggccagcagggtcagtagcaggtgccagctgtgtcggacatgaccagggacacgttgtacagggtgggtttaccggtggacttgtccacggtcctctcggtgaccctgttgggcagggcctcatgggccaccacgcaggtgtaggtctcccccgtgttccattcctcttcggacacggtcaggatgctgtgggcgaagtaccggcctggggcctggggctcaggcattggggcgctggtcacatacttctccggggacaagggctgccccctctgcatccactgcacgaagacgtccgcgggagagaagcccgtcaccaggcacgtgatggtggccgactcccgcaggttcagctgctcccgggctggtggcagcaagtagacatcgggcctgtgcagggccacccccttgggccgggagatggtctgcttcagtggcgagggcaggtctgtgtgggtcacggtgcacgtgaacctctccccggaattccagtcatcctcgcagatgctggcctcacccacggcgctgaaagtggcattggggtggctctcggagatgttggtgtgggttttcacagcttcgccattctggcgggtccaggagatggtcacgctgtcataggtggtcaggtctgtgaccaggcaggtcaacttggtggacttggtgaggaagatgctggcaaaggatggggggatggcgaagacccggatggctgtgtcttgatcggggacacacatggaggacgcattctgctggaaggtcaggcccctgtgatccacgcggcaggtgaacatgctctggctgagccagtcgctctctttgatggtcagtgtgctggtcaccttgtaggtcgtgggcccagactctttggcctcagcctgcacctggtccgtggtgacgccagaccccacctgcttcccctcgcgcagccaggacacctgaatctgccggggactgaaacccgtggcctggcagatgagcttggacttgcgggggttgccgaagaagccgtcgcggggtgggacgaagacgctcactttgggaggcagctcagcaatcactggaagaggcacgttcttttctttgttgccgttggggtgctggactttgcacaccacgtgttcgtctgtgccctgcatgacgtccttggaaggcagcagcacctgtgaggtggctgcgtacttgccccctctcaggactgatgggaagccccgggtgctgctgatgtcagagttgttcttgtatttccaggagaaagtgatggagtcgggaaggaagtcctgtgcgaggcagccaacggccacgctgctcgtatccgacggggaattctcacaggagacgagggggaaaagggttggggcggatgcactccctgaggagacggtgaccagggttccctggccccagtagtcaaaacacttatagcagctggtactactacaattgtcagcccttgcacagtaatacacagccgtgtcctcggctctcagactgttcatttgcagatacagcgtgttcttggcgttgtctctggagatggtgaatcggcccttcaccgacgcagcatatgctgtcgcataagaattcgctttgcttctaatacggccaatccactccagtcctttcccggaggcctggcggacccagtgcatagcagagccactgaaggtgaacccagaggctgcacaggagagtttcagggaccccccaggctggaccaagcctcccccagactccaccagctgcacctcacactggacaccttttacaatagcaacaaggaaaacccagctcagcccaaactccatggtgagtctcctgtattcagtgccgatcaccgagtggagacaac

SEQ ID NO: 91322 - DNA, 2340 bp, Homo sapiens; identical to SEQ ID NO: 58946

SEQ ID NO: 91323 - DNA, 610 bp, Homo sapiens
ataatcctttcctgaatcaataatttcattagagtctgagaaatgatgcttttctaattcttttgaattctcttctcttattagctggcattcttccgtaagagggctttctctcccaagctgggcaactaggttatcatgaaatacagttcttactgtaaagacaggataaatgctacattccttccctgtaatttctaattttcaaagtaagaaatggttttaacagctacctctaaagatgacaagttaatttttctctggctttctcattttttagtgtcattttggaattatggatttctatggatttaatgtgttttcataaacacaattattatgtttcttggggctcaacttaccacaactttgacaagttataaccccttcctgctagctgctgtgtccttttaaaaagacacacattcatctttgaaagctttcttgttttttaatacaataagatgtcccatgctcaacttcctgccctgaacctggaataagccgttttccaagaagcctgtatggttgttacaggtgttcattactacttggatgacatttttttctcagtcatttcagtgaaaaatgagcaatgaatcaacttgtg

SEQ ID NO: 91324 - DNA, 3487 bp, Homo sapiens
ggcacgaggtggcagctgcctccccaagacaggctcactcaccatgaccaagctgagcgcccaagtcaaaggctctctcaacatcaccaccccggggctgcagatatggaggatcgaggccatgcagatggtgcctgttccttccagcacctttggaagcttcttcgatggtgactgctacatcatcctggctatccacaagacagccagcagcctgtcctatgacatccactactggattggccaggactcatccctggatgagcagggggcagctgccatctacaccacacagatggatgacttcctgaagggccgggctgtgcagcaccgcgaggtccagggcaacgagagcgaggccttccgaggctacttcaagcaaggccttgtgatccggaaagggggcgtggcttctggcatgaagcacgtggagaccaactcctatgacgtccagaggctgctgcatgtcaagggcaagaggaacgtggtagctggagaggtagagatgtcctggaagagtttcaaccgaggggatgttttcctcctggaccttgggaagcttatcatccagtggaatggaccggaaagcacccgtatggagagactcaggggcatgactctggccaaggagatccgagaccaggagcggggagggcgcacctatgtaggcgtggtggacggagagaatgaattggcatccccgaagctgatggaggtgatgaaccacgtgctgggcaagcgcagggagctgaaggcggccgtgcccgacacggtggtggagccggcactcaaggctgcactcaaactgtaccatgtgtctgactccgaggggaatctggtggtgagggaagtcgccacacggccactgacacaggacctgctcagtcacgaggactgttacatcctggaccaggggggcctgaagatctacgtgtggaaagggaagaaagccaatgagcaggagaagaagggagccatgagccatgcgctgaacttcatcaaagccaagcagtacccaccaagcacacaggtggaggtgcagaatgatggggctgagtcggccgtctttcagcagctcttccagaagtggacagcgtccaaccggacctcaggcctaggcaaaacccacactgtgggctccgtggccaaagtggaacaggtgaagttcgatgccacatccatgcatgtcaagcctcaggtggctgcccagcagaagatggtagatgatgggagtggggaagtgcaggtgtggcgcattgagaacctagagctggtacctgtggattccaagtggctaggccacttctatgggggcgactgctacctgctgctctacacctacctcatcggcgagaagcagcattacctgctctacgtttggcagggcagccaggccagccaagatgaaattacagcatcagcttatcaagccgtcatcctggaccagaagtacaatggtgaaccagtccagatccgggtcccaatgggcaaggagccacctcatcttatgtccatcttcaagggacgcatggtggtctaccagggaggcacctcccgaactaacaacttggagaccgggccctccacacggctgttccaggtccagggaactggcgccaacaacaccaaggcctttgaggtcccagcgcgggccaatttcctcaattccaatgatgtctttgtcctcaagacccagtcttgctgctatctatggtgtgggaagggttgtagcggggacgagcgggagatggccaagatggttgctgacaccatctcccggacggagaagcaagtggtggtggaagggcaggagccagccaacttctggatggccctgggtgggaaggccccctatgccaacaccaagagactacaggaagaaaacctggtcatcaccccccggctctttgagtgttccaacaagactgggcgcttcctggccacagagatccctgacttcaatcaggatgacttggaagaggatgatgtgttcctactagatgtctgggaccaggtcttcttctggattgggaaacatgccaacgaggaggagaagaaggccgcagcaaccactgcacaggaatacctcaagacccatcccagcgggcgtgaccctgagacccccatcattgtggtgaagcagggacacgagccccccaccttcacaggctggttcctggcttgggatcccttcaagtggagtaacaccaaatcctatgaggacctgaaggcggagcttggcaactctagggactggagccagatcactgctgaggtcacaagccccaaagtggacgtgttcaatgctaacagcaacctcagttctgggcctctgcccatcttccccctggagcagctagtgaacaagcctgtagaggagctccccgagggtgtggaccccagcaggaaggaggaacacctgtccattgaagatttcactcaggcctttgggatgactccagctgccttctctgctctgcctcgatggaagcaacaaaacctcaagaaagaaaaaggactattttgagaagagtagctgtggttgtaaagcagtaccctaccctgattgtagggtctcattttctcaccgatattagtcctacaccaattgaagtgaaattttgcagatgtgcctatgagcacaaacttctgtggcaaatgccagttttgtttaataatgtacctattccttcagaaagatgataccccaaaaggagcctatggtcctcatttcaacttctaaggtcgctagattgtttctatcctgaggtattgcatcaattttaatactcctatagttttctcttcttagaagagcacaaacactccatggaacattagagttctgaggcactaccctagcttgtcctctatcatgactcatttttatctatggcaggtaggctgaagcactttgcaggtttacatcttccccagagtaacagcttttccttttcacatatactttccttactgccttactcagtgggtaagttaaagggctgaaggagagttgaatggtccacaagactaccctcttaagaggtttcacaaattccaaacagtaccagtgagagcagcacttccactggggctaggcttgagacctaaaggcaagtatgaaatgcatatgctacttcactccctctcccaacccttaataatgaggcaaagcaagagcctagtgaaggccaatgctaggtttacaaacttacccagaagcctctgcaaagcttcacaggctcctcagatgaaaataacaggaatcaatggggactacggccagacactggtttgccattctgttccttttaagaaagtaacagtgctgcaagggaagtccatgtcagaaagccaacagaaggtgattttccacaactttgaacaggttgttacaagtatcagcaagaatgtgtccttttcagaaataacagtcaaatcaaagaaggttaataaaggctttaatttcatacacacaaaaaaaaaa

SEQ ID NO: 91325 - DNA, 459 bp, Homo sapiens
  misc_feature (1)...(459): n = a,t,c or g
ggatgtnattggactggagcgtctcaccngcatacgccaagcttggcacgaggcagaaggaagagaataaataaccgtgctgaatattatgtatggtgaaaccctccccccttcctttatcaagggaatattcctagtgttcattgttcattggtcctttaagagagagctttagcttttacttgagggttgtaagcacattagaggaataattccctttggatactatacagaaggagccacctgcaaaatgttgatgctgttattgaagtctcaagtggaatcagctttcaaaaaattagatattagatacatccgatataatttgcaatgtgtaattatactaatgtgcatatagttgtctgttgctttacatgttgcctacttgagtttttttcttttcttgtgcatttctcatcattgaaatggttcctgagtagaatctttttaaaataagct

SEQ ID NO: 91326 - DNA, 701 bp, Homo sapiens
  misc_feature (1)...(701): n = a,t,c or g
gagggaactcctacaaccaccgctcgctcgccgcctacccctacatgagccactcgcagcacagcccttacctccagtcctaccacaacagcagcgcagccgcccagacgcgaggggacgacacagatcaacaaaaaactacagtgattgaaaacggggaaatcaggttcaatggaaaagggaaaaagattcggaagcctcggaccatttattccagcctgcagctccaggctttaaaccatcgctttcagcagacacagtatctggcccttccagagagagccgaactggcagcttccttaggactgacacaaacacaggtgaagatatggtttcagaacaaacgctctaagtttaagaaactgctgaagcagggcagtaatcctcatgagagcgaccccctccagggctcggcggccctgtcgccacgctcgccagcgctgcctccagtctgggacgtttctgcctcggccaagggtgtcagtatgccccccaacagctacatgcctggctattctcactggtactcctctccacaccaggacacgatgcagagaccacagatgatgtgagttgcccaagggaacaccctagggaaacgtctgaacaaggaaaagaggatccgggaacctgcttgtatctgcgaaaaaggagccaaaggagcaaggtttaggaagagttcttaaggtttggncaagagg

SEQ ID NO: 91327 - DNA, 1587 bp, Homo sapiens
aaattgagatgcttcttcatcatcagattctcagccctgacaacatacagaatcacctggtgatctccaaaaaaaaggctggctgggcatggtggctcatgcctgtaatgtcagcactttgggattacaggtgtgagccaccgcgctcagccaacaaacaactttcaaatacctttctcttcactccaaaatttaccattgttttgcttaaggtctcacctcccatgtaggatggaaaacattctttcatttaaggcccccctcttcctcctggccttggagcctcctaatgtccaggaccggcacctctgtcatcacattgtcagctgcagagataccctacctgctgtcagaaccatgcacaattaatttgcttacaaacatggaaaacaaaggcctggaatcatgctctatatactgagttgagcaatacaagatggaagcagaaacatatttaacatcgaccatttgcattgtcttaattatcattcattttttcatgcatcaaggtggtagaaagggggtcatggtgtctgccttcagagaccctccactctaaatgaagaaaagtccaatgaagcaaacacgtgacataaagtaaaataattgctactgtgaataagagttgggtattgccacaaagcatacctatgagaatttgaaatagggaagtttcctcatgaaaagttttgattttggaggaagaaacagaattaaagaaactaaagtcaggagatatttgggcctttgaagtagaagagaggcatggggttggcttctgtccacttgctgagcaacttgttttccttttcacagtggatatgaccttggatgccgacacagccaacaacttcctcctcatttctgacgacctcaggagcgtccgaagtgggctcatcacacagaatcggcaagaccttgccgagagatttgacgtgtccgtttgcatcctgggctcccctcgctttacctgtggccgccactactgggaggtggacgtgggaacaagcacagaatgggacctgggagtctgcagagaatctgttcactgcaaagggaagatccagctgaccacagagcttggattctggactgtgagtttgagggatggaagccgcctctctgccagcacggtgccgctgactttcctcttagtagaccgcaagttacagcgagtggggatttttctggatatgggcatgcagaacgtttccttttttgatgctgaaagtggttcccatgtctatacattcaggagcgtctctgctgaggagccactgcgcccatttttggctccttcaattccacctaatggtgatcaaggtgtcttgagcatctgtcctttgatgaactcaggcactactgatgctccagtccgtcctggggaggccaaataagccgccacatttactgtgttccttggggtcaccttggtaacagagaaggggtcctcacttgcccactctttggaatccaccttccattgatcttctgggggaactttaatgcaggaactcaggttccccataagaaagaccagaatctgtgaaaatgacagcaagcatgttcaacctgctatgaactttg

SEQ ID NO: 91328 - DNA, 7315 bp, Homo sapiens
gccaacttcacacttcctactctatgaggagctgagaattgactttctgtcttcttcccaatacctgtagatggccgagacagaggttcaaacccatccctggaaagtacaagtagtgagctgagcacaagtacgtcagagggaagtctgagtgccatgtctggccggaatgagctgcacagtagattgcacccccatcctcaaagttcactcatccccatgatgttctccccacctgagtcactgctggcatcctgcatccttcgcgggaacttcgcagaagcccatcaggtgctgttcacgttcaacctgaagtcctcacccagttcaggggaactgatgttcatggagcgctaccaggaagtgatccaagaactggcccaagtagagcacaagattgaaaaccagaactcagatgcgggtagcagcaccattcggagaactggcagtggccgctcaactctacaggccattggcagcgctgcagcagcaggaatggtgttttactctatctctgacgtgactgacaagctgctcaacacctctggagaccccatccccatgctccaggaggacttttggataagcacggctctagtggagcccactgctcccctgagagaggttctggaagacctcagtccccctgccatggctgcatttgacctagcttgctctcagtgccagctctggaaaacctgcaagcagcttttggagacagccgaacggcgtttgaatagtagccttgaaaggcggggtcgacggatagaccacgtactcctaaatgctgatggcattcgaggttttccagttgttcttcagcaaatcagtaagagtctcaattatctgcttatgtcagccagtcaaaccaaatcagagagtgtggaagaaaagggaggaggccctccacggtgcagcatcactgaactgcttcagatgtgctggcccagcctaagcgaggactgtgttgccagccacaccaccctctcccagcagctagatcaggtccttcagtcactgagagaggcactagagctgccagagcccaggactcctccactgtcttccctggtggagcaggcagcccagaaagctccagaggcagaggcccaccctgtgcagatccagactcagctcctccagaagaacctgggcaaacagaccccatcaggcagcaggcagatggactacttgggcaccttcttcagttactgcagcacccttgctgcagttctccttcaaagtttgagctctgagcctgatcatgtggaggtcaaggtaggaaatccctttgttctgctgcaacagagctcttcccaactggtgtcacatctcctgtttgagagacaagttcccccagagagactggcagcccttctggcccaagagaatctcagcctaagtgtgccacaggtcatcgtcagctgctgctgtgagccccttgctctttgctcatcccggcaaagccagcagacctcctccctcctgactcgtctgggtactctggcccagctacacgcctctcactgcctggatgacctcccactttctacaccgagctccccgaggacaactgagaaccctacattggaaagaaagccctactcctccccaagggactcatcactcccagccctcacctcctctgccttggcctttcttaagtcacgctcaaagctcctagctacggtggcctgcctgggggcttccccgaggttaaaggtcagcaaacccagcttgtcatggaaggaacttcgtggccgcagggaggtgcctctggctgcagagcaggtagcccgggagtgtgagcgccttctggaacaattccctctgtttgaggccttcctcctggctgcctgggagcccctgcgagggtctttgcagcaggggcagagtctggcagtgaatctctgtggttgggccagtctttctaccgttctcctgggcctacattctcccattgccctagatgtactgagtgaggcttttgaggaatccttggtggccagagattggtcccgggcccttcagctcactgaagtgtacgggcgagatgtggacgatttgagcagcataaaggatgcagtcctgagctgtgctgtggcatgtgacaaagaaggttggcaatacctgtttcccgtgaaggatgcatctctgagaagtcggctggccctacagtttgtggacaggtggcccctggagtcatgcctggagattctggcctactgcatttcagacacggctgtccaagaaggactaaagtgtgagctacagaggaagctggcggagctgcaggtgtatcagaagattctgggtttgcagtctcccccagtgtggtgtgactggcagaccttgaggagctgttgtgttgaggacccatcaactgtcatgaacatgattctagaagcacaggagtatgaactgtgtgaagagtggggctgcctgtaccccattccaagagaacatttaatcagccttcatcaaaagcatcttctccaccttctagaaagaagagatcatgacaaggctctgcaactcctgcgaagaatccctgaccccaccatgtgccttgaagtgacagagcaatccctcgaccagcacactagcttggccacttctcacttcttggccaactacctcaccacccacttctatggacaactgactgctgtccgacaccgtgaaatccaggcgctgtatgtgggatccaagattctgctgaccctgcctgagcagcaccgggccagctattcccacttgtcctctaaccccctgttcatgctggagcagctgcttatgaacatgaaggtggattgggccactgtggctgtgcagactctccagcagctgctggttggacaggagattggcttcactatggacgaggtggactcactgctttccagatacgcagagaaagccctggactttccataccctcagagggagaaacgatcagattctgtgattcacctccaagaaattgtccaccaggctgcagatcccgagaccctccctagatcaccatcagcagagttctctcctgctgctcctcctggtatctccagtatacattcccctagtctaagggaaaggagtttcccaccaacccagccctcacaggaatttgtgcccccagcgacaccccctgccaggcaccagtgggtaccggatgagactgagagtatctgcatggtctgctgcagggagcacttcaccatgtttaacaggcgtcatcattgtcgccgctgtggccggctagtgtgcagctcctgctccactaagaaaatggtggttgaaggctgcagagagaaccctgctcgtgtgtgtgatcagtgctatagttactgcaacaaagatgtaccagaggagccttcagaaaaaccagaagctctagacagctccaagagtgaaagccctccatactcgtttgtggtgagagtccccaaagcagatgaggtggaatggattttggatctcaaagaggaggaaaatgagctggtgcggagtgaattttactatgagcaggcccccagcgcctccttgtgcattgccatcctgaatctgcaccgggacagcattgcctgtggtcaccagctgattgagcactgctgcaggctctccaagggcctcaccaacccagaggtggatgccgggctgctcacggacatcatgaagcagctgctgttcagcgccaagatgatgttcgtcaaagccggccagagccaagacttggctctttgtgacagctacatcagcaaggtagatgtgctgaatattttagttgctgctgcctatcgccacgtgccatctttggatcagatcttgcagccagctgcagtaaccaggctaaggaaccagcttttggaagccgagtactaccaactgggcgttgaggtctccacaaagactgggcttgataccaccggggcgtggcatgcttggggcatggcctgcctcaaagccgggaacctcactgctgcacgggagaagttcagtcgctgtctgaagcccccatttgacctcaatcagctgaatcatggctcaaggctggtgcaggatgtggttgagtacctagagtccacagtgaggccctttgtatccttgcaagatgacgattactttgccaccctgagggaactggaagctacccttcggacgcagagcctttctctggcagtgattcctgaagggaaaatcatgaacaacacctactaccaggaatgcctcttctacctgcacaactatagcaccaacctggccatcatcagcttctacgtgaggcacagctgcctgcgggaagctcttctgcaccttctcaacaaggagagtcctccagaagtttttatagaaggcattttccaaccaagctataaaagtgggaagctacacactttggagaacttgctagaatccattgatccaaccttggagagctggggaaagtacttgattgctgcctgccaacatttacagaagaagaactactaccacattctgtatgagctgcagcagtttatgaaggaccaagttcgggccgccatgacctgtattcggttcttcagtcacaaagcaaagtcatatacagaactgggagagaagctctcatggctacttaaggccaaggaccacctgaagatctacctccaagaaacatcccgcagctctggaaggaagaaaaccacattcttcagaaagaagatgactgcagctgatgtgtcaaggcacatgaacacacttcagctgcagatggaagtgaccaggttcttgcatcggtgcgaaagtgctgggacctctcaaatcaccactttgcctctgccaaccctgtttggaaataaccacatgaaaatggatgttgcctgcaaggtcatgctgggagggaaaaatgtagaagatggttttggaattgctttccgtgttctgcaggacttccagctggatgctgccatgacctactgcagagctgcccgccagttggtggagaaagagaagtacagtgagatccagcaactgctcaaatgtgtcagtgagtcaggcatggcagccaaaagtgacggggacaccatcctcctcaactgcctggaagcgttcaagagaattccgccccagtgctgtttctgttctgcacaggagctggagggcctgatccaggcaatacacaatgatgacaacaaggttcgggcctacctgatatgttgcaaactgcgttctgcctacttgattgctgtgaagcaagaacactcacgggccacagcccttgtccagcaggtgcagcaggccgccaagagcagcggggatgcagtagtgcaagacatctgtgcccagtggcttctgacaagccacccccggggtgcccatggcccaggctccaggaagtgaccttgggcagtggggccaggaacacgtggcctgagagctgggcaacagcagtgatggcgatgccctccacctctttcctccagtggagtgggacttctctggctctgccctaggttggaaagagttggattggaccctacttgccttcccgggcaaggataggacctttcacgcaagtgccatgtttctctaaaattgtggaatctatgtgtgtttgtctggagatggccagttctttctacctcagagtgagtgagtgagtatgtgtgcacacacgtgtgcattgtttcctgtgcgctgatgtttacgcccaagcatttctgaacaaatgaaactcttctccatttaaaagaggcactttactttggacttgccactctgaaaaccttccctgcgttttggttcttgacccgggttgtcctgtttgtatagtcccccctctgtgggacgtgctttagtagctcctcttacctaggaggggcttttacagaggaattaggaggcaacaccaaaagggattgcctcttttccttccttcccattccaaaaatttcaggaggatgggctttggggggcaagtggctacctggtgggaattaaacctgttttccaggtgtctcttctcccaagcacaagaagtcctggagtctttggaaggtagtctgaatagaagggttttcaggtgcaggcatctgaaagctgtgggtatgtgtataaatgatcaggtctgtgaggctaacacgggcaagagggaaagaaaggctaaccatccaaacagggatacaggggaggcggtggggggtggtggggggagcgggtgctcacaagcacagagctgcctgttgtgaatgtccctgctgcaaagttggtgggtgagagaatgggacttcctctttgagagtctggggagagaaaaggtggccaggatcctaggactgaatgactcgattttacctatttgagctgcagtcctgtttgcgctccttgaattggttaggaagctgcttccttttccctcctgcttcccttcagtctcttcaggaccacaggatggatatgcagacatgtggggtcattgggaagggagtgcgcttcttttctctgtcttagaaaagggagtcaagggttggctttggaattgggcctctggacagagtcagaatgagggaataatgaataggtcacatctggttggtggaaaactaggtgaagtgcttctttaatatgcactgtcttgtcttcccacgcaagatgtgacaatgtttgagaaaaggtgtgtcatactcagtgacttcaatttgcaaatgtggggcctaaagaaagctctgcagctctgaacctctcactggccagagctcagcctattggtcccatccatgatgctgagacaaacagaaactggaagctgaagtcagtgtctctggtgctcagaaaccctgtggatttccctctgaaccaagatttttagtagtaaaataaacaactcatggacatctgtcagatgagaagttttggtcctgttagagaggagaaagactgtaatgaaactactagacccatttgggctaaagtttggcttttcctttcttgagtcatagaacatatccatctcccaggaaatgtccttctctgggcgtctgcttgcccttctgagtctgccttttttgcactgaacataagcactttatactaatggggtcacaaatcttgcagcccttaatttgggataagaccagattttcctgacattttcctctaactcattgaactatcaaattataggcaaccactgactagactgatatgagatgaggctaaaagcctttgaacaccacgctgtagtctccaacagaaaaacaccaccaaaacagatacccatgttgaggggttgaatgttttactacaaacaagccacaataaagtgtctatcaacatg

SEQ ID NO: 91329 - DNA, 1336 bp, Homo sapiens
  misc_feature (1)...(1336): n = a,t,c or g
gcggccgctttcgccagtccgtccggccgttccgcattaggtccgggataactaggtggagtaggtgtgcggcccgccgccggacagcccgctcgctgtttctttaagcccccgcctgcgtcttcacggccctctcccgttctgctggaaagctgacgtggggcaatccgttcagaccctccatggagaagtttgggatgaatttcgggggcggcccgagcaagaaggacttgcttggagactatagagacccagaagaagcagcttctccagtaccaggcacggctcaaggatgtggtccgtgcctataaaagcctgctgaaggagaaagaggcattagaggccagcatcaaggtgctgtcggtatcccacgaggcagatgtgggcctcgcaggtgtccagctttccaggcctcaccttttcctgactctgtggatgaccggtgctccactcacagcgaggatagcacttgggaccgccactagcttggatacctgcggccagtctcaccagcaccaagggtgagtttggggtagaagatgacagaccggcccgtggaccaccacctccaaagtccgaagaggccagttggtccgagagtggcgttagcagtagcagtggggatgggccatttgcaggtggggaggtggacaaaagactgcaccagctgaagactcagttggctactttgaccagttctttggctacagtcactcaggagaagtcccgcatggaggcttcttacttggctgacaagaaaaagatgaaacaggacttagaggatgccagtaacaaggcggaggaggagagggcccgcctggagggagaattgaaggggctgcaggagcaaatagcagaaaccaaagcccggcttatcacgcagcagcatgatcgggcccaagagcagagtgaccatgccttgatgctgcgtgagctccagaagctgctgcaggaggagaggacccagcgccaggacttggagcttaggttagaagagacccgagaagccttggcaggacgagcatatgcagctgaacagatggaaggatttgaactgcagaccaagcagctgacccgtgaggtggaggagctgaaaagtgaactgcaggccattcgagatgagaagaatcagccagatccccggctgcaagaacttcaggaagaggctgcccgccttaagagccatttccaggctcagttacagcaggaaatgagaaaggtaattatccacatctctttcaaacatcagccattgacctgaagtgagaaatatnnnnntttttcctcgtgccaagatgagcgtaatcatattcaagacgggtntcaattccggccc

SEQ ID NO: 91330 - DNA, 491 bp, Homo sapiens
  misc_feature (1)...(491): n = a,t,c or g
aggctnccaggatgccggcgtttgaganngatttaagctgcgtacgccncgcttggnncgaggaaagactattatgttggccccatacgtaaactgagtcactttgctcatagacttggggttccgtagacaactgtctgaccatcaaagctgaccaagaatgatttgttttattcttagttttagctgctccccataaacttcagattaggataaaagaggctttttaatggtgatgctaattcattttgtatggcaaattttctccagctatttagatcccaggtgtttccactttaatgttgatcttgaagaaatcagagaagtcgtatcaaagtaacctgattttacagttccttccctaataaatgactgactgatgggtgaataaataatgcagagtcaagtgaaatattttgcaattatgatatcagaagcacaaagaaaagattgaaaaccatatcatggaaacagtagagattttcaggaaa

SEQ ID NO: 91331 - DNA, 3773 bp, Homo sapiens; identical to SEQ ID NO: 59904

SEQ ID NO: 91332 - DNA, 470 bp, Homo sapiens
  misc_feature (1)...(470): n = a,t,c or g
cagggctgggncctaggtagccagtanccncatcacgcctagcttgggacgaggagggtgatgcccataagccactctaacttcctgcactccctttcatttctctgtggggctcaccgatgagtgagtatatttccagaacatcatttctgacatcatccaaatcctctaaagcagccttcctttaaaaactccaaccctggaatctaatctgcatttttggaacgtttgcaatatgctgaagtcagagctactccctttgctgtgccccacgtgcctgggcaccagcccctcggctccaccacctgatgtgcaagtcatgtcagtgtcctcccaagattcctttcacttccccaacttggtgcccaagggggatctgcactgggtctagtgcagcatcccccctaacgtgctttctacaaaagggaattggcagcaatgctaggcaaggcgattcagaatcagcgact

SEQ ID NO: 91333 - DNA, 472 bp, Homo sapiens
  misc_feature (1)...(472): n = a,t,c or g
cttcgatcgacgtcactagnccagngcggnggaattcgtgcctactactgtcgctctcagtcctcttctcagagaaaggcaaagtaacctttattcaaactggaattttctcaagctggaaggcaagtttgttatgggaggagagaatgccaatgggtcagccagaatccaaggagggctgcactttgcggaatgctctgctccctgaccacactagggcctccccgtccactgtccatatccgttttgagagcttctgagcatctctaggttaatgctttttgcaggctgtttagcatttctcctgtgatgaggctgtcctgctctctgctggcattcgggaccactttagctgggaaggatcatttccttcccattagtgaaagggagcacagctttcctgttttattttttccctctcttcgtaatccttaatgtattcactcaattactagtggtactattattnttn

SEQ ID NO: 91334 - DNA, 2811 bp, Homo sapiens
ccagtgtggtggaattcgtccgcggtggtggcggtgcaagagagctgagggaggcgcgagggcgcggagttccaggtcgagcagttaggccgcgagcgactgcggcgccgagccgatgagtaacccgaagcccctagaggagtggtcacctgcctgagggcacttctgtcccaccagcatcagaccaggccgcaccgagtccccggcaccatgtttgggaagaggaagaagcgggtggagatctccgcgccgtccaacttcgagcaccgcgtgcacacgggcttcgaccagcacgagcagaagttcacggggctgccccgccagtggcagagcctgatcgaggagtcggctcgccggcccaagcccctcgtcgaccccgcctgcatcacctccatccagcccggggcccccaagaccatcgtgcggggcagcaaaggtgccaaagatggggccctcacgctgctgctggacgagtttgagaacatgtcggtgacacgctccaactccctgcggagagacagcccgccgccgcccgcccgtgcccgccaggaaaatgggatgccagaggagccggccaccacggccagagggggcccagggaaggcaggcagccgaggccggttcgccggtcacagcgaggcgggtggcggcagtggtgacaggcgacgggcggggccagagaagaggcccaagtcttccagggagggctcagggggtccccaggagtcctcccgggacaaacgccccctctccgggcctgatgtcggcaccccccagcctgctggtctggccagtggggcgaaactggcagctggccggccctttaacacctacccgagggctgacacggaccacccatcccggggtgcccagggggagcctcatgacgtggcccctaacgggccatcagcggggggcctggccatcccccagtcctcctcctcctcctcccggcctcccacccgagcccgaggtgcccccagccctggagtgctgggaccccacgcctcagagccccagctggcccctccagcctgcacccccgccgcccctgctgttcctgggccccctggcccccgctcaccacagcgggagccacagcgagtatcccatgagcagttccgggctgccctgcagctggtggtggacccaggcgacccccgctcctacctggacaacttcatcaagattggcgagggctccacgggcatcgtgtgcatcgccaccgtgcgcagctcgggcaagctggtggccgtcaagaagatggacctgcgcaagcagcagaggcgcgagctgctcttcaacgaggtggtaatcatgagggactaccagcacgagaatgtggtggagatgtacaacagctacctggtgggggacgagctctgggtggtcatggagttcctggaaggaggcgccctcaccgacatcgtcacccacaccaggatgaacgaggagcagatcgcggccgtgtgccttgcagtgctgcaggccctgtcggtgctccacgcccagggcgtcatccaccgggacatcaagagcgactcgatcctgctgacccatgatggcagggtgaagctgtcagactttgggttctgcgcccaggtgagcaaggaagtgccccgaaggaagtcgctggtcggcacgccctactggatggccccagagctcatctcccgccttccctacgggccagaggtagacatctggtcgctggggataatggtgattgagatggtggacggagagcccccctacttcaacgagccacccctcaaagccatgaagatgattcgggacaacctgccaccccgactgaagaacctgcacaaggtgtcgccatccctgaagggcttcctggaccgcctgctggtgcgagaccctgcccagcgggccacggcagccgagctgctgaagcacccattcctggccaaggcagggccgcctgccagcatcgtgcccctcatgcgccagaaccgcaccagatgaggcccagcgcccttcccctcaaccaaagagccccccgggtcacccccgccccactgaggccagtagggggccaggcctcccactcctcccagcccgggagatgctccgcgtggcaccaccctccttgctgggggtagatgagaccctactactgaactccagttttgatctcgtgacttttagaaaaacacagggactcgtgggagcaagcgaggctcccaggacccccaccctctgggacaggccctcccccatgttcttctgtctccaggaagggcagcggccctcccatcactggaagtctgcagtgggggtcgctgggggtggagagaacactaagaggtgaacatgtatgagtgtgtgcacgcgtgtgagtgtgcatgtgtgtgtgtgtgcaaaggtccagccaccccgtcctccagcccgcaaggggtgtctggcgccttgcctgacacccagccccctctccccctgagccattgtgggggtcgatcatgaatgtccgaagagtggccttttcccgtagccctgcgccccctttctgtggctggatggggagacaggtcagggccccccaccctctccagcccctgcagcaaatgactactgcacctggacagcctcctcttttctagaagtctatttatattgtcattttataacactctagcccctgcccttattgggggacagatggtccctgtcctgcggggtggccctggcagaaccactgcctgaagaaccaggttcctgcccggtcagcgcagccccagcccgcccacccctgcctcgagttagttttacaattaaaacattgtcttgttt

SEQ ID NO: 91335 - DNA, 470 bp, Homo sapiens
  misc_feature (1)...(470): n = a,t,c or g
tgaaagtanaggagnanngaaatcgagaccattcgacagcgtcgnggaattcgctttaaatcatactcctttaaactagatcctacaagtggtatcactatacctatcctagccaccacaaagaagagagcagattaagtgcagtaaaatacattagtttattggatttgttcattgcaagatagtaagtgattacagttcattctgaagtgggtgctgatctgtcctcaaagacagcacctgagctaagcaaacttggcaagtccttctctaccttcttacctataaatgtgatgagtaacacttgccttgcatgcttgagtgaagaggaagactttttttgtccaaatagagagaatagcttctcatttaagatcatgaaggcccagtttccatttcttcttctccctgttatcaaatgtaaagtgtgaaaattaaagataaactatgtccagtgtttggtatacagn

SEQ ID NO: 91336 - DNA, 1999 bp, Homo sapiens
ttttttttttttggtttttattgattctttttaagattgaaacagactattacaacaatatttgagatttcacagagaactgcatgcttttgttattaaaagacttttgttgaaaaatttgacctttacctcttatgaacgaaagaaatatagaggtttcaagcatttttgccagcacagagtcattcacaacaaccttctagatgcttattttccaccttttcctacagaaggtaatattcagttaccagaaggccatctccaccactgaatgattcaaagcttcagagctcaaaagtgatcagaactcacaaattagcataattagtccaaagcttgatttaaatgtttgaagaacagcaaacatcaaataatataataccaaatagaatattatagtctctatgaggtaataactcatcagctacaaccacctaaaactgaaattttctgtacttagtttctattagtacaacaccttcattcttaatgcttcttagggcatcacaggttttagaaattaatgtatttttagcattccacagtaatgatcactttcaaaaactgcaatatacatctgcatgttacactgacatacaacacataagtattttgtcacacatcaacttttagcctcaaataatagaatacaaaaagctacactggacataacaccacagaacttttgaatatccccttttcccaattgttaacaggtagtactttttttctaaagagaaagtgatgaaaaatccaaaatttctgcatccagtgtttgactccaactttctactttatcgtctcctggtaccaccatatcctgatgcagttctggttttcgtgtctgagtttgaacataccgaatagctgcccgagcctccatgaaggggtgagtaagccctattccacgtgccagggtaggagggaggataggacgggtagtaccacgagtctgagaagggtgttgccgctctattgctgccaaacaaatatcctagtattccaccagttcccaagcctgtccagaaccctggtcctgaattttcatatccttgttgtcctgtaaaagcactgccaaaaccagaagttgcaccatggccagtattctgtggtcctgtgaactcagacttaaagcctgggggaggaggtcctgctgagttggtgaatctctggtaacggtgggaaaatggaggatactcagagtacggtggaggagaatactgcccgtcactcaggaacagcttatagactacaaaggcgatcccaaggagtaccacgatggtaatcaatccactcatgttacaggaatccgccgaggaccacttataataataatcagagaaagaggcaaagccgtgctgctttccagactccttcagtttctgcaggccaagttctgtataatctaaattatactccaagccacaagaacctcttagtacatactggtcttcagaggactcatagccttcacagctcaccacagtttttccaaatttgtatgcaatatctaagtccgtcttacattcccactgtacatcatacccatcccagcctttgttctgacactgtatgacttttggggtataagaatcacaaccagctgtgcctccaacacatttcaactgtgggatgggatccagcctgcgggaggtggtatagcggtcatagtggagggtaagagcttttacatcccgcagcaacattctgtcagggtcgttccagcccagggcagggcccgcggtcagcagaaacaaatgcaagccgaggagcaagcagtacccggccgctcccggcccgcaggctgcggccatggcgctcgatgaagatggcgccgggctgccagacgcctacgggccgaacctgggtgcggtagcgcgcgcgacgctgcgcagctacaccgctacccctggcggcggcgaaggaacggcccgactgcagagctgcagccgcaacggatccgtgcgccaaccctacgtcactgccgctgcggcccgtg

SEQ ID NO: 91337 - DNA, 955 bp, Homo sapiens
atgctccggaccccgctggcgccccagcgagatgatcacggctcacagcgcgctttcggattgggaagcgcacgagtccagcaccaccgacgaggatctcgcaggccggagagcggcgaacgggagcagcgagaggggcggcgccgtcagcacccccgactatggggagaagaagctgccacaggcgctcatcatcggggtcaagaaaggagggacccgcgcgctgctggaggcgatccgcgtgcacccggacgtgcgggcggtgggcgtagagccgcacttcttcgacaggaactacgaaaaggggttggagtggtacagaaatgtgatgcccaagactttggatgggcaaataaccatggagaagactccaagttactttgtgacaaatgaggctcccaagcgcattcactccatggccaaggacatcaaactgattgtggtggtgagaaaccccgtgaccagggccatctctgactacacgcagacactgtcaaagaaacccgagatccccacctttgaggtgctggccttcaaaaaccggaccctcgggctgatcgatgcttcctggagtgccattcgaatagggatctatgcgctgcatctggaaaactggctccagtatttccccctctcccagatcctctttgtcagtggtgagcgactcattgtggaccccgccggggaaatggccaaagtacaggattttctaggcctcaaacgtgttgtgactgagaagcatttctatttcaacaaaaccaaggggttcccttgcctaaagaagccagaagacagcagtgccccgaggtgcttaggcaagagcaaaggtcggactcatcctcgcattgacccagatgtcatccacagactgaggaaattctacaaacccttcaacttgatgttttaccaaatgactggtcaagattttcagtgggaacaggaagagggtgataaa

SEQ ID NO: 91338 - DNA, 1748 bp, Homo sapiens; identical to SEQ ID NO: 76263

SEQ ID NO: 91339 - DNA, 477 bp, Homo sapiens
  misc_feature (1)...(477): n = a,t,c or g
gcgttgattcgatacactagtccangtggtggaattcgggagagagaagtgtgcaaatgattttaatgagagtgaggagggaaaaatttggcaaacgtacagtgtgccttcatctctagcacttggtgcaatgtgggacacacagtggtgatcaataaatgtttgaaataaagatggaatcagtacttgaccaaactgggaatcctcctatctctttattgtgggtgtggagtttttgtttttgtttatttatttatcatataatttaaagacttctaaagaggcttgttaaggtctgacaaatctcctctatctgctagtagcaactaaaacttccactgccattgaacatttctaagactttgaaggtcctggttggatggagctggatcatctgggattatctgggaggaatgtaacactatcgtcagtcaagtaatattttactatgagtaattcacccagatgggctctaan

SEQ ID NO: 91340 - DNA, 2631 bp, Homo sapiens
ttttttttttttgaaaggaagcgagtaggttttaattcaagatacaggcccctcgcgttgatctcgtagaaggaaactcagtggactgacaagctcaagtcatgtatgagggcacgtcctgggacccccccccccctcctgccataggaaggacgacagcttcaggcagagggaaggaggtttgagatcagggttgggccccatacagattgtgtgaggtggtctcaagtacaaatacttatctgaggctcctgaacaggccagaaattggtgagtctcaagtaggtgtctggggaaagagagggaaggggcctgccctcgctccaggggagctggtcgccgtttggcaggcctaacagacctctaaggcacagactggtagcaggagagagctatgtcctgtactccagatgctgggtaaggagcagctggatgtgctcagatggggctcatctgagaaggtggaggtaggagagagggcagaagagagtaagccacttccaaacgtccctccaaaaaatctgaaaggagttactatgctaatgcgctgggcatgaatccaattcagaaccaatctggtgggcccctcatggctcagaaatactctgggtagggctggctgttactgcagtcacggacgctgagttatgtacagagagtacgtcaggaaagtggccttcagagaaagagccccatggcctaaccccaaagtcctagcccgtccaccagcacctctgagttcactggccacggcaccgggctgcttgatctctgggaatgcagcggtggcagcaaagtgcccttggctcacccggctgcaaggtcagcccttcaagctgcttgcagaaacgctggtagtttggggcaaggccttcggctgcaagcttgctgcccagtcctgcctgagacggctgccagagcctgtgcgcgctgcctgaagccttaaagaaaagagatggcggtgtcaaggcgacggtgccacgtgcctggccggggaggcccaggaggggcccggacgaaggcaggctattgaatggcctctggccccaggagcagagtggtctcctctgtccgcacactgagccagccctgtgtgccagggcccaaccgcttctccggccttcgctgggtgaggccttccccagcagggcacgaggccagaggctgggtacactgggtccctgggtgctagttcagctggtcataccccggtctctttctgtacaaacagaagtgctggatgaagaagacgacgtcgaagacgatggagaagaccccgagtccaaacttggttgggtctccgaagatcagcgtccactggtcgttgttgtaggactggaggaacatctgcaggaggctgaagctgcccccggtgaagtccaggagcacgttgccaatgctccagccctcagtgcttttgtagtaaaagttcatgtaggcctgtggaaaatacttgaccagcgtgactgcgagcttgatgtaggagaagcagaagagaaactgcagccacgtgatcactcccactgcagccacgatcatggtgacaaatgcgaagagccacgcgagcaccaggaagccgatggcaggccaggacacgcgctggccaccgcgctcatacaggcagcactgcacgatgatgatcagcgtgaggacaaccgcgtgcaggctgaagaagacgtcgttgctgttcacggggttcactccgttggggtatttgaggagaaactgctccttgatgtagggcacccagaggaggccgatgttgaatacactgtaggccacgaagcccgtcaggttcagagccacgaagtcgaagctcagaccaatgacacttttccgcctccaattcatgatcacctgagggtagaaggagatggaccaggccacaaagtagatccagccaatcacctggtttatgatgctaatggcgctgctgcggatcacaagaaagcgtatcctcgggccggtctgattggagtgatttccatgtagataaacagtaagttgtccaacattttgagatgtcacttgaaaagaggagtttgtcactccaggaggcaccacaacttcatcggggagctcaaggatagtaatatttttggaacgaaatgtgatttcaaaagtgatcaccagggttgcatttaatggtggccgcagggtgaggctgacgttggtcgagctgccgttctccagctttacgacaggaggaacagtgaggctgacgcttgactcacatttctctacgagcttcaggggaaaaaggataaaaatagtcagccaattccttatcatgtttctcgatttctcagaactctgttgcttagggcgcctagcgagctctcacaaaacacagtaatcctcaatgttactggaagaggcagagctcaggagtcctcccttcgcccagtgtgaaaacccggaggggaggatggggtctcgtgctgctcagtcccccggagccccgcactccgcacgtcaaccggcgctctcgcaaaggttctctcagcgtctccaaagcaatctgagcgcccccaggctcgaggaaccgccctcacgggacgcatgagcctcgccaggtgccggtcaggaatgcaccgcgttcccctgcccggctagactttgggagaggcg

SEQ ID NO: 91341 - DNA, 2629 bp, Homo sapiens; identical to SEQ ID NO: 60269

SEQ ID NO: 91342 - DNA, 1743 bp, Homo sapiens
atgaagagaagtgctctcaagttctatttcagagacagaacaagcaagatcgaaggggatttaagagcacagaccctttacgggtgtcgggttggaggacggtcaggtctttcccttcctacgaggccatatttcagactatcacatggggagaaaccttggacaacacctggctttcctaggcagaggaacaaaagcacccaaggaggaaaaagaggcctgagatttccacggaattacaagtgaacttcctgtcctgggtaaacttccggaatcaacaacaggaagacccaatcagaatcttcctccgggagccaatgggagagcacattacaaagagccaatccccagcgccgctgtcactgttatggtcctgtcagggtgccggcgtcgtggtgcttgggtggtcgccaccaagaagactttggtggggtagtctcggggcagctcagcggcccgctgtgcccgtttctggcctcgctcgcagcttgcacgtcgagactcgtaggccgcaccgtagggcgagcgtgcgggtcgccgccgcggccgcctcggggtctgggcccagccgcagcctcttctaccgcggccggttgggagtcgccgcgagatgcagcctccgggcccgcccccggcctatgcccccactaacggggacttcacctttgtctcctcagcagacgcggaagatctcagtggttcaatagcatccccagatgtcaaattaaatcttggtggagattttatcaaagaatctacagctactacatttctgagacaaagaggttatggctggcttctggaagttgaagatgatgatcctgaagataacaagccactcttggaagaattggacattgatctaaaggatatttactacaaaatccgatgtgttttgatgccaatgccatcacttggttttaatagacaagtggtgagagacaatcctgacttttggggtcctctggctgttgttcttttcttttccatgatatcattatatggacagtttagggtggtctcatggattataaccatttggatatttggttcactaacaattttcttactggccagagttcttggtggagaagttgcatatggccaagtccttggagttataggatattcattacttcctctcattgtaatagcccctgtacttttggtggttggatcatttgaagtggtgtctacacttataaaactgtttggtgtgttttgggctgcctacagtgctgcttcattgttagtgggtgaagaattcaagaccaaaaagcctcttctgatttatccaatctttttattatacatttattttttgtcgttatatactggtgtgtgatccaagttatacatgaatagaaaaagatggtgttaaatttgtgtgtaggctgggaattcttgctgaaggaattggagaaaacctgttgctgcaaaattttacatgttccagatggaaagggaagtctaagcgctttttaaaacaatttttttttgtatttaattaagcaattgcagttatctgggatttttgggtcagaattttaaattctgtttgattctccatattccagtgaataaaatacaaaagcattgtgtttttaagattgtgtcgatattcacctaaaaacttgtgccaaaagcacctggattggtaattatatttcacttaaagggtaaatttgacaatatcttgataatcaaaagtgcaatttttttcttcaaaatgttttctcaacg

SEQ ID NO: 91343 - DNA, 1283 bp, Homo sapiens
caagctccagagactacaataattcacttgccctaggttccaaagccagcaagtggaaaacggagactggaattccgcccgcaggactccaaagcctgtgcagcaacaccccactcccccggcaggatcaccagcaggacgcgcgggagccagaaagtaagatccgtacctccaaggctcccatgggcccaagcctccgcatcaacagactgggagggattacgtggggtcccagggccggctctgaggcgggaaaactttctggaggcggcggcctcaggccggagcgggcgcacaccgactggaggggtcggattcagggatgtgggtggaccgcatttccccatcttccccgccgcgcacttcctctggtgcaatctccacaccccgcgccggcccgcctgcaacgcgccctggcactcaccggtgggcgaaatttccccgcctccacgtgagagccagctccgccgtgacccggaagtccacttcgagtcgccggcccaccctctcgggttccggcttcttccgggtcgcggccttccggcgaacgcggttaccgtggaaaccgcggccatggcggcaccgcggcaaatccccagccacatagtgcgcctcaagcccagctgctctacagactcgtcgttcacccggacgccggtgcccaccgtgtctctcgcgtcccgcgagctgcctgtctcgtcgtggcaggtcaccgagccgtcaagcaagaatctgtgggagcagatctgcaaggagtatgaagctgagcagcctccctttccagaaggatataaagtcaaacaggagcctgtgattacggttgcgccagtagaggaaatgctttttcatggcttcagtgcagagcactattttccggtttcccatttcaccatgatctcacgtacaccctgtcctcaagataaatcggaaacaatcaacccaaaaacatgttctcccaaagaatatttggaaactttcatctttcctgttctgcttcccggaatggctagcctgcttcaccaagcgaagaaagaaaaatgttttgaggttgttctccagatgaccccttcgggagggaaagcctgtgtttggggtcacttacccagttccagccacaccatctagttgtgcacatacatgcgctgccatctgtctggccacttggactccggagagcttttccgccttgcttggcctcctgcctgaccttctcctgtgcagtttggcatccaccaggtttcttgggtcttcagcttctgtttattacatgcactgattaaagc

SEQ ID NO: 91344 - DNA, 3252 bp, Homo sapiens; identical to SEQ ID NO: 59952

SEQ ID NO: 91345 - DNA, 670 bp, Homo sapiens
tttcgtggccggctggcgtgctctcaccgccccctccaccagtgctcggctccgggcatttggatggcaggctgctgcccgcctactggtatttggggcccggggagtgggtctgggttcaggggctccaggctccctgccctgctacctgcgcatggacgcactggcgctgcttgggggactggtaaatgtagcccgtctgcccgagcgctggggacctggccgctttgactactggggcaactcccaccagatcatgcacctgctgagcgtgggctccatcctgcagctgcacgccggcgtcgtgcccgacctgctctgggctgcccaccacgcctgtccccgggactgagctgccatgccagcctgcccacagcagcctcctagagttagcaacaccaggtgttcctcccaactcgtctgcaaggggctggctccttggatgcttccagctcatgagatgtctcagcaggagccctgttcacccgttcttccctgtggactgacctcttccacccacgccgtggcgctccaacttccttccctgccttttccctccaagctcctattttactgtgtcagctggaaggaaacctttccctcttgggacctctttaccctctgtgacctgtggggttagaccagagagggactctggggtcatgtcttg

SEQ ID NO: 91346 - DNA, 3497 bp, Homo sapiens
atgacatgcttcaaagggcaaaaaggagaacaaagatcacatgcttttgaggccaataaagatcacaaggcaaaggttccatctcccaacctctatagccagctgaatgcactacagtttactgtggatgaaagaagcattctatggttaaatcaatttctgttggatttaaaacagagtcttaatcagttcatggctgtgtacaagttgaatgacaattcaaaatctgacgagcatgttgatgttcgagttgatggcttaatgctaaagtttgtcattccttctgaagtgaaatctgaatgtcatcaagatcagccacgtgcaatttctattcagagttctgaaatgattgccacaaatacaaggcactgtccaaactgtcgacattctgacctagaagctttgtttcaagactttaaagattgtgatttttttagtaaaacatataccagcttccccaaatcttgtgacaattttaatcttctacatccaattttccagagacatgctcatgaacaagataccaaaatgcatgaaatttataaaggaaatattactccccaattgaataaaaacactcttaaaacttctgctgccacggatgtttgggctgtgtacttttctcaattttggatagattatgaagggatgaaaagtggaaaaggacggccaataagttttgtagactcattccctctttccatttggatttgtcaaccaacaagatatgcagagtcacaaaaagagccgcagacttgtaatcaggtatctctaaatacatcacaaagtgaatctagtgatctggctggccgattgaagcggaagaagctcttgaaggagtattatagtacagagtctgagcctttgacaaatggtggtcagaagccttcttcatcagatacatttttcagattttccccttcctcgtcagaggcagatattcatctcctagttcatgttcataaacatgtcagtatgcagattaatcactaccagtatctgcttctacttttcctgcatgagtcacttatcctgctttcagagaacttaaggaaagatgtagaagctgtaactggcagtcctgctagtcagacatccatttgtattggaattttacttagaagtgcagaactggctcttttgctccatccagtggatcaagcaaatactcttaagtctcctgtttctgaaagtgtgagcccagtggtacctgattatttgcctacagaaaatggggattttttgtcttcaaaaagaaaacaaattagtagggatataaatagaattagaagtgtaactgttaatcatatgtcagacaacagatctatgagtgttgaccttagccatatccctttaaaggatcctttgctttttaaatcagctagtgatacaaatctgcaaaaaggcatttcttttatggactatttatcagataaacatttagggaaaataagtgaagatgaaagtagtggacttgtttacaaaagtggctcaggagaaattggatcagaaacaagtgacaaaaaggattcattttatacagattcaagtagtgtcttaaactacagagaagattcgaatatactttcatttgatagtgatggtaatcaaaacatactttcaagtactttaactagtaaaggaaatgaaaccatagagtccatctttaaagctgaagatttgcttccagaagcagcttcactctctgaaaacctggatatcagtaaagaagagacccccccagttagaacacttaaatcacagtcatctttaagtggaaagcctaaggaacgttgcccacccaacctggctcctctctgtgtttcttataagaatatgaaaagaagctcttcacaaatgtcattggataccatttcacttgacagcatgatattggaagaacagttattagaaagtgatggaagtgatagccatatgtttttggaaaaaggaaataaaaagaactcaactacaaattacaggggcacagcagaaagtgtgaatgctggtgcaaacctacagaattatggtgaaacttctccagatgccatcagtacaaattcagagggtgctcaggaaaatcatgatgacctgatgtccgttgtggtatttaaaattactggtgttaatggggaaattgacatccgaggggaagatacagaaatctgtcttcaagtgaaccaggtgacaccagaccaattaggcaatatcagccttcggcattacctttgtaatcgtccagttggttccgatcagaaagctgtaattcattccaaatcctctcctgagatttctctgagatttgaaagtgggcctggtgctgtaatacactctttacttgcagaaaaaaatggatttctgcagtgccacatagaaaacttcagcactgagtttcttacatcttctcttatgaatattcaacattttttggaagatgaaactgttgcaacagtaatgccaatgaagatacaagtttctaacacgaaaataaatttaaaagatgatagtccccggagtagtacagtatcccttgaaccagctcctgtaactgtacatattgatcatcttgtggtagagagaagtgacgatggctcttttcatatcagagattctcacatgcttaacactggaaatgatttgaaagaaaatgtcaaaagcgattcagtgctgctgaccagtggaaagtatgatctgaagaaacaacgcagtgtcacgcaagccactcagacaagcccaggggttccttggccttctcagtcagctaactttcctgagttctcctttgacttcactagggaacagctcatggaagagaatgaatctcttaaacaggaactggctaaagctaaaatggctcttgcagaggctcacttggaaaaagatgctcttcttcatcatataaagaagatgacagttgaatagcaggagtggcagtcaaaactgaaattatagctctgggagtaggaaggttatatttataatgtggatgttaccagttaggggaagacttttattttcatgaaaagacaataaaacaaaatggaatgtgatgaagtggtgactatttcaaagccagtttagaaagtattagtacgggcattacaatcttttggttgttttgtgttttggggcttaaccctcttttaagctgttgtgatctagggaagtcaacacatagtgtaaaataattacatgcctaatgaaaagaagatgtcatttcctaattttgatatctcattttcggcattttttaaaatgtaaaaggaaaacctcttgtgttcacacagattgctgaattgatttctccatatttgttaataatttactattatttacaaagattcaaatgcttttatgactaatgtaaaatgaaaagaggcttacattttaaatgttattaaaattatgtacttaaatctataattatttaattattgtaaaaagtccaagcagatcaataaactatataattaatgggtttggaaaaaaaaaaaaaa

SEQ ID NO: 91347 - DNA, 7390 bp, Homo sapiens
gtcatgtccctgggactcctgtctacagagaaaaagaagatatgtatgacgagattattgagttaaagaagtggcgtgtgcttggctgtgcccgtggggatgtgtgtgcggcatatacacattggcgtgtgcgtggctgtgtgtgcggggacgtgtgtgcggcgtgcgcgcattggcgtgtgcatggctgtgcgcgcggggacgtgtgtgcggcgtgcacgcattggcgtgtacttggctgtgcgcgcggggacgtgtgtgcggcgtataccgattggcgtgtgcgtggctgtgcgtgcggggacgtgtgtgcggcgtgcccgattggcgtgtgcgtggctgtgcgcgcggggacgtgtgtgcggcgtatacgcattggcgtgtgcgtggctgtgcgcgcggggacctgtgtgcggcgtatacgcattggcgtgtgcgtggctgtgcgcgcggggacctgtgtgcggcgtgcgcgcattggcgtgtgcgtggctgtgcgcgcggggacgtgcgtgcggcgtgcgcgcattggcgtgtgcgtggctgtgcgcgcggggactggcgtgtgcgtggctgtgcgcgcggggacgtgcgtgcggcgtgtgcgcattggcgtgtacttggctgtgcgcgcggggacgtgcgtgcggcgtgtgcgcattggcgtgtacttggctgtgcgcgcggggacgtgtgtgcggcgtgtgcgcattggcgtgtgcgtggctgtgtgcgcggggacgtgtgtgcggcgtgcgcgcagtggcgtgtgcgtggctgtgcgcgtggggacgtgtgtgcggcgtgcccgcattggcgtgtgcgtggctgtgtgcgcggggacgtgtgtgcggcgtgtgcgcagcttcgtgtggatggctgtgcatggcccttgttttcttcagtcattgcacgtgcagaagagcgacgtggacctgatgagaacgaagctccggcgcctggaggaggaaaacagcaggaaggaccggcagatagagcagctcctggatcccagccgcggcacggattttgttcggactctggcagagaaaaggcccgatgccagttgggtcattaacgggctgaagcagaggatcctgaagctggaacagcagtgcaaggagaaggacggcaccatcagcaaactccagaccgatatgaagactaccaacctggaagagatgcggatcgccatggagacatactacgaggaggtgcatcgtctccagaccctcttggcaagttctgaaaccaccggaaagaagcccctgggggagaagaagacgggcgccaaaaggcagaagaagatgggcagtgccctcctgagcttgtcccggagtgtccaggagctcacggaagagaaccagagcctgaaggaggacctggaccgcgtgctgagcacctccccaaccatctccaagacacagggttatgtggagtggagcaagccccggctgctgaggcgcattgtggagctggagaagaaactaagtgtgatggagagctcaaaatcacacgccgcagagccagtcagatcacacccgccagcctgccttgcatccagctctgcgctgcacagacagccacgaggggaccgcaacaaggaccacgagcgtctccgaggggctgtgagagacctgaaggaagagcggaccgcgctgcaggagcagctgctgcagagagatttggaggtgaagcagctcctgcaggcgaaggccgacctggagaaggagctggagtgcgcgagggagggcgaggaggagaggagagagcgagaggaggttttgagagaggagattcagacacttaccagcaagctccaagaattgcaagaaatgaagaaagaagagaaagaggattgcccggaagttcctcataaggcccaagagctcccagctcccactcccagcagcaggcactgcgagcaagactggccgccggattccagcgaggaggggctcccgcggccccgctccccctgctctgatgggagaagagacgccgcggccagagtcctgcaggcccagtggaaggtgtacaagcacaagaaaaaaaaggctgttctggatgaggcggctgtggtgcttcaggcagctttcaggggacatctcacgcggacaaagctcttagcaagcaaagcacatggctcagagccacccagcgtgccaggcctcccagaccagagctctcctgtgccccgcgttccgagccccatcgcccaggccacgggcagccctgtgcaggaggaggccatcgtcatcatccagtccgctctgcgggcacacctggcccgggccaggcacagtgctaccggtaaaagaaccaccaccgcagcttctaccaggaggagatcggcttcagccacacacggggacgcctcctccccacccttcctcgcagctcttcctgacccctctccctcagggccacaggccgtggcacctctacctggggatgacgtcaactccgatgattccgacgatattgtcattgcaccgtctctgcccacgaagaactttccagtttaggtccccgtcactgtctccacgctgtgatggcagcgctgccgaggacataggaaccacgactggaaagataatttatcgtgttaggagaagaacgatgatacctacttaacacctcagcatctgcgtggtgtctctttgtgcttttgtttgtggaaggagacccaaatgcctttactttattctctggggagggccagcggctcgcatccccctcatctccagctgcagctcggatggtggattttcagtgccaacagacacatctgccgtgaactcgcagatgccagggagccctgtagtgacacgttctctgacagcaccttgccgcctgcccacgaccttgaccgtgaggagctgctatacgcaaccagcgccgacaccatgccccctcttcctggtgacaccctcaacaaccaggatttgctcgatctcagcccagcaggccaggcagacacaccccgctgtgccttaggaaggtgtgagaccggcttcccccatccccacagcaaaacacggcctgtcccaagccagtgaggagctaaagacacccaggtccccaaatgatcttactccatgccccacccgctcacaccgtcctttcccgtcacccttgctatcccctggagcactgccctccagagctgcccttcccaggaaggaatttggttggattctgtcactgtggagaccaagattttttaaaattcccaattacaaaagcagcatcacacttgcttctgagaacagcagggtgatgtctgttcccaagctggtggcgggagccttagcctgtgtggggccacccggggaagaggaggagaggagggtgaggaggcaggctcgccgttccaagggacagcataggctcgtggtggggcgtgttgcatctggtgtctgggacagtccccgtcaccccatgtgtgcggcctctgcactcccaagctccatggctgggctgggctgggctgggctgggctgggccgggcgtgcggagcctgtggagccagcagctgcagaggcctaggagggagttcctgggggaagcgcacagtgtccagtgcccatctcttgcttgtgtgtgagattagcccttgctggggcgtcaagaggaagagccttagacctgggcgggccttcaggggcatctagacccctgcacagcccaggcctggtgtctgcatttccacagcacccctgtggggactcctgccggggctggccgctgtctcaggagagacccaatggttagaaagcccctttttacacagctgacagcttctcccaaggcttccgtccacggggacaggcttaacccctgggcgccttttctgcagcatggcggccttctgagtcacctaagctgagcctgggtcattctctgtggcggtcagaaggccgatggccccaacacagtggcttgtgaaagggagagaggaggctctgcatgtccacctgctctatgggaggaggacacaggtgtccccagcccagcctgttctctcccagtcactcagggatggggccacccaaagtgcaggacccgccccaccctgcggttcgaagcctggcccctgtctccacttagcttctgtttctgcagtgggtggaagcgagtcagcggggggcctggcttgtgtacgtgttttccttatttggtctgtgggttgccaagtccatttttttttccactgaactggctggtaacttgatggactgtgtaactgacacaggccctctttagacccctgccttcaccccacccgcccgggtccactccctggggcgctgtcccaagccatccctgcttgccagctcaaagcttcaggtcctaggagccagtccacctcgaaagccctgagaaagtgagacacctgcacattcgctgggggagaccctccgttctcttgtggcagctgctcccacttgttaaaccaagctgtttctgcgggacgtgctcactcttgggaaccagtggcctagagctttgggttacaggcatggagagggctttcctgcctcaggcttggaggccaatgttccatacataaaccgccatgtcctctggtgcagctgggctgctcttttaaaagccagcatccatcttgaagctcgctgggtaaatggcaatgcattctcaagccagtgtcttcagctgatgcccagtgtccagtgctggtcaccagtcccctttgctgggtacagcctgcctggctgttctgtggtcctggaacgctgcagtgtggttttgttccatggagacagtaccaagcggagaggcctccttgcccacggccccagggcctgggggccaggggttctggccctgcggggacttaggcaggaggggaagagaagcccatggagccatgggaggggtgagctgtgggcggggcctagtcatgggaggggtgagctgtgggcggggcgagctgtgggtggggcctagccatgggagaggtgagctgtgaatggggctagctatgggtggggtgagctgtggacagggcctagccatgggaaaggtgagctgtgggcggggcctagtcacgggagaggtgagctgtgggcggggcctagtcatgggaggggtgagctgtggatggggcctagccatgggaggggtgagctgtgagtggggctgagccatgggagcagcaagctggtggagtgggctgggcggagctgtgggggctgctggcagggcctaggaaagtagacaactcccgggggagacgaagtagagagtgagtccccaagaaagggactcctgccccagcgtcaagtgccaaagcaggccccatctaccacttcagggtcgacgttggtggcaggtgttgttcacggtgtactgattgtcactgcaacacctccacatcaccttgaacttcaagaacagcagcaaagctgtatctgctatcagaggctgttaggtagtccagctttaaaataacacactctttctctatcccatgccctttaaacaagcagccacaggagatgtcagtctccagggcctggccccactgtgttgacagcagtcatgtctgttgagctgacactgctgaggctgaagctggccctgtgcaggtggctggtgagccacaggtgcagtacccggaggtgtgctctcccctagaggcctgtccccaactcctcccctagaggcctattcccgctgctcacagacctcagcagaggcaccagctggagggctccagggacatccttggaaatacaggaggctttcctggcacagggcacagctcttaggaggcctttgtaggacgctgtctccccagcgtgtcctgctcatccaggatggggagaaagaggaggaggccccaggctcagaagccagggacagactgccgacgattaccaaactgaatccaggcagtgccatgaccctgggtgtcccttggttcacatcacccaccagacagctgcggagagagtgcagggaggggctgggaccaaacaggccagaaaccagcagaaaagaggcagaagtgaggtgggtgtgcctggggcacgaagccagcgccggggggatttcagtggagccttacagccaggctccgtgcggactgtgatgccagagaggcgtgcagcctctgggcaagtcgggagagggcttgggtggtccccacaaggcagaagaggtggaagggccagagaagaccaccaagaccaccgttcccgcaggcctggggtgagtgacctgactgagactagcgggcagagccaagcagggctaaactccaacccagggcccggtgttggacaaagtagctttttctttgctcgtttgtctgtgtattaagaagagactaaaatagccaaacgacgctggtcgcatgcgctggctgtggtctgtctgctgaatgtctatttttgtctcctgacgagacgtgaggaccatgcccttgatccctccgatggaccagaaacccccttccttgcaaaaaaaaggcaattgaattaggaaaagatagcccaacctagctcagatccaccaagataagcacagcaaagcttggctgcatttttgaggaataaaaacctgcagaaagcaccgataaccttcaagatctgaatgagattctattataacccgtctaaacgattgcaaaattcctcctttggttttggaagcagcgtttgctctcccgtggctcggattctctgaggaccagggagttgacacacaaaccccgccatgggtccgagccagctatttctcaaggctcccacctcgccaagctcccaagggcctgctggcagtgcctacgctgtgccaactaccctgtctggtacagaccacggctgggtaagcacccttaaaagcaacagaaatgacgtctggaagctgaaatgtgaaactgtcaagatggcttaaggagaggaaggagtggacccgctggtctttggcattttgtatttagaattattctaactttatacataatgtataggccgatcttttggaagggataaggttttcattcttgtgcaactcattattctcattattggccttttaaataaaaagttgttttgcagtgtgccttgagtgccccgtgaaaacttctctttaatgacctccaggtgtgttcctgccccacgcactcgggctgaacaaacgatccgcttcaaaaaccccgcttctctgggcttctggcattttgccgtggtcgtaatgcaggcttggggttggagagccagctggagggacgggtcccgccgccagctccctgccacgcatgaactcggatacatctgttgacaccccggtcccccgtcaaatatctattccctctgcctgttgagtatgggtgtatccacggttccgtccccaacac

SEQ ID NO: 91348 - DNA, 1943 bp, Homo sapiens
tttcgtaggaggaggagggactgagcggcggcggcccccgcgttccgtgctctctatgggggaagcagacaatggattatgatttcaaggcgaagctggcggcggagcgggagcgggtggaggatttgtttgagtacgaagggtgcaaagtgggacgcggcacctacggtcacgtctacaaggcgaggcggaaagatggaaaagatgaaaaggaatatgcattgaagcaaattgaaggcacaggaatatccatgtcggcttgtagagagattgcacttttgcgagaattgaagcaccctaatgtgattgcattgcagaaggtgttcctttctcacagtgacaggaaggtatggctgctgtttgattatgcagagcatgacttgtggcatattattaagtttcaccgtgcatcaaaagcaaataaaaagcccatgcagttgccaagatctatggttaaatccttactttaccagattcttgatggtatccattacctccatgcaaattgggtgcttcacagagacttgaaaccagcaaatatcctagtaatgggagaaggtcctgagagggggagagtcaaaatagctgacatgggttttgccagattattcaattctcctctaaagccactagcagatttggatccagtagttgtgacattttggtatcgggctccagaacttttgcttggtgcaaggcattatacaaaggccattgatatatgggcaataggttgtatatttgctgaattgttgacttcggaacctatttttcactgtcgtcaggaagatataaaaacaagcaatccctttcatcatgatcaactggatcggatatttagtgtcatggggtttcctgcagataaagactgggaagatattagaaagatgccagaatatcccacacttcaaaaagactttagaagaacaacgtatgccaacagtagcctcataaagtacatggagaaacacaaggtcaagcctgacagcaaagtgttcctcttgcttcagaaactcctgaccatggatccaaccaagagaattacctcggagcaagctctgcaggatccctattttcaggaggaccctttgccaacattagatgtatttgccggctgccagattccataccccaaacgagaattccttaatgaagatgatcctgaagaaaaaggtgacaagaatcagcaacagcagcagaaccagcatcagcagcccacagcccctccacagcaggcagcagcccctccacaggcgcccccaccacagcagaacagcacccagaccaacgggaccgcaggtggggctggggccggggtcgggggcaccggagcagggttgcagcacagccaggactccagcctgaaccaggtgcctccaaacaagaagccacggctagggccttcaggcgcaaactcaggtggacctgtgatgccctcggattatcagcactccagttctcgcctgaattaccaaagcagcgttcagggatcctctcagtcccagagcacacttggctactcttcctcgtctcagcagagctcacagtaccacccatctcaccaggcccaccggtactgaccagctcccgttgggccaggccagcccagcccagagcacaggctccagcaatatgtctgcattgaaaagaaccaaaaaaatgcaaactatgatgccatttaaaactcatacacatgggaggaaaaccttatatactgagcattgtgcaggactgatagctcttctttattgacttaaagaagattcttgtgaagtttccccagcaccccttccctgcatgtgttccattgtgacttctctgataaagcgtctgatctaatcccagcacttctgtaaccttcagcatttctttgaaggatttcctggtgcacctttctcatgctgtagcaatcactatggtttatcttttcaaagctcttttaa

SEQ ID NO: 91349 - DNA, 1523 bp, Homo sapiens
aggagcgcaaaatggcggaaccgccgagccccgtgcactgtgtcgctgccgcggcccccaccgccaccgtctcggagaaagaaccgtttggcaagctgcaactctcctcccgggaccctccgggttctctgtccgccaagaaggtccggactgaggagaagaaggcaccgcggagagtgaacggagaagggggcagcggcgggaacagcaggcagctgcagccgccggcagcaccttcgcctcagagctatggcagccccgcgtcttggagctttgcccctctgtctgctgctccctccccgtcctcttctcggagcagtttctctttctccgctggcacggccgttccctcctcagcctccgcttccttgtctcagccggggccgcgcaaactgctggtccctcctacgctgctgcacgctcagcctcaccatctcctcctgcccgccgccgccgccgctgcctcggctaacgccaagtcgcgcagacctaaggagaagcgggagaaggagaggaggaggcacggtctcggtggggcccgagaggccggcggggcctcccgggaggagaacggggaggtgaagccgctgccccgagataaaatcaaagacaaaattaaagagagagacaaagaaaaagaaagagaaaaaaagaaacataaagtaatgaatgagatcaagaaagagaatggagaagtaaagattttgctgaaaagtgggaaggagaaaccaaaaacaaatatagaagacttacaaattaaaaaggtaaagaagaaaaagaaaaagaaacacaaagagaatgaaaaacggaagcgtccgaaaatgtatagcaaatctattcagaccatctgctcaggattgctaactgatgttgaagatcaagcagccaaaggcatcctaaatgataacataaaagattacgttgggaagaatttggataccaagaactatgattccaaaattccagagaacagtgagtttccatttgtctcattaaaggagccacgagttcagaataacctcaaaaggttggacactttggaatttaaacaactcattcatatagagcaccagcctaatggaggtgcatcggttatccattgcctacagtaacgaactctcccacctgtctcctatgggggatgggagaggtttgccagaaagagtttggtggggtcctagtgttccagtgaaaatgaaaactctggcagctttcctacgtgatggggtattgttccatggggcagctacttatttaccctgactttttagactatttttcatttaattttccccaattcacccagtgaaaatggagatattgggaaagaaagatatagagacaacgactatgtccaattttcatgctcagagtctcactgtactccagcctggacgacagagtgagactccatctcaaaaaaaaagaaagaaattcatgataatgctatcctctaggtgggaaggagaaaccaaaaacaaatatagaagacttacaaattaaaaaggtaaacaaaaaaataa

SEQ ID NO: 91350 - DNA, 3215 bp, Homo sapiens; identical to SEQ ID NO: 59511

SEQ ID NO: 91351 - DNA, 1649 bp, Homo sapiens; identical to SEQ ID NO: 76862

SEQ ID NO: 91352 - DNA, 5240 bp, Homo sapiens
atggtagaaggcaaaaggcacgtcttacatggcggcagacaagagagaatgagagccaagcagaaggggaaacctcttataaaatcttcagatctcgtgagacttattcactaccaccacaacagctccccactgcacaaacagtcatctggaccctcctcctccccggccgcagctgctgcccccgagaagccgggccccaaggcggcggaagtgggggatgacttcctgggggactttgtggtgggcgagcgggtgtgggtgaacggcgtgaagccaggcgtggtgcagtatctgggagagacgcagttcgcaccgggccagtgggctggcgtggtgctggacgacccggtgggcaagaatgatggcgcggtgggcggcgtgcgctacttcgagtgcccggccctccagggtatcttcacgcggccctccaagctgacccggcagcccacggccgagggctcggggagtgatgcccactccgtggagtcgctgactgcccagaacctgtcattgcattcgggcacggccacgcccccgctgaccagccgcgtcatccccctgcgggagagcgtcctcaacagctccgtgaagactggcaacgagtcgggatccaacctctcagacagcggctctgtgaagcggggcgaaaaggacctgcgcctgggggaccgcgtgctggttggcgggacgaagactggcgtggtgcggtacgtgggggagacagactttgccaagggcgagtggtgtggcgtggagctggacgagccccttgggaagaatgatggggcggtggcgggcaccaggtacttccagtgcccacccaagtttggtctcttcgcgcccatccacaaagtgatccgtatcggcttcccatctaccagcccagccaaggccaagaagaccaagcgtatggccatgggtgtgtcagcactgacccacagtcccagcagttcctccatcagctccgtcagctctgtggcctcctccgtggggggtcggcccagccgcagtggcctgctcacggagacctcttcacgctacgcccgcaagatctcgggcaccacggccttgcaggaggcactgaaggagaagcagcagcacattgagcagctgctggctgaacgagacctggaacgggctgaggtggccaaggccacaagccacatctgcgaggtggagaaggagattgccctgctcaaggcacagcatgagcagtatgttgcagaagccgaggagaagctgcagcgagcccggctgctcgtggagagcgtgcggaaagagaaggtggacctgtccaaccagctggaggaggagaggaggaaggtggaggatctgcagttccgcgtggaggaggagtccatcaccaagggagacctggagacccagacgcagctggagcacgcgcgcattggggagctggaacagagcctgctactggagaaggcgcaggccgagcggctgctccgagaattagcggacaacaggctgaccacagtggccgagaagtcgcgcgtgctgcagctggaggaggagctcaccctgcgccgaggtgaaatcgaggagctccagcagtgcctgttgcactcgggtcccccacctccggaccacccagacgccgccgagatcctgcggctacgggagcggctgctctcggccagcaaggaacaccagagggagagtggggtgctgcgggataaatacgagaaggccctgaaggcctaccaggcggaggtggacaagctccgcgcggccaacgagaagtacgcacaggaggtggcgggcctgaaggacaaggttcagcaggccaccagcgagaacatggggctaatggacaactggaaatccaagctggactcgctggcctcggaccaccagaagtccctggaggacctcaaagccaccctgaactcgggcccaggcgcccagcagaaggagatcggcgagctgaaggcagtgatggagggcatcaagatggagcaccagctggagctgggtaacttgcaggccaagcatgacctggagaccgccatgcacgtgaaggagaaggaggccctgcgagagaagctgcaggaggcccaggaggagctggctgggctgcagcggcactggcgggcccagctggaggtgcaagccagccagcaccggctggagctgcaggaggcccaggaccagcgccgggatgccgagctgcgtgtgcacgagctggaaaaactggacgtggagtaccggggccaggcgcaggctatcgagttcctcaaggagcagatctcgctggccgagaagaagatgttggactacgagcggctgcagcgggcagaagcccagggcaaacaggaggtcgagagtttgcgggagaagctcctggtggctgagaacagactccaggcggtcgaggccctgtgctcctcccagcacacccacatgattgagtcgaatgacatttcagaggagacgatcaggacgaaggaaactgtggagggcctgcaggacaagctgaacaagagggacaaagaggtgacagccttgacctcccagaccgagatgctcagggcccaagtaagtgcgctggagagcaagtgtaagtcaggcgagaagaaggtggacgccctcctgaaggagaagcggcgcctggaggcagagctggagaccgtgtcccggaagacccatgacgcctcgggccagctagtcctcatcagccaggagctgctgcggaaggagcggagcctgaacgaactgcgggtgttgctgctggaggccaatcgtcactccccagggccggagagggacctgagccgtgaggtacacaaggctgagtggcggatcaaggagcagaaactcaaggatgacatccggggcctgcgtgaaaagctgaccgggctggacaaagagaaatccctgtcggatcagaggcgctactccctcatcgacccgtcctcggcgcccgagcttctgcggctgcagcaccagctgatgagcacggaggacgccctgcgggatgcgctggaccaggctcagcaggtggagaagctgatggaggccatgaggagctgccctgacaaggcccagaccatcggcaattccggttctgcaaacggcatccaccagcaggacaaagctcagaaacaagaggacaagcactgatcctgaggggatactgtggagcagcccagtccacaccagagccccacgcggctgcccggcagtacctcctccaggcaggagccgggactgtcactttggagacaaaacagtgtttgtaacaataacgtactcaccgccgcggacaatcccccaccccgatccctcgccagaccaggacgcttcctcaagcccagccttctacagagagtgtgaacggtacagccctggcctgacccggggaccttcagcctggacacccggcagcttctggagtttgtcagtggaggcagaggggatccggccaggcccctctgtccagaaggagctgccctgaggaccatcttagcggccctgtcctctttttccgcccattctccctcgggtctccccagaggggccggcgggggctggggagggggtaagtttatccatgcagacaccaagggggagcatccagtctttaagagccaagtgggggccccttttccgaagccacttccaggccaaggcagtcgccagggcttcttgtccccaccttctgaaccttcttcaaacagtagtacaagctcccctcagccagcctgcctgcccagcgaggcccccaggttcaaggtgttggcgggggcggagggcaggggaacgggatccttctcccgctgcccaccaacaccaacacacacacacctctaagctgctggccgaagatgtcaccaaggccaaagacacagtattatgaaggtttggaaacccctctcctcacctcccaccgtgaccttgggcaaaccctggctcggagcccagggcagaggcagctcagagtggaggctctaggcaggtttgacaaaggtcagtaatacggtttcccctggggttgaccagatgttccaaaatatctgcatccacctggagatgcagctaagtgggtccttatgtacacaccacgttcacacacacacagagggaccacgtgtgcacgcatgaccgtgtgggtggcggcgtttgctgtgaaccatgctcaggccacacagagacacatacttggtttctgggactgagacccaggcctggcaggaccgtgcctacagatactgcaaacgttcctacagcctagaggtgcgtatacacacccaagtacacgcagccaggcattcaggggtgtgtttgccacatggagcatcccttcctggtcttgccaggcacctgcacagagcgtctccagccccatctcctaacgggggctgggggtaagagaaatctaactgcgctcccccaacccctcgccctgccatcttcccctcaagcctgctaagttatcccaggcctgtgcgtggtggaaaaagccagccttggccctgcagcctccacctcgccgctgggggaccaacaggttgcttacagctttgcaccccggcatcagcacaggggtccctgccccaccctccggcagctcagggagtgttttcctgtgaggcctcccccatcagtggaccagagggagaagcccgatgccccatcccggctttcccgtaacgcacaggacacgtgtgcaattcataggaacggcccagatcgccctcatgagtgccacctggtacaggtaggtggcgctcacgttcctgcccaaatgcagcccatcggggagtcacagtcagtccccccggcccccctcccagtccctgttggctttcggtagctctcgcatgcagttctattaacagccgtctagaagcgatgctttagtggcctaacccagggtcaaatacagctctttctagcaaaatcaggcagctctgccccatcggtaggggcaccgattagtctactaacagccagaggtccatctagcagggtgccgggaggagctgagcccccggaggtgggctcctggtgacgggtgtccaagaagcggtttccttgggagcttctgcctccgtgggcctctcagcccgccccgtgtggccgcccgggtgtggctcagccatgtcccctccccaggtccttcattcacccctcccctccccacagtggaattgttgaagtgtggcgagtctgtgctcgggacaataaagcttgtgacaggtccaggaaaaaaaaaa

SEQ ID NO: 91353 - DNA, 3029 bp, Homo sapiens
agtggggaagctgctaacccgacccggattggcgctgaggtggcccgtggggcagggcagatgattctggaccagatgaagcctgaggagccttccagctctaagatagcaggataggagacttctaagattggagctgcagaagacttgccagcccaccagcacaatgtcaggaagccatacacctgcctgtggccctttctcagccctgactccgagcatatggccccaggagatcttggccaagtacacgcagaaggaagagtcagcagagcaaccagagttctactacgatgagtttggtttccgtgtgtacaaggaagaaggtgatgagcctggctccagtctgctggcgaactcccctctgatggaggatgctccacagaggctgcggtggcaggcccacctggagttcacccataaccacgatgtgggggatctcacctgggacaagattgccgtctccctaccccgctctgagaagctccgctccctggtgctggccggcatcccacatggcatgaggccacagctgtggatgcggctctctggggccctgcagaagaagaggaactctgagctgtcctaccgcgagattgtgaagaacagctccaacgatgagaccatcgctgccaagcagatcgagaaggacctgctccgcaccatgcccagcaacgcctgcttcgccagcatgggtagcatcggggtgccccgcctgcgcagggtgctccgggccctggcctggctctacccagagatcggctactgccagggcaccggcatggtggccgcctgcctcctgctgttcctggaggaggaggacgccttctggatgatgtctgccatcatcgaggacctgctccccgcctcctacttcagcaccaccctgctgggtgtccagactgaccagcgggtcctgcgccacctcattgtccagtacctgcctcgcctggacaagctgctccaggagcatgacattgagctgtccctgatcacactgcactggttcctcacggccttcgccagcgtggtggacatcaagctgctcctgcgcatctgggacctgtttttctacgagggctcccgggtgctgttccagctcacgctgggcatgctgcacctcaaggaggaagagctgatccagtcagagaactcggcctccatcttcaacacgctatcggatatcccgtcgcagatggaggacgcggagctgcttctgggggtggccatgcggctggccggctccctcaccgatgtggccgtggagactcagcgccgcaagcacctggcctatctcattgcagaccagggccagctcctgggggccggcaccctcaccaacctctctcaggttgttcgccgcaggacccagcggaggaagtccaccatcactgctctgctcttcggggaggatgacctggaggcactcaaggccaagaacatcaagcagacggaactggtggctgacctccgggaagccatcctgcgcgtggcacgccacttccagtgcacagaccccaaaaactgcagcgtggtgagtcgccagctccctgggctgctaccaaacacggccctaactcctccaacccccttggtgggcctgtgttcactgtggcaggagctgactccagactatagcatggagagccaccagcgggaccacgagaactacgtggcgtgctcacgcagccaccggcgccgagccaaggccctgctggactttgagcggcacgacgacgacgagctgggcttccgcaagaacgacatcatcacaatcgtgtctcagaaggacgagcactgctgggtgggggagctcaacggcctgcgaggctggtttccagccaagttcgtggaagtcctggatgagcgcagcaaagagtactccatcgcgggggatgactcggtgacggagggggtcacagacctcgtgcgagggaccctctgcccggcccttaaggccctgttcgaacatggactgaagaagccatccctgcttgggggcgcctgccacccctggctgtttatcgaggaggctgcaggccgggaggtcgagagagactttgcctccgtgtattcccgtctggtgctctgtaagaccttcaggttggatgaagatggcaaagtcctgaccccggaggagctgctctaccgggctgtgcagtctgtgaacgtgacccacgatgcagtgcatgcacaaatggatgtgaagctccgctcactgatctgcgtggggctcaatgagcaggtgctgcacctgtggctggaggtgctctgctccagcctgcccaccgtggagaagtggtaccagccctggtccttcctgcgcagcccgggctgggtccagatcaagtgtgagctccgagtcctctgctgctttgccttcagcctctcccaggactgggagctccctgcgaagagagaggcgcagcagcccctgaaggagggcgtccgggacatgctggtgaagcaccacctcttcagctgggatgtggacgggtgaccccctcctccccagcccaacctcgggcctgcgtctgaggtggcccaggaccccaagctgcagagcccagggaagagcagctccagagccctggccggggccgcgggatatcaatatcaggctgccccactccacgttccccagcacatcccaggtggtgggagcagagggtaccctgccccaccagggtccttagggatgctctaggccaaaccacagtttgtaccaaaaaccttgtgaggaggtgggggagccatgtctgtgctcaggaagagggaaggggatgggggtggctagtaggctcctggcctctttggtttataaataaactgtgtctgtctgtctttgagaaagcacctacctgtcttctgtgcagctagggctgcagagctgtattcaggtccaaggttctgcccttccttgagtggtctagaaggcactgcgtggcccctcagatgctgggacacaacagacccgggacccagctgtgctacccaccccttccatggactgaataagatggactaac

SEQ ID NO: 91354 - DNA, 860 bp, Homo sapiens
ccgatgtcgtgcctcccggccacgctcgctgtagtgaaggagcgttgcagcctggggctcgtttgggtgatttccctcggcggtggaggtcgctcctaatagaggcggcggcggatcacccgaacagccttcaggcgacgtactgtaagacgatattactttaatcatcttcacatcagtatttatggaatagccacaggtgcctcatcctttagtaggagttaattatacatttactggccgagtaaacatctccgaatgtattttttttagataaggaaataaaacatttccaataaagctgaagtctcatcccacccatccgttatcagtcactccatggattcctttgggcaacccagaccagaagataatcagtcagtactcagaagaatgcaaaagaaatactggaaaactaaacaggtctttatcaaagcaacaggaaaaaaagaggatgagcacttggtggcgtctgatgctgaactggatgctaaacttgaggtttttcactctgttcaagagacatgcactgaacttctgaagataatcgagaaataccagctaagactcaatggtatgaaatcatagttatctatctgataattcccatttaaaataaatattagcattttttaaaatgaaagatttaatgtaaaaacaattttgtgaatagcttcttatggcaaaatatgaatatttacagctacctgttctcaaaggccccagtattctctcttctttcctcagttaatcaaatcctctgacccagatttattttttgctgatattttttttctttgagacagggtctttctctgcactccagcctaggcaacagagcaagactccgtctcaaaaaa

SEQ ID NO: 91355 - DNA, 461 bp, Homo sapiens
  misc_feature (1)...(461): n = a,t,c or g
tttcgtgcaaggcagcccctgtggagtggagaaaggggtcctagaccctcagagatggggacagatactgtctgaggcaggacggggccatgtgtgagctgcagatccgtggcctggccatggtggatgccgcggagtactcgtgtgtgtgtggagaggagaggacctcagccttactcaccatcaggcccatgcctgcccacttcataggaagactgagacaccaagagagcatagaaggggccacagccacgctgcggtgtgagctgagcaaggcggcccccgtggagtggaggaaggggcgtgagagcctcatagatggggacagacatagcctgaggcaggacggggctgtgtgcgagctgcagatctgtggcctggctgtggcagatgctgtggagtactcttgtgtgtgtggggaggagaggacctctccactctaccgtgaaggccctgccagn

SEQ ID NO: 91356 - DNA, 1206 bp, Homo sapiens
tttcgtgggggccagggccaggccactgcctgggggcagcatgcatcataaactaaaggcagcctgagccgggcagggcccctgcctctgctacggcagcccccgatcatgcagcccccactggacctcaagcagatcctgcccttcccactcgagccagcccctacccttggcctcttcagcaactacagcaccatggaccctgtgcagaaggctgtgctctcccacacttttgggggacccttgctcaagaccaagcggccgcgcatttcctgtaatatctgtcaaatccgcttcaattctcagagccaggctgaggcgcactacaaaggtaatcgccacgcccgacgagtcaaaggcattgaggctgccaagaccagaggcagggagcctggcgtccgagaacctggagacccagctcccccaggcagcaccccaacaaatggggatggtgtagcaccccgtccagtttccatggagaatggactggggccagccccaggatccccagagaaacagcctggctccccatcccctcccagcattccggagactggtcagggtgtaaccaagggtgaaggggggactccagccccggcttccttgcctgggggtagcaagaaagaggaggagaaagccaagcggctgctctactgtgctctgtgcaaggtggctgtgaactccctgtcccagcttgaggcacataacaaaggtactaagcacaagacaattctggaggcccgaagtgggctcgggcccatcaaagcttaccctcggctggggcctcccaccccgggggaaccagaggctcctgcccaggaccgaactttccactgtgagatctgcaatgtcaaggtcaactcggaggtccaactgacacagcacatctccagccggcggcaccgagacggcgtggccgggaagcccaacccactactgagccgtcacaagaagtctaggggcgccggggagctggcgggcacgctgactttctccaaggagctgcccaagtccctggcgggcggcctgctccccagccccctggcggtggctgcagtgatggcagcggcagcaggctcgccgctgtccctgcgcccggctccagccgcacctcttctccagggaccgccgatcactcaccctctgcttcacccggcccccggacccatccgaactgcgcacggacccatcctcttctccccgtac

SEQ ID NO: 91357 - DNA, 4778 bp, Homo sapiens
tttttttttttttatattgctgaacaccaatatgtcactttattatttggattttttttcccatttgtcacatacctgtcaatgtttacacaatgagggaaatcaaccagcattggaagcaactgaccaaatcagttgataattctgtaccctcttaacacacatcaattttcacttggtagggattatctttaattcggtctcacagctattcttaaaattggtgtcaagattgtcacatctttaaatacagatagaattgccagaagtacataattatatatatatatacacacatacagaaaaatacaagactgtttttccacaatatttaatttatacactactgtaactatatgcaacttttgaagacaggttaaggggtacaagtaactgtttagagcaagtaagtagtttggtccaatattatcttaatgtaatggtttttcgctccctcccttttatgtgacgacatactatgacatacaaaacatgcacaatcattcacttataaacaaaggagtaagacaccactcagactgacatttgtataccccaagggtcaaccacacaactaataaggctataatacagctatgcagcataaatggtcaacactgctgatcctaaagtgagccccatatatacatctgaatataaaaaaccattgaaaccaaacacatatgggttagttaaaaggtgccattccaaggctatacataatcacaggaaaaagtatttacactgcttggaaaacagctgcaacaaagagtttattgccaatgccctttataaacttctctcctatgtttaatacagatgttacgctcactatctatgtgaaccacacatcttatttctggccctttataagatccctgctcaagaatttcaagcaaatatgttctatggcttcacccacacatctattctcatagctttcaaattataaatatcacaatgaactagagctgtagcttaaaacatctagcctaggtctagaaagtaaaataagtattttaagtatcatttttacttagtttagtaagtatactgtgaaattcagagttctgagtaaaatatatttatcctaaagtagcagagtcagtgtgtacttgaagaaacagtgaccacagcaatgcagttctttggtgatgtgcccactctctgaattacaggaccagatgcgtctcagtccgtcacctcagacacatgactcggggctgaagagtggggaagggccctgggtcccagccacatgctatcaccaatgttgctaagcactgcttttaagactcccagggcactgcatgaaaaaacagcaactggccccttccataatcagcaatttgcaatatacagtgtcctacaagatagaatgccacaacagatgattatctggtcaaaaacagtctttgtacaggaataggttaaagcaagagttctttgattattgttttggcagaaaaaggcaaagtgaaaaacaattccagaaaaaaaagttacgaagcaggctttgtgcatttttgtttgctgtatgtgtgaattttacccttttatgtatattttttcatcagccaatttcaaagctagctgagcccaaaggatattaactgaatgaaaataacaaaagagataatctaattaccaaactcctaaaaaccaaattccagtaggttttaattcatggggttttgactttgccaacatttgctgtgcaccttctgtactaggccctatagttcttctatctacatggaaatcctgcagtgtgccctacaggaaggaatttacacagagcatctttttgttctgttagacagacatacactctctaagtagagttaagacatcatcacttcatcacattacaaaataagattgtctgcttgtaatttatcactacaggggaagctgccttataaatctaagtactttatctcacctattacaaaaacaaggaaatctttttcagttaaattttcagagcccaaactttgtttttacactatagcttaagacaaacaggtgtgggtatgttcaactgtggtttaaggttctcagtgcagacactcactgtcctctgctctgcacgggccatggacagctgggcggcacaaggtcgctagctggctccaggcctgtgggcatcacaacgttattgctttggttctgtctcagacaccagagagtgtgtctcagagcctagggtttccacatcacagaaggtcaggacaggaattcagatttttcacaaagaaaaagcattttttctctctctaggttaagtgcagaacaacaaatttctaagtgctccatttataagaggttccagatatatatcttgatttaatcctgatcatccacattaaaattatgaatgtaaaaattacataataggcttttcggctgggaaagaaaagtgtctagcagcatgcacaaagaccatgcattgtcacatcatcaggcgaacaaatggaaaggtaataaataattgctcctaacgcccactttaaaatagtaaaaccaaatggaacagtgaagtgagccggtcttcactgctctgagcaggaagcgtgctagcggccagatggggccacagtcagatgacatggcaacagctggctgggctggatgcgcacagcagcccctccttagggttccgctggatgttcacagagatggtcttttcgcacagaggtagctgcagcacgttatttttcagggtcttgctctttatccgttccaattcagtggtggtatctgccatgtggtcagagaaaaactttatgccgcccactgcagggacctgccctgcattccctgtggagctaatgcacattttccacgtagatttctcttggactttcacactggaaaatgacaagccattctgtggatcaataatgtacttggtgctcccatgaagctgggagccgaggcagaggctcatgagtttgaggctctcaacgagctccccagcactgcgagaggccagctgcatggagttgctggggccggcacagcggcgtgtggtacccgatgtattggtggggttgccacccgagccgctggagggactgcccccaccagcattgttctcactggggctggccttgtccacccctccactggcattgcttggcttgctctggcccccgccatccccctcactgccagggggcccctcgctgctatcccgtcggtgccaggagtaggtgaacccgctatctttatcgagccgccgccggctttcagaatcatcatcactggtctccgaactactgcagctggagccccggccctgacttttcctccggtggtagcgtttgtgaactgtacctggagaagctatattcatctttaacctgctcaacttgggaggcagattctcatccatgtcaaactcatcatcagattccccttcctcaaagatctggttgaggacgggcgcactcttcctggatgtcaggcggttggttacagatggcttccggcgcaaaaccacttgtgttgagagggacatgggtttcttgtcctcctcatcttcctcttcatcttcttccaccctgaacagacacttccgcccactggctgtgggttttaagcttgcgggtggcaccgtagagagtgctggtccagccaactcagggaggtcatctttcttagctgagtcacacaggcctttgctcctgtggccattgaggacactgtcagcagcccgagcaggagactgagggacagtcgcgtgggacaaaggagtggccgtgaggtcatcctcaaggtcctggggtacatcaattttggttggccatgactgcctaaactgggccttgatattgctcgggcttgcagatctggtctgtatttctttctcttgcttttctctcaggatcctttcagccagcaggaagtatgtggctgtgatatggttatacctgttggtttccagggcttctacaatggcgtctcgatccgctatgtccccaagcaccatgcgctgaatgatgctgttgtgctcctcttccgagagatttttgtatgacacaaggggaatgttatactttgtagctggtgaagggtccactccctgaagccaaggatgattttcaatctcttctaaagaagcccttctcttgggatctctctgtagcatccgtgtgattaggtctttacactctttagacacatgggatggtactgtatatttgcaatccatgatcattgtcagtgtttcactgtcattggcttcttgaaagggcggctgcccacacaccaacatgaaaaggatcactcccagactccaaatatctataaatcaaagacatactttaaaatattggactaattagaaaaccaaaaacattaaaagtgcgctaacaatattattttatcttgagcagtcaaaagcatttatatctcaaagtacaaacatccatgaaggaaaagaagccccaatagggcagggaaggtgtctatcttcttcaatgtttttacagtaattgctagtacacagtgaatggtcaataaatgttcgatgaagagacaaattaatgcctttggtaacagagcaataatatcaactgaaaagtatccaggtgcccaagccaacagacaacacactgctatttttcccattagaatatataccagaaataaaactaatatattaatactctgagaccggaaaagaattttgcttaaggtcacaattatgtcaagttgttctttacctcaacgctagtgaggtaaccaggtgatgtaaccggacgcgtggg

SEQ ID NO: 91358 - DNA, 4444 bp, Homo sapiens
ggcaggacttgaacttgagccagttggacccggcagcccctttcctgtccgctcccctgcctctccaatagtgggggccgtgagggactcctgggctttctgtctctggcccccacctgggggcccctcacggttcctctcttctcccctgcttccctagcccccgctccacacaaggggtggatcctcagcaagcgattcccctctctgggcctcagtttcctcatctgtaacaggaggggatctgaccgcagggaggggcagcaggcaagcccagtgcttaagagtgtgggtctgtttgggactggactgtctgggctcgatccttctattgtcattcagttaaaaatatttttttcatgcttaaaggcaaatgtattcagttcctttccatgcagcacacaataagtttatctatgtgcttatttcttttccacgtgcgcgtgcgcgtgcgcgcccggacgagggtgacggggaccccgccagccccagcatcgcgcgccgcagccgcggccccgcagctccgcccccggcccggcccggccccgggcccgctcgcccgccgccccgcatggagctgtcagccatcggcgagcaggtgttcgccgtggagagcatccggaagaagcgcgtgcggaagggtaaagtcgagtatttggtgaagtggaaaggatggcccccaaagtacagcacgtgggaaccagaagagcacatcttggacccccgcctcgtcatggcctacgaggagaaggaggagagagaccgagcatcggggtataggaagagaggtccgaaacccaagcggcttctgctgcagcggctgtacagcatggacctgcggagctcccacaaggccaagggcaaggagaagctctgcttctccctgacgtgcccactcggcagcgggagccctgagggggtggtcaaggcgggggcacctgagctggtggacaagggccccttggtgcccaccctgcccttcccgctccgcaagccccgaaaggcccacaagtacctgcggctctcgcgcaagaagttcccgccccgcgggcccaacctggagagccacagccatcgacgggagctcttcctgcaggagccaccggccccagacgtcctgcaggcggctggcgagtgggagcctgctgcgcagccccctgaagaggaggcagatgccgacctggccgaggggccccctccctggacacctgcgctcccctcaagtgaggtgaccgtgaccgacatcaccgccaactccatcaccgtcaccttccgcgaggcccaggcagctgagggcttcttccgagaccgcagtgggaagttctgaatcaccgtttttactcttcttaaactgttttcttttgggcttggggtgggacttccagagatagggatgggttgggggcggggtaattattttatttaaaaaaataccgagcagcaaaaggggagaagatcccactactctcccaccacctgccctttctctgagggacgtttaccacgaggcctcaggctggggatggagagagttgctctgggagttggggtaccacccccagggcaggatggggacaggatcacctgcccgggacaccaccattatcattctcctctagtgacgcagcagctggttctgggagttaaaggagcattggaaggcccaaaccctctcccttgagtggccaccccagcctggttggctggttttccccttttctcttgtttcaattgggtctttaccttgaactctcctctctggctttgcggtgggctgtggaggctggttttgaccaaaagtgagtggggcgggaggaaggggcaggaggaagggttgaggttacttggggcgagtcccttccccttcagagaggcttctatccttcccagggaggaggcgccgctgagacccttctgctgagagctctgccctcccctcatcacctggcctgtgcagaaacgctcatgcacacctggctgcacaggtgtgcacgcattacccttcgcgtgtacgttcccatgtgccccgtgaaagcatgtgtggctgcagacgtgtccacatgggccttgcgaacctgggttagaaaccctggccaggcgaacgtggggtgattcacagcacaaaagacctcaccaccacacctgcactcaccccaccttgcatgcaccttgctacctgcttgcggctttcagcggagggcaggggtctggcacaggtgcgatggcaccccatgctccaggcatacagatgtggtttctcggctgcaccgggccaggctgcgggtgtgcaggcgtctgctaagttgtgtgatgtatcagcacaggctttgagacgtctggaccctgttcttcctcccgtgagggtttcttgttctttctgactcaggtgactttatcagcccttccaattcccctctttttctgccctcccctccaactcagccaacccaggtgtgggcagtcagggagggagggagtgtcccaccacgttctcagggcagcccttgactcctaagccccttcctccttccattctgcatcccctccccatccaacctaaatgccacagctggggctgagctgtattcctgtggagggacctctgccgtgcctctctgaggtcaggctgtgctgtgtgatgggcaggctttgccccagcccacccctggcaaggtgcacttgttttctggtttgtacaaggtgtcctgggggcccgtggcttccctgccagtgaggagtgacttctccctctcttccagtcctgtaggggagacaaaaccagattggggggcccaaggggagcatggaaaaggccggctcccctgtctttccttggctgtcagagtcagggtaacacacaccaagagtggagtgcggccagcaagtttgagacctgcccgccctcctcgcagctctgctctgtgtcctcaggaagtcacagagtctactgaggcaaggagagggtgattctttccccaaatcccttcttccctggttcccaaaccaaagacagcctgcagccctttctgcatggggtgctctgttgacaggcttcccagatccctgagtctctctttccttcctcctcgatctttagttgtccacggtcaattcagtgcttccattgggggacagtcccctccgggatgacctgattcacctccagcccagggaatggaatctagaggaatacgtggggtgggtctggacaaggagcggcaggaatcaccacccatctccagctgtggagccctgtggaggggaaggggaagcttggggttcagagggaactcttccaggagaggggtgcccagcggaggtaaagatgatagagggttgtggggggtctctagttgaatgttttggcccatgactttggaacatggctggcagcttccagcagaagtcacgctccccatcccccaggggacataggacctttttcctgcttcctggtcactttcaaagaactatttgcgcaatctgtgggtctgtggattcacggggctttctgtgtgggtgctgcagttgcttttgtctgcagcagcaggacacatctttcctcttactcagccctttatggcccatggggaactccgtggctcagggagagctgaactccaggggtgtgacctgggacgggtgggcctgaggtgcccagctcagggcagccaggtggctcatgggctgtagtgagccagctccctgggggaaaaggctgtgggccgttaggaccatcctccaggacaggtgacctctatgaggtcacctacggctgtggccgtgcaggcctccttccagcccagagtggcccagtagagcaaggcagacagtgacctccacccccgcagccctcttaaaaggccagtactcttgggggtggggggagggtttagaaagcatttgcccatctgcctttctttcccccagcccccacccgctttgaatgtagagacccgtgggcacttttccttttgtggtggggggtgcggaggaggtacccccacccctggcacagccgcctggaatgcaggactgtcactgctgttcgggtgatgacctcgttgccaagctcctcctgtccccttgttctgggggcaggcgctgtgcttctgtgaggtggtttagcttttgctttcgaagtggccagctgcggccaccaggtctcagcacaagagcgcttcctttgcacagaatgagcttcgagctttgttcagactaaatgaatgtatctgggaggggtcgggggcacgagttgattccaagcacatgcctttgctgagtgtgtgtgtgctgggagagtcagagtggatgtagagcgcggttttatttttgtactgacattggtaagagactgtatagcatctatttatttagatgatttatctggtaaatgaggcaaaaaaattattaaaaatacattaaagatgatttaaaaaaaaaa

SEQ ID NO: 91359 - DNA, 3073 bp, Homo sapiens; identical to SEQ ID NO: 59108

SEQ ID NO: 91360 - DNA, 2419 bp, Homo sapiens; identical to SEQ ID NO: 59132

SEQ ID NO: 91361 - DNA, 7471 bp, Homo sapiens
tctgcggcgctcggagcctcccttgcgatcccacggccgggactgcccggagtgcatgggcgcgggccagggacgctgagcggtcgcgccatggagggcgccgagccccgcgcgcggcccgagcgcctggccgaggccgagacgcgggcggcggacggcgggcgcctggtggaggtgcagctgagcggcggcgccccgtggggcttcaccctgaagggcggccgcgagcacggcgagccgctggtcatcaccaagattgaagagggcagtaaagccgcggcggtcgacaagttactggctggagatgagatcgtcggcatcaatgacattggtctctcagggtttagacaggaagcgatttgcctggtgaaggggtcccataagaccctgaagctggtcgtcaaaaggaggagcgagctgggctggaggcctcactcctggcatgccaccaagttctctgacagccaccccgagctagcggcctccccgttcacctccaccagcggctgtccttcctggtccggccgacaccacgcgagttcttcctcccacgacctgtccagttcctgggagcagacgaacctacagcgcaccttagatcacttcagctccttggggagcgttgacagcctggaccacccctccagtcgcctctcggtggccaagtccaacagcagcatcgaccacctgggcagccacagcaagcgcgactcggcctacggctccttctccaccagctctagcactcctgaccacaccttgtccaaagccgacacgtcctccgcagagaacatcctctacactgtgggcctctgggaggctcccaggcagggtggccggcaggcccaggccgcaggcgaccctcagggctcggaggagaagctcagttgtttcccgcccagggtccccggtgacagcggcaaaggccccaggccagagtacaatgccgagcccaagctggctgcccctgggaggtccaattttgggccagtctggtatgttcccgataagaagaaagcaccatcatccccacctcctccccctccccctctccgcagtgacagctttgctgccaccaagagccacgagaaggcccagggccctgtgttctcagaggcggctgcggcacagcactttacggccctggcccaggctcagcctcgtggtgaccggagaccagagctcaccgatcggccttggaggtcagcacacccggggagcctcgggaagggatcgggaggcccgggctgcccacaggaggcccacgcagacggcagctggccgccctccaaggatggagcttccagtaggctgcaggcctctctgtccagctcagatgtgcgcttccctcagtctcctcatagcggccgacaccctcccctatacagcgaccacagccccctctgtgctgacagccttgggcaggagccaggggctgccagcttccagaacgacagccctcctcaggtgagggggctcagcagctgtgaccagaagctggggagcggctggcagggtccccggccctgtgtgcagggagacctgcaagcagcacagctctgggcgggatgctggccttctgacacagcccttggagccctcgagagtcttcccccacccacggtgggccagagcccacgccatcacctacctcagcctgagggtcctccggatgcccgcgagacaggacggtgttacccgctggacaaaggggccgagggctgctccgcgggagcccaggagcctcccagggccagccgtgcagaaaaagccagccagaggctggcagccagcatcacgtgggcagatggggagagcagcaggatctgcccgcaggagacgcccctgttgcactccctgacccaggaggggaagcgccggcctgagagcagtccagaggacagcgccaccagaccgccaccgttcgacgcccacgtgggcaagcccacccgaagaagcgaccgctttgccaccaccctgcggaatgagatccagatgcatagagccaagctgcagaagagccggagcacagtggctctgactgcagcaggggaggcggaggatggcaccggccgctggagggccgggttgggaggtggcacccaggaaggacccctcgctggcacctataaagaccacctgaaagaggcccaagcccgggtcctgagggccacgtccttcaagcgccgcgacttggaccccaacccaggagacctatacccggagtcactggaacaccggatgggggatccagacactgtcccccacttctgggaggcaggcctggcccagccaccctcatctacaagtggcgggccccacccgccccgcatcggaggccggagacggttcacagctgagcagaaattgaagtcctactcggaacctgagaagatgaacgaggtgggcctcacgaggggctacagtcctcaccagcaccccaggacatctgaggatactgtgggcacgtttgctgacaggtggaagttttttgaggaaacgagcaaacctgttccccagaggcctgcccagaagcaagctcttcacggaatcccgagagacaagccagagaggccgcggacagcgggccgcacatgtgagggcacggagccctggtcgcgcaccacctcccttggggacagcctcaacgctcacagcgcagcggagaaggcagggacttcagacctgccgcggaggctcggcacctttgcagagtatcaggcctcttggaaggaacagaggaaacctctggaggccaggagctctgggcgctgccactcagcggatgacatcctggatgtgagcctggacccacaggagaggccgcagcacgttcatgggaggtcccggtcttcaccgtccacagaccactacaagcaggaagcttctgtcgaactgcgaaggcaggcaggggaccccggcgagcccagagaagagcttccctccgcagtccgggccgaggagggacagtccacgccgagacaagcagatgcccagtgtcgggaaggcagcccaggatcacagcagcacccaccgagtcagaaggcaccgaacccacccacattctctgaactatctcactgccggggagccccagagctgccccgggagggccggggccgagcgggaaccctacctcgagattatagatactcggaggagagcaccccagcagacttgggaccccgagcccagagccctggctcacccctgcatgctcgaggacaagactcgtggccagtgagctcagccctgctctccaagaggccagccccacagaggccaccgccacccaagcgcgagcccaggagatacagggccacagacggcgcacctgctgacgcccccgtgggcgtcctcggcaggcccttcccaacgccatcccctgcgtccctggatgtgtatgtggcccgcctgtccctctcccacagcccctctgtgttcagcagtgcccagccccaggacaccccgaaggccactgtctgtgagcgtggaagccagcatgtgagcggggacgcatcacgtcctctgccagaagcactgctccctcccaagcagcagcacctgcgcctgcagacggccaccatggagacctcgcgctccccctcgccccagttcgccccccagaaactgacggacaaacctcccctgctcatccaggatgaggattcaaccagaattgagcgggtgatggacaacaacaccacggtgaagatggtgcccatcaagatcgtgcactcggagagccagccagagaaggagagccgccagagcctggcatgccccgccgagccacctgccctgccccacgggctggagaaagaccagatcaagacgctgagcacatctgagcagttctactcgcgcttctgtctgtacacgcggcagggtgctgagcccgaggccccacatagggcccagccggctgagccccagcccctgggcacccaggtgccccccgagaaagaccgctgcacctcccctccagggctcagctacatgaaggccaaagagaagactgtggaagacctgaagtcggaggagctggccagggagatcgtggggaaggataagtccctggccgacatcctggatcccagtgtgaagatcaaaaccactatggacttgatggaaggcatcttccccaaagacgagcacctcctggaagaagcccagcaacggaggaagctgctccccaaaatcccctctcctagaagcacagaggagaggaaagaggagcccagcgtgcctgcggccgtgtccctggccaccaattctacctactacagcacgtcggcccccaaggcggagctgctgatcaagatgaaggacctgcaggagcagcaggagcacgaagaggattcgggaagcgacttggaccacgacctgtcggtgaagaagcaggagctcatcgagagcatcagccgcaagctgcaggtgctccgggaggcccgcgagagcctgctggaggacgtgcaggccaacaccgtgctgggggccgaggtggaggccatcgtgaaaggcgtctgcaagcccagcgagtttgacaagttccggatgttcattggagacctggacaaagtggtgaacctcctgctgtcgctgtcaggccgcctggcccgggtggagaatgccctcaataatttggacgacggcgcttctcccggtgatcggcaatcactgcttgagaagcagagagtcctgatccagcagcacgaggacgccaaggagctcaaggagaacctggaccgccgcgagcgcatcgtctttgacattttggccaactatctgagcgaggagagcctcgcggactatgagcacttcgtgaagatgaagtcggccctcatcatcgagcagcgggagctggaagataaaatccaccttggtgaagagcagctgaagtgcttattggacagccttcagcccgaaaggggcaaataagagaccagtccccggtggaggaggggcacggggcctccgagctccagctccgttcccaaggatactcgtgaagaccccatctgtgttcatggcctggaaagagacttctcccatagcaaagaggctgttataaaagcaataacttttgtgtttgtgtgggatgatttatttaattttttagtttcccctttgattgctgagagccattttcctttacacataactacacctgacaccaggctctgctggatgtgagtttccactgcatgggctgtgggctgggcctgtggtgcctgccgagtggtcactgtcagtgggaaacccgttgttcctcccgtcttcagatgctgagccaactgcttggacagcagccagcgcgtcatgacgtgcatgagagggggaccctggtgctcatcttctcttgtcattcatccaggcatgggctgccaggttttgtccctgctcgttcaacagtgtgagcatttgtctctgttatctaatgatgttctctgacccagcagaaatcatcatcatgatgatgataatttattaactttttggaagggtgaatagtttcctaatggttaaaaaccaactgtgaaaggaaccacctgtgtggttgggttcactcattctcagattaaattgccacttaaagaaataacgtgcatgctttaaaaaacacagtcacgcaccaagcaggcaaatagctttagtccttctcacctcacatcacagttgttctgcaaagtaaaattttttggttaagagcgtgtccagtagtaatgtgcttgttagctgtttctcaagaccaacagaagattttttcagttactttccccccatgtattttgtatgcatatgattgtccgtgataattgggctacttttccattgtttcctccttaaatcgtttagcatggcatgagggccacattccatggacgggaagacccccttcctcttcagaggtcccgtgggacctacacagcctccctgagcttggatcctttttcctgccccatgaagttttaaagattcctatgccccatttcccttgattgaaatggcaggattcctaaagagagccctggtttgttaaaagaaaacactgtcatgcctgtcagttccccaattgacaagtcacagactgggagaaaatatttgcaaatcgtgtatctgacaaaaggtttgtgtccaggatgtacaaagaactctcaaaccggatagtaagaaaacaaacagcccaagtgaaaagcaggcaaaagacttgaatagacacttcaccaaagagcatacacgcgtggcaaacaagcacacgaaaagacgttcagccgccgatggcttggttataatttataacttacttatttttatctaataattggagattcagtgtatttcttcaaaaaatgtttaattaaatgcatgttaatggtgagtgaatcccttgggtgacttcgtgtttaggtcgtattagggcatttgttggatcaacggatcattttaaccctgacttccccttattcccataaaagaagttttccagtggaatggagatttcattttgtcagcagcagtgaccacagccttaccaaagcagacgcgtgcgcgtgcacagatgcacacacacagatgtcttaaaagactagaatccacacttcctgagccagaggggccgtgttgacggtaatgcattctctatagagccaagtccaaactggcaagctcaatgatgcaggcaataaaccgcctttttggcagcctaccaatgccaaaaggataaatgtctttccaaaagtgtgtattcctgttaaattaagctcttgctaacttgaaaaatccctgttctgccagcgaagcttcctcctcctctccagctggtaggtacttgcgtgaatgctggtcagtctgaaaaggtgaagctggctgtgcacttacccccatctttctccctcggggagacgacccaaggaatttcaaaatattttgtttggcagagcttttacctgttattctttgccctcaaatacagtattggggtcattttgatgatatgtgtgtaaaatgtgaataatccaattggtgtctgtactcagccttttgatgtctttttaggactttctcttctacacagcaatacgtcgtgctcgagtatccttgtagcaaagcacatagagccagctgtcctgtcagttcccctgtttgcctctgaaacgtctggttagtggggacccaaagattctagtgagtcaacatccataactctgtatctagttgtattattcatagaaaatcaatctggtgctaatggttggccctggtgttgttgggtggcagctgctccttcgccctcttgtagtgtggctgtggagggctctgcctatggggggtggcctgtggcttgtatccttcagtccaccacagcaaatgtgtgtagatttcatgctcgacacttaccactcacctatcaacagatcatcctgcttgactggtaacaaaataaatagtgtatcattcaaaaaaaaaa

SEQ ID NO: 91362 - DNA, 2324 bp, Homo sapiens
ggcgctactccggggcttcacgggattgtggcggtcctctctcccaattcggaagctacagctacctccggacgctctcaagatggcgacctctctgggttccaacacctacaacaggcagaactgggaggatgcggacttccccattctgtgccagacatgtcttggagaaaacccatatatccgaatgaccaaagaaaagtatgggaaggaatgcaaaatctgtgccaggccattcacagtgtttcgctggtgccctggagtccgcatgcgtttcaagaagactgaagtgtgccaaacctgcagtaaattgaagaatgtctgtcagacctgcctcttagacctagagtatggcctgcccatccaggttcgtgacgcaggattgtcttttaaagatgacatgccaaagtcagatgtcaacaaagagtactatacacagaatatggagagagagatttctaactctgatggaacacggccagttggcatgctggggaaagccacatctaccagtgacatgctgctcaaactggcccggaccacaccctactacaaaaggaatcgaccccacatttgctccttctgggtgaaaggagagtgtaagagaggagaggaatgtccatacagacatgagaagcctacagatccagatgacccccttgctgatcagaatattaaagaccgttattacggaatcaatgatcctgtagctgacaagcttctaaagcgggcttcaacaatgcctcggctggacccaccagaggataaaactatcaccacactatatgttggtggtctaggtgataccattactgagacagatttaagaaatcatttctaccagttcggagagatccggacgatcactgttgtgcagagacagcagtgtgctttcatccagtttgccacacggcaggctgcagaagtggctgctgagaagtcctttaataagttgattgtaaatggccgcagactgaatgtgaaatggggaagatcccaggcagccagaggaaaagaaaaagagaaagatggaactacagactctgggatcaaactagaacctgttccaggattgccaggagctcttcctcctcctcctgcagcagaagaagaagcctctgccaactacttcaacttgcccccaagtggtcctccagctgtggtgaacattgctctgccaccgccccctggcattgctccacccccacccccaggttttgggccacacatgttccacccaatgggaccaccccctcctttcatgcgggctccaggaccaatccactatccttctcaggaccctcagaggatgggagctcatgctggaaaacacagcagcccctagcaccttgtcaccactctggggctctgtggaagaaagggcacttaaaactcccagtaaatcttggaataaatatatttttccttcccttgtagtttccatggtagctgaatgtgctcagatgtgagcagtcagagactgacagccatgctttcctatacttgttcaaaggatcgatggaccgtaaataagctgccattaacacatctggttactgctgtaacatgactaataaaaccgaacgcctgttccccttacccgtgtgggggacacgcagatgagtgaattggaatgtccagcagagttaccctcccaattatatgttcattttgtatattttttggtcgggggaaaaattgacctgcagtaaaaaaacctttgaccatttttatgtccattggatactttcctttttatcatcttaaaaaaagataactagtactaatcattgtagtgggcctaagtgtgatttaactcttggaagtcacaccctccgaaagatgagtaggaaaccaggcaccagcacagcccagatcttctctttcctctccttttcctcatttatttcctaaagggaatctggaccattttacgtctctacgggcccaaaaaaaggacaaaaataaaaattcctttttattcctgttcaactggatggaaacacaaatttcatggagctgtgtaccatcgaagaaacctggtgtctggcatgaaactaccggaaaagaacttcctgttaaacccgtttctttaaccaactcgaaggaaacagaatggagcggcttgaatgaaagacgtgacctcctgctgggactctgatggtcttcagcattcaccttccgtgtgtcttcagtgtctcattggtcatccctgcttctgtttgggtcttagagtgtttggatataactgaattgtagatggtaaaggaaatttgatgtgttttttgtttttaaataattaaaacgggtcaatttttcaaaaa

SEQ ID NO: 91363 - DNA, 1823 bp, Homo sapiens
cttgagaaccgcgccggaatttccgggacgattccacgcgtccgcgcacgcgtgggcggacgcgtgggcgccgccgtcgtgcgtgccgctcggcggaggggacgggcctgcgttctctcctccttcctccccgcctccagctgccggcaggacctttctctcgctgccgctgggaccccgtgtcatcgcccaggccgagcacgatgccccctaaaaagggaggtgatggaattaaaccacccccaatcattggaagatttggaacctcactgaaaattggtattgttggattgccaaatgttgggaaatctactttcttcaatgtgttaaccaatagtcaggcttcagcagaaaacttcccgttctgcactattgatcctaatgagagcagagtacctgtgccagatgaaaggtttgactttctttgtcaataccacaaaccagcaagcaaaattcctgcctttctaaatgtggtggatattgctggccttgtgaaaggagctcacaatgggcagggcctggggaatgcttttttatctcatattagtgcctgtgatggcatctttcatctaacacgtgcttttgaagatgatgatatcacgcacgttgaaggaagtgtagatcctattcgagatatagaaataatacatgaagagcttcagcttaaagatgaggaaatgattgggcccattatagataaactagaaaaggtggctgtgagaggaggagataaaaaactaaaacctgaatatgatataatgtgcaaagtaaaatcctgggttatagatcaaaagaaacctgttcgcttctatcatgattggaatgacaaagagattgaagtgttgaataaacacttatttttgacttcaaaaccaatggtctacttggttaatctttctgaaaaagactacattagaaagaaaaacaaatggttgataaaaattaaagagtgggtggacaagtatgacccaggtgctttggtcattccttttagtggggccttggaactcaagttgcaagaattgagtgctgaggagagacagaagtatctggaagcgaacatgacacaaagtgctttgccaaagatcattaaggctgggtttgcagcactccaactagaatactttttcactgcaggcccagatgaagtgcgtgcatggaccatcaggaaagggactaaggctcctcaggctgcaggaaagattcacacagattttgaaaagggattcattatggctgaagtaatgaaatacgaagattttaaagaggaaggttctgaaaatgcagtcaaggctgctggaaagtacagacaacaaggcagaaattatattgttgaagatggagatattatcttcttcaaatttaacacacctcaacaaccgaagaagaaataaaatttagttattgctcagataaacatacaacttccaaaaggcatctgatttttaaaaaattaaaatttctgaaaaccaatgcgacaaataaagttggggagatgggaatctttgacaaacaaattatttttatttgttttaaaattaaaatactgtgtacccccccccctccatgaaatgcaggttcactaaatgtgaacagctttgcttttcacgtgattaagaccctactccaaattgtagaagcttttcaggaaccatattactctcatgatacttcattaatctccatcatgtatgccaagcctgacacatttgacagtgaggacaatgtggcttgctcctttttgaatctacagataatgcatgttttacagtactccagatgtctacactcaataaaacatttgacaaaaccaaaaaaaaaaa

SEQ ID NO: 91364 - DNA, 378 bp, Homo sapiens
ctaatactttcctaaagaatattcttaatatcttgattagaattgaatcaatgttaaaactgtttctctattgtttatcagatttcagagcagttcaatacttgaatagttacttgtaaatatttgtaaaattttgaaactcaaataatcatggagtacaaatggccatctgtgttgccattcattacatcctagggtagacccttggttgtcagagctttaaaatttactatattgagtacttataagtgacctgaaagtccacgatgtcaaataattttcagtttgtccatggcataagttgccatgtctcagctttcagtgccctaaaccaaatgctcctgtggcttcatgtgctcttggctgtaactcacatgt

SEQ ID NO: 91365 - DNA, 2983 bp, Homo sapiens
accgcctcgcgatttcgtcgcggctcggcgggcgggcagtgccggcgtccgcggctggaatggtgctggctgtgttggtcggtgcctgcgttctgaagcccgagaggagccacaatggagacgccgccgctgcctcccgcatgcacaaagcagggtcatcagaagcctctcgattcaaaagatgataataccgaaaaacactgcccagtgacagtgaatccttggcatatgaagaaagctttcaaagtcatgaacgaattaagaagtcaaaatttgctgtgcgatgtcacaattgtggcagaagacatggaaatttctgctcatagagtggtgctggccgcctgtagtccttattttcatgccatgtttacaggtgagatgagtgagagccgagcaaagagagttagaataaaagaggtagatggctggaccctgaggatgctaattgattatgtttacactgcagaaattcaggttacagaagaaaatgtacaggtacttctcccagcagctggtctcttacagttacaggatgtgaagaagacttgttgtgaatttttggaatcccagcttcaccctgtcaactgcttaggaatccgggcttttgctgatatgcatgcatgtaccgaccttctgaacaaggccaacacctatgcagagcaacattttgcagatgttgtacttagtgaagaatttctcaatcttggcatcgaacaagtgtgcagcttaatctcaagtgacaaacttaccatttcttcagaagagaaggtatttgaagcagtaatagcatgggtgaaccatgacaaggatgtgaggcaagagtttatggcccgactgatggaacatgtacggttacctttgcttcctcgggaatatttagttcagagggttgaagaggaagcattggtcaagaatagcagtgcttgcaaaaattacctgattgaagcaatgaagtaccatttgctgccaacagagcagcgtatattaatgaagagtgtccggacccggctgaggacacccatgaaccttcccaaattgatggtggtggttgggggccaagcaccaaaggctatccggagtgcggaatgctatgactttaaagaacaaaggtggcaccaagtagcagagttgccttccaggaggtgcagagcaggcatggtctacttggctggacttgtttttgctgttggtggctttaatggctcattaagagttcgcactgtagattcctacgaccctgtgaaggaccagtggaccagcgttgctaacatgagagaccggagaagcactttgggagctgctgtgttaaatggattattatacgctgtgggaggctttgatgggagtacaggtttgtcatctgtggaagcatacaacataaagtctaatgagtggtttcatgtagctcccatgaatacaaggaggagcagtgttggtgtgggtgttgttggaggtttgctctatgctgtaggaggttatgatggagcatcacgtcagtatcttagcacagtagaatgctataatgctacaacaaatgagtggacctatatagcagaaatgagcaccaggcggagtggagcaggtgttggtgtgttaaacaatttattgtatgctgtaggaggtcatgatggccctttagtacgaaaaagtgttgaagtatatgatcccaccactaacgcatggagacaggttgcagatatgaacatgtgcagaagaaatgcaggagtttgtgcagttaatggtctgttatatgttgttggaggggatgatggttcctgtaacttggcgtcagtagaatattataacccaacaaccgataaatggacagttgtgtcatcgtgtatgagcacagggagaagttatgcaggggtcacagttattgataaaccattatgagcctgaaggacattttcagcatatttatacatgagaaacagccttcaacaagtatttgtgaagtgactgagaatctagcacttctccacttgtagctgcactttaagtctcagcagaagatacgatcgtctgcctttataggcctcagatactgaagattatttttggtagaagcaccgtgtaggctttttctgcaatgagcagcagctgactgaattttcataagaaacttggactgcaggacttaatctgtagtctttagacaacagttgctttcataaagactagttcttatcaaccttgaatgactacagattattttgtgaaggaggatgaagtaatgtgtgttcttgtaaaattaaattttatctttatttcttctaaaaatctgtataccaggaactgaaaatctttgaacagatattaaaatctacgtaagtatacaaactagttgagggatacactgtttgcttttataaaataactttgattacatgaatataataaattatgtgcatataaatgtgtgtctatatgctttcctttaaatatgtttgaaaagatgtttgaaacttgattatactatttataattggcacagtactttgaattatgccagtactacattgtaaaacagagttgtattttttgatatttaacaatgcttaacactttaaatgccacttctgaggaatggacctggtgtaacacacttgaatatgtgtgatgccaaactttttaaaatacaatataaattatgcttatttattattttctttagtttaatcttggtcatgttttggtgtgtatttttaatttttttcttaaattaacactttggcatgaacattactgcaggtttttgatgaatataatgaatgtatggaattcaattgaatttgcatggtcttcggaattttttctgtgtgtataaatttagctgctattaacagaagagagaactttctgtgagtagccatgtgtgttgatcagatacagtttttctgagatcttcaattaatctcactttaaaaatgaccaaaacatgtctttcttgaattaactttgaataaaagtttgtatatta

SEQ ID NO: 91366 - DNA, 3945 bp, Homo sapiens
cctgccagacacgcgcgaggttcgaggctgagatggatcttgaggcggcaaagaacggaacagcctggcgccccacgagcgcggagggcgactttgaactgggcatcagcagcaaacaaaaaaggaaaaaaacgaagacagtgaaaatgattggagtattaacattgtttcgatactccgattggcaggataaattgtttatgtcgctgggtaccatcatggccatagctcacggatcaggtctccccctcatgatgatagtatttggagagatgactgacaaatttgttgatactgcaggaaacttctcctttccagtgaacttttccttgtcgctgctaaatccaggcaaaattctggaagaagaaatgactagatatgcatattactactcaggattgggtgctggagttcttgttgctgcctatatacaagtttcattttggactttggcagctggtcgacagatcaggaaaattaggcagaagttttttcatgctattctacgacaggaaataggatggtttgacatcaatgacaccactgaactcaatacgcggctaacagatgacatctccaaaatcagtgaaggaattggtgacaaggttggaatgttctttcaagcagtagccacgttttttgcaggattcatagtgggattcatcagaggatggaagctcacccttgtgataatggccatcagccctattctaggactctctgcagccgtttgggcaaagatactctcggcatttagtgacaaagaactagctgcttatgcaaaagcaggcgccgtggcagaagaggctctgggggccatcaggactgtgatagctttcgggggccagaacaaagagctggaaaggtatcagaaacatttagaaaatgccaaagagattggaattaaaaaagctatttcagcaaacatttccatgggtattgccttcctgttaatatatgcatcatatgcactggccttctggtatggatccactctagtcatatcaaaagaatatactattggaaatgcaatgacagtttttttttcaatcctaattggagctttcagtgttggccaggctgccccatgtattgatgcttttgccaatgcaagaggagcagcatatgtgatctttgatattattgataataatcctaaaattgacagtttttcagagagaggacacaaaccagacagcatcaaagggaatttggagttcaatgatgttcacttttcttacccttctcgagctaacgtcaagatcttgaagggcctcaacctgaaggtgcagagtgggcagacggtggccctggttggaagtagtggctgtgggaagagcacaacggtccagctgatacagaggctctatgaccctgatgagggcacaattaacattgatgggcaggatattaggaactttaatgtaaactatctgagggaaatcattggtgtggtgagtcaggagccggtgctgttttccaccacaattgctgaaaatatttgttatggccgtggaaatgtaaccatggatgagataaagaaagctgtcaaagaggccaacgcctatgagtttatcatgaaattaccacagaaatttgacaccctggttggagagagaggggcccagctgagtggtgggcagaagcagaggatcgccattgcacgtgccctggttcgcaaccccaagatccttctgctggatgaggccacgtcagcattggacacagaaagtgaagctgaggtacaggcagctctggataaggccagagaaggccggaccaccattgtgatagcacaccgactgtctacggtccgaaatgcagatgtcatcgctgggtttgaggatggagtaattgtggagcaaggaagccacagcgaactgatgaagaaggaaggggtgtacttcaaacttgtcaacatgcagacatcaggaagccagatccagtcagaagaatttgaactaaatgatgaaaaggctgccactagaatggccccaaatggctggaaatctcgcctatttaggcattctactcagaaaaaccttaaaaattcacaaatgtgtcagaagagccttgatgtggaaaccgatggacttgaagcaaatgtgccaccagtgtcctttctgaaggtcctgaaactgaataaaacagaatggccctactttgtcgtgggaacagtatgtgccattgccaatggggggcttcagccggcattttcagtcatattctcagagatcatagcgatttttggaccaggcgatgatgcagtgaagcagcagaagtgcaacatattctctttgattttcttatttctgggaattatttctttttttactttcttccttcagggtttcacgtttgggaaagctggcgagatcctcaccagaagactgcggtcaatggcttttaaagcaatgctaagacaggacatgagctggtttgatgaccataaaaacagtactggtgcactttctacaagacttgccacagatgctgcccaagtccaaggagccacaggaaccaggttggctttaattgcacagaatatagctaaccttggaactggtattatcatatcatttatctacggttggcagttaaccctattgctattagcagttgttccaattattgctgtgtcaggaattgttgaaatgaaattgttggctggaaatgccaaaagagataaaaaagaactggaagctgctggaaagattgcaacagaggcaatagaaaatattaggacagttgtgtctttgacccaggaaagaaaatttgaatcaatgtatgttgaaaaattgtatggaccttacaggaattctgtgcagaaggcacacatctatggaattacttttagtatctcacaagcatttatgtatttttcctatgccggttgttttcgatttggtgcatatctcattgtgaatggacatatgcgcttcagagatgttattctggtgttttctgcaattgtattgggggcagtggctctaggacatgccagttcatttgctccagactatgctaaagctaagctgtctgcagcccacttattcatgctgtttgaaagacaacctctgattgacagctacagtgaagaggggctgaagcctgataaatttgaaggaaatataacatttaatgaagtcgtgttcaactatcccacccgagcaaacgtgccagtgcttcaggggctgagcctggaggtgaagaaaggccagacactagccctggtgggcagcagtggctgtgggaagagcacggtggtccagctcctggagcggttctacgaccccttggcggggacagtgtttgtggactttggttttcagcttctcgatggtcaagaagcaaagaaactcaatgtccagtggctcagagctcaactcggaatcgtgtctcaggagcctatcctatttgactgcagcattgccgagaatattgcctatggagacaacagccgggttgtatcacaggatgaaattgtgagtgcagccaaagctgccaacatacatcctttcatcgagacgttaccccacaaatatgaaacaagagtgggagataaggggactcagctctcaggaggtcaaaaacagaggattgctattgcccgagccctcatcagacaacctcaaatcctcctgttggatgaagctacatcagctctggatactgaaagtgaaaaggttgtccaagaagccctggacaaagccagagaaggccgcacctgcattgtgattgctcaccgcctgtccaccatccagaatgcagacttaatagtggtgtttcagaatgggagagtcaaggagcatggcacgcatcagcagctgctggcacagaaaggcatctatttttcaatggtcagtgtccaggctgggacacagaacttatgaacttttgctacagtatattttaaaaataaattcaaattattctacccatttt

SEQ ID NO: 91367 - DNA, 1418 bp, Homo sapiens
ctaccagcaacttgagcaaaatcgccgcctcactaatgaactaaagctggccctgaatgaggattaaacttaagagtgaaaaaacttgggctgaattctaggcgtggagcccatgtgcagaaaatctaagactgtcctaccttcaactaatagagttgaaaacagttgctttctgcagaaatgcaaatgcaaggaattggctgaaaggctggccttgcctgcttgtttctctatatggctggaataattacgttctctttaatcacaaaacagcttttatggtagaatacttatatcaattcagcactgctccttgaaatagcaggtcctcttgtttgaactgataaataatgaggagcccccccaaaaaatgttttctatttcctgacagccatgagtcctactttaagtatgtatatatatatatatatatatatatatggtgtgtgtgtgtgtgtgtgtgtatatatattccctatcagatactcatattcctaacttctaaatatctggtatagcgtttgaaatatgattaaatgtacctatgcttgggcaaaatagcttttgaaaacaggaactcatgccagaagcccctggttgtctgaaaggtatgctttactcagtctaatggtgctgttggagtctggggagaatgtcatgctaataaatagaacactataaaaatattaagagaatgtcctaatgaagtgtgcatgaaacatgttgacaattttttatgagcaacagaaataaatcattttaaaagttctcagaaaacctatttatgtcatctttgcttttgtgagtttgtgttaccgcacaactcccagacttttaactgcctgtaccttggaaatgtctgctgttcgtaacttcttcagtttgtataacagtgctgcagctgtatttggtttttacctctccctgttcccacggcacaccgtcagtgaaccttcaccaaaccccacgtgcattttatcctcagtgaattgttggtggaggtgcacctgactgctctgtgagaatccgtgccatggctcctttgggtcaaagatgccctcccctccgtcttaggttcttgtctagaaatgagtaatgtcttacaagcatgcctagttctaatcatctcatcctgtgtttgtgattgatgtttgcctgcctaaatgtacaaaccaccattgtgtccaaagcacagctattcatgacttaattttctaatctcaccacagagaaagtggctcatgccaaagaagaaaaccttagtatgcatcagatgctggatcagactttactggagttaaacaacatgtgaaaacctccttagctgcgaccacattctttcgttttgtttttgttttgtttttaaacacctgcttaccccttaaaatggcatttatttacttttaccactggtccac

SEQ ID NO: 91368 - DNA, 445 bp, Homo sapiens
acccactcatgctttggttttatttgttcttcctatgggctcctcaaatcaagagaaagccagaaaaaaaaattgagataggaatatcctgttttatcaagtcttcttgtgactactatatcatttgttctcctgaagcctaatcaaatgagacataaaggacagccaacataaataccacttactgaatgtgataacaaaggtaaaattagttgaaacaacatgttccccagtgtccagcctctccgtggaagagtgagaagtcagaagtggctgctgatgttatggaaagttcatggcctttaatgggagacagttccagcggacacagattttcatccaggccctatgattagctatgtggccttgagcaaaactttaggttttaggggttttcatgtcctcatgggaagaatggggataggtaaatctaatttcaacaggg

SEQ ID NO: 91369 - DNA, 1326 bp, Homo sapiens
ttttttttttttcttaaggcttgtaggttttaatgtttcatgactggtaacagagtagtctcgaggggatccttggagaacctgttctgactttagaagcacttcctgtggacaatggagggccctgcctcatcatactcaggcttgctgatccacatctgctggaaggtggagagagaggccaggatagagcccccgatccagactgagtacttccgctctgggggagcaataatcttgatcttcatggtgctgggggccagggctgtgatctccttctgcatcctgtcagcaatgccagggtacatggtggtgcccccagagaggacattgttggcatataagtccttacggatgtcaatgtcacacttcatgatggaattgtaggttgtctcatgaattccagcggactccatgccaataaaggaaggctggaagagggtctcagggcagcggaagcgctcattgccaatggtgataacctgcccatctggcagctcatagctcttctccagggaggaagaggaagctgctgtggccatctcattctcaaaatccagggccacatagcacagcttctccttgatgtctcgcacaatttctctctcagctgtggtcacaaaggaatagcctctctctgtgaggatcttcatgaggtagtccgtgaggtcacggccagccaagtccaggcgcatgatggcatggggcagggcatagccttcatagatggggacattgtgggtgacgccatcacctgaatccaggacgatgcctgtcgtgcggccagaggcatagagggagagcacagcttgaatggcgacgtacatggcagggacattgaaggtttcaaacatgatctgggtcatcttttccctgttggccttgggatttaggggagcctctgtgagcagggtggggtgctcttcaggtgctacacgcagctcattgtagaaggagtggtgccagatcttctccatgtcatcccagttggtgatgatgccgtgttcaatggggtatttgagagttaggatccctcgcttgctctgagcctcatcccccacatagctgtctttctggcccattcccaccatcacaccctggtggcgagggcggcccacaatggaggggaagacagcccggggggcatcatctcctgcgaagcctgccttgcacaggccagagccattgtcacacacgagcgcggtggtctcctcttcacacatggtgtatgtggctgagtgagctggggactggagcaccgagggtatgagaggttcttctcccagtgaccggacgcgtgggcggacgcgtgggcggacgcgtggg

SEQ ID NO: 91370 - DNA, 1807 bp, Homo sapiens
ttttttttttttaaaaaaaaaaaaactttttaattctgattgccaaattatttaaggcaggtttaaaaaaggaaagcattcaatatacattttacataaaataaactaaattacagcataaaacaagtaaccaggcaatggcgttaaagtcttttttttctaaaactggataattgtaaacattaaaaaaaaaaaaaagactgtagaactattcaagtaatagaacaatcacagatgtctctggtacgcaggctattgggttatttgccattcaagattatcaaaaaatgacacctcattattcacagatgctcattatttccccattttaatctttacattatatacaacacagtttttgtggtactggcaaccccatgccttccaaaagtactttttccacaatacacaagtacaaacagtgactacaggaacattttacactggtgcgtctttaacaggagccaccaaatagacatctaaattgtaccaaagtgtcatcatcacagttagcctttctgaggggcttatgggaaatatgtgaaggatatgcaaggttcaggcacactgatacataacattatttatttataattttaaaggaaaaggaaaagaaagtaagtagccttttgtggctaacactttttaacatgacaaatacatttttaatttcctttactgagtggtttgcgacgtggcagcagaccctgtgtgtgcgagcctggttactgatacaaaaagtaaagaatatatttatatttatatatatatatatgtatatatacagatatgtatacgtatatatatataaaacagaagtttaattacagcaacatttgttactctgtgataaaatctgtaatttacaaaaatgaaatgactggtttttgcctgccattaaggcatttcaaattaacaccatggaactgatgtctgtataaagcgcttccccatgtgatccagtcacatgacaatgtacatgtccaatcttgttattctctttagcattatgaaaataaatgtctccatttgcgactttatcttctttgtccaggaaacattccagatgcagatgcctgggcagccacctgctgagaggcaacaagggcagcagaggtcaagccttgaaaagggtcatattgacccgggattagcgggtaacccatgccaacgtgggtgtggtggtgcgtgtgcaggtgccgctggccgaagggggagtggcgatccctttccctttctgcctcccgttcccgctcagctgtagccttttccacaggagcaggagacttgctgcggtattggttagcatgctgctggagcaaatccagtgctttagattcagtggttgttttcgtgttgacgctagggctggtattgactttctctgtctcttctctccctgacatcttcccataaacaggataatgaaatcctggagagagatatgccccaggataactgtgcattaggacgggagaaacagcccggtatgcaggatggctggggtcgtacatctgtgggtaaggataagcatgcaagtactgtatgtatgactgatgctgactcatgggtgaggagacagccactcttgttcccctagagtccttccagttcacaggagtctttcgatcatcatttttcagcttgctctcctccattgattgagaatcaggatgcttggcctctttgggctcctctttaatgcttgttaacgatacaggaaggctgggcacaccactctctttattaggagttttcctcggactatcctcttttaatttcttctctctatcaagttcttctgact

SEQ ID NO: 91371 - DNA, 632 bp, Homo sapiens
tgattagcaatagattggacactctactgatcttgcctctctacaacctctctttccacctgacctctaaatgttgaagtgtttcaggaattgtcttagaccttcttccttatctacacttcctctccaacatgaatcttgatggctctgcacaagatcctgaaaagagggaatattcttctgtgtgtgtgggcagagaagatgacattaaaaaatctgaaagaatgacagctgttgtccatgatagagaagtggtcattttctaccacaagggagaatatcatgctatggatattcgctgttaccactcaggaggacctttacatttgggagatatagaggattttgatggacgaccgtgtatagtttgcccctggcataaatacaaaattactttggcaacaggagaaggtctgtaccagtctataaaccctaaagatccatcagcaaaacccaagtggtgctccaaaggaataaagcaaaggattcacacagtgacagtagacaacggaaatatttatgtgactctttctaatgaaccttttaagtgtgactctgatttttatgccactggagacttcaaagtaattaagagttcttcctgataaaaaatatatagaaatgaaaaaaaa

SEQ ID NO: 91372 - DNA, 617 bp, Homo sapiens
caggaacagccttctcctgcctcctctgcacctggacaactcaactcctgccaagatgtcctgccagcagaaccagcagcagtgccaacccccacccaagtgtccctcacccaagtgtcccccaaagagcccagtacagtgtctgcctccagcttcctctggctgtgccccaagctctgggggctgtggccctagctccgagggcggctgcttcctgaaccaccacaggcgccaccaccgatgccggcgccagaggcccaactcctgtgacaggggcagtggtcagcaaggcgggggctctggctgcggccatggctctggaggctgctgctgacctggatcctgatgctgagacaagcgattttggaggaaacaagaatgccaagggcccaggaaaaccccatcttgatgcatgagttcccagataccctcttctggctttcacaggctgagctaggggttttcctgtggaaggtctgagctctccccagaaggcacttcctgtctgatgtccaggatgtcacatgttcccttacccctgtacctgtgaaggattggcagtgcttgtgcctgacctcatcaaaaaataaagctccttgtcctcattaaaaaaaaaa

SEQ ID NO: 91373 - DNA, 1461 bp, Homo sapiens
cggtctgcaccgcgctgcaggaattcggcacgaggtcgacgctgcttcgttgcctggactctggtttccgccctggagcaagccggggcctggtcggcagctgggccgccatggagtccacgctgggcgcgggcatcgtgatagccgaggcgctacagaaccagctagcctggctggagaacgtgtggctctggatcacctttctgggcgatcccaagatcctctttctgttctacttccccgcggcctactacgcctcccgccgtgtgggcatcgcggtgctctggatcagcctcatcaccgagtggctcaacctcatcttcaagtggtttctttttggagacaggcccttttggtgggtccatgagtctggttactacagccaggctccagcccaggttcaccagttcccctcttcttgtgagactggtccaggcagcccttctggacactgcatgatcacaggagcagccctctggcccataatgacagccctgtcttcgcaggtggccactcgggcccgcagccgctgggtaagggtgatgcctagcctggcttattgcaccttccttttggcggttggcttgtcgcgaatcttcatcttagcacatttccctcaccaggtgctggctggcctaataactggcgctgtcctgggctggctgatgactccccgagtgcctatggagcgggagctaagcttctatgggttgactgcactggccctcatgctaggcaccagcctcatctattggaccctctttacactgggcctggatctttcttggtccatcagcctagccttcaagtggtgtgagcggcctgagtggatacacgtggatagccggccctttgcctccctgagccgtgactcaggggctgccctgggcctgggcattgccttgcactctccctgctatgcccaggtgcgtcgggcacagctgggaaatggccagaagatagcctgccttgtgctggccatggggctgctgggccccctggactggctgggccacccccctcagatcagcctcttctacattttcaatttcctcaagtacaccctctggccatgcctagtcctggccctcgtgccctgggcagtgcacatgttcagtgcccaggaagcaccgcccatccactcttcctgacttcttgtgtgcctccctttcctttccctcccacaaagccaacactctgtgaccaccacactccaggaggcagccccatccccttccagcccctaagtaggccctcccctccctaaatctgcttccgcaccacctggtcttagccccaaagatgggccttctctctcccagataagttggtcctccctctgcctttcctctcaagcccccaaagagcaaaggcaacagcaagaccagcgggttcttgcaacactgtgaggggcagccagggcggccccaataaagcccttgaatactttgaaaaaaaaaa

SEQ ID NO: 91374 - DNA, 1534 bp, Homo sapiens; identical to SEQ ID NO: 59094

SEQ ID NO: 91375 - DNA, 4394 bp, Homo sapiens; identical to SEQ ID NO: 59966

SEQ ID NO: 91376 - DNA, 1715 bp, Homo sapiens; identical to SEQ ID NO: 59842

SEQ ID NO: 91377 - DNA, 1805 bp, Homo sapiens; identical to SEQ ID NO: 58987

SEQ ID NO: 91378 - DNA, 1216 bp, Homo sapiens
ggtcgacttattttttttttttttaacacaccatcagtgtttattggtcagctgtcccaaacgggccagccctggggctttggggctgggcctccgtgaggagaggtcagtcggtcagcggcccggggtggctgccctgagccccagggctggtcctggggtctgtcagtccttccccaggctttccaggtccagaaggctttgtggggtctggggctgtgtcagggtaaggaaagctgccttggtggaggaagagaagtcagagaggtcacacatgtggccttagaacctgctaagtccaacgtcagcatgtgacaggaggggaagtgaggcaagacggcagaacccaggggaaaaggtggcagggagtctgagagtgaggttgggaggaccagcatcttttaggccctgagcaagaaggaggtgaccggagtcttccaggtatccctccctcctagcttctggaagtgggagtcggggagggggctccagtcagtcaggtgtaagctccatgccatggggactctgcaggacaggcaggcttgaggagccactgtgcctggacaggttctgcaggctcccccacttggtccctgtgctggaggggaagcagagaaggggctggcagcctcatccctgcgggaccttcactgagccttcttggtcactctcttgctcttcagcatcacgtaggagatgaacagtcccacaaacaggagcagcaggaggcctgcagccagtgggatggcgacagcataggctcggggcaggaaatacttgtggatgacatgctgactgtcgatgaatggcaagagaatcacccaggcggtgtagtaggtgaagatgatcaggctaacggcgacgaggccgagtcccaccacctggtctgtccccgtggcctggagaaaagggaggtctcagctgacgaagtgaccctctatttcggcgcactaatggaagcggggcgtcgcggcccgatcacggtctaagcttcccattcaacagatggtagaaggctgactagggatcagtttctaggctgggagagaatgctaggcctccgcgttgtcgtccgtacaatagtgggggcgggagagcaatccccgttccaagtgcccatgccccagctcctgagcagacccgggaccccacccccagacgcccctatctccggcacacggtgccaatctcacacgaaatcgtcgacccgggaatt

SEQ ID NO: 91379 - DNA, 4125 bp, Homo sapiens
tttcgtctgtctctcctccgctttgctgagccctcccttcttcctctcagttcctagagtccgaccgccgccgccgccgagagagaggagaaggagggggagtggccacagcaggtcctatctggtggtgagtggctgtcatgatctctacagcaccgctctacagcggcgtgcacaactggaccagttctgaccggattcgcatgtgtggcatcaacgaggagagaagagcacctctttctgatgaggagtcaacgacaggcgactgccagcactttggatctcaggagttttgtgtcagcagcagtttttccaaggtggagctcacggcagttggaagtggcagcaatgcccggggggcagacccagatggcagtgctacagaaaaacttgggcacaagtcagaagacaagcctgacgatccccagccaaaaatggactacgctgggaacgtggcagaggctgagggcctcttggtgcccctgagcagcccaggagacgggctcaagcttcccgcatctgacagcgccgaggccagcaacagcagggccgactgctcctggactccactcaacacccaaatgagcaaacaggttgactgctcacccgccggagtaaaggctttggactctcggcaaggtgttggagagaagaatactttcattttggcaactctgggaactggagtccctgtggaggggaccctgcccctggttaccactaacttcagtcctctgccagcccctatctgtccccctgctcccagttcggcctctgtgccccactctgttccagatgcattccaggctcctgtgcccccttcagctccgaccttggttctcgctcccgtccccactccggttctggctcccatgccagcatccacgcctccagcggcccctgcccctccgtctgtgcccatgcccactccaaccccatcttccggcccaccttctacccccaccctcatccccgcctttgctcctacaccggtgcctgcacccaccccagcccccatctttactccagcccctacacccatgcctgctgccacgccagctgccattcccacctctgcacccatcccggcctccttcagtttgagtagagtgtgctttcctgcagctcaggcaccagctatgcaaaaagtccccctgtcctttcagccagggacagtgctgaccccgagccagccgctggtatatatcccgcctccaagctgtgggcagccactcagtgtggccacactgccaaccactctaggggtttcctccactcttacgctccctgtcctgccgtcctacctgcaggacaggtgtctcccaggcgtgctagcctcccccgagctccgttcttacccgtatgcattttctgtggcccggcctctgacttcggattccaagctggtatctctggaggtgaacaggctcccctgcacttccccatccggtagcaccaccacccagcctgcacccgatggggtccctgggcctttggcagatacctcccttgttactgcttctgccaaggtgcttccaactccacagcctctgctgccagcccccagtgggagctcagccccaccgcaccccgccaagatgcccagtggcaccgagcagcaaacagaagggacttccgttaccttctctcctcttaagtcaccgccacagctggaacgagagatggcctctccacctgagtgcagcgagatgccccttgatctgtcctccaagtccaaccgccagaagcttccattgccgaaccagcgcaagacaccccccatgcctgtgttgacccccgtgcacaccagcagcaaggccctcctctccacagtcctgtctaggtctcagcgcacaacccaggctgccggtggcaatgtcacctcctgcctgggctccacttcctcgccctttgtcatctttcccgagatcgtgaggaatggggacccgagcacctgggtgaagaactcaactgcactgatcagcaccattcctggcacctacgtgggagtggccaacccagtgcctgcatccctgctgctgaacaaagaccccaacctgggcctcaaccgtgacccccgccatctccccaagcaggagcccatctccatcattgatcaaggagagcctaagggcactggtgccacgtgtggcaaaaagggcagccaggctggtgctgagggacagccaagcacagtgaaacgatatactccagcccgcattgcccctgggctgccagggtgccaaaccaaggaactctctttgtggaaacccacggggccggcaaatatttatccccggtgttcagtcaatgggaaacctaccagcacccaggtcctgcctgttggctggtccccgtaccaccaggcgtctctgctttccattggcatttccagtgccgggcagctgacccccagtcagggggcgcccatcaggcccaccagcgttgtttcggagttttctggtgtgccatctctcagctccagcgaagccgtgcacggacttcctgaggggcaaccacggcctgggggctccttcgttccagagcaggaccctgttacaaagaacaaaacttgccggattgctgccaagccttatgaagaacaagtcaatcctgtcctcttgaccctcagccctcagactgggaccctggcactgtctgttcagcctagcggtggggacattcgaatgaatcaggggcctgaggaatcagagagccacctctgctctgacagcactcctaagatggaaggcccccagggggcttgtggcctgaagctggcaggagacacgaagcctaagaaccaagtgctggccacctacatgtcccatgagctggtcctggccaccccccagaacctgcctaagatgcctgagctgcctttgctacctcacgacagccaccccaaggaacttatattggacgtggttccgagcagcaggaggggctccagcacagagcgcccacagcttggaagccaggtggatctggggcgagtgaaaatggagaaggtggatggtgatgtggtcttcaatttagccacctgcttccgggctgatggcctcccagtggctccccagaggggccaagctgaagttcgggctaaggccgggcaggctcgagtgaaacaggaaagcgtaggggtctttgcttgcaagaacaagtggcagccagatgatgtgacggaatctctgccgcccaagaagatgaagtgcggcaaagagaaggacagtgaagagcagcagctccagccacaagccaaggccgtggtccggagttcccacagacccaagtgccggaagctgcccagtgacccccaggaatccaccaagaaaagccccaggggggcttcagattcaggaaaagagcacaatggagtcaggggaaagcacaagcaccggaagccgacaaagccggagtcccagtctccaggaaaacgagccgacagccacgaggaaggttccttggaaaagaaagcaaagagcagtttccgtgactttattcctgtggttctgagcacccgcacgcgcagtcagtctgatttaaaggcccgtaagcagaagacttcctcctcccaaagtttggagcaccgcctcaggaacaggaaccttctcttgcccaacaaagtccaggggatctcggattcaccaaacggtttcctcccaaataacctggaagagccagcctgccttgaaaattcagaaaagccatcaggaaaacgaaagtgcaagaccaagcacatggcaaccgtctcagaagaggcaaagggcaaaggtcgttggagccagcagaagacacgatctcccaaatctcccaccccagtgaaacccacagaaccatgtacaccctctaagtcccgaagtgccagctcagaggaggcctcagagtcacctacagcccggcagatccccccagaggcacgtcggctcatagtgaacaaaaatgctggtgagaccctcctgcagagggcggcgcgtcttggctataaggatgttgttctctactgcctccagaaagacagtgaagatgtgaatcaccgtgacaatgctggctacacagccctgcatgaggcttgttcccggggctggaccgacatcctgaacatcctgctggagcacggggccg

SEQ ID NO: 91380 - DNA, 2795 bp, Homo sapiens
cctcacttagaatgcacaatctatccattttggtgagacagataaaattttattaccaggagactttgcagcaattgatcatgatgtcgttgccaaatgtcttaatcattggcaaaaatcccttttctgaacaaggcacagaagaagttaaaaaactgcttttacttttattgggttgtgcagttcagtgtcagaaaaaagaggaatttattgaaagaattcaaggtttagattttgatacaaaagcagcggttgccgcacatattcaagaggtaactcataatcaggaaaatgtgtttgacctgcaatggatggaagtgactgatatgtcgcaggaggacatagaaccactcttgaaaaatatggcattgcatctaaaaagacttatagatgagagagatgaacattcagagactatcatagaactctctgaagagcgggatggtctccattttctaccccatgcctcttcatctgcacagtcaccctgtggttctccaggcatgaagcgaacagaaagtcgacaacatctgtcggtggaactggcagatgctaaagccaagataagaaggcttaggcaggaattggaggaaaagactgagcagttgttggattgtaaacaagaacttgagcaaatggaaatagaactcaaaaggctgcaacaagagaacatgaatttgctttcggatgctcgctctgccagaatgtaccgagatgaattagatgcacttcgagagaaagcagtcagagtcgataagcttgaaagtgaagtcagcagatataaagagagactacatgatattgaattttataaggcaagagttgaggaattaaaagaagacaatcaagttttattagaaacaaaaaccatgttggaagaccaactagagggaactcgtgctcgttctgataaattacatgaattagaaaaagagaacttacaactgaaagctaaacttcatgatatggaaatggaacgagatatggatagaaaaaagattgaagaattaatggaagaaaatatgactttggaaatggcacagaaacaaagtatggatgaatcattacatcttggctgggaactggaacagatatccagaactagtgaactttccgaagcaccccagaaatccctgggccatgaggtgaatgagttgacatcaagtagattattgaagctagagatggaaaatcaaagtttgacaaaaaccgtagaagagcttcggactactgtggattctgtagaaggcaatgcttccaaaatcctgaaaatggaaaaagaaaatcaaaggctcagtaaaaaggttgagattcttgaaaatgagattgttcaagaaaagcaaagtcttcagaattgtcagaatttaagcaaggatctaatgaaggagaaagctcagcttgaaaaaacaatagaaacactgagagaaaattcagagagacagattaagatactggaacaggaaaatgaacatctgaatcaaacagtgtcttccttaaggcagcggtcccagataagtgcagaagcaagagtgaaagacattgaaaaagaaaacaaaattcttcatgaatctatcaaagaaacaagtagcaagctaagcaagattgaatttgaaaaaagacaaattaaaaaagaattggaacattataaagaaaaaggagaacgagctgaagaacttgaaaatgaattgcatcatcttgaaaaagaaaatgaattattacagaaaaaaataactaatttaaaaattacttgtgaaaaaattgaggccttagaacaagaaaattcagagctagaaagagaaaatagaaaattaaaaaaaacattggatagctttaaaaatctgacctttcagttagaatccctagaaaaagagaattcccaacttgatgaggaaaacttagaactgcgaaggaatgtagaatctttgaagtgtgcaagcatgaaaatggctcagctacagctagaaaacaaagaactggaaagtgaaaaagagcaacttaagaagggtttggagctcctgaaagcatctttcaagaaaacagaacgcttagaagttagctaccagggtttagatatagaaaatcaaagactgcaaaaaactttagagaacagcaataaaaaaatccagcaattagagagtgaactacaagacttagagatggaaaatcaaacattgcagaaaaacctagaagaactaaaaatatctagcaaaagactagaacagctggaaaaagaaaataaatcattagagcaagagacttctcaactggaaaaggataagaaacaattggagaaggaaaataagagactccgacaacaagcagaaattaaagataccacattagaagaaaataatgtgaagattggaaatttggaaaaagaaaacaaaaccctatccaaagaaattggtatatataaagaatcttgtgtccgtctggaagaactagaaaaagaaaataaggagcttgtgaaaagagcaactattgatataaaaacgttggttacactacgtgaggatttggtgagtgaaaagttgaagacccaacagatgaacaatgatctcgaaaaattaactcatgagcttgagaagatagggttaaataaggagcgactcttacatgatgaacaaagtactgatgacagtaggtataaacttttggaatcaaaattagaatccactcttaagaagtctcttgaaataaaagaagaaaaaattgctgctttagaagctcgattagaagaatccacgaattataaccagcaattgcgccaagaacttaaaacagtgaaaaaaaaa

SEQ ID NO: 91381 - DNA, 2515 bp, Homo sapiens
aggcttttggctgcatctcacactgctcggagcctccctgccggctgcgctgggatggatggacccaggaaccagcagaggcccggatgtgggtgtgggggagtcacaggcagaggagcccagaagctttgaagtcacaagaagagaagggctttccagccacaacgagctgctggcctcctgcgggaagaagttctgcagccgagggagccggtgcgtgctcagcaggaagacaggggagcccgaatgccagtgcctggaggcatgcaggcccagctacgtgcctgtgtgcggctctgatgggaggttttatgaaaaccactgtaagctccaccgtgctgcttgcctcctgggaaagaggatcaccgtcatccacagcaaggactgtttcctcaaaggtgacacgtgcaccatggccggctacgcccgcttgaagaatgtccttctggcactccagacccgtctgcagccactccaagaaggagacagcagacaagaccctgcctcccagaagcgcctcctggtggaatctctgttcagggacttagatgcagatggcaatggccacctcagcagctccgaactggctcagcatgtgctgaagaagcaggacctggatgaagacttacttggttgctcaccaggtgacctcctccgatttgacgattacaacagtgacagctccctgaccctccgcgagttctacatggccttccaagtggttcagctcagcctcgcccccgaggacagggtcagtgtgaccacagtgaccgtggggctgagcacagtgctgacctgcgccgtccatggagacctgaggccaccaatcatctggaagcgcaacgggctcaccctgaacttcctggacttggaagacatcaatgactttggagaggatgattccctgtacatcaccaaggtgaccaccatccacatgggcaattacacctgccatgcttccggccacgagcagctgttccagacccacgtcctgcaggtgaatgtgccgccagtcatccgtgtctatccagagagccaggcacaggagcctggagtggcagccagcctaagatgccatgctgagggcattcccatgcccagaatcacttggctgaaaaacggcgtggatgtctcaactcagatgtccaaacagctctcccttttagccaatgggagcgaactccacatcagcagtgttcggtatgaagacacaggggcatacacctgcattgccaaaaatgaagtgggtgtggatgaagatatctcctcgctcttcattgaagactcagctagaaagacccttgcaaacatcctgtggcgagaggaaggcctcagcgtgggaaacatgttctatgtcttctccgacgacggtatcatcgtcatccatcctgtggactgtgagatccagaggcacctcaaacccacggaaaagattttcatgagctatgaagaaatctgtcctcaaagagaaaaaaatgcaacccagccctgccagtgggtatctgcagtcaatgtccggaaccggtacatctatgtggcccagccagcactgagcagagtccttgtggtcgacatccaagcccataaagtcctacagtccataggtgtggaccctctgccggctaagctgtcctatgacaagtcacatgaccaagtgtgggtcctgagctggggggacgtgcacaagtcccgaccaagtctccaggtgatcacagaagccagcaccggccagagccagcacctcatccgcacaccctttgcaggagtggatgatttcttcattcccccaacaaacctcatcatcaaccacatcaggtttggcttcatcttcaacaagtctgatcctgcagtccacaaggtggacctggaaacaatgatgcccctcaagaccatcggcctgcaccaccatggctgcgtgccccaggccatggcacacacccacctgggcggctacttcttcatccagtgccgacaggacagccccgcctctgctgcccgacagctgctcgttgacagtgtcacagactctgtgcttggccccaatggtgatgtaacaggcaccccacacacatcccccgacgggcgcttcatagtcagtgctgcagctgacagcccctggctgcacgtgcaggagatcacagtgcggggcgagatccagaccctgtatgacctgcaaataaactcgggcatctcagacttggccttccagcgctccttcactgaaagcaatcaatacaacatctacgcggctctgcacacggagccggacctgctgttcctggagctgtccacggggaaggtgggcatgctgaagaacttaaaggagccacccgcagggccagctcagccctgggggggtacccacagaatcatgagggacagtgggctgtttggacagtacctcctcacaccagcccgagagtcactgttcctcatcaatgggagacaaaacacgctgcggtgtgaggtgtcaggtataaagggggggaccacagtggtgtgggtgggtgaggta

SEQ ID NO: 91382 - DNA, 748 bp, Homo sapiens
cactcaaagatcacatggatccttattgggccttggaaaacaggtctgtcctccacctgaaccaggggcactgcattgccctgtgccccaccccagcttcccttgctctgagcctacccttcctccacaatttcctagggttccatcactgccagagcacactggacctacgcccagcactggcttggggtatatacttggccaccttcacagggatcctagggaagtgttcgggaccttttctcacttcaccctggtatcacccggaagacttcttgggaccaggtgaaggaagatgaggttgtgctgaccagaatgctgctggagaactgccccagggctgacaggccaggcttagctgagcagatgttatcactggccccaacttactttgagcaagggtggctgacccaaaaccatgaggtggcagtcagctggatgacagatgaacacttcccccataactatttagggtagtacccaagcactacaggaaagggtggcaggaactgcctcactcctaggaactggtagatggtgaggttgagggtgtccagcgcccttaggtcattttctcactgcctgggaacctcaccaaaatacttcttgcttccttggggtcagcccaaagctgtcacaaaatcagatatttccctttattccagatttcctggacactttcacccaattataaacaccccacttcagccccaatcacgtgggaggaagtgtaacttccctttaaaaa

SEQ ID NO: 91383 - DNA, 2032 bp, Homo sapiens
cagagccctgagggccgctggccaattggcgcgctcgtctgaatggcgtttggcgcggagcagtgacggctgcgataatagcgaggcagcagtgcagctttcagagggtccgggctcagaggggctatgattcggagggttctgccgcacggcatgggccggggcctcttgacccggaggccaggcacgcgcagaggaggcttttctctggactgggatggaaaggtgtctgagattaagaagaagatcaagtcgatcctgcctggaaggtcctgtgatctactgcaagacaccagccacctgcctcccgagcactcggatgtggtgatcgtgggaggtggggtgcttggcttgtctgtggcctattggctgaagaagctggagagcagacgaggtgctattcgagtgctagtggtggaacgggaccacacgtattcacaggcctccactgggctctcagtaggtgggatttgtcagcagttctcattgcctgagaacatccagctctccctcttttcagccagctttctacggaacatcaatgagtacctggccgtagtcgatgctcctcccctggacctccggttcaacccctcgggctacctcttgctggcttcagaaaaggatgctgcagccatggagagcaacgtgaaagtgcagaggcaggagggagccaaagtttctctgatgtctcctgatcagcttcggaacaagtttccctggataaacacagagggagtggctttggcgtcttatgggatggaggacgaaggttggtttgacccctggtgtctgctccaggggcttcggcgaaaggtccagtccttgggagtccttttctgccagggagaggtgacacgttttgtctcttcatctcaacgcatgttgaccacagatgacaaagcggtggtcttgaaaaggatccatgaagtccatgtgaagatggaccgcagcctggagtaccagcctgtggaatgcgccattgtgatcaacgcagccggagcctggtctgcgcaaatcgcagcactggctggtgttggagaggggccgcctggcaccctgcagggcaccaagctacctgtggagccgaggaaaaggtatgtgtatgtgtggcactgcccccagggaccaggcctagagactccgcttgttgcagacaccagtggagcctattttcgccgggaaggattaggtagcaactacctaggtggtcgtagccccactgagcaggaagaaccggacccggcgaacctggaagtggaccatgatttcttccaggacaaggtgtggccccatttggccctgagggtcccagcttttgagactctgaaggttcagagcgcctgggccggctattacgactacaacacctttgaccagaatggcgtggtgggcccccacccgctagttgtcaacatgtactttgctactggcttcagtggtcacgggctccagcaggcccctggcattgggcgagctgtagcagagatggtactgaagggcaggttccagaccatcgacctgagccccttcctctttacccgcttttacttgggagagaagatccaggagaacaacatcatctgagcatgtgtgctctgcactggctccactggcttgcatcctggctgtgttcacagccttgtttgctgcttccatcttccccagtactgtgccaggccttctccccctccccagtgtcctctcctctcagggaggccattgcacccatatggctgggcaggcacaggcagtgaggccgaggccaatagcgagtgatgagcgggatcctaggactgatctgtagcccatgctgatgtcacccaccagggcaatccatctggaggcctgagcaccctggcccaggactggcttcatcctggcactgaccaggaaagactgcctctgaccctcttagcagacagagcccaggcatgggagcactctggggcagcctggctcaggtttattgattttcgtctgtttaccctatccattaatcaatacatgtaattaactcctaaaaaaaaaa

SEQ ID NO: 91384 - DNA, 2873 bp, Homo sapiens
ggcgctggctggcaggtgtcgctaaccggacggtggtcgccagggcgagaggcgggagccggagaggtgaggcaggacccgggctccactgccgcctctccgagctcttgtgacgcggacctcagtgccaggatggctcggggcgagcggcggcgccgcgcagtgccggcagagggagtgcggacagccgagagggcggctcggggaggccccgggcgacgggacggccggggcggcgggccgcgtagcacggctggaggagtggctctggccgtcgtggtcctgtctttggccctgggtatgtcggggcgctgggtgctggcgtggtaccgtgcgcggcgggcggtcacgctgcactccgcgcctgctgtgttgcctgccgactcctccagccccgccgtggccccggacctcttctggggaacctaccgccctcacgtctacttcggcatgaagacccgcagcccgaagcccctcctcaccggactgatgtgggcgcagcagggcaccaccccggggactcctaagctcaggcacacgtgtgagcagggggacggtgtgggtccctatggctgggagttccacgacggcctctccttcgggcgccaacacatccaggatggggccttaaggctcaccactgagttcgtcaagaggcctgggggtcagcacggaggggactggagctggagagtgactgtagagcctcaggactcaggtacttctgccctccctttggtctccctgttcttctatgtggtgacagatggcaaggaagtcctactaccagaggttggggccaaggggcagttgaagtttatcagtgggcacaccagtgaacttggtgacttccgctttacacttttgccaccaaccagtccaggggatacagcccccaagtatggcagctacaatgtcttctggacctccaacccaggactgcccctgctgacagagatggtaaagagtcgcctaaatagctggtttcagcatcggcccccaggggcctcccctgaacgctacctcggcttgccaggatccctgaagtgggaggacagaggtccaagtgggcaagggcaggggcagttcttgatacagcaggtgaccctgaaaattcccatttccatagagtttgtgtttgaatcaggcagtgcccaggcaggaggaaatcaagccctgccaagactggcaggcagtctactgacccaggccctggagagccatgctgaaggctttagagagcgctttgagaagaccttccagctgaaggagaagggcctgagctctggcgagcaggttttgggtcaggctgccctcagcggcctccttggtggaattggctacttctacggacaagggctggtattgccagacatcggggtggaagggtctgagcagaaggtggacccagccctctttccacccgtacctctttttacagcagtgccctcccggtcattcttcccacgaggcttcctttgggatgaaggctttcaccagctggtggttcagcggtgggatccctccctcacccgggaagcccttggccactggctggggctgctaaatgctgatggctggattgggagggagcagatactgggggatgaggcccgagcccgggtgcctccagaattcctagtacaacgagcagtccacgccaaccccccaaccctacttttgcctgtagcccatatgctagaggttggtgaccctgacgacttggctttcctccgaaaggccttgccccgcctgcatgcctggttttcctggctccatcagagccaggcaggcccactgccactatcttaccgctggcggggacgggaccctgccttaccaaccttactgaaccccaagaccctaccctctgggctggatgactacccccgggcttcacacccttcagtaaccgagcggcacctggacctgcgatgttgggtggcactgggtgcccgtgtgctgacgcggctggcagagcatctgggtgaggctgaggtagctgctgagctgggcccactggctgcctcactggaggcagcagagagcctggatgagctgcactgggccccagagctaggagtctttgcagactttgggaaccacacaaaagcagtacagctgaagcccaggccccctcaggggctcgttcgggtggtgggtcggccccaacctcaactgcagtatgtagatgctcttggctatgtcagtctttttcccttgctgctgcgactgctggaccccacctcatcccgccttgggcccctgctggacattctagccgacagccgccatctctggagcccctttggtttacgctcccttgcagcctccagctccttttatggccagcgcaattcagagcatgatcccccctactggcggggtgctgtgtggctcaatgtcaactacctggctttgggagcactccaccactatgggcatctggagggtcctcaccaggctcgggctgccaaactccacggtgagctccgtgccaacgtggtaggcaatgtatggcgccagtaccaggctacaggctttctttgggagcagtacagtgaccgcgatgggcgaggcatgggctgccgccctttccacggctggaccagccttgtcttactggccatggctgaagactactgaagggagggagaggaggggagccaagacactcatgccactctggctctgaagggacaaaggcttctggcttttgcccccagccccttggataccagtaattcaaaccttcctcatttcatctcaggtgtctccttgctgtcatcccacatagccctggggtgaatgtgaatccagagtctatttttctaaataaattggaaaaaacattttgaactctaaaaaaaaaa

SEQ ID NO: 91385 - DNA, 5530 bp, Homo sapiens
atggttatcaagacggacgagttgccggcggccgccccggccgacagcgcccgggaacacggctcgcaggccgggggcaaggggcggccgggcgcggccgccgtccttctggccgaccttgagcgggatgccaggcagggggagtgtgcccttcctggggctgccatggcaggcctggccccactgaaacccgaagccagccggagctccagccccgggccgactggctgcattagggcaagggtagcggcagaggctggaacaaggaacccgggcaatgctggggctgagctggagagctggctgccttgctgccacggccatcctgagactccagagccgaggggagggcagctgccaactgcaccagagctgccatcagtcatgctcttaaacggggactgcccagagagcctgaagaaggaggcggcggcggccgagccacccagggaaaatgggcttgacgaggccggcccgggagatgagaccaccggccaggaagtcattgtcattcaggacacgggcttttctgtgaagatcctcgcccctgggatcgagcccttctccctgcaggtgtccccccaggagatggtgcaggagattcaccaggtgctcatggaccgggaggacacgtgtcaccgcacctgcttctcactgcacctggatggcaacgtgctggaccacttctcggagctgcgcagcgtcgaggggctgcaggagggctctgtgctgcgtgtggtggaagagccgtacacggtgcgtgaggcccgcatccacgtgcgccatgtccgagacctgctcaagagcctggacccatccgatgccttcaacggggttgactgcaactccttgtccttcctgagtgtcttcaccgacggcgacctgggagacagcgggaagcggaagaagggcttggagatggaccccatcgactgcacaccacccgagtacatcctgccagggagccgggagcggccactgtgtcccctgcagccccaaaaccgtgactggaagcccttgcagtgcctgaaagtactcaccatgagcggatggaacccgcccccggggaaccggaagatgcacggggacctcatgtacctgtttgtgatcacagccgaggaccggcaagtcagcatcaccgcgtccacacggggcttttacctgaatcagtccacagcttatcacttcaaccccaagcccgccagcccccgcttcctaagccattccctagtggagctgctcaaccagatcagcccgaccttcaagaagaacttcgctgtgctgcagaagaaaagggtccagcgccacccgttcgagaggatcgccaccccattccaggtgtacagctggacagccccccaggcggagcatgccatggattgcgtgcgtgcagaggacgcctacacctcgaggctgggctatgaggagcacattcctggacagacccgagactggaatgaggagctgcagacgacgagggagctgcctcgcaagaacctgcctgagcggctgctccgagaaagggccatattcaaggtgcacagcgacttcaccgcggcagccaccaggggcgccatggccgtcattgacggcaacgtgatggccatcaaccccagcgaggagaccaagatgcagatgttcatctggaacaacatcttcttcagcctgggcttcgacgtccgagaccactacaaggacttcgggggggacgtggcggcctacgtggcgcccaccaacgacctgaatggcgtccgcacgtacaacgcggtggacgtggaggggctgtacacgctgggcacggtggtggtggattaccgcggctaccgggtcacggcccagtccatcatccccggcatcctggagcgggaccaggagcagagcgtcatctacggctccatcgacttcggcaagaccgtggtgtcacacccgcggtacctggagctgctggagcgcacgagtcggcccctcaagatcctgcggcaccaggtgctcaacgaccgtgacgaggaggtggagctctgctcctcggtcgagtgcaagggcatcattggcaacgacgggcgccactacatcctcgacctgctgcgcaccttccccccggacctcaacttcctgcccgtgcctggcgaggagctgcctgaggaatgcgcccgcgccggcttcccccgcgcccaccggcacaagctctgctgcctgcgccaggagctggtggacgccttcgtggagcacaggtacctcctctttatgaagctggccgccttgcagctgatgcagcagaacgccagccagctggagaccccctcctccctggaaaatggtggtccttcctccttggagtccaagtctgaggatcctccaggacaggaggcgggaagtgaggaggagggtagcagcgccagcggcctggccaaggtgaaggagctggcagagaccatcgccgcagacgacggcacagaccctcggagccgggaggtgatccgcaacgcgtgcaaggcggtcggctccatcagcagcaccgccttcgacattcgcttcaatcctgacatcttctcaccaggggttcgtttccctgagtcctgccaggatgaagttcgggaccagaagcagctgctgaaggacgcggctgccttcctgctctcctgccagatccctggcttggtgaaggactgcatggagcacgcggtcctgcccgtggacggggcaacgctggcagaggtgatgcgccagcggggcatcaacatgcgctacctgggcaaggtgctggagctggtgctgcggagcccggcccgccaccagctggaccacgtctttaaaatcggcattggagaactcatcacccgctcggccaagcacatcttcaagacgtacttacagggagtcgagctctccggcctctcagccgccatcagccacttcctgaactgcttcctgagctcctacccaaaccccgtggcccacctgcccgccgacgagctggtctccaagaagcggaataagaggaggaaaaaccggcccccgggggctgcagataacacagcctgggctgtcatgaccccccaggagctctggaagaacatctgccaggaggccaagaactactttgacttcgacctcgagtgtgagaccgtggaccaggctgtggagacctacggcctgcagaagataacgctcctgcgggagatctcgctgaaaacagggatccaggtcctgctgaaggagtacagcttcgacagtcgccacaagcccgcgttcaccgaggaggacgtgctcaacatcttccccgtggtcaagcacgtcaaccccaaggcctcggatgccttccatttcttccagagcgggcaggccaaagtgcagcagggcttcctgaaggagggctgtgagctcatcaatgaggccctgaacctgtttaacaacgtctacggagccatgcacgtggagacctgcgcctgcctgcgcctcctcgcccgcctccactacatcatgggcgactacgcagaggccctgagtaaccagcagaaggcggtgctgatgagcgagcgggtgatgggcaccgagcaccccaacaccatccaggaatacatgcacctggccctgtactgcttcgccagcagccagctgtccaccgccctgagcctgctgtaccgcgcccgctacctcatgctgctggtgttcggggaagaccaccccgagatggcgctgctggacaacaacatcgggctggtgctgcacggggtgatggagtacgacctgtcgctgcgcttcctggagaacgcgctggccgtcagcaccaagtaccacgggcccaaggccctcaaggtggccctcagccaccaccttgtcgcccgagtctacgagagcaaagctgagttccggtcggccctgcagcacgagaaggagggttacaccatctacaagacgcagctgggcgaggaccatgagaagaccaaggaaagctccgagtacctcaagtgcctgacccagcaggccgtggccctgcagcgcaccatgaacgagatctaccgcaacggctccagcgccaacatcccgcccctcaagttcacggcccccagcatggccagcgtcttggagcagctgaacgtcattaacggcatcctcttcattcctctcagccaaaaagacctggagaatctgaaagccgaggtggcgcggcggcaccagctccaggaggccagcagaaacagggatagagccgaggagcccatggctaccgagcccgcgccagcgggggccccaggagacctgggctcccagcccccggctgccaaggacccttctccgagcgtgcagggatagagagggagccagacggacagccagccagcggccccgtcaccagggagcccgactgcgggagaagggggcgagcctgcgggcggaagaggaagcaaggccctcttcctccacgtctcaccccaccccacccccgtgtcctcctgggagcctggcctgcctgccccgcagaaggtgtttttgcgctggttcaatgaatagatgatgcagaggccccattggagacacgtgaatggcgtgtgcggccatcagttcccggctggggggcaggtgttgcttcggcccccgccctccggccggcgtgtgcgagtgcgcccctggctgtgagtgttgaccgttcctctcccctgtacatagcccgagccagtcctgagtgggtgactcctgagtgggtgacgcgcagacgggatttctcaggtcatttgtatggtcgacatgatggctgctgctttggctgccaccacccccgggcccagcctgtctgaaagttcagggtttaggccgaaaaacccggtggggaggggtggggagccggagctctgtggcggggctggagggctggggtgcactttagtttggggcgggacgggagccgccgttgtgactggcgtggtctggctgctgctcccgaacggaggggtcggggttggcttgctgggccctcagagcccagtgggtggctctgactcggctccctactccctgcacccagctgggcgcagccttggggcctgcggtctgaatgtatccctcccctcagttttaacctgagctgccgaacgcacagtgggccgggggcgaggctgggggaagcggggcccaattacggatcccgggagttacaggtgccgacgtgatgtcgcttctctggtgcccagctcccttcctggtctgagactagctctgggggtggcgggggcccccacacgctgctcccgctccaccctgcccgtgctgctgctctgtgcctgctgtcagagccctggtgggggaggatgtggccaccctgagacccggaggagacgggcgtctgcctgggtttgcggagagccgcttatgggtgtggtccgtccagacaccttgtttcaagggggatgggcgtgagcgggcaagcagagcatccccaccgctgagcaagaactttttcttgtttttaaaccatcacgtcctcatttcacattggaataaagtgagtttttgaaacctgcgaaaaaaaaaa

SEQ ID NO: 91386 - DNA, 5032 bp, Homo sapiens
gggagaggaatcgtatctccatatttcttctttcagccccaatccaagggttgtagctggaactttccatcagttcttcctttctttttcctctctaagcctttgccttgctctgtcacagtgaagtcagccagagcagggctgttaaactctgtgaaatttgtcataagggtgtcaggtatttcttactggcttccaaagaaacatagataaagaaatctttcctgtggcttcccttggcaggctgcattcagaaggtctctcagttgaagaaagagcttggaggacaacagcacaacaggagagtaaaagatgccccagggctgaggcctccgctcaggcagccgcatctggggtcaatcatactcaccttgcccgggccatgctccagcaaaatcaagctgttttcttttgaaagttcaaactcatcaagattatgctgctcactcttatcattctgttgccagtagtttcaaaatttagttttgttagtctctcagcaccgcagcactggagctgtcctgaaggtactctcgcaggaaatgggaattctacttgtgtgggtcctgcacccttcttaattttctcccatggaaatagtatctttaggattgacacagaaggaaccaattatgagcaattggtggtggatgctggtgtctcagtgatcatggattttcattataatgagaaaagaatctattgggtggatttagaaagacaacttttgcaaagagtttttctgaatgggtcaaggcaagagagagtatgtaatatagagaaaaatgtttctggaatggcaataaattggataaatgaagaagttatttggtcaaatcaacaggaaggaatcattacagtaacagatatgaaaggaaataattcccacattcttttaagtgctttaaaatatcctgcaaatgtagcagttgatccagtagaaaggtttatattttggtcttcagaggtggctggaagcctttatagagcagatctcgatggtgtgggagtgaaggctctgttggagacatcagagaaaataacagctgtgtcattggatgtgcttgataagcggctgttttggattcagtacaacagagaaggaagcaattctcttatttgctcctgtgattatgatggaggttctgtccacattagtaaacatccaacacagcataatttgtttgcaatgtccctttttggtgaccgtatcttctattcaacatggaaaatgaagacaatttggatagccaacaaacacactggaaaggacatggttagaattaacctccattcatcatttgtaccacttggtgaactgaaagtagtgcatccacttgcacaacccaaggcagaagatgacacttgggagcctgagcagaaactttgcaaattgaggaaaggaaactgcagcagcactgtgtgtgggcaagacctccagtcacacttgtgcatgtgtgcagagggatacgccctaagtcgagaccggaagtactgtgaaggtaatgactggaagtactgtgaagatgttaatgaatgtgctttttggaatcatggctgtactcttgggtgtaaaaacacccctggatcctattactgcacgtgccctgtaggatttgttctgcttcctgatgggaaacgatgtcatcaacttgtttcctgtccacgcaatgtgtctgaatgcagccatgactgtgttctgacatcagaaggtcccttatgtttctgtcctgaaggctcagtgcttgagagagatgggaaaacatgtagcggttgttcctcacccgataatggtggatgtagccagctctgcgttcctcttagcccagtatcctgggaatgtgattgctttcctgggtatgacctacaactggatgaaaaaagctgtgcagcttcaggaccacaaccatttttgctgtttgccaattctcaagatattcgacacatgcattttgatggaacagactatggaactctgctcagccagcagatgggaatggtttatgccctagatcatgaccctgtggaaaataagatatactttgcccatacagccctgaagtggatagagagagctaatatggatggttcccagcgagaaaggcttattgaggaaggagtagatgtgccagaaggtcttgctgtggactggattggccgtagattctattggacagacagagggaaatctctgattggaaggagtgatttaaatgggaaacgttccaaaataatcactattgagaacatctctcaaccacgaggaattgctgttcatccaatggccaagagattattctggactgatacagggattaatccacgaattgaaagttcttccctccaaggccttggccgtctggttatagccagctctgatctaatctggcccagtggaataacgattgacttcttaactgacaagttgtactggtgcgatgccaagcagtctgtgattgaaatggccaatctggatggttcaaaacgccgaagacttacccagaatgatgtaggtcacccatttgctgtagcagtgtttgaggattatgtgtggttctcagattgggctatgccatcagtaataagagtaaacaagaggactggcaaagatagagtacgtctccaaggcagcatgctgaagccctcatcactggttgtggttcatccattggcaaaaccaggagcagatccctgcttatatcaaaacggaggctgtgaacatatttgcaaaaagaggcttggaactgcttggtgttcgtgtcgtgaaggttttatgaaagcctcagatgggaaaacgtgtctggctctggatggtcatcagctgttggcaggtggtgaagttgatctaaagaaccaagtaacaccattggacatcttgtccaagactagagtgtcagaagataacattacagaatctcaacacatgctagtggctgaaatcatggtgtcagatcaagatgactgtgctcctgtgggatgcagcatgtatgctcggtgtatttcagagggagaggatgccacatgtcagtgtttgaaaggatttgctggggatggaaaactatgttctgatatagatgaatgtgagatgggtgtcccagtgtgcccccctgcctcctccaagtgcatcaacaccgaaggtggttatgtctgccggtgctcagaaggctaccaaggagatgggattcactgtcttgatattgatgagtgccaactgggggtgcacagctgtggagagaatgccagctgcacaaatacagagggaggctatacctgcatgtgtgctggacgcctgtctgaaccaggactgatttgccctgactctactccaccccctcacctcagggaagatgaccaccactattccgtaagaaatagtgactctgaatgtcccctgtcccacgatgggtactgcctccatgatggtgtgtgcatgtatattgaagcattggacaagtatgcatgcaactgtgttgttggctacatcggggagcgatgtcagtaccgagacctgaagtggtgggaactgcgccacgctggccacgggcagcagcagaaggtcatcgtggtggctgtctgcgtggtggtgcttgtcatgctgctcctcctgagcctgtggggggcccactactacaggactcagaagctgctatcgaaaaacccaaagaatccttatgaggagtcgagcagagatgtgaggagtcgcaggcctgctgacactgaggatgggatgtcctcttgccctcaaccttggtttgtggttataaaagaacaccaagacctcaagaatgggggtcaaccagtggctggtgaggatggccaggcagcagatgggtcaatgcaaccaacttcatggaggcaggagccccagttatgtggaatgggcacagagcaaggctgctggattccagtatccagtgataagggctcctgtccccaggtaatggagcgaagctttcatatgccctcctatgggacacagacccttgaagggggtgtcgagaagccccattctctcctatcagctaacccattatggcaacaaagggccctggacccaccacaccaaatggagctgactcagtgaaaactggaattaaaaggaaagtcaagaagaatgaactatgtcgatgcacagtatcttttctttcaaaagtagagcaaaactataggttttggttccacaatctctacgactaatcacctactcaatgcctggagacagatacgtagttgtgcttttgtttgctcttttaagcagtctcactgcagtcttatttccaagtaagagtactgggagaatcactaggtaacttattagaaacccaaattgggacaacagtgctttgtaaattgtgttgtcttcagcagtcaatacaaatagatttttgtttttgttgttcctgcagccccagaagaaattaggggttaaagcagacagtcacactggtttggtcagttacaaagtaatttctttgatctggacagaacatttatatcagtttcatgaaatgattggaatattccaatcccattaagatacagtgtaggcatttaactcctcattggcgtggtccatgctgatgattttgccaaaatgagttgtgatgaatcaatgaaaaatgtaatttagaaactgatttcttcagaattagatggcttattttttaaaatatttgaatgaaaacattttatttttaaaatattacacaggaggccttcggagtttcttagtcattactgtccttttcccctacagaattttccctcttggtgtgattgcacagaatttgtatgtattttcagttacaagattgtaagtaaattgcctgatttgttttcattatagacaacgatgaatttcttctaattatttaaataaaatcaccaaaaacataaacattttattgtatgcctgattaagtagttaattatagtctaaggcagtactagagttgaaccataatgatttgtcaagcttgctgattgttcttgtattcgatattttttctttttcccgagagagataataacc

SEQ ID NO: 91387 - DNA, 580 bp, Homo sapiens
ttttttttttttgatatcgatctcttttaatttttaggccaattttgagtagtcaaagtcagagcagtcaatctgtgttgtgagccgaggcacagctgcagaagcgtgtctgaggtgtccggtggaggtggcagccgagctctgggactaatcaccgtgctggggacggcaccgcgtcaggatgcaggcagatccctgcagaagtgtctaaaattcacactcctcttctggagggacgtcgatggtattaggatagaagcaccaggggaccccacgaacggtgtcgtcgaaacagcagcccttatttgcacactgggagggcgtgacaccaggaaaaccacaattctgtctttcacggggggccactgtacacgtctctgtctgggcctcggccagggtgccgagggccagcatggacaccaggaccagggcgcagatcaccttgttctccatggtggccattgcctcctctctgctccaaaggcgaccccttctttccgccagcctttcccaataccaaccgctggttcctcacctgcattaaccagccccagttccgggctgtcttgggggaagtgaa

SEQ ID NO: 91388 - DNA, 1641 bp, Homo sapiens
cccacgcgtccgggcggctgacgtggccgctggagctcaggcggtggtttcggctgggatggcgaagagcaacggagagaatgggccgcgcgcgcccgcggccggggaaagcctgtcgggaacccgggagagcctggcccagggccccgacgccgcaaccaccgacgaactcagctctctcgggtctgactcggaggccaacggcttcgccgagcgccgcatcgacaagttcggcttcatcgtgggctcgcagggcgccgagggcgcgctggaggaagtacccctggaggtgctgaggcagagggagtccaagtggctggacatgctcaacaactgggacaaatggatggccaagaagcacaaaaagattcgtctgcggtgccaaaagggcatcccgccttctctgcggggccgtgcttggcagtacctgtcaggaggcaaggtgaagttacagcagaaccctggaaagtttgacgagctggacatgtcccctggggaccccaagtggctggacgtgattgagcgtgacctgcaccggcagttcccattccatgaaatgtttgtgtcccgggggggccacggccagcaggacctattccgtgtgctgaaggcctacacgctgtaccggcccgaggagggctactgccaggcccaggcgcccattgccgctgtcttgctcatgcatatgcctgctgagcaagccttctggtgcctggtacagatctgtgagaagtacctgcccggctactacagcgagaaactggaggcgatccagctggacggggagatccttttctcgctgttgcagaaggtgtcgccggtggcccacaagcacctcagccgtcagaagatcgacccgctcctttatatgacagaatggttcatgtgcgccttctcccgaaccttgccctggagctctgtgctgcgtgtctgggacatgttcttctgtgaaggggtcaagatcatcttccgggtggggctggtgctgctgaagcacgcgctgggctcccctgagaaggtcaaagcctgccagggccagtacgagaccatcgagcgactgcggagcctcagccccaagatcatgcaggaggcctttctggtccaggaggtggtggagttgcccgtgacagagcgccagattgagcgcgaacacctccttcagctgcggcgctggcaggagacccggggtgagctgcagtgccgctccccgcccaggctgcatggtgccaaggctatcttggatgcagaacctggtccccggcctgccctacaaccttcaccatccatccgcctgcccctagatgcccccctccctggctccaaagccaagcccaagccacccaagcaggcccagaaggagcagcggaaacagatgaaggggagagggcagctggagaagcccccagccccaaatcaagccatggtggtggccgctgcaggagatgcatgtcccccacagcatgtgcccccgaaggactcagcccccaaggactcagcccctcaggatttggctccccaggtctcagcccaccaccgctcccaggagagcttgacgtcccaagagagtgaggacacctacttgtaaccctggcagctaaggcctccagggcggggtctccatataactacacgggtcatgaa

SEQ ID NO: 91389 - DNA, 770 bp, Homo sapiens
ccagctcggccatggggtcgcgcagctcccacgccgcggtcattcccgacggggacagtattcggcgagagaccggcttctcccaagccagcctgctccgcctgcaccaccggttccgggcactggacaggaataagaagggctacctgagccgcatggatctccagcagataggggcgctcgccgtgaaccccctgggagaccgaattatagaaagcttcttccccgatgggagccagcgagtggatttcccaggctttgtcagggtcttggctcattttcgccctgtagaagatgaggacacagaaacccaagaccccaagaaacctgaacctctcaacagcagaaggaacaaacttcactatgcatttcagctctatgacctggatcgcgatgggaagatctccaggcatgagatgctgcaggttctccgtctgatggttggggtacaggtgacagaagagcagctggagaacatcgctgaccgcacggtgcaggaggctgatgaagatggggatggggctgtgtccttcgtggagttcaccaagtccttagagaagatggacgttgagcacaaaatgagcatccggatcctgaagtgactccgtttgtgccttgggcttgatcctgtcaccagtatcttcttggaactcattcagagcccccatgtacgcttggacccaggttcaccgatacgctgtatatttgtttcttactgtatttagtggcaacgccaagagatcttccttgttgccctctattgagcaacg

SEQ ID NO: 91390 - DNA, 600 bp, Homo sapiens
  misc_feature (1)...(600): n = a,t,c or g
aatttcatcctgcccacacactgcatatgagggaagcatgtctactttatccaatttcacacagacgctggaagacgtcttccgaaggatttttattacttatatggacaattggcgccagaacacaacagctgagcaagaggccctccaagccaaagttgatgctgagaacttctactatgtcatcctgtacctcatggtgatgattggaatgttctctttcatcatcgtggccatcctggtgagcactgtgaaatccaagagacgggaacactccaatgacccctaccaccagtacattgtagaggactggcaggaaaagtacaagagccaaatcttgaatctagaagaatcgaaggccaccatccatgagaacattggtgcggctgggttcaaaatgtccccctgataagggagaaaggcaccaagctaacatctgacgtccagacatgaagagatgccagtgccacgaggcaaatccaaattgtctttgcttagaagaaagtgagttccttgctctctgttgagaattttcatggagattatgtggttggccaataaagatagatgacatttcaatctcnnnnnanaaaaaaaaaa

SEQ ID NO: 91391 - DNA, 600 bp, Homo sapiens
caccctggggtgcagctgagctagacatgggacggcgagacgcccagctcctggcagcgctcctcgtcctggggctatgtgccctggcggggagtgagaaaccctccccctgccagtgctccaggctgagcccccataacaggacgaactgcggcttccctggaatcaccagtgaccagtgttttgacaatggatgctgtttcgactccagtgtcactggggtcccctggtgtttccaccccctcccaaagcaagagtcggatcagtgcgtcatggaggtctcagaccgaagaaactgtggctacccgggcatcagccccgaggaatgcgcctctcggaagtgctgcttctccaacttcatctttgaagtgccctggtgcttcttcccgaagtctgtggaagactgccattactaagagaggctggttccagaggatgcatctggctcaccgggtgttccgaaaccaaagaagaaacttcgccttatcagcttcatatttcatgaaatcctgggttttcttaaccatcttttcctcattttcaatggtttaacatataatttctttaaataaaacccttaaaatctgctaaaaaaaaaaa

SEQ ID NO: 91392 - DNA, 2037 bp, Homo sapiens
tttcctctttctctaagagtctctctctccctttccctctctctccccccaatctgtctttctagcatgttgccctttttcaaccacatttgtgtttcaggtgtagagaggagagagagtgaacagggagcggggcttttgtctgttggtctccctggactgaagagagggagaatagaagcccaagactaagattctcaaaatggtttattacccagaactctttgtctgggtcagtcaagaaccatttccaaacaaggacatggagggaaggcttcctaagggaagacttcctgtcccaaaggaagtgaaccgcaagaagaacgatgagacaaacgctgcctccctgactccactgggcagcagtgaactccgctccccaagaatcagttacctccactttttttaatcgtaacacctccatttgtattacatatggtgtatgggtattgatgaggtcatggtatcatatatgggatttttttctgtgtaaatcatcaagtataagaagaaactatgggactctgagccttgctttagagaatttacagtggacaaataggtgtcatcaaaccagtttttaatcattctgactcaagtgaaaacgctcagaatttcacactgtgaatccacgtttacaacccttacaggtgggccttcaggcctggttcgctacaacaatgtcttccacaactcaaactcccaccgcgctcacacaaccggtccactcctgccttttcactcacacagctcccgactgcttcttgcagaggctgagagtcccccccccccaccttttttttcatttagatgtaacaaacctagtagtttatgttcatcaattggctggatatctctatattttatccatgtactcttttgatgtatagaagtagtttgaaactcattgtttccttgtggtaagtgaccgagatgctgccacaggacctgagacactgatgaatggtgctattttggactttcaacatgctccttggcgaggtagctctgatggagttattttttatttccatgttctaagaaggtgttggtactctgtttccctgaatgttgttctctagactggattgacttgttttccttgtgtcttcagtgtggctttcttcctcagtgttgtaggttgagcgaatgctaccagagtgtgagagaccattgtctcgttggctggcgctcacggacatgcagtcacggtagcgggagcaatcacaaaactgtaatttacttaccaaatctcttcctttccgtagcctcgcctgcctgacttagagaaagaaaagcaataattttacaggcattttgaggtgtctctttgggttctttctgtttgaaaggatatttgtcgaaaaaaagagcaaaaccgttttaaataaactccccctggaaaaaaacccaaaacactggcatctgagtaggaatatgaaaatgacaccttttccaaatattaaattggaaaacaaggtctacaaaatcatgatacttttttaaaaggcagagcattcttttttcggcaattttgataagcaaggtgtagatttacatttttgtccttgctcccaacgaaatggataaacaaaaataacttaccatctactcatggaatgttgttgtgttagccagtctgaaagcccaccttaatttttatataactgtctttagctcttcttttgacagggcaggccttgttctgaactgtttcgcttctgactgttaaacaccgatgacgcatgcactgcacttcttcgttttcttcttgctcccccattggcctgagtttcttgtgcattactcctctccctccttcgttagaataggtatatcagctgtgtaaatagagcaagaaaacagtattctgcatctgtggcatttatgtagagttgcagttgtgtactgctgaaaatgcaggcttttgtaacagtgtgatctttactgatgcactcatgacaagtacccaatgtattttagctattttagtagtatttgttcaataaatacgcaagctgtaaggtaaaaaaaaaa

SEQ ID NO: 91393 - DNA, 1236 bp, Homo sapiens
acagattctagtgaagaaaaaactttaggaggctacatggtctattggagagtgtaggctctgcagtcagaagatccctacccaggcttctgtctttctcagtaagacttgggaccacagcaaggtccgcaatctcctgaggctctgttttctatggttgggataacatggtaagttattttcttctaagtagtcacacatggaaatcttatctaaaattttataccattaacttttatttcacttattaactcataccattaatactttactttagctatgtttggtatgcatgagttaatgagtgattagagtactatgagcagcacaggtttagaaatgcctatttgcctatagtgcagcctcttacataggcaaaataaaagtcaagtaagaattttattttatttttttaaaatgcaaagtaaaatgtgtctttaaaactctcccaggaggtgaagggaagctaccataacaccaggtgggaaggaagacatactgggcttggctcatgctttaattagctactgtgtaaaaatgttcagggattttcagttatccgctggcacccagaggcaatgggtaaggttaactggagctagagccaatatttttttcttcctagaaggagtaacagcagcaaacagtaggagagaagatgccaagttagaagtgcatatagctctcttccacaggaggcctacacgccgccgcttgtgctgcagccatgtctctagtgatccctgaaaagttccagcatattttgcgagtactcaacaccaacatcgatgggcggcggaaaatagcctttgccatcactgccattaagggtgtgggccgaagatatgctcatgtggtgttgaggaaagcagacattgacctcaccaagagggcgggagaactcactgaggatgaggtggaacgtgtgatcaccattatgcagaatccacgccagtacaagatcccagactggttcttgaacagacagaaggatgtaaaggatggaaaatacagccaggtcctagccaatggtctggacaacaagctccgtgaagacctggagcgactgaagaagattcgggcccatagagggctgcgtcacttctggggccttcgtgtccgaggccagcacaccaagaccactggccgccgtggccgcaccgtgggtgtgtccaagaagaaataagtctgtaggccttgtctgttaataaatagtttatatacctaaaaaaaaaa

SEQ ID NO: 91394 - DNA, 5256 bp, Homo sapiens
gggatgccgaggagccggggcggccgcgccgcgccggggccgccgccgccgccgccgccgccgggccaggccccgcgctggagccgctggcgggtccctgggcggctgctgctgctgctgctgcccgcgctctgctgcctcccgggcgccgcgcgggcggcggcggcggcggcgggggcagggaaccgggcagcggtggcggtggcggtggcgcgggcggacgaggcggaggcgcccttcgccgggcagaactggttaaagtcctatggctatctgcttccctatgactcacgggcatctgcgctgcactcagcgaaggccttgcagtcggcagtctccactatgcagcagttttacgggatcccggtcaccggtgtgttggatcagacaacgatcgagtggatgaagaaaccccgatgtggtgtccctgatcacccccacttaagccgtaggcggagaaacaagcgctatgccctgactggacagaagtggaggcaaaaacacatcacctacagcattcacaactataccccaaaagtgggtgagctagacacgcggaaagctattcgccaggctttcgatgtgtggcagaaggtgaccccactgacctttgaagaggtgccataccatgagatcaaaagtgaccggaaggaggcagacatcatgatcttttttgcttctggtttccatggcgacagctccccatttgatggagaagggggattcctggcccatgcctacttccctggcccagggattggaggagacacccactttgactccgatgagccatggacgctaggaaatgccaaccatgacgggaacgacctcttcctggtggctgtgcatgagctgggccacgcgctgggactggagcactccagcgaccccagcgccatcatggcgcccttctaccagtacatggagacgcacaacttcaagctgccccaggacgatctccagggcatccagaagatctatggacccccagccgagcctctggagcccacaaggccactccctacactccccgtccgcaggatccactcaccatcggagaggaaacacgagcgccagcccaggccccctcggccgcccctcggggaccggccatccacaccaggcaccaaacccaacatctgtgacggcaacttcaacacagtggccctcttccggggcgagatgtttgtctttaaggatcgctggttctggcgtctgcgcaataaccgagtgcaggagggctaccccatgcagatcgagcagttctggaagggcctgcctgcccgcatcgacgcagcctatgaaagggccgatgggagatttgtcttcttcaaaggtgacaagtattgggtgtttaaggaggtgacggtggagcctgggtacccccacagcctgggggagctgggcagctgtttgccccgtgaaggcattgacacagctctgcgctgggaacctgtgggcaagacctactttttcaaaggcgagcggtactggcgctacagcgaggagcggcgggccacggaccctggctaccctaagcccatcaccgtgtggaagggcatcccacaggctccccaaggagccttcatcagcaaggaaggatattacacctatttctacaagggccgggactactggaagtttgacaaccagaaactgagcgtggagccaggctacccgcgcaacatcctgcgtgactggatgggctgcaaccagaaggaggtggagcggcggaaggagcggcggctgccccaggacgacgtggacatcatggtgaccatcaacgatgtgccgggctccgtgaacgccgtggccgtggtcatcccctgcatcctgtccctctgcatcctggtgctggtctacaccatcttccagttcaagaacaagacaggccctcagcctgtcacctactataagcggccagtccaggaatgggtgtgagcagcccagagccctctctatccacttggtctggccagccaggcccttcctcaccagggtctgaggggcagctctggccagtgctcaccagggccagcagggccctaggctggggtcgtacagctgaagttgtgggtgcattggcctaggctgagcgtggggcagggaattatgggggctgtgccgagaggtgggtgtctggcacccagctgccagccttctgtcctgggcaaactactccctacttaagggaataggccaggctccatccggaggcagggaccatgccaggaggagcccctgtggtcacggcatcctgtggtgtccatgaggtaccacagctccactcctggctggaacccggcaccctctgtgggaagccagcactagctctcatcccccatccgggagataccaccagtcctggtccccttttgccaacacctgctggtcagatgtccccctacccccaccccactgtcctccaaggctacaggacccctgcttctgacacagtgagcaacaagcctgggtttccctgctggcagacggcagatccctcaggaaacctgctccacttgtcagggtctcttcggagacccaggatttagggtcacatgctgcaggcagggctgtggcccagctgggtctgacaaggacccagctgtcacatcgtgaatatttaaatgtcctgtcactactgtcccattttgcaaaggctgcttgaggctttaggtgaactagaggtgactgtcttggtgatgaggccagcatagcggccctcccccaggcgacaaggaccaaggtgctgctaaggccactctagcgcccagacaccccagtagctgagctctgctcctatggctacagagctggggcagaagctgaccccatttctggaggaagatccgagtttgtgaccgtcctccactcccctctattgtcactgtccccagctttgctgccagtctgtcacttgcagcctggagctcaacctcaccatttaggtgaggcagagatggctgcagggccaacactgggcagagcctgggagtccttcggaaggggaccagggcgtctgaagtgctcagtgcccccactactctgaggccgactccagctactctgaggccgactcaatctctcggctggaagcagtgttttcccagagcttggcccttgctgacctcgctcactgggcccatcttcccacactgctcttggaaggacacccctaccggtagcagccccaagctgagggggctccctttttgaccttcactggcccgcccttcactgtctccagcaggagttcctagggcttggcctgccttgctccacagtacggcggaggcagccctgcttgtcactgaggagccctagacaaggccaatgggttcatcaatgcccactggctctctgccaaagccaaaaaggtgtcaggcagtctccagcgtgctggccgggtctcggatgccacccctgctcactgagcctgcatgggccttgcccccgaccctgtggtctctgggattggggtcggcttaccctgtagcacagacagggactcctgctgccctgggagctgtctcaagcaaaatctcttgtcccagaggtgcccatgtgggtccgctgtgtcccctgtcatcatccttgttttttctcattttggccaagggcaggctccctgggacaggcagggaacaactgcggagatattagtgattcataggtttgtacagtgttttatactttgcaaagcactttattagctcacacctgtccactcacatgaaactcgtgttaggccctgggaggccgacggtaactctcaccgtgccctcagatgaagcacagagaggttgttacttgcccgggccatccagtgggctggctgggtcttgtgtccccatctgtggacccctctagggtctgagatgagatgagaagtgtctcctgtatccacctcttcctggcctcccttcccccacttcctggtccctgtccactcctcaggttggtgctctcacttcttgaaagctctaggcacccccgcctcccgccaggctccccgttggctcctggcaggccagctgagaatgaacaggagatggaggcaggcagcccaggctgcagaggtgagggatgtggggccaggcccagagggctcagcctagaggcttccaatctcagattctcctgcctgtggtcatctgtttgtccatcaccccaggacagggcagacagaggggcaaagcactgggggccccagagcctagcttcccctcagcctgggggacatcacagcatttcagtgtcagtcacattttaaactgatcagcctttgtataatgttttttaaatcatttctaaataaaacagaaatacagagtgtgtcatttccctgggatgagggaacaaagatcaggttccaagagtaaccttaggacgctctgggaagagaaccgggtcctttggggtgtctgggagctgcccacccatctcctctgccagaccggcggtcagatagcctccctctacaacaggctggccctgggggcccagggttattggggttccaggaacacagcctgatgatgcctccttacgatccaggatggagagcagcccccccaggagtatggggagggtcactgtggcacgggcttctccatgacctgggacatgacctgggacacatagtcaagagcacggttatcagcaatacagatattaataaaaggcagacgaagtcaggaggtcagcaactttgcgggcttaccaggaggcctgtcctgcctctggaagccagcgacagagagggatgcccccgacccagccagccggagaaagggatggggtggtcacgaaggtctgagctgggtctgggtgtaggctgggaagcaggctggggtgtagactgcgaaggcggccctgccgggacttctttccagtccccggcgacctcttcgaattctctgctatctctggggagcctcgggtgggagggggtgtaagagacgcagggacgtggggagaggagacaaggcaggcaagaaccacaggggacggcggacagacgggcgacatcctgcggaggacgccgtcagtaccaggaagtgcaggcgatgaggaagcgcacgtcgtccagcggcccccacgggctgggctcgggctcgggctggggctggggctggggctggggctggggctggggctggggcggatgccggggctgttccgggccctccggcgccgcaggctggggctggggctggggctgggtttgcgcaggctccggggcgccgcggccgc

SEQ ID NO: 91395 - DNA, 2681 bp, Homo sapiens
gtatacttgtaactatcaaaatgaatagttcatttttgatagatttgttgtgcagccattatgaattaaatggtttattaggagtttgactaaatttttatttttagtgtgtatagcatgaatactaccaaaggagacgacaaacttgcagcttaaaatgggcaccagttcccacactggcttaatttatataactgcttggctgtattgcgggtaataatattagaagcaagaagcacttcatttttaaaagagatgttactataatattgcttaaatgctttagcacttggacttcttgagatgcagatgtgtgatttggagtgctggcttatttaaaggtcaagccaaggagtttgtggttcagccacaactactgtttcctaagactattgatgtgaaggacttagtgaagtaatttttatattctgggcttcccagcaagatgtcctttttatgactgccatgcttcttttggactcagtaaatatttgtaatgttagaaaagtctcattatttttataaaatgcatgacattttaagtatgtgttgcataaaatggattatagcagttctcatggtttaggatttttaagaaatagtccatttaatttcagcttaaccttttaaatgatctgtaaaatttctttgatagtttaggaatgttgtggggagggttcattaataaaagttcagcaattttttaactgaaatagtttatctcttttacctagtcacaaaaaaggtatgtaaacaaggccattatatgtgtttattgctctttatttccctatctagattttctaagtatcttagctttcttaatataagtttaacttggtacttactgaaaatgcctttttacccctgttaacggtattttgagcttttgaaaagaacttggttgacactgcttttattgtggataaaggagagatggtcagtaattaatggcttgaagtattattggagtggtttatcatttctgaaactaatcgtgtcagaattgactttgaaaagcattgctttttacagaaatatattaactttttaggagtaatttctagtttggattgtaatatgaaataatttaaaagggcttcgctcatatataggaaaatcgcatatggtcctagtattaaattcttattgcttactgatttttttgagttaagagttgttatatgctagaatatgaggatgtgaatataaataagagaagaaaaaagaataaagtagattgagtctccaattttatgtaagcttcagaagaactggtttgtttacatgcaagcttatagttgaaatatttttcaggaattacatgaatgacagtcttcgaaccaatgtgtttgttcgatttcaaccagagactatagcatgtgcttgcatctaccttgcagctagagcacttcagattccgttgccaactcgtccccattggtttcttctttttggtactacagaagaggaaatccaggaaatctgcatagaaacacttaggctttataccagaaaaaagccaaactatgaattactggaaaaagaagtagaaaaaagaaaagtagccttacaagaagccaaattaaaagcaaagggattgaatccggatggaactccagccctttcaaccctgggtggattttctccagcctccaagccatcatcaccaagagaagtaaaagctgaagagaaatcaccaatctccattaatgtgaagacagtcaaaaaagaacctgaggatagacaacaggcttccaaaagcccttacaatggtgtaagaaaagacagcaagagaagtagaaatagcagaagtgcaagtcgatcgaggtcaagaacacgatcacgttctagatcacatactccaagaagacactataataataggcggagtcgatctggaacatacagctcgagatcaagaagcaggtcccgcagtcacagtgaaagccctcgaagacatcataatcatggttctcctcaccttaaggccaagcataccagagatgatttaaaaagttcaaacagacatggtcataaaaggaaaaaatctcgttctcgatctcagagcaagtctcgggatcactcagatgcagccaagaaacacaggcatgaaaggggacatcatagggacaggcgtgaacgatctcgctcctttgagaggtcccataaaagcaagcaccatggtggcagtcgctcaggacatggcaggcacaggcgctgactttctcttcctttgagcctgcatcagttcttggttttgcctatctacagtgtgatgtatggactcaatcaaaaacattaaacgcaaactgattaggatttgatttcttgaaaccctctaggtctctagaacactgaggacagtttcttttgaaaagaactatgttaatttttttgcacattaaaatgccctagcagtatctaattaaaaaccatggtcaggttcaattgtactttattatagttgtgtattgtttattgctataagaactggagcgtgaattctgtaaaaatgtatcttatttttatacagataaaattgcagacactgttctatttaagtggttatttgtttaaatgatggggaatactttcttaacactggtttgtctgcatgtgtaaagatttttacaaggaaataaaatacaaatcttgttttttctaaaaaaaaaaaaaag

SEQ ID NO: 91396 - DNA, 5261 bp, Homo sapiens
gggactgtcggctgcaggcggccatgcccaccaacttcaccgtggtgcccgtggaggctcacgccgacggcggcggggacgagactgccgagcggacggaggctccgggcacccccgagggccccgagcccgagcgccccagcccgggagatggaaatccaagagaaaacagcccattcctcaacaatgtcgaggtggaacaagagagcttctttgaagggaagaacatggcacttttcgaggaggagatggacagtaaccccatggtgtcctcgctgctcaacaagctggccaactacaccaacctgagccagggcgtggtggagcacgaggaggacgaggagagccggcggcgggaggccaaggctccgcgcatgggcaccttcatcggcgtctacctgccgtgcctgcagaacatcctgggcgtcatcctcttcctgcgcctgacgtggatcgtgggggtggctggtgtcctggagtccttcctcatcgtggccatgtgctgcacatgtacaatgctgaccgccatttccatgagtgcgatcgctaccaacggtgtggtcccagctggcgggtcctactacatgatatcgcgctcgctgggacccgagtttggaggcgctgtcggcctctgcttctacctgggcacgacgtttgcaggggccatgtatattttggggaccatcgagatttttctgacgtacatctccccgggtgcggccatcttccaggcggaggctgcaggtggcgaggcggccgccatgctgcacaacatgcgtgtgtacggcacgtgcacgctcgtgctcatggccctggtggtcttcgtgggcgtcaagtatgtcaacaagctggcgctggtcttcctggcctgcgtcgtgctgtccatcctggccatctatgccggcgtcatcaagtctgccttcgaccccccggacatcccggtctgcctcctggggaaccgcacgctgtcacggcgcagcttcgatgcctgcgtcaaggcctacggcatccacaacaactcagccacctccgcgctctggggcctcttctgcaacggctcccagcccagcgccgcctgtgacgagtacttcatccagaacaacgtcaccgaaatccagggcatcccgggcgcggccagtggtgtcttcctggagaacctgtggagtacgtacgcgcacgcgggggcgtttgtggagaagaaaggtgtgccctcggtgcccgtggcagaggagagccgtgccagcacactgccctacgtgctcaccgacatcgcggcctccttcaccctgctggttggcatctacttcccttccgtgaccggtatcatggcgggttcaaaccggtccggggacctcaaggatgcacagaagtccatccccacggggaccatcctggccatagtgacgacgtctttcatctatctctcctgcattgtgctgtttggggcctgcattgaaggcgtggtcttacgagataagttcggggaggccctgcaggggaacctggtcatcggcatgctggcctggccctccccctgggtcatcgtcatcggctccttcttctccacctgcggtgccggcctgcagaccctcacgggggcaccgcgcctactgcaggccattgcccgtgacggcatcgtccccttcctgcaggtgtttggccacgggaaggccaacggggagcccacgtgggcgctgctgctgacagtcctcatctgcgagactggcatcctcatcgcctctctggacagcgtggccccgatcctctccatgttcttcctcatgtgctacctgttcgtgaacctggcctgcgccgtgcagaccctgctacgtacccccaactggcgtccacgcttcaagttctaccactggaccctgtcctttctgggtatgagcctgtgcctggcgctgatgttcatctgctcctggtactacgcgctgtccgccatgctcatcgctggctgcatctacaagtacatcgagtaccgcggggccgagaaggagtggggcgatggcatccgtggcctatccctgaacgccgcccgctacgccctgctgcgcgtggagcacggtcccccccacaccaagaactggaggccccaggtgctggtgatgctgaacctggacgcggagcaggccatgaagcacccccgcctgctgtccttcacgtcgcagctgaaggccggcaagggcctgaccatcgtgggctcggtgctggaggggacgtacctggacaagcacatggaggctcagcgggccgaggagaacatacggtccctaatgagcacagagaagaccaagggcttctgccagctggtggtctcgtccagcctgcgggatggcatgtcccacctgatccagtcggccggcctgggcggcctgaagcacaacacggtgctcatggcctggcccgcatcctggaagcaggaggacaaccccttctcctggaagaactttgtagacaccgtccgcgacaccaccgccgcgcaccaggctctgctggtggccaagaacgtcgactcgtttccgcaaaaccaggagcgcttcggcgggggccacatcgacgtgtggtggatcgtgcacgacggcggcatgctcatgctgctgcccttcctgctgcgccagcacaaggtgtggaggaagtgccggatgcgtatcttcaccgtggcccaggtggacgacaacagcatccagatgaagaaggacctgcagatgttcttgtaccacttgcgcatcagcgccgaggtggaggtggtggagatggttgaaaacgacatatctgctttcacctacgagaggacactaatgatggagcagaggtcgcagatgctgaagcagatgcagctgtccaagaacgagcaggagcgagaggcccagctgatccacgacaggaacaccgcgtcccacaccgcggcggcagccaggacccaagcgccgcctacgccagacaaggtgcagatgacctggaccagggagaagctgatcgctgagaagtacaggagcagagacaccagcctatctggtttcaaagacctcttcagcatgaagccggaccagtccaacgtcaggcggatgcacacggctgtgaagctcaatggcgtcgtcctcaacaagtcccaggatgcgcagctggtcctgctcaacatgccaggtcctcccaaaaaccggcagggagacgagaactacatggagtttcttgaagtcctgaccgaggggctgaacagagtcctcctggtcaggggtggcggccgggaggtgatcaccatctactcctaatgcccaacagcatcacggcactctgggacaggcacggaggacggcgtgggcagcctgggcctgggcttggcccagggaaacagacggcagacacacctgtcccccagtgatgccacccaagctgcccatggggcttcctacggaagtttctaggcccgtcacctagggctctcctgttcagccttaacaggctcagcaaatcagggcgtggctggacgatttccttgcatctgagggcagacgctgctaccggagtgacctggacgtggccagatcttctcgcaggtcacaagaagccagtgagcccttgccttggtttctggaagttcttttccttggctggatttacccagtggttaggttgcatttctaccccatccagaacattcttggaagagcacccggagctgaagctgtccctgatgatgaaggtgaaacgtcagccctggccatggctccgctcagggccccggtcacctccgagtcactctgttccttgactgtctttgtgtttctgtacctcaaggcactgaagctggaggactctgtccatgcccgtgtcaccctcgtgtgggagcctctgggctcggcaggtccacatttcatgagctgaggcgtgggccagggccatctggaaagggaactcggcttttccagaacgtggtggatcatctgtcgggtgtgtggtgaacacgttcagttcatcagggcctacgctccgggaaggggcccccagctgtggctctgccatgccgggctgtgtttgcagctgtccgagtctccatccacctttagaaaaccagccacttcttttcataagcactgacagggcccagcccacagccacaggtgcgatcagtgcctcacgcaggcaaatgcactgaaacccaggggcacacgcgcgcagagtgaacagtgagttcccccgacagcccacgacagccaggactgccctccccaccccaccccaccccaggagcacggcacacagttcagcctctgagctggctcacacgtgccatccccaccccggtgctccagggaaggaggacacggacccgacgtgggaggtcctcaggcagcagtggcgcctggtgtcaggtctgtctggctgagtcccgggcgtcccctgccatggcctgtgccttgcatggaggcggcggtggcactgaagagatagctttcaagggcccaacactttgcacttcggctggctgtgagtttctgctttgtaggttgtggtcacatttgcaggctgcgggcagtggcaccgacttgggcctccctttctatgtggcatatttatttatttaaacaccccagggagttacgtggtaacaaggttgtccataaagaggttgcttctatatactagaggccccagatggccaggccttgggctacgtctggcttgcatggtctcccaagggaatcagccccatcaacaaagttcaaatcggggcagaggctgcacttgtgcccccagatgtttctgaggagccagactagggctggcattgctgtagagtgacggctgctgcccagagcgtgtcccagacatcacagcggggctcagcagttcccacagcctctgcctgccttggctaagcatgagttaagcagcaaaacgctcctccatgtctggatggggccggcaggtcctgtgtcccctgcacctggaggagagcaggctagaggcacagcggccacatggtgctggctctgaacgttggttggtggctggaaaacagccctgcttctgagggccgctcagttctgcacacgaaaccacctcctgagggctcagctctgcccccgccctgggctgcagcctctgcacgcaagcaccaggcatcctttgtgttgtcaactccgtgtaaccagtaactacagccatttacaattgactccgtttccttttgtaggtttccctgtctgtctgtgttagtagaaaaataaaatcctatgaaatctgaaaaaaaaaaa

SEQ ID NO: 91397 - DNA, 378 bp, Homo sapiens
gcgccggggcaaatgcgggcgcaggctcccccatgcatggactaatcagatgactctcgtttcttctcttctctctgtctcctgtcctgcgtgtgtggcctgcactgtccctgggtgtctttctgcctcatcctgccctccgcatgacccaggacggggctcttcacccccgacatggcctttgaagccattgtgaaaaaacagattgtaaaactcaaagagccgagtttgaagtgtgttgatctcgtggtctcagagctggccacggtcataaaaaagtgtgccgagaaggtaacaggttttgttctcatctccgcatttgtccccgtcctccccctccatgtgttagtctcaacccgagcatctggaaaattcagc

SEQ ID NO: 91398 - DNA, 1293 bp, Homo sapiens; identical to SEQ ID NO: 59137

SEQ ID NO: 91399 - DNA, 4377 bp, Homo sapiens; identical to SEQ ID NO: 59074

SEQ ID NO: 91400 - DNA, 2681 bp, Homo sapiens
gcggccgcggagcccggggcgggtccggcgcgggagctcttcgcggctgtcgtggctatctgcagaagctgtcgggcaagggcccctcgcgtggctaccgcagccgctggttcgtgttcgacgcgcgccgctgctacctttactatttcaagagtccgcaggacgcgctgcccctcggccacttggacatcgcggacgcctgcttcagctaccagggccccgacgaggcggcggagccgggcacggagccgcccgcgcacttccaggtgcacagcgcgggagccgtcaccgtgctcaaggctcccaatcgtcaactcatgacttactggttacaggagcttcagcagaagagatgggaatattgtaacagtcttgacatggtcaagtgggacagcaggacctctccaactcccggggattttcctaagggtcttgtagccagagataacactgatttaatttacccacacccaaatgcttctgcagaaaaagccagaaatgtcctagctgtggagactgtgcctggagagctggtgggagaacaagctgcaaatcagcccgcgccggggcatccaaattccattaatttttactctttgaaacagtggggcaatgagctcaagaattcgatgtcttctttccgtcctgggagaggacataatgatagtcggaggactgtgttttataccaatgaagagtgggaacttttagacccaacccctaaggacctagaggagtccatagtacaggaagaaaagaagaagctgacccctgaaggaaacaaaggagtaactggctcaggattcccctttgattttggacgtaacccctacaaaggaaagcgccctttgaaagacataattgggtcgtacaaaaatcgtcacagcagtggtgacccttcaagtgaaggcacatcaggcagtggcagcgtcagcatcaggaagccggcctccgaaatgcaactgcaggtccagagccagcaggaagagctggaacagttaaagaaagacctgtccagtcagaaggagcttgttcgactgctccagcagacagtccggtcatcccagtatgacaagtatttcacaagcagccggctctgtgagggggtcccaaaggacacgctcgagcttctgcaccaaaaggatgatcagattctgggccttaccagccagctggagaggttcagcttggagaaggagagtcttcagcaggaagtaaggacgctgaagagcaaagtgggcgagctcaacgagcagctgggaatgctcatggagaccatccaagccaaggacgaggtcatcatcaagctcagcgagggcgagggcaacgggcctcctcccaccgtggcgcccagctccccttcggttgtgcctgttgccagggaccagctggaactggacaggctgaaagataatctacaggggtacaaaacccaaaacaaatttctaaataaggagattttggaactctcagctctacgaagaaacccagaaaggagagagagggatctgatggcaagaaattctagcctggaagccaagctctgccagatagaaagtaaatacctgatattgctccaagaaatgaagacaccagtgtgctcagaagaccaggggcccacccgggaggtcatagcccagttgctggaggatgctctgcaggttgagagccaagagcagccggagcaagcatttgttaaacctcatcttgtcagtgaatatgatatttatgggttcaggactgtacctgaggatgatgaggaagagaaattggttgccaaggtccgcgcgttggatctgaagactctctacctcacagaaaaccaggaagtctccactggggtcaagtgggaaaactattttgcaagtacagtgaacagggagatgatgtgctctccagagttaaaaaacctcatccgtgcgggcattccccacgagcaccgttccaaggtgtggaagtggtgtgtggaccgtcacaccaggaagttcaaggacaacactgagcctggccacttccagaccttgctgcagaaggcgctggagaaacagaacccagcctccaagcagattgagctggacttgctgcgaactctgcccaacaacaaacattactcctgccccacctcagaaggcatacagaagttacgcaatgtcctcctcgccttctcctggcggaatccagatatcggctactgtcaaggcctaaacaggttggtggcagtggccctcctgtacctggaacaagaagatgctttctggtgtctcgttaccatagtggaagttttcatgcctcgagactattatacaaagactcttttaggatcccaggtggaccagcgggtgttcagagaccttatgagtgagaagctgcctcggttgcatggccactttgaacagtacaaagtcgactacactctcatcactttcaactggtttctggtggtatttgtggatagtgtcgttagtgacatcctctttaaaatatgggactctttcctttatgaaggaccaaaggttattttccgttttgctctggcactttttaagtacaaggaagaggagattttgaaattgcaagattcgatgtctatatttaagtatctccgctacttcactcgcactatccttgatgctagatccggaaccgacgcgcctaccacttggagaaagtccggctggagc

SEQ ID NO: 91401 - DNA, 5039 bp, Homo sapiens
cgctcttgatttcccgggccgacgatttcgtccaacagccagctttatagggcatcagccttgtttgaaacaatccgacatgaggcacagctgagcacggactacaaactctccctctttgacctgcagacatcatcctaccaggccttgcagcgggtgctcgtcagcctaggccatcatgatgaagccctggctgtggcagaaaggggacggacaagggcatttgctgatcttctggtggaacgacaaacaggacaacaagactccgacccctactccccagtcactattgatcagatcttagagatggtaaatggccagaggggactagtgctttactattccctggctgcaggctatctgtatagctggctgctggctcctggggcaggaattgtgaagtttcatgaacactacctgggtgagaacacagtggaaaactcaagtgacttccaggccagcagcagtgtaacccttccaacagcaaccggctcagccctggagcagcacattgccagtgtccgggaggccctgggggtggagtctcactactcaagggcctgtgccagcagtgagacagagagtgaagcgggagacatcatggaccagcaatttgaagagatgaacaacaaactcaactcggtcactgaccccactggctttctgcggatggttcgccgcaataacctgtttaacaggagctgccagagcatgacgagcctgttcagtaacactgtgtcaccgacccaggacgggacctcctctcttcccaggaggcagagctcgtttgccaagcccccgctccgtgccctgtatgacctgctcatcgcgcccatggaagggggcctgatgcactccagcggccccgtgggccggcaccggcagctcatcctggttctggagggggagctctacctcattcctttcgccctcctgaagggaagctcctccaatgagtacctctacgagcgcttcggcctccttgctgtcccttccatccgctccctcagcgtgcagtccaagtctcacttacggaagaacccgcccacatactccagctccacatccatggcggctgtcatcggcaaccccaagctaccatcggccgtgatggacaggtggctgtgggggcccatgccatcggccgaggaagaggcctacatggtgtccgagctgctgggctgccagcccctagtgggcagtgtggccaccaaggagagggtcatgagtgccctgacccaggctgaatgcgtccactttgccacccacatctcctggaagctgtcggccttggtcctcacgcccagcatggacggcaaccctgccagcagcaagagctccttcggccacccctacacgatccctgagtccttgcgggtgcaggacgatgccagtgatggggagagcatctcggactgcccgcccctgcaggagctgctgcttactgccgccgacgtcctggacctgcagctgcctgtgaagctggtggtgcttggctcctcccaggagtccaacagcaaagtcgcagccgacggggtcatcgcgctgacaagggccttcctggctgccggcgctcagtgtgtcctcgtgtctctgtggcctgtgccagtggctgcttttaagatgttcatccatgccttctactcatccctgctgaacggcctgaaagccagcgccgccctgggggaggccatgaaggtggtgcagagcagcaaggccttctcgcacccctccaactgggcagggttcatgctcatcgggagtgacgttaagctgaacagcccctcatcactcatcggccaggccctcacagagatcctgcagcacccggagcgtgcgcgggacgccctgcgagtgctgctgcacctggtggagaaatccctgcagcgcatccagaatgggcagcgcaatgccatgtacacatcccagcagagtgtggagaacaaagtgggcggcatccctggctggcaggccctcctcaccgctgtgggcttccggctggaccccccaaccagtggcctgccagcggctgtcttcttcccaacctccgacccgggcgaccggctccagcagtgcagcagcacactccagtccctgctgggtctgcccaatcctgccctccaagccctttgcaaactcatcactgcctccgagacgggcgagcagctcatcagccgggctgttaaaaatatggttggaatgctccaccaggtgctggttcagctccaggctggcgagaaggagcaggacttggcatcagctcccattcaggtctccatcagcgtccagctgtggcggctcccgggatgccacgagttcctggcagctctaggttttgttctctgtgaagttggtcaggaggaagtaatcctgaaaaccgggaagcaagctaatcgacggactgtgcacttcgcgctccagtccctgctgtctctgtttgattctactgagctacccaagcgcctcagccttgacagctcctcctccctcgagtctcttgcttctgctcagtctgtttccaacgccctgcccttgggttaccagcaaccccccttctctcccaccggtgcggacagcatcgcctcagatgccatctctgtgtacagtctgagctccattgcctcctcaatgagctttgtctccaaacccgagggtggatcagagggtggaggccccggaggacggcaggaccatgaccggtccaagaacgcttacctgcagagatccaccctgcctaggagccagctgcctccccagacccgccctgcaggcaacaaagatgaagaagaatatgaagggttttctatcatcagtaacgagcccttggcgacctaccaagaaaaccgaaacacatgcttctcaccagaccacaaacaaccccaacctgggacagccggaggcatgagagtctcggtgagctccaaagggagcatcagcactccaaattctccagtgaaaatgactctgattcccagccccaactcacccttccaaaaggtgggaaaactagcaagctcagatacaggagaatcagaccagtctagcacagaaacggacagtaccgtgaaatcccaagaagaaagcaacccaaaactggatccacaagagttagcccagaaaattctggaggagacacagagtcatctcattgcggtggagcgtcttcagaggagcggcggccaggtgagcaagagtaataaccctgaagacggcgttcaggcgcccagcagcactgctgtcttcagagcgtcagaaaccagtgcgttcagcaggcctgttctctcccatcagaagagtcagccatcaccagtcactgttaaaccaaagcccccagccaggagctcctccctgcccaaggtgagttccggatatagcagccccaccacctcagagatgtccatcaaagacagcccgagccagcacagtggccggccatcgcccggctgcgactcacagacttcccagctggaccagcctctctttaaactgaagtaccccagctctccttacagcgctcacatttccaaatcaccaaggaacatgtccccaagctccggccaccagtctcctgctggcagtgcaccctccccagctctctcctactcctcagctggatctgctcgctcaagtccagcagacgctcccgacatagacaaactgaaaatggcagccattgatgaaaaggtgcaggctgtccataacctgaagatgttctggcagagcacaccccagcattccacagggccaatgaagatcttccggggggctcctggcacgatgacttccaaaagggatgtcctcagtctgctgaatttgtcaccacggcccaataagaaggaggagggagtggataagcttgaactgaaggagctgtccctgcagcagcatgacggagctccaccgaaagcccctcccaacggacactggcgcaccgagaccacctcgctgggctcactgccgctgcccgccggccctcccgccacagcccccgcgcgccctttgaggcttccttctggaaatggctacaagttcctgtctccaggaagatttttcccttcttccaaatgctaaagcatcttttatacccactgactctgagcagcctgcagatgggggcctggcgtttgcttcagcccttccctgagtgcagtccccccacagccaccagcaccctcatgatgctgtgctctgcaggcgaggggcaccaccacgtccaaaggctgccacacacactggtggcttttctgggccacattcaccaaaagccaggacttctgtggggctggtacaggaggctcatggaatttcctacacacttcaccaaatgtttgtttacctttgaactccctgcttctcatctttgatatgattcttcaccaggattttgtacaaaaatgatcatggttctggggtggggagaggaaagggagcacatattttgctaagaggtatatatgcagtaccttttataccacagaaatacaaatagagctttttcctaaggctttcggttgcctggttgggggtgggatatatgaaatttcagttgaattctacaggaaagtgttatattagcccaaaaacagaaaaatggtttttaaaatgccaatgatttgtaattaaattgtagcaattttggtctcatgatagtgtaatatctcagcaacaatgcaataattcacattgaaacagcgcttccattctgaactcctgctctgcaaatgtcttttgggtcccgctgtcaaccaaacttgaattttcttaaaaaaaaaattatgtaactcttatccaggcattttagaactatgcaattgtgatttaaaatgcaactttgtgcttttaaaacattattgaccttttttgtatatggataaacaacttggttttattatcaatagtactttgcatttatagctattatttttaaaagctcaaaaagttttttaaaatgtcaaattttgaatagtcatcaataagtaattatcaagtttggaaggaaaggttgaaatgactccgtttccttataagcaaaaaaaaaa

SEQ ID NO: 91402 - DNA, 1290 bp, Homo sapiens; identical to SEQ ID NO: 59830

SEQ ID NO: 91403 - DNA, 699 bp, Homo sapiens
ttttttttttttgatagtaagtggaatttatttataagacaatgcatatatctatgtggaattaggaagcatttcccattcttattcataaaattattacttaaaattgcaaaagtagatttacagaggcacaggtaacaaaacaggaaatgaaatgttccagacattccgaaaagttcgaaagaaacacaccctagcctcaaaatctccggttaaaccgtggttgcacaacaggttctatttattcctgcattttctcaataagttcttctttatatttgcctttctcttttccaacttgtcgagacttggctttgcgttcaagaatttttttccgatccttgtccagttttagcctggtgataaccaccttgcttgggtgaatgcccacgtggacagttgtgccgttggccttctcacgctgcacccgctcgatgtagatgacatatttctttctgtacacctggactaccttgccaatttgctgacctttgtagtgtcctcgaactacctggacctcgtcgtccttgcggatgggcatggagcggacattgtacttctgccgcagctccttggagagcggggatgacatgatcttcctgcgcacgtgtgagggggcattgaagtgacgtttgcggtttttactgcggtccgaggtaacgaagggattgaacttcatggtgaccctccggctcgtgc

SEQ ID NO: 91404 - DNA, 3679 bp, Homo sapiens
agtcgcagcgtctacagctgctcgggggctttttcttggcggaggcttggccggctcctctctcccggctccgcggcggctgcgaaggcggcggctcctgccctctcgctttccctctcgcgtctctggctgcagaaagaagcttccggttctgaggtcctggaggtgccatttccctctctgttgaagcaaaggccggggcagacctcctagtgaaaggaaagcaagccaggatggatatttacgacactcaaaccttgggggttgtggtctttggaggattcatggttgtttctgccattggcatcttcctggtgtcgactttctccatgaaggaaacgtcatatgaagaagccctagccaaccagcgcaaggagatggcgaaaactcaccaccagaaagtcgagaagaaaaagaaggagaaaacagtggagaagaaaggaaagaccaagaaaaaggaagagaaacctaatgggaagatacctgatcatgatccagcccccaatgtgactgtcctccttcgagaaccagtgcgggctcctgctgtggctgtggctccaaccccagtgcagccccccattatcgttgctcctgtcgccacagttccagccatgccccaggagaagctggcctcctcccccaaggacaaaaagaagaaggagaaaaaagtggcaaaagtggaaccagctgtcagctctgtagtgaattccatccaggttctcacttcgaaggctgccatcttggaaactgctcccaaggagggcagaaatacagatgtggcccagagcccagaggcaccaaagcaagaggctcctgccaagaagaagtctggttcaaagaaaaaagggcccccagatgccgacggccctctctacctcccctacaagacgctggtctccacggttgggagcatggtgttcaacgagggcgaggcccagcggctcatcgagatcctgtctgagaaggctggcatcattcaggacacctggcacaaggccactcagaagggtgaccctgtggcgattctgaaacgccagctggaagagaaggaaaaactgctggccacagaacaggaagatgcggctgtcgccaagagcaaactgagggagctcaacaaggagatggcagcagaaaaggccaaagcagcagccggggaggccaaagtgaaaaagcagctggtggcccgggagcaggagatcacggctgtgcaggcacgcatgcaggccagctaccgggagcacgtgaaggaggtgcagcagctgcagggcaagatccggactcttcaggagcagctggagaatggccccaacacgcagctggcccgcctgcagcaggagaactccatcctgcgggatgccttgaaccaggccacgagccaggtggagagcaagcagaacgcagagctggccaagcttcggcaggagctcagcaaggtcagcaaagagctggtggagaagtcagaggctgtgcggcaagatgagcagcagcggaaagctctggaagccaaggcagctgccttcgagaagcaggtcctgcagctgcaggcgtcccacagggagagtgaggaggccctgcagaagcgcctggacgaggtcagccgggagctgtgccacacgcagagcagccacgccagcctccgggcggatgccgagaaggcccaggagcaacagcagcagatggccgagctgcacagcaagttacagtcctccgaggcggaggtgcgcagcaaatgcgaggagctgagtggcctccacgggcagctccaggaggccagggcagagaactcccagctcacagagagaatccgttccattgaggccctgctggaggcgggccaggcgcgggatgcccaggacgtccaggccagccaggcggaggctgaccagcagcagactcgcctcaaggagctggagtcccaggtgtcgggtctggagaaggaggccatcgagctcagggaggccgtcgagcagcagaaagtgaagaacaatgacctccgggagaagaactggaaggccatggaggcactggccacggccgagcaggcctgcaaggagaagctgcactccctgacccaggccaaggaggaatcggagaagcagctctgtctgattgaggcgcagaccatggaggccctgctggctctgctcccagaactctctgtcttggcacaacagaattacaccgagtggctgcaggatctcaaagagaaaggccccacgctgctgaagcacccgccagctcccgcggagccctcctcggacctggcctccaagttgagggaggccgaggagacgcagagcacactgcaggccgagtgtgaccagtaccgcagcatcctggcggagacggagggcatgctcagagacctgcagaagagcgtggaggaggaggagcaggtgtggagggccaaggtgggcgccgcagaggaggagctccagaagtcccgggtcacagtgaagcatctcgaagagattgtagagaagctaaaaggagaacttgaaagttcggaccaggtgagggagcacacgtcgcatttggaggcagagctggaaaagcacatggcggccgccagcgccgagtgccagaactacgccaaggaggtggcagggctgaggcaacttctcctagaatctcaatctcagctcgatgccgccaagagcgaagcccagaaacagagcgatgagcttgccctggtcaggcagcagttgagtgaaatgaagagccacgtagaggatggtgacatagctggggccccagcttcctccccagaggcgcccccagccgagcaggaccccgttcagctgaagacgcagctggagtggacagaagccatcctggaggatgagcagacacagcggcagaagctcacggccgagtttgaggaggctcagacctcggcatgtcggttacaagaagaattggagaagctccgcacagccggccccctagagtcttcagaaacagaggaggcctcacagctgaaggagagactagaaaaagagaagaagttaacaagtgacctggggcgcgccgccacgagactgcaggagcttctgaagacgacccaggagcagctggcaagggagaaggacacggtgaagaagctgcaggaacagctggaaaaggcagaggacggcagcagctcaaaggagggcacctctgtctgagtttcctctttggaaaaagaagttactgttcaacttaccaaaatgccttacacattccttacaaataaaccaaccaacctacacagcgttatccaggtccaacttccggtagctccgagagaagccatgagagacaagtctcttagagccacagaagtagaccttccagagccccagtttgtaaatgaacctgtgtcacatttgataaacactatcctgggcgcagccccgggccaccgccgagtgacgccaaagccctggttgactctgacagccccgtgggtgtgtgggaggccgggcgctctggggtctgtctgtcagtgcaatcgtttagtgttttttcagtggggcggggcgggaagcgggtgggaccgggcagccagttctcaaaggctgtggggccgactggaggccacagcccctcacccctagacgttgccaaccagaactgacgtgtgacctcctgggtgttgatgccattaaaaccaacgttggtgcccggtaaaaaaaaa

SEQ ID NO: 91405 - DNA, 5209 bp, Homo sapiens
tttcgtggacactgggcttctgtgtgccagtcgcagccgttggctggcggtcacccaatcccagggcatgccgccggagcctggccaggacgcacggtgaaagacgagtttggtggcaggcttgaccccccggctgccagcagaagccggcgtcgggagcccaggcgggcaggccgctggggtcggggctgcacgtacgagagccgggacgcccgggttcagagcgaaggaggaggcatggcttcggtgttcatgtgtggcgtggaggacctgctgttcagcggcagccgcttcgtatggaacttgaccgtgtccacgctgcggagatggtacacggagaggctgcgggcttgccaccaggtgctgcggacgtggtgcgggctgcaggacgtgtaccagatgacagaaggcaggcactgccaggtgcacctcctggatgataggagactggagctgctggttcagcccaaacttctagcaagagagttgctggacctagtggcttcacatttcaacctgaaagaaaaggagtattttggaataacattcatagatgacacaggtcagcagaactggctgcagttagatcaccgagttcttgaccacgatttgcccaagaaaccaggcccaaccattttgcactttgctgtgaggttttacattgagagcatatcgtttttaaaggataaaaccaccgtggagctgtttttcctgaatgcaaaggcctgtgtgcacaaggggcaaatcgaagtagagagcgaaaccatcttcaagttagcagcgtttattttacaggaagccaagggagattataccagtgatgaaaatgccaggaaagatttaaagacattaccagcctttccaaccaaaactcttcaggagcatccatcccttgcctactgtgaggacagggtaattgagcattatttgaaaatcaaaggtctcactcgaggtcaagctgtggttcagtatatgaaaatagtagaagctctaccgacttacggtgtccattattatgcagtaaaggataagcaaggacttccttggtggcttggaataagctataagggaattggccaatatgatatacaagacaaggtgaagcctcggaagttattccaatggaaacagctggagaacttatatttccgtgagaaaaaatttgctgttgaagttcatgatccacgaaggatttcagtttcaagaagaacctttgggcaaagtggcctgtttgtgcaaacatggtatgctaactcttctctcatcaagtccatttgggtaatggcaattagtcagcatcagttttacttggaccggaagcaaagcaaagcaaaaattccttcagccaggagtttagatgagattgcaatggatttgacagagacaggaacacaaagggcctccaagctggtgacactggaggcgaaaagtcagttcatcatggcaaggaatggcagtttaatctcctcaggttctcaagactcagaagttagtgaagagcaaaagagagaaaaaatccttgaactaaagaagaaggagaaactattacaagaaaaacttctgaaaaaagttgaggagcttaagaagatctgtctgcgggaggctgagctcacaggcaaaatgccaaaggagtatcccctgaacataggcgagaagcctcctcaggtcagaagacgtgtgggtactgcgttcaaattagatgacaacttgctgccgagtgaagaagatcctgctttgcaagaactggagagtaattttctaatacaacaaaagctggtggaagctgcaaagaaacttgccaatgagccagacctttgtaaaactgtgaagaaaaagcgaaagcaagattacacagatgcgatgaaaaagcttcaggagattgaaaatgcaataaacgaataccgaattaggtgtggaaagaaacccagccagaaagcaacagtgttaccagaagacataatcccctcagagagtagctctttgtctgacaccaccacctatgatgatcccagtgatgccttcacttttcctgggcagcgatcaagttcagtacctcattctccaagaattcttccccccaagtctcttggtattgagcgaatccatttcagaaagtcgtccatcaatgaacagtttgtggataccaggcagtccagagaaatgctgtccacacacagcagcccttacaaaactctggagaggcggccccagggaggacgaagcatgcccaccacgccagttcttacccgaaacgcctacagcagcagccacttggaacccgaatcttcatctcagcactgccgccagcggagtggaagcctggagtcccagtcccatctgctctccgagatggacagcgataagccatttttctccctctccaaatcccaaagaagcagcagcacagaaatcctcgatgacgggtcttcttatacaagccaatcaagcacagagtattactgtgtgacaccagttaccggcccctattacaccacccagaccctggacactcgcaccaggggtcggaggaggtcaaagaaacagaatgtttctacttcaaattcaggaagcatgcccaacctagcacaaaaggatagtttgaggaatggtgtttactcaaagagtcaggagccaccgtcttccagttactacattgccgggtacacaccctatgcagagtgtgacttttattacagtggtggttatgtctatgagaatgacaccgagggacagtatagtgtcaacccttcctaccggtcctcagcccactatggatatgagcgccagagggactacagcagatcctttcacgaagatgaggtcgaccgggtaccccataacccatatgcaactctccggctgccaaggaaggctgctgcaaaatcggagcacatcaccaaaaacatccacaaggccttagttgccgagcacttgcgtggctggtaccagcgggcctctgggcagaaggatcagggacacagcccgcagaccagctttgactcagacaggggatcacagagatgcctggggtttgcggggctgcaagtaccttgttctccaagcagtcgtgcatctttgtactcttcagtgtcttctacaaatgcttctgggaactggaggacccagttaaccatagggctgtcggattacgagactccagcacattcttcttacaccagctgctatggcaatgtctataatcctttaccctctccaagcagacaatacacagaaatcagtcaactggatggtacagatggaaaccagctggaagacaacctggagagtagtgagcagagactcttttggcatgaagattcaaagcctggaacattagtctgaactgcagttggacctcctgaccaagcactgcgttctcacactagtgtgccttgcaaattgtatttgtcttccgagaggatgttcgttttagaaacctaaagacatcaaaggttgaagagaagacttagttgccctggaagtgaatcagtgaatcacacaccaagccccacaaagcccctaaaggaggatttggcctttcaaactctaggcactaacgtaactgtagggtctgcccacatgttgaagtattgccaagagaggactcagtgtgaagccttcatcaatagcaagcactttttaagggagtaaaagttgttaaaggcaaacgtcaaaaacatgaaagggcattcaggatgtcccatggcaataagaacaggggaaatctcagagcacaattcagcaggatgagagaaggggaaccagaagctccggagtcattgctcacttcagagtttgaattcgtgagctgacaaagagtaacatgctctttctacacagacatggacaatttagacagtattggaaaattacttgaagctggattttcatgaagttctgaatgagtgtaaatgttttttaggatactataaagagtgatgtttttcataagcaccataaaatgggttctggaaaaactgattaccttagcatcctgtaatataacttatggtagcagattggggaaaatgaagcagcccactgaataattgacaaagtctgcttggagaacattctaaggtacaatatcatggagctcctttttcctttctccactaattgcgtgatgagctattgttctggctggtaattctccaactcggctgtcatttgaagtggcagacttaatatggaaagtttttataattatgagtttgaaaaagcattttaagatgatacagaaagtatccaaaacaacagaaaaaaaaagccacgtcattttagatgaattgcgtgccttaaaatggtgaacgttagaaaattaaacaagtctggattccacaagtagttccaagtcaccaagtgacaaaaacaaggttaacattaaaaaagaaaaacaacaacaacgacaaaaagctccaagctgcagtggatttaattatgaggctaaaactacctcatactttccttggaagaactaattagctatggtttattgtagggttttgtttgtttgttttttaaagcaaatgatttccatattcctgattgatcttttttgtcatctttgcttcaaaattacataaaaggtgctcctttcccccttcttttatacaagtttcttgttcatattgtgaatagaaaagtttctgaacaacttttttggaacattttctatctatattccaaagcatgtaatatatacataaaaacgatttgttaaactggtccttagtcatttgtataattagaaatgaagtttgggaaaaaattttggaaaaaagacaagcaaaaaaaaaataacttattccttttttgcatatttggtatagccttctaaaatcaaaaataacctttttgcatattcttttattgttctgacttttcaagacctattatttttttacataggtcaataaacaaaaggtgtgctactgaaaatgtttacgttttcttccatttatgtcaggggttcatgtgaagcaggtcgcagtgctctacttcaagtaatcatattgggcaaggcttcggatttttatttatagtattaccgtattttattaattccgggatgtacatttttaaatatttacattaaaaacatagttcatctttttattgatggcatattctacttgaattggcagttttttcttaatagtacattaaaaataatgctgtgtcttacaataaagttgccttagaattg

SEQ ID NO: 91406 - DNA, 6769 bp, Homo sapiens; identical to SEQ ID NO: 59765
  misc_feature (1)...(6769): n = a,t,c or g

SEQ ID NO: 91407 - DNA, 1463 bp, Homo sapiens
cctgagcaatttttcttttattgggatcatcttaattcttgtttgcggggttaagatgaaggaaatatgagcaaggactgcactcagctatttgggtgacccttgtataccatgagcttcttagatagggcctgatgtgatcaccagaaaacattaattgatcgtgatgacaggagatagtctctctagccagaacctgctaatacaagtcctgatgaattgagaatgatgcctgaaggaagcagactgacgtggtgcattagtaattttaggcaaaagaagataatggtactagtatgtatattttttagtttccttttccattgctttgttttgcacaggctgaagaaaataaatgtaaacagcatattatggtggctcagggtggataataatgggacatcacttcctttgtttcagtgtgaggttgcccctgctatgtgacagctccaaggactaaagatttcaatccccagaaaaatgtcgagtcccagtaacatgtttcaggttatcatgattattatgattataggaggggaagagcagtgctggtcttttagaaagttctcatcatgaatgtgttctggagtgaacatcacttactaacagatgagcagcttgaagttgagtcaaacaaaacttttagtgtttgtaagggtcagggagccaggggacagtctgtaactcagttgtatattgacacagagaatgtacaaaagctgtgaaagcttccacttgtaatgactgcggatggttgctggtgacggtcttggacagtaagggttttcttcggagttgtaggaggtgaagtcttcctatgggaaatttctggacaaaaatacaaatgaaatgacttgcaggcctcagtttagagtattgttggctttgtctgtcaacaaatggagatttgaacatgggagttcaaggggattttaatgaaattttattaaggagatgagaagcagggagtctgtgttgaaaattcaataaagggcttgttttccatctcagcctggataataattgttaccccctttactcagagataacatagattatccaggctgagatggggggtaacaattctaacaacctggcttccttagaagtttccattctcatatagtcaccgaaggcagcagcactcaggcgtttgctgccgtgcctgccctttggtttctgggacggctcgggtcccgtagcgccggcacagctgagattgccaagccgggaagagcccttgctccaggtgtaggtgcgttttccccagatcacctgtccttttcccctccgacaaggaagctgtgatttttctctggcctttagaggcaaagtgattccagataagtagattaatgtgtagaatatctcatctgtgttgttccagtgcagccctttcagctttccagagccagttagacttgatatgaggagctaagtgattggctggctctggagctcag

SEQ ID NO: 91408 - DNA, 390 bp, Homo sapiens
aactcagagtacttactatgactttattttaggcaactggtaacatttagtataaggtaggtaataaaatattaagttgtgcctggaaaaaatagcatttggtccttcatagcaggcaaagcaattcacagcattgggaaaaaaaaatacatacatacatatacatgtatggatacccatatatatgtatatacatgcatgtatacccatgcatatgtatatacttacatgtatacacatatatatgtatgtacgtacatatatacccatatctatgtatggacgtacatatatacccgtatatatgttcgtacatatatacacatatatgtatgcacgtacatatatacacatatatgtatgtacgtacatatatacacattatgcgcg

SEQ ID NO: 91409 - DNA, 646 bp, Homo sapiens
  misc_feature (1)...(646): n = a,t,c or g
gatccctgccaaagctccaggctggaggggactgcgtcctcctccctcctgcagtccatctccagtggccggctggggtgagtcagcctggatgaagacacctacttccatgcagactgtgccccctgacctgggaggcgcctgtcaggggcaccagccgagactgaggacaggctgggcagcactccaggtcgctgtgtggcagctgatttagggggctggaaatgtccagagccatcagaagcagctgggcgtctggggccttgaggcccgtaagtcatgctgctgcctgccgttccctgcattgctgtgaagcctcaccggggactgggctcatcaaaatcagtttatgccaaaggaaattaatttttgcctctctgagatggggtgtggggaagggaggtcagctccagaggcaggcctgtaacagcactgcagggaggggttggatactacagtgtgcccacgatggcactgatcgaatagccttggggctacagggccctggccccatttcttacagaaggcggggtggatctggaggggttttcaaaggaggcctccttaatnttttgggacccagaaagccagatttttgttcttttatttaatctggccgttaattcattttcttgacctcacataa

SEQ ID NO: 91410 - DNA, 646 bp, Homo sapiens
acttgattcagttaaatatgactccacttatatggattctaaatataaatatataggtctacttaaaatcatctacccacccatctctttatctctctacctttctatctgtctcatttttcctgtcaccctccatgacaatgagcacaatagcaggaggtagtttgtatgtttgctgttttctcaatatctacgacagtgcctggcacagggtgggcatcggtatccacggaatgaacgaatccatggcttttgagctgaggaagaacataatcaaaatggtcctttgagctgaggccttgcagagatgtactggatagagcgaaagggggaagctagccccagtaggcagggaaggggaggcgggggagctatgtgtggcccgtgtttgtggtcatgagcatctgatgtaggaggtggccatggctgggagggatcatacagacatgactgatattgagaacggaggatcgatgggatttgactacttaatttgtcaaaaagggtaaatattcactgaccccccagcaaagggaattttatttttggagcggaaaaccccgcttgggcagtttgcaaaacaacgttgctactattatagacaaagggggggcctggactttctttgaagaacacaagcctagaa

SEQ ID NO: 91411 - DNA, 556 bp, Homo sapiens
ggaattaagagttgaaatacccacagaacagaatcatggaatgtaaaacaagtaaaccattatttgggagatggggtgaatccatcactggttactggaaccctgagtctgcattttctcctcaggaaggcggtctgaaatggagtgggctgtgtttggcaagggttgtagtggtttggaatctgcttggctcccgagctgggcctcaggcctgtctccccagagtaaatgcccgggatcattgaggaagcgttggctgcgctggcatgttaggcaggtctgtacggtccagcgctgtcccctgcagcgtctctggcgctgggtgcaggtgaggcccgggacgaggagggaagagcagcctcgacagagagtcctcttcaccgagggatctcgccgcaagacgagccgcttcgcaatggtcctctcagtgtagcagtaaaacctcgccagcgcctggttctcggggtcctgggcaaggacacaatgggcggcctggtacaggaagttgagcctctggaaggcctcgcggtccttcaccggccccgccctcgtgccg

SEQ ID NO: 91412 - DNA, 3466 bp, Homo sapiens
gcggccgcccgcattctcctgagctttccgcgggccgacgcacagccgcggagaaggagccagcgcccggccagacagtctcagcccgccgtcggcgcccgccgcgctcgcgcccggctgctccgaggggattagtgggccgtccgcgcggctcgtcggcgcgggagccatgttgaccgagggacttggcaacgcgtgagacacccgcgggccctcccgaggctccggacccgcggcgagagccggaaggcggctcgtggcggcggaggcctgcgctcggaagcgcctcacgtctgccgggccgctgagacccggacttgcatccggtcgccgcgggcgtccgcggagcagcttccccccgcgcctctcttcgcctcgcctcgggacccgcggtccccgctcttgctggatttttcaagccacattcaattgataggatgaaaaaatttaagagaaggctatccctcacactccgaggaagtcagactattgatgaatcattgtctgaattggctgaacaaatgactattgaagaaaacagcagcaaggataatgagcctattgtgaagaatggcaggcctccaacgtctcacagtatgcattccttcctccaccagtacacaggatctttcaagaagcccccattgcggagaccacacagtgttattggagggagccttggctccttcatggcaatgcccagaaatggaagcagattagatattgttcatgaaaatctaaaaatgggatcagatggtgagagtgaccaagcttctgggacatcatctgatgaagtccagtcacctacaggtgtttgtctcagaaatcgtatacatagacggatctcaatggaggatttaaataagcggttatcactgcctgcagacatcagaatacctgatggatatcttgaaaagttgcagataaacagtccaccatttgaccaaccaatgagtcgaaggtctcgtagagcttccttatcagaaattggctttggaaaaatggaaacctacatcaaattggaaaagcttggagagggtacatatgcaacagtatataaaggaagaagtaaattgacagagaatttggtggcattaaaagagatccgattggaacatgaagaaggtgcaccctgcacagctataagagaagtttcactattaaaggatttaaaacatgcaaatatagtaaccttacatgacattgttcacacagataaatccttgactttggtgtttgagtatctggataaagacctgaaacagtacatggatgactgtggaaacatcatgagtatgcacaacgtaaagctgtttctgtaccaaattctacgtggtttggcatattgccatagaagaaaggtattgcatcgagacttgaaaccacagaacctcctcattaatgagaaaggagaattaaagctagcagattttggactagcccgagccaagtcagttcccacaaagacctactcaaatgaagttgtcacactatggtaccggccacctgatgtgcttcttggttcctcggagtactcaacacagattgacatgtggggtgttggttgcattttctttgaaatggcttctggaagacctttatttccaggatcaaccgtggaagatgaactgcacttaattttccgactgctaggaactccatctcaggaaacttggccaggtatttcttcaaatgaggagttcaagaactacaactttccaaaatataaaccacagcctctaattaaccacgcacccaggttagactctgaaggaattgagttgataacaaaatttcttcagtatgaatctaagaaaagggtttcagctgaagaggccatgaaacatgtgtactttcgaagtctgggaccaagaatacatgctttaccagaaagtgtatcaatattcagtttgaaagagattcagttgcaaaaggacccgggttttcgaaattcttcttatccagagacaggacatgggaagaacagaagacagagcatgctcttttaagtctgataacatggtttcaagcccagcccccagcctttcttaccaatcaaggactcagaactgaaggcaattatttcttttggtggacttggaatctccgtttgtctacactgtcctcttcacagtggagtctttttatttcagacctacagattgtttttatatttgttgtcacagtgtgacaattttttgtacagtcggttttaaggtcttctctgccattagagccagtaggttacagctattgatgtaactatagctgcaatttttgtgcaggactgagaaacacagtgcattatttattgcggaatcattgctgctaaataactactgtctgtttatttaacacaacaattgaatgcctgaagaagttgcagtggctttattatatgtgaatgcatctgtttctcctcacgaattgttttactgctgcattttttgtttttaaaattaaactgccaggtgtttcctggaatgtaaatttagctttgcttaatagtaaaataagtgagccatcttgaacactttaagtttatactatataatttcttaatgaacattggcaaatagagtagctaagagattgacaagcacattacgtttagataagcatgtgatgcagaagttgattcaagcaagtgaatccctgacattttgaggatctcacattagacaccaacaaattaaagctccaaaattatttattttttatgtgttcctcactttagaaacgtctactgcatattactggatatttgtatactaatacacttacctattttacattgtgttttaaatttagttaaaacttaaccgtagaagtctgttcaaacgcgaaaggtcttgctttgtttgttttaaatacatttattttattagaaaggatgatatttcattggggaatagtttctttcatttgggggctatgtgtttcaataacattcacttggaatcagctgaaagctgtaatatgtctttgaaatgagccatgataaattacaaacaagagaaatgagaacttacaggattgcttgaaattattgtgggtattatctgtttaccagagatactaaatattagttttaattatgcatctctttgaacatcataaacacactttggtgttggtaacagtattttaagcatttttgttcacttttaaggactatttgtttagtgcatcttacaaactataaatcttaattggtatattttgaaatggtcgtgtaaatttttgccttatatatcatgaaaatagtcataacttaatttcttttcctgaaattcactgtaaaacattcaggggtcctaccatttctgttcaggaaatcttgtagtttattgttgttatttaacagtattaagtggatttttgtatatttcattttaactttatttgtgaatagtgattgtggcatgtttggggtgttattttaatatttcacgatactaaaatt

SEQ ID NO: 91413 - DNA, 3226 bp, Homo sapiens
ttttttttttttttatttaattttttaataaaccataaaatttaaatattcaaatgaaaagaaacaaaaatagattatttaagccagcatgaatttctggttttactcttcctctagggcattgtaggcttgacttacctggggattagagtagtaaagctatgatgctgggtacaataatgaatgagggaggtaaaaatggggcaatgtcttgcataaaatttactttcaaatctaggatcagaagttcactcaagcctactgcaaaggcctgacactggttttttgtctgtataaaactactctgggctttttaccacactttcttcatcacagcttaggtgttccctggcattctgatccttttgctcactaaagctcacttcaatctgtcaaaacatcaagggggaaaatccccaaaatgaaccgacgaataaacactcttaatgtgaacaatcatattcagaccagcctcttgtgcaaaaatacaagtcagtggattttttatccttacataactcaaatattgctatttttttcctgcctttactaaaatggcactttcgtttacatcaaccaattattttctacttgcttctaagtttctgagattgtatgctgtactggctattctttttgattaagctttacaatttccattccagaatatctggtctttgaccaactttatctaattttgtgaagaaatgtgctattaatcagtgaaaatcgcaaaaggaaaaagaaaaggaagcaatgaacaatagtagaatctcacttcagcatttgtataattttttataagaaaaacattcatttttattatgggatctaaaaccatgatcgtgtctgatactgtaagccttttagcgtactcaaatgggtcaacattcaatatggacagccagctagctcacaagaaatgaaatgtaatgcacaaatatgtttgactggtaaaatcccagaggcttggtaataaagtgcagcaaactttccttatattgaataagaactccagtaacctctggatatttttggtaaaaattaaagaaaaggtactgcagtcaagagacaggtaatctttaaacttcaaaagactggctgccagggaccacagtgaaaaattagacctggagccaatgaaaaacactagcttggaaggaatgggtttttccaaaaatgcaaaattagcatttacagatgcttaggatactatgatttgacaggcttacagtgataaaacaacaaagatgaacagttacaatatttatacgtgtagtgtgtaaagaacacaggttttttaattggcagcaagaaattctatgacagcttctgagacaagtaatcctatgccctatatccaccccatgccaatgacgaccagtcaaaatggtaacacagagtaaaaagtgatctactgtatgtgagtcagaaagtacttgaaaagtgacaaaactgtatgttattaaatgccaaaacatatttagaggctttatttaaaaatctctcactgttcattatcaaagttacaagattgcataccaatagacagactgtaaacataggaaattttcgttaaggaaagatgggtttactgtaattcaatcttttacaaaaaattacttgcaagttattgataacagaatttctcttttactttcttaattctcttgaaaattaaaccaatgtttccactttcatgagctaaagttcaaccatggtcaccttaggaaatacccctgtttatttgttaatcagaaatacaaatcgagtggcacatacttccattttcttcttaggccaaaggtttcagcttcattatattttacagaagaccttcagtggtccggtaagtctttcatgtcacagctgaggtttaatgatggcagtggaggaaagcagaggtgatgcaaagtaagaccagcccagttgccttatctgacatggaatctttttcctgtctggcttgcagcagcgaagtgtttctggtcaggttgcctccaccaaacctgattgaagcaaaagggtgacatgctctgataaatcccatttaaggatgattctgttcaggcaaatagttgatccttcaatctgttggctgtgggatgatactaatatgaagaaaattatccgggtagctcagatgttcactcagccactgcagaggtgtttccaacattggctcaattccatgaatcatcacttgattctttttttccccatcttcaggatcaatagcagaaggacaaacttctttgaggagatctcctagtgtgtgcaactgtccatctgcagccacaggacgaaacagcttctgaatgaaaggtctttcagtcgttgtctgatatattctaaaggggatataacgaaatccattttcttctgcaggatattccatgagtttccgattgatggcccaaaactggtcaaatctgtcattttgcaatcccatccagagttgcttgtgatcttttttctgcatttcattgattacttgacttttatgttttaaagcatcagcttctttcatacatgacataaaatgagcttcaattgcatccttagatggacagtgcagaaggtctttttctggaaaactcttaaaatgtactgtgatgttccaaggaagagctgaacttgatgcaagaagatcaaatagcaaaccaattggataatgccatttcagtggtgtgccttcatattcaaaccatatctcactaatgtcttcttgtctcataaccttctgaaagtgctttttcactttgtcagttaccaacgtcaaataacttactcttggcaaaagcaaatagtatggttctgcttccctttcagttatctcatcctgatatagcgtgaaacaagttggaattcgtccaaaccacacatctcgaagcacatctttgtcatctgtcattcttccaggagttaaagcagtacatacaggctaaattcttatttcaaccaaagccaaacctactccaagctatggctcctccttccggctccccgcactggtggggacgcccagattccgcgctccggtggggcggcggggcaagctgcccgcctgacacactgtcctgcggggacgcggtagcaggactccaggaagcccgcgcagccgcaaaaagcaccggcgcggaggtcggagctgaaccctgctgcacttccgccctctggtatccagcgaatacaaccggcaacgctgcggagccctggcacgaaa

SEQ ID NO: 91414 - DNA, 657 bp, Homo sapiens
atttcgtcgggcgggtgctggcagaggacgcagaaggggtgaggtcacgtctcccttgagccccgagccgctggcttttcagagcctcgccacaagccggcggccagagccccagaccacacagaccgtgcgctcctccgccctcccggcgccgccggcctcgcccatgtctcagtacgcccctagcccggacttcaagagggctttggacagcagtcccgaggccaacactgaagatgacaagaccgaggaggacgtgcccatgcccaagaactacctgtggctcaccatcgtctcgtgtttttgccctgcgtaccccatcaacatcgtggctttggtcttttccatcatgtctctgaacagctacaacgacggagactacgaaggagccaggcggcttgggcggaatgctaagtgggtagccatcgcctccatcatcattggccttctcatcatcggcatttcttgtgcagttcacttcacaaggaatgcctgaggaaccagcggtcagtgggctgtgagcgtggaggatggacctcatccacacacaccccaaaggagtctctaaggaatggatccttgacttcagactgtgagatcttttcctccaggactctccagaggcaggtccctggcaaatgaacaagaaaaaaaaaa

SEQ ID NO: 91415 - DNA, 5631 bp, Homo sapiens
atttcgtagtggcggctgcaggaggcgggcgtggacgagccggtggccgcagcggcggcggtccccggagtcctgtgaagcgcccctgtccgcgcctctgtggggccctcagagagggctgccaggacgcgagccactgaggagccgctcagccagcgccatagcccttaggactatcggtcacatcctcgcgctcctgctccggctcctccatcttggcctcggcagtggcggctgccgggaggatgtgccgccttctggcagggggaagaaggaggagaagatgaagaagcaccggcgggccttggccctggtctcctgcctctttctgtgctctctggtctggcttcccagctggcgtgtatgttgtaaagagagttcttcagcttcagcgtcatcatattactctcaagatgacaactgcgcactagaaaatgaagatgtacaattccagaaaaaggatgaaagagagggacctatcaatgccgaatcattgggaaaatcaggttcaaatttacctatttctccaaaagaacataaattaaaagatgattctattgtggatgtacaaaatacagagtcaaaaaagttaagtccaccggtggtggagacactccctacagttgatttgcatgaagagtcttccaatgcagttgtggacagtgaaactgttgaaaatatttccagctcatctacctcagaaatcactccaatctcaaagcttgatgaaatagaaaaatctggtactattccgatagccaaaccaagtgaaactgagcagtctgaaactgattgtgatgttggtgaggcccttgatgctagtgctccaattgaacaaccttcctttgtcagtccacctgacagccttgttggccagcatatagaaaatgtatcatcttcacatggtaaaggaaagataacaaaatcagaatttgaatcaaaagtttcagcaagtgaacagggcggtggtgatccaaaatctgcattgaatgcttcagataatttaaaaaatgagagctctgattatacaaaaccaggagacattgaccctacatcagtagcaagtcccaaagatccagaagatataccaacatttgatgaatggaagaagaaagttatggaagtagaaaaagaaaaaagtcagtcgatgcatgcatcttctaatggaggttcacatgccaccaaaaaggtccagaaaaatcgaaataattatgcctcagtagaatgtggtgccaaaattctagcagctaatccagaagccaagagcacatctgctattcttatagaaaatatggatctttacatgttgaatccttgcagcactaaaatttggtttgttattgaactttgtgaaccaattcaagtaaaacagcttgatattgcaaattatgaattattttcttctactcctaaagattttctggtttctatcagtgacagatatccaacaaataagtggattaagctgggtacttttcatggtagagatgagcggaatgtacagagtttccctttagatgaacagatgtatgcaaaatatgtcaagatgttcatcaagtacataaaggttgagttgctatcacattttggatcagagcacttttgtccattaagccttataagggtatttggcactagcatggtggaagaatatgaagaaattgctgattcccagtatcactcagaacgccaggaactatttgatgaggactatgattatccactggattataatactggagaggataaatcctcaaaaaatcttcttggttctgctacaaatgccattctaaatatggtgaatattgctgctaatattctgggagcaaaaactgaagacctgacagaaggaaataaaagtatatctgagaatgccactgccacagctgcacctaaaatgcctgaatcaactcctgtttcaactcctgttccatctcctgagtatgtaaccactgaagtacacacacatgacatggagccgtcaacaccagatactccaaaagagagtcccattgtacagttagttcaagaggaggaagaggaggcaagtccatctacagtgacccttctgggcagcggtgaacaggaagatgaatcatcaccctggtttgagtcagagacacaaatattttgcagtgaactgaccacaatttgttgtatttctagtttttcagaatacatatataaatggtgttcagttagagttgctctttatcggcagcgcagccgaactgctttgagtaaaggaaaagattatcttgtgttagctcaaccacccttactacttcctgcggaatcagtagatgtttcagtattgcaacctctgagtggagaattggaaaatacgaatatagaaagggaagctgaaactgttgttctgggtgatttaagtagtagtatgcaccaggatgacttggtgaatcacactgtagatgcagttgaacttgaaccaagccattctcaaactctttctcagtctcttcttttagatattaccccagaaatcaatcccttgcctaaaatagaagtatctgagtctgttgaatatgaggcaggacatataccatcaccagtgattccccaagagagttctgttgagatcgataatgaaacagaacaaaagtctgagagctttagttctatagagaaaccatctattacctatgaaacaaataaagttaatgagttaatggataatattataaaagaagatgtgaactccatgcaaattttcacaaagctgtctgaaacaatagtgccaccaataaatacagccactgtacccgacaatgaagatggggaagccaaaatgaatatagctgacacagcaaagcaaactttgatttctgttgtggattcttcttcattacctgaagtaaaagaagaagaacagtctccagaagatgcccttttgagagggttacagaggacagctacagatttttatgctgaattgcaaaattctacagatctaggatatgctaatggaaatcttgtacatggatcaaaccaaaaggagtcagtatttatgagacttaataatcgtattaaagccttagaagttaacatgtctctcagtggtcgctatctggaggagcttagccaaaggtaccgaaaacaaatggaagaaatgcaaaaggctttcaataaaacaatcgtgaaacttcagaatacttcaagaatagcagaggagcaggatcagcggcaaactgaagccatccagttgctacaggcacagctgaccaacatgacacagcttgtttcaaatttatcagcaacagtagcagaattgaaacgggaggtttcagatcgacaaagctatcttgtcatatctttggttctttgtgttgtcttgggactgatgctttgtatgcagcgttgtcgaaatacttctcaatttgatggagattatatttcaaaacttcctaaaagtaatcagtatccaagccctaaaaggtgtttctcttcctatgatgatatgaatttgaaaagaagaacttcattcccactcatgagatccaagtctctacagttaactggcaaagaagtagacccaaatgatttgtacattgtagaacccctcaagttttctccagaaaagaagaagaagcgctgcaagtacaaaattgaaaaaattgagaccataaagcctgaagaaccattgcaccccatagccaatggcgacataaaaggaagaaagccctttacgaaccagagagatttttctaatatgggagaagtttatcactcttcttataaaggtcctccatctgaaggaagctcagaaacttcatcacagtcagaagagtcctatttttgtggcatttcagcttgcacaagtctgtgcaatggacagtctcaaaagacaaaaactgagaagagggctttaaaacgaagacgatctaaagtccaagaccaaggaaaattgataaaaactctaatacagactaagtcgggatcattgccgagcctgcatgacataatcaaaggaaacaaagagatcaccgtgggaacatttggtgttacagcagtctcgggacatatctaaaattaattgaacttttcatacagaagacttttttgttgttgttctttgaagaacagtctgtagtatttgaagggtttgggggagggagaaaatattaatgggaaaggcattcagaaattatggtttctacctttttaaaaagtagatgggattgtgtcaatcttggttaatgagctacagttttacaaagctgatcacttcctataaggacaatggtagacattttataaagatgttttttcacaagattaattactgggacaaaagtaatttggaagcccagttccttaggtgggataggaatgaaagcctaaacctcttcctttagctttgttcctatttcttgcaccttcccatatttatgtgccttttgtctatttataatgccactggaagaggagggataactttttctgttatttgatttcttttataactttgttaggtttttgaagctgcaaacactacaatgctttgagggggtctgtgcctgaagctcaggagtgtggatcagacagtctaaagatcctaaaaacttgccaactggatctttgtttagcaaactcactggaaatgaacacttaatggaatttttaagtctgttctgttaggtagatggtgatgctcttgttattttcacttattcagactggattacttcttacttagttactaactcaatgaggaaaaatccctacaggatctttttttgcaaacaactgatatatgcagacaaatttttgacaaattcaccttttaaacacacttaaccatttgtgaaggttttctttagcttacattttaaacatacacaataaacactaatcctccaaactttcactgtttttattagtatgaatataaaatttgaaggtttggccaattagtacaagtctcatgatataatcactgcctgcatacatatgcacagatccagttagtgagtttgtcaagcttaatctaattggttaagtctaaagagattattattccttgatgtttgctttgtattggctacaaatgtgcagaggtaatacatatgtgatgtcgatgtctctgtctttttttttgtctttaaaaaataattggcagcaactgtatttgaataaaatgatttcttagtatgattgtacagtaatgaatgaaagtggaacatgtttctttttgaaagggagagaattgaccatttattgttgtgatgtttaagttataacttattgagcacttttagtagtgataactgtttttaaacttgcctaatacctttcttgggtattgtttgtaatgtgacttatttaacgccttttttgtttgtttaagttgctgctttaggttaacagcgtgttttagaagatttaaatttctttcctgtctgcacaattagctattcagagcaagagggcctgattttatagaagccccttgaaaagaggtccagatgagagcagagatacagtgagaaattatgtgatctgtgtgttgtgggaagagaattttcaatatgtaactacggagctgtagtgccattagaaactgtgaatttccaaataaatctgaacacttgtttttattaaaaaaaaaaa

SEQ ID NO: 91416 - DNA, 5499 bp, Homo sapiens
tcgacaaaaatgccagggaaaggcgagcccagagcttggtgatggagaaattgggaagccaccccccacccttcaatcttaggatggggaattcgcaactgaagccggagcttcagacttggggcgcactcccagcttagcccaggaaagagatttaagggcgcagcagtgtggatacctctcaccccggccccgaaggtctagcgagggtctaacctgggccccttgccaggcccgccccccgcccctttccagcccccggcccgtgcgccgctgcccctttaagaagcccaggtaggcaggcccggctgctggagccgctcctatggcaacccgcgagctgcggcggcttcatgaatattccggggcgcgggagcccgagcgctgccggagggcgcttcgggggaggcggccgctgatgtaagcccggcgggtcgctgggctccgctcggttgcggcgggagccccgggacgggccggacgggccggggcagaggaggcgaggcgagctcgcgggtggccagccacaaagcccgggcggcgagacagacggacagccagccctcccgcgggacgcacgcccgggacccgcgcgggccgtgcgctctgcactccggagcggttccctgagcgccgcggccgcagagcctctccggccggcgcccattgttccccgcgggggcggggcgcctggagccgggcggcgcgccgcgcccctgaacgccagagggagggagggaggcaagaagggagcgcggggtccccgcgcccagccgggcccgggaggaggtgtagcgcggcgagcccggggactcggagcgggactaggatcctccccgcggcgcgcagcctgcccaagcatgggcgcctgaggctgcccccacgccggcggcaaaggacgcgtccccacgggcggactgaccggcgggcggacctggagcccgtccgcggcgccgcgctcctgcccccggcccggtccgaccccggcccctggcgccatggacaagctgccgccgtccatgcgcaagcggctctacagcctcccgcagcaggtgggggccaaggcgtggatcatggacgaggaagaggacgccgaggaggagggggccgggggccgccaagaccccagccgcaggagcatccggctgcggccactgccctcgccctccccctcggcggccgcgggtggcacggagtcccggagctcggccctcggggcagcggacagcgaagggccggcccgcggcgcgggcaagtccagcacgaacggcgactgcaggcgcttccgcgggagcctggcctcgctgggcagccggggcggcggcagcggcggcacggggagcggcagcagtcacggacacctgcatgactccgcggaggagcggcggctcatcgccgagggcgacgcgtcccccggcgaggacaggacgcccccaggcctggcggccgagcccgagcgccccggcgcctcggcgcagcccgcagcctcgccgccgccgccccagcagccaccgcagccggcctccgcctcctgcgagcagccctcggtggacaccgctatcaaagtggagggaggcgcggctgccggcgaccagatcctcccggaggccgaggtgcgcctgggccaggccggcttcatgcagcgccagttcggggccatgctccaacccggggtcaacaaattctccctaaggatgttcggcagccagaaagccgtggagcgcgaacaggagagggtcaagtcggccggattttggattatccacccctacagtgacttcagattttactgggacctgaccatgctgctgctgatggtgggaaacctgattatcattcctgtgggcatcaccttcttcaaggatgagaacaccacaccctggattgtcttcaatgtggtgtcagacacattcttcctcatcgacttggtcctcaacttccgcacagggatcgtggtggaggacaacacagagatcatcctggacccgcagcggattaaaatgaagtacctgaaaagctggttcatggtagatttcatttcctccatccccgtggactacatcttcctcattgtggagacacgcatcgactcggaggtctacaagactgcccgggccctgcgcattgtccgcttcacgaagatcctcagcctcttacgcctgttacgcctctcccgcctcattcgatatattcaccagtgggaagagatcttccacatgacctacgacctggccagcgccgtggtgcgcatcgtgaacctcatcggcatgatgctcctgctctgccactgggacggctgcctgcagttcctggtacccatgctacaggacttccctgacgactgctgggtgtccatcaacaacatggtgaacaactcctgggggaagcagtactcctacgcgctcttcaaggccatgagccacatgctgtgcatcggctacgggcggcaggcgcccgtgggcatgtccgacgtctggctcaccatgctcagcatgatcgtgggtgccacctgctacgccatgttcattggccacgccactgccctcatccagtccctggactcctcccggcgccagtaccaggaaaagtacaagcaggtggagcagtacatgtcctttcacaagctcccgcccgacacccggcagcgcatccacgactactacgagcaccgctaccagggcaagatgttcgacgaggagagcatcctgggcgagctaagcgagcccctgcgggaggagatcatcaactttaactgtcggaagctggtggcctccatgccactgtttgccaatgcggaccccaacttcgtgacgtccatgctgaccaagctgcgtttcgaggtcttccagcctggggactacatcatccgggaaggcaccattggcaagaagatgtacttcatccagcatggcgtggtcagcgtgctcaccaagggcaacaaggagaccaagctggccgacggctcctactttggagagatctgcctgctgacccggggccggcgcacagccagcgtgagggccgacacctactgccgcctctactcgctgagcgtggacaacttcaatgaggtgctggaggagtaccccatgatgcgaagggccttcgagaccgtggcgctggaccgcctggaccgcattggcaagaagaactccatcctcctccacaaagtccagcacgacctcaactccggcgtcttcaactaccaggagaatgagatcatccagcagattgtgcagcatgaccgggagatggcccactgcgcgcaccgcgtccaggctgctgcctctgccaccccaacccccacgcccgtcatctggaccccgctgatccaggcaccactgcaggctgccgctgccaccacttctgtggccatagccctcacccaccaccctcgcctgcctgctgccatcttccgccctcccccaggatctgggctgggcaacctcggtgccgggcagacgccaaggcacctgaaacggctgcagtccctgatcccttctgcgctgggctccgcctcgcccgccagcagcccgtcccaggtggacacaccgtcttcatcctccttccacatccaacagctggctggattctctgcccccgctggactgagcccactcctgccctcatccagctcctccccaccccccggggcctgtggctccccctcggctcccacaccatcagctggcgtagccgccaccaccatagccgggtttggccacttccacaaggcgctgggtggctccctgtcctcctccgactctcccctgctcaccccgctgcagccaggcgcccgctccccgcaggctgcccagccatctcccgcgccacccggggcccggggaggcctgggactcccggagcacttcctgccacccccaccctcatccagatccccgtcatctagccccgggcagctgggccagcctcccggggagttgtccctaggtctggccactggcccactgagcacgccagagacacccccacggcagcctgagccgccgtcccttgtggcaggggcctctgggggggcttcccctgtaggctttactccccgaggaggtctcagcccccctggccacagcccaggccccccaagaaccttcccgagtgccccgccccgggcctctggctcccacggatccttgctcctgccacctgcatccagccccccaccaccccaggtcccccagcgccggggcacacccccgctcacccccggccgcctcacccaggacctcaagctcatctccgcgtctcagccagccctgcctcaggacggggcgcagactctccgcagagcctccccgcactcctcaggggagtccatggctgccttcccgctcttccccagggctgggggtggcagcgggggcagtgggagcagcgggggcctcggtccccctgggaggccctatggtgccatccccggccagcacgtcactctgcctcggaagacatcctcaggttctttgccaccccctctgtctttgtttggggcaagagccacctcttctggggggccccctctgactgctggaccccagagggaacctggggccaggcctgagccagtgcgctccaaactgccatccaatctatgagctgggcccttccttccctcttctttcttcttttctctcccttccttcttccttcaggtttaactgtgattaggagatataccaataacagtaataattatttaaaaaaccacacacaccagaaaaacaaaagacagcagaaaataaccaggtattcttagagctatagatttttggtcacttgcttttatagactattttaatactcagcactagagggagggagggggagggaggagggagcaggcaggtcccaaatgcaaaagccagagaaaggcagatggggtctccggggctgggcaggggtgggagtggccagtgttggcggttcttagagcagatgtgtcattgtgttcatttagagaaacagctgccatcagcccgttagctgtaacttggagctccactctgcccccagaaaggggctgccctggggtgtgccctggggagcctcagaagcctgcgaccttgggagaaaagggccagggccctgagggcctagcattttttctactgtaaacgtagcaagatctgtatatgaatatgtatatgtatatgtatgtaagatgtgtatatgtatagctatgtagcgctctgtagagccatgtagatagccactcacatgtgcgcacacgtgtgcggtctagtttaatcccactgttgacaggatgcccaggtcaccttacacccagcaacccgccttggcccgcaggctgtgcacttgattggtctagggacgttctctctccagtcctcaaggaagaggaccccaagacttcgcagcaggccccctctctccccatctctggtctcaaagccagtcccagcctgacctctcaccacacggaagtggaagactcccctttcctagggcctcaagcacacaccg

SEQ ID NO: 91417 - DNA, 5213 bp, Homo sapiens
tttcgtgagagagagagagagagacagcaaagcagtcccaggcttcctcctctctttcacgtcagaggcaggaaccgactgtgctaaggctgttggctcaacacccagaggagacgggcagacccagggagagtgagagaagggggtcctctctgacccaaggaattaccactagtggagtgaagccacctgactttttgatcttattttggttgcctcctcattctccttccacccgtagccctgacagcttgggtttcatttctttcgtggagccttgtctcttcctcccagaataggaggaagggaagagaagggaaagaggagggctctctaggtgagcgcatcagctggctccagcctgagcaagcaagaattttcttcccaggaagctcctctcgctccccggccgcccacccccagcctgggtggctgtatcgttttaactgcatagagggcaggtctcttttggaattaggattaaagaaagtgcagtaaagagaaagcatcgaagacaccatcacaaaagattcccacaactccatgctgtgtgctgcaggctggtcctgaacccagatctctggctgagaggatgggggcagatggggaaacagtggttctgaagaacatgctcattggcgtcaacctgatccttctgggctccatgatcaagccttcagagtgtcagctggaggtcaccacagaaagggtccagagacagtcagtggaggaggagggaggcattgccaactacaacacgtccagcaaagagcagcctgtggtcttcaaccacgtgtacaacattaacgtgcccttggacaacctctgctcctcagggctagaggcctctgctgagcaggaggtgagtgcagaagacgagactctggcagagtacatgggccagacctcagaccacgagagccaggtcacctttacacacaggatcaacttccccaaaaaggcctgtccatgtgccagttcagcccaggtgctgcaggagctgctgagccggatcgagatgctggagagggaggtgtcggtgctgcgagaccagtgcaacgccaactgctgccaagaaagtgctgccacaggacaactggactatatccctcactgcagtggccacggcaactttagctttgagtcctgtggctgcatctgcaacgaaggctggtttggcaagaattgctcggagccctactgcccgctgggttgctccagccggggggtgtgtgtggatggccagtgcatctgtgacagcgagtacagcggggatgactgttccgaactccggtgcccaacagactgcagctcccgggggctctgcgtggacggtgagtgtgtctgtgaagagccctacactggcgaggactgcagggaactgaggtgccctggggactgttcggggaaggggagatgtgccaacggtacctgtttatgcgaggagggctacgttggtgaggactgcggccagcggcagtgtctgaatgcctgcagtgggcgaggacaatgtgaggaggggctctgcgtctgtgaagagggctaccagggccctgactgctcagcagttgcccctccagaggacttgcgagtggctggtatcagcgacaggtccattgagctggaatgggacgggccgatggcagtgacggaatatgtgatctcttaccagccgacggccctggggggcctccagctccagcagcgggtgcctggagattggagtggtgtcaccatcacggagctggagccaggtctcacctacaacatcagcgtctacgctgtcattagcaacatcctcagccttcccatcactgccaaggtggccacccatctctccactcctcaagggctacaatttaagacgatcacagagaccaccgtggaggtgcagtgggagcccttctcattttccttcgatgggtgggaaatcagcttcattccaaagaacaatgaagggggagtgattgctcaggtccccagcgatgttacgtcctttaaccagacaggactaaagcctggggaggaatacattgtcaatgtggtggctctgaaagaacaggcccgcagcccccctacctcggccagcgtctccacagtcattgacggccccacgcagatcctggttcgcgatgtctcggacactgtggcttttgtggagtggattccccctcgagccaaagtcgatttcattcttttgaaatatggcctggtgggcggggaaggtgggaggaccaccttccggctgcagcctcccctgagccaatactcagtgcaggccctgcggcctggctcccgatacgaggtgtcagtcagtgccgtccgagggaccaacgagagcgattctgccaccactcagttcacaacagagatcgatgcccccaagaacttgcgagttggttctcgcacagcaaccagccttgacctcgagtgggataacagtgaagccgaagttcaggagtacaaggttgtgtacatcaccctggcgggtgagcaatatcatgaggtactggtccccaggggcattggtccaaccaccagggccaccctgacagatctggtacctggcactgagtatggagttggaatatctgccgtcatgaactcacagcaaagcgtgccagccaccatgaatgccaggactgaacttgacagtccccgagacctcatggtgacagcctcctcggagacctccatctccctcatctggaccaaggccagtggccccattgaccactaccgaattacctttaccccatcctctgggattgcctcagaagtcaccgtacccaaggacaggacctcatacacactaacagatctagagcctggggcagagtacatcatttccgtcactgctgagaggggtcggcagcagagcttggagtccactgtggatgctttcacaggcttccgtcccatctctcatctgcacttttctcatgtgacctcctccagtgtgaacatcacttggagtgatccatctcccccagcagacagactcattcttaactacagccccagggatgaggaggaagagatgatggaggtctccctggatgccaccaagaggcatgctgtcctgatgggcctgcaaccagccacagagtatattgtgaaccttgtggctgtccatggcacagtgacctctgagcccattgtgggctccatcaccacaggaattgatcccccaaaagacatcacaattagcaatgtgaccaaggactcagtgatggtctcctggagccctcctgttgcatctttcgattactaccgagtatcatatcgacccacccaagtgggacgactagacagctcagtggtgcccaacactgtgacagaattcaccatcaccagactgaacccagctaccgaatacgaaatcagcctcaacagcgtgcggggcagggaggaaagcgagcgcatctgtactcttgtgcacacagccatggacaaccctgtggatctgattgctaccaatatcactccaacagaagccctgctgcagtggaaggcaccagtgggtgaggtggagaactacgtcattgttcttacacactttgcagtcgctggagagaccatccttgttgacggagtcagtgaggaatttcggcttgttgacctgcttcctagcacccactatactgccaccatgtatgccaccaatggacctctcaccagtggcaccatcagcaccaacttttctactctcctggaccctccggcaaacctgacagccagtgaagtcaccagacaaagtgccctgatctcctggcagcctcccagggcagagattgaaaattatgtcttgacctacaaatccaccgacggaagccgcaaggagctgattgtggatgcagaagacacctggattcgactggagggcctgttggagaacacagactacacggtgctcctgcaggcagcacaggacaccacgtggagcagcatcacctccaccgctttcaccacaggaggccgggtgttccctcatccccaagactgtgcccagcatttgatgaatggagacactttgagtggggtttaccccatcttcctcaatggggagctgagccagaaattacaagtgtactgtgatatgaccaccgacgggggcggctggattgtattccagaggcggcagaatggccaaactgattttttccggaaatgggctgattaccgtgttggcttcgggaacgtggaggatgagttctggctggggctggacaatatacacaggatcacatcccagggccgctatgagctgcgcgtggacatgcgggatggccaggaggccgccttcgcctcctacgacaggttctctgtcgaggacagcagaaacctgtacaaactccgcataggaagctacaacggcactgcgggggactccctcagctatcatcaaggacgccctttctccacagaggatagagacaatgatgttgcagtgactaactgtgccatgtcgtacaagggagcatggtggtataagaactgccaccggaccaacctcaatgggaagtacggggagtccaggcacagtcagggcatcaactggtaccattggaaaggccatgagttctccatcccctttgtggaaatgaagatgcgcccctacaaccaccgtctcatggcagggagaaaacggcagtccttacagttctgagcagtgggcggctgcaagccaaccaatattttctgtcatttgtttgtattttataatatgaaacaaggggggagggtaatagcaatgtgttttgcaacatattaagagtatgtggaggaagcagggatgtcgcaggaatccgctggctaacatctgctcttggtttctgctgccctggagcctgaccctcagtctccattctccctcctacccaggcctcctcaaccttcacctcctttcccaccaaggaggagaagtaggaagttttcttaaagggccaattcaaagccaagtcgtggggtgcagattgttatggtgacaggcacacacatttttctacccttcttctgagatgtcctctgccttccaggtatttgtgattttgtcacagcctgacatggccaggttctcacactggcccagagaaaagagcctcagcaagagagttttgccaacaattccccttaaaaggaaacagatcaactacaccgcatcccaacaacccaggttcttttccttccttccttccttcctcccttccttc

SEQ ID NO: 91418 - DNA, 2428 bp, Homo sapiens
ccggctgcagctcccggcgtgccccgcactctccgctgcccaccctctcgcccttccctccttctcctcccagtgccacagagccgaagcccgagctgccgccgcagccacagccgagggcactatggcttctggagttacagtgaatgatgaagtcatcaaagtttttaatgatatgaaagtaaggaaatcttctacacaagaggagatcaaaaagagaaagaaagcagttctcttctgtttaagcgatgacaaaagacaaataattgtagaggaagcaaagcagatcttggtgggtgacattggtgatactgtagaggacccctacacatcttttgtgaagttgctacctctgaatgattgccgatatgctttgtacgatgccacatacgaaacaaaagagtctaagaaagaagacctagtatttatattctgggctcctgaaagtgcacctttaaaaagcaagatgatttatgctagctctaaagatgccattaaaaagaaatttacaggtattaaacatgagtggcaagtaaatggcttggatgatattaaggaccgttcgacacttggagagaaattgggaggcaatgtagtagtttcacttgaaggaaaaccattataaaatgacagtcaagtgccatctggatcttaaggagcttccatttctccagctcagtccattggaatagtattaggttttggttttttgttgtatttccccctttccactgggcccttccaacacaatgaatgaaggaaatatcatttatttaagcagcctatcagtgattgccattagactgttgaatactgttacttttatatagaacccaaggaatgccttcctgtcatattttagccaaaacaactggttatatgcctcccttgcagcaagcactacaatgtatgtgatcgtcaatgtgaatagcttagaatactgcaaaggataagctaattgaatgccttgaaagtattatccactggtcagatggtcaacttttttcagtattatttatagttggcacttgattgcagttctgtgaggcttgagcattcatacacctcacctgccttggcaagcctattttagtgatatggcagcacggatataacactatgcattaaaagcactttttgtaataagtttaatatcctaaaaggaatgccaattaagttttgttaactgtgtcatcaacttatcctagtacctcagtgttcattcctgttacctgcatatcttcttaaaagaaatagctgttattaatgcctttttgttttccattgagtgtacactactgaataagtgtaggagttttatgtttaccatgtgagtcctgcaacactaaagatattttgaatatcagtcatgatggcaatttctgtataaaagagccttaaatggaacattgttttgagatcaaactccccaccctcacaaaaatggccacgttgcaataaaaattgtggcatattacagaacgttgccttgttttccttggaaattttgcaaaatgttatgtgaaacaacttctagggtaaaaacagctattactaatctctgcactggtcatttgagaattttttttgtacagcattcatgtgtgatattttccagatttgttggatctatttggtttaaaaagtattttatattagttggccttaagatagaatactttttaaaccaactaatataaaataccattgttaaagaatggtacttttataaacattagtgtatttatttcctatgtgttaatatgaagatcagaaattattttttgcactttggcataaatacttttcaatatctgatttgttctctggataaattagcatagttatttttttattcacatttacatttctaagtagttgtatagtagaagcaggaagctcttattgcttatttggtcgtaatgaaaataatttgtaaaatgtcctttaaaagtttaatgatacttctgatgtttcggaacagtcatttcacctactatttctgaatatattttgcaaattgaattggaataggaattgatatagcagtcttaaacattagtagtgggatttggctatggtccagactgtgctccttatagagaatttgatctgctcagtgtgagcggtttgctgttagccagggctatttatggcaaacacatgcttttgtatcttgtcatagttatccacaaatggcaaaactggacttgattctactggtatgcaaaacaggcatgctagttaaggcagttcagtcgtgggctcaggaacttaaccccatagctcagaggaatgcttttagcagaaaacaggaaagaaaatatcccttaaaatttttttttgaatgtgtggaagtaattttagtataattagattttttccatatttttgaaagatttttcagatgtgaacattaaaataggga

SEQ ID NO: 91419 - DNA, 2423 bp, Homo sapiens
cccaattcccgggtcgacgatttcgtgagtgggcggagggggtggaggtttgtctccgctgtttcatctctatggctgtcagaggtgggcggctttgaccgagaggctgctggagctcgtgtttggacgcgatgtttcgtctgaactcactttctgctttggcagaactggctgtgggttctcgatggtaccatggaggatcacagcccatccagatccggcgaagactaatgatggtggctttcctgggagcatctgcagtaactgcaagtactggtcttttgtggaagagggcccatgcagaatctccaccatgtgtagacaacctaaaaagtgacatcggtgataaagggaagaataaagatgaaggggatgtttgtaaccatgagaaaaagactgcagatcttgcccctcacccagaagagaaaaagaagaaacgttctggattcagagacagaaaagtgatggaatatgagaataggattcgagcctactccacgccagacaaaatcttccgatattttgccaccttgaaagtcatcagtgagcctggtgaagcagaagtgtttatgacaccagaagattttgtgcgatccataacacccaatgaaaaacaaccagaacacttgggtctggatcaatatataataaaacgctttgatggaaagacagagaaaatttcccaggaacgagaaaaatttgctgatgaaggcagtatattttacacccttggagaatgtgggctcatatccttttcagattacattttcctcacaactgttctttccactcctcagagaaattttgaaattgccttcaagatgtttgatttgaatggagatggagaagtagatatggaagaatttgaacaggttcagagcatcattcgctcccaaaccagtatgggtatgcgccacagagatcgtccaactactggcaacaccctcaagtctggcttgtgttcagccctcacaacctacttttttggagctgatctgaagggaaagctgacaatcaaaaacttcctcgaatttcagcgtaaactgcagcatgatgttctgaagcttgagtttgaacgccatgaccctgtggatgggagaattactgagaggcagtttggtggcatgctacttgcctacagtggggtgcagtccaagaagctgaccgccatgcagaggcagctcaagaagcacttcaaagaaggaaagggtctgacatttcaggaggtggagaacttctttactttcctaaagaacattaatgatgtggacactgcattgagtttttaccatatggctggagcatctcttgataaagtgaccatgcagcaggtggccaggacagtggctaaagtggagctctcagaccacgtgtgtgatgtggtgtttgcactctttgactgtgatggcaatggcgaactgagcaataaggaatttgtttccatcatgaagcaacggctgatgagaggcctggaaaagcccaaagacatgggtttcactcgcctcatgcaggccatgtggaaatgtgcacaggaaactgcctgggacttcgctttacccaaacagtaaccccacactgcaagaggggacccctccacccccagtaccctggaccccctccgcagagtctcggcagagccctttgtgctgctgcttctggaagtagtctcccttcctcccgggatgacctcaggactctgtcggtttcccctctttacccttccccgtccccgtgttctgctgggctctgattctgcccaatgagtatccccataggttctcaaaaacatgaacaagtctgtaaagctcagacatttgtcagcctcaacagcaccacccattcaagcatcctgtggataaagaattcagggaaccatccacacacctgccaaccctgggaagcatccagttctcaaatcgtttttgctatggatttatactaacaagaacattccttgacttccctcctgctggtgttttaaagccacaagtagggaagatatctggcaggcagaaagaagtctgtgatgataaacaatgatgaggatgacctaggcaccctacgctagtgtgagaagcctgcgccccaggaaggatctgtgttagtccctgggatggctccaaggcctgctctaggaaggcagcatgctcagtgggaacacagcaagattcagaatttaaagtagttgcttcatggctctgtgcactcccttttcttcctcgcagcctccctaagatgactccagtgtgaccctgtgcttagtgagcaatagtgattgagctcatgttccctgcaagtgccatttcctctccaggatgggcctctaaagctgaggcctggctcagagcctgtttgccctctgtcttaaacaattgtaaatatcacttaaattataaccatttgcaataaacatccccaaagtt

SEQ ID NO: 91420 - DNA, 2405 bp, Homo sapiens; identical to SEQ ID NO: 60206

SEQ ID NO: 91421 - DNA, 710 bp, Homo sapiens
ggcctacggctgtggggcgcgcagagtccacctggcggccaagggcgctggcgaccgctgaagctcctgggggtgttcggggtccgggctgcgcctgtgcccgcgggaaggctgggcgcttcccacacacagaccccgctccgggccagccccgcagggagactaccagggctggcggtagctgggcgtggtcgggtcgggggcggctgtgggcggccggcaggcagcgcgcggggcagccctcggcagacggccaatggcggcggtgctcggggcgctcggggcgacgcggcgcttgttggcggcgctgcgaggccagagcctagggctagcggccatgtcatcaggtactcacaggttgactgcagaggagaggaaccaagctatacttgaccttaaagcagcaggatggtcggaattaagtgagagagatgccatctacaaagaattctccttccacaattttaatcaggcatttggctttatgtcccgagttgccctacaagcagagaagatgaatcatcacccagaatggttcaatgtatacaacaaggtccagataactctcacctcacatgactgtggtgaactgaccaaaaaagatgtgaagctggccaagtttattgaaaaagcagctgcttctgtgtgatttcttccaaaatacatgtaaaatcttgcacacatcttagctgcattggatgttgagggaa

SEQ ID NO: 91422 - DNA, 1806 bp, Homo sapiens; identical to SEQ ID NO: 60326

SEQ ID NO: 91423 - DNA, 1408 bp, Homo sapiens
ttagagaggcgtaattcagccacactcagagaaggcagggcagggaggctgacggaactgctcagggagacccagcgagaggctcatagatccaggaggaaaataaatatgtgacagtaaatctacggaacctgtgtgccaccttgactacttatgctgtggctgatgtcactttgtgatcaccatggtctttcccactgatcccccgatgccaccctagaattctcaacacagcactccatagtggattagagctcagattctgaagtcagctaaaacagggtttaaattttggctccaccacttactctgtgacctgagtcacatttcttagcttctctgagcctccatttcagcatctgtaaaatgttactacctactttataggttttctgatgaggcttaagtgtggttgtgcatgtgaccatcttagcatagtgtgtggcaatggtaagcactcagtgctgtcagctgtttttaccgctgttattatattactgtgttttcccatgtcattaggtctgtgatccaggcttcagcagacaatccaggctgatgcttttgctgagtgcgctaagggatgctggcctggcgggatggtgaactggaagcagaaacgtcatcctctctcttccttcttgccatgcaggtgtggatgtgtgggggccgcatggaggacatcccctgctccagggtgggccatatctacaggaagtatgtgccctacaaggtcccggccggagtcagcctggcccgggtaagaacccttaagcgggtggccgaagtgtggatggatgagtacgcagagtacatttaccagcgccggcctgaataccgccacctctccgctggggatgacgcagtccagaaaaagctccgcagctcccttaactgcaagagtttcaagtggtttatgacgaagatagcctgggacctgcccaaattctacccacccgtggagcccccggctgcagcttggggggagatccgaaatgtgggcacagggctgtgtgcagacacaaagcacggggccttgggctccccactaaggctagagggctgcgtccgaggccgtggggaggctgcctggaacaacatgcaggtattcaccttcacctggagagaggacatacggcctggagacccccagcacaccaagaagttctgctttgatgccatttcccacaccagccctgtcacgctgtacgactgccacagcatgaagggcaaccagctgtggaaataccgcaaagacaagaccctgtaccaccctgtcagtggcagctgcatggactgcagtgaaagtgaccataggatcttcatgaacacctgcaacccatcctctctcacccagcagtggctgtttgaacacaccaactcaacagtcttggaaaaattcaataggaac

SEQ ID NO: 91424 - DNA, 1002 bp, Homo sapiens
tcgattttaggcagacgactaccagccttgcgtctggaacactgatttattactttttgctgcctttctgttgggtcagtttttgtagatcctgttagatgttagataaaatatgagactaggaaatggcaagcaagtgaattacctcaagtacctttcatcttgttgtgaaaagcaactcttaccatcaatatgattttatgggtttttttctttattcatctgttcagtacacatttgagagaaggcttcagagaggagttgataattgatgatgtcttacaggataagtcaaattctactgggttgacaaggtagagtttactttagaagagattgcagatgtggaaggacttggtacatccttcggggtaggtatgacatggtaaattacagtgtctctggatagttagaaaggcattatattggacataataataccttaaatgccagtccaaggaatttagatttttcctgtttatagtggggaatcaatatgtttattgatggttcctagtacacagtagttgctaatagttttctctattggtagaaagatgtatggaggctgctctcatagagtactgcacttatatttttgtgctacctcattactgtcactaatgaattctctgtctctacacattcgcaagagtttttttttttaaacgaatctcgccctgtacctgattaagctgaaaggaagggcccaactcggttaattgaactttttctggggttgaaggatttttgcttacactctggaaagtggaaaaaaggcgtgcgtcatgcccgttattttgttttcttcaaaacgcttaaccctttccgcgacgcactcttcatctcttataaatctctatggccacacaccacacgtcactgacccacgacgcaaacccagaatattaagtaattctctatgtactccagggcatctaaaaaaccacaaactcttgccactatatcatagcaaccccgtaaatgaacaaaccgctgagc

SEQ ID NO: 91425 - DNA, 1181 bp, Homo sapiens
  misc_feature (1)...(1181): n = a,t,c or g
cggctgagcgtgtggctgcaggagcttctgtgggagtacggtcatgagccttttgctgtactatgccctccctgccctgggcagctatgccatgctctccatcttcttcctgcgccggcctcatctgctgcacacgcccagggctcccaccttccgcatccgcctgggggcccaccgaggaggatctggagagctgctggagaacaccatggaggccatggagaactccatggcccagcgctcggacctcctggagctcgactgtcagctgacacgggacagagtggtggtggtgtcacatgatgagaacctgtgccgccagtcgggcctaaacagggatgtgggcagcctggacttcgaggacctgcccctctacaaggagaagctggaggtttacttctctccaggccactttgctcacgggtcagaccggcgcatggttcgtctggaggacctgttccagaggtttccaaggacacccatgagcgtagagatcaaagggaagaacgaagagctcatccgtgagatagcaggcttggtgagacgctatgaccgtaatgaaatcaccatctgggcctcggagaagagctcggtcatgaagaaatgcaaggnnnnnnnnnnnnnnnnnnnnnnnnnnnnnnnnnnnnnnnnnnnnnnnnnnnnnnnnnnnnnnnnnnnnnnnnnnnnnnnnnnnnnnnnnnnnnnnnnnnnnnnnnnnnnnnnnnnnnnnnnnnnnnnnagatgcccctgtccttcacaataagccgaggattctgggtgctgctttcctactacctggggctgctgcccttcatcccaatccctgagaagttcttcttctgcttcctgcccaacatcatcaacaggacctatttcccattttcctgctcttgcctgaaccagttattggctgtggtttcgaaatggctgatcatgaggaagagtctgatccgacacttggaggagcgaggggtgcaggtggtcttttggtgccttaatgaagagtcggattttgaagcagccttcagcgtgggagccactggcgtcataacggattatcccacagccctgcggcactacctggacaaccatggaccagctgcccggacctcctaagtccagaagcctcgaggtctcctgtttctcttcctgaaaaataaatatttgcctttcgatcaaaa

SEQ ID NO: 91426 - DNA, 658 bp, Homo sapiens
ttttttttgcaatgctcagtatctatttattaaatgaatgcacaattgaaagagtgaagattgaatgtctagatatttgttcctctaacccacaagctcacatgcagcagagcacacgaatgtgtgtgtgccaaggccccagaggctggatgcccacatatgtgctgatgcatgtgccctagggagtccctcttggttaacatctgtttaaaatctctgtcttcttcttgatagagaaacagcatggtttcctagactgaattgaagaatgaaggtgagagtacaaacagtgggagagacgtttcctcagctgtcagaacaggaacgacctgggttatgggaagcccagaaagggaggaggacttcttttggtcccagtgaaagatgcttccagaatctgtagccttacttatttgcttggatctcactggaataacttggtggtgaggtcaccggttctggggtgatcactgggtttgctgcatagatgtttggatagatgacactcacattgcttgattgacagcagaccaactggcagccaaagtgggaagatgcgcatgcgatgccaaactccaggaggcagaagaccagcagcacgccagaaatcgccattccagggttcacaccccaggcgtaaggataatagtcggggtag

SEQ ID NO: 91427 - DNA, 905 bp, Homo sapiens
tgaagaccaaactgccactgaggggaggaagaacgaagactgctccctccacctgccccacgggccagccatgctccttggattctgtgggttaacattcatgctttgtgatgcgagtctgctcgtgaagaaacaggaacacacttctcctggttctggcaggtacacaattttctcggcaaagttcttttttgccaagttcagttttatttggttgctgttctgaaccgttgtcaccggaattcatagatgggtgcactgtgttcaggaacatgggttagattgagggactgataccattctgaactcctatggtagtagtagccctctatggaggctgctgacttctgaaagcagatgtagtagaacccggcaaaagaagcaccactgatgtctttgatcgtgtgatctgggaccagaaactgttccttccacctcatgaagacgtagtctccattcttcagctcttcataatcaaagtcatctgagttaaatgattttgcatactgataaaaagccagaaacttgccccagtgtttccgatcaacatcttcatctgcatcccacttgcgagttaagaaagggtgttttttgctgattatttctccttcgaagaaggttgtaagggttggatactcctcagtaaggcctttaatcttcaagtacccacaaaggtaagagttccccgtgtccacgtgctgcagcaccacctgtacgtcgtacgagttccccttgctcttctggtggccgcggaacttggagccgctgtagagcaggctggtggccacgccgggctgctgggtgttgatgggcggcggcgggatgagtgaggccgcggaggcagcggaggcaccggccggcgggggacactcggtgcggaccggctcgtgccgaattcctgcaga

SEQ ID NO: 91428 - DNA, 2008 bp, Homo sapiens; identical to SEQ ID NO: 60027
  misc_feature (1)...(2008): n = a,t,c or g

SEQ ID NO: 91429 - DNA, 2560 bp, Homo sapiens
cgtgcccaatctgatgctttgagaaactgtccgccggcacgtaccggcccggaattccagggtcgacgatttcgtcccgcggcaactgcacaggttcggtgacagccgagacgccgagtgtttcccgcagccggccggggtccaggtcggaaatgtagccagtggggccgccaggcttcagtgtcatttgaggacgtgactgtggacttcagcaaggaggagtggcagcacttggaccctgcccagagacgcctgtactgggatgtgacactagagaactacagccacctgctctcagtggggtaccaaattcccaagtcagaggctgccttcaagttggagcaaggagaggggccatggatgctggagggggaagccccacatcagagctgttcaggtgaggctattgggaaaatgcagcaacagggaattcctggaggaattttcttccactgtgagagatttgatcaacccataggagaagattcattatgttctattttagaagaactgtggcaagataatgaccagctagagcaacgtcaggaaaaccagaataaccttttaagtcatgtgaaagtattgattaaggagaggggctatgaacataaaaacattgaaaaaataattcatgtgactaccaagcttgttccttcaattaaaagactccataactgtgacacaattttgaagcatactttaaactcacataatcataatagaaacagtgcaacaaagaaccttggcaagatttttggaaatggtaacaatttcccccatagcccttcctctactaagaatgagaatgctaaaacaggagcaaattcctgtgaacatgaccactatgaaaaacatctcagccacaaacaagctcccacccaccatcagaaaattcatcctgaggagaagctttatgtgtgtactgaatgtgtaatgggcttcactcagaagtcacatctgtttgagcatcagagaattcatgctggagaaaagtcccgtgaatgtgacaaaagcaacaaagtcttcccccagaaaccccaggttgatgtacatccaagtgtttatacaggagaaaaaccctatctgtgtactcaatgtgggaaagtctttaccctcaaatcaaacctcattacacatcaaaaaattcataccgggcagaaaccctacaaatgcagtgaatgtggaaaagcctttttccagagatcagacctctttagacatctgagaattcatacaggagaaaaaccttatgaatgcagtgaatgtggaaaaggcttctcccagaactcagacctcagtatacatcagaaaactcataccggagagaaacactatgaatgcaatgaatgtgggaaggctttcacaagaaaatcagcactcaggatgcatcagagaatccacacgggagagaaaccttatgtatgcgctgactgtgggaaggccttcatccagaaatcacatttcaacacacatcagagaattcatactggagaaaagccgtatgaatgcagtgactgtgggaaatccttcactaagaagtcacaactccatgtgcatcaaagaattcacaccggagagaaaccctatatatgtacagaatgtggaaaggtcttcactcacaggacaaacctcaccacacatcagaaaactcatactggggaaaaaccctatatgtgtgctgaatgtggaaaggcttttactgaccagtcaaatctcattaaacaccagaaaactcacactggagagaaaccctataagtgcaatggctgtggaaaagccttcatatggaagtcgcgcctcaaaatacatcagaaatctcatattggagagagacactatgaatgcaaggactgcgggaaagccttcatccagaaatcaacactaagcgtgcatcagagaatccatacaggagagaaaccgtacgtttgtcctgaatgcgggaaggcctttatccagaaatcgcacttcattgcgcatcatagaatccatactggagagaagccttatgaatgcagcgactgtgggaaatgcttcactaagaagtcacaactccgtgtgcatcagaaaatccacacaggtgagaagcccaatatatgtgctgaatgtggaaaggccttcactgaccgatcaaatctcataacacatcagaaaatccacactagggagaaaccctatgaatgtggtgactgcgggaaaaccttcacctggaagtcacgcctcaatatacatcagaagtctcatactggagaaagacactatgaatgtagtaaatgtgggaaagctttcatccagaaagccacactaagtatgcatcagataattcatacaggaaagaaaccttatgcttgtacagaatgtcagaaggcctttactgacagatcgaatctcattaaacaccagaaaatgcatagtggagaaaaacgctataaagccagtgactgagaaagtcttcacctggaaatcacaactgggtatgcatcaggtatctaatagcagggaggaggaaggcctgttgctgcaatcattgtacagggggaaatgggtatgagagactgaggct

SEQ ID NO: 91430 - DNA, 1812 bp, Homo sapiens; identical to SEQ ID NO: 59790

SEQ ID NO: 91431 - DNA, 1790 bp, Homo sapiens
cggttgacgtttgctgatttttgactttgcttgtagctgctccccgaactcgccgtcttcctgtcggcggccggcactgtagattaacaggaaacttccaagatggaaactttgtctttccccagatataatgtagctgagattgtgattcatattcgcaataagatcttaacaggagctgatggtaaaaacctcaccaagaatgatctttatccaaatccaaagcctgaagtcttgcacatgatctacatgagagccttacaaatagtatatggaattcgactggaacatttttacatgatgccagtgaactctgaagtcatgtatccacatttaatggaaggcttcttaccattcagcaatttagttactcatctggactcatttttgcctatctgccgggtgaatgactttgagactgctgatattctatgtccaaaagcaaaacggacaagtcggtttttaagtggcattatcaactttattcacttcagagaagcatgccgtgaaacgtatatggaatttctttggcaatataaatcctctgcggacaaaatgcaacagttaaacgccgcacaccaggaggcattaatgaaactggagagacttgattctgttccagttgaagagcaagaagagttcaagcagctttcagatggtattcaggagctacaacaatcactaaatcaggattttcatcaaaaaacgatagtgctgcaagagggaaattcccaaaagaagtcaaatatttcagagaaaaccaagcgtttgaatgaactaaaattgtcggtggtttctttgaaagaaatacaagagagtttgaaaacaaaaattgtggattctccagagaagttaaagaattataaagaaaaaatgaaagatacggtccagaagcttaaaaatgccagacaagaagtggtggagaaatatgaaatctatggagactcagttgactgcctgccttcatgtcagttggaagtgcagttatatcaaaagaaaatacaggacctttcagataatagggaaaaattagccagtatcttaaaggagagcctgaacttggaggaccaaattgagagtgatgagtcagaactgaagaaattgaagactgaagaaaattcgttcaaaagactgatgattgtgaagaaggaaaaacttgccacagcacaattcaaaataaataagaagcatgaagatgttaagcaatacaaacgcacagtaattgaggattgcaataaagttcaagaaaaaagaggtgctgtctatgaacgagtaaccacaattaatcacgagatccaaaagattagacttggaattcaacaactaaaagatgctgctgatagggagaaactgaagtcccaggaaatatttctaaacttgaaaactgctttggagaaataccacgacggtattgaaaaggcagcagaggactcctatgctaagatagatgagaagacagctgaactgaagaggaagatgttcaaaatgtcaacctgattaacaaaattacatgtctttttgtaaatggcttgccatcttttaattttctatttagaaagaaaagttgaagcgaatggaagtatcagaagtaccaaataatgttggcttcatcagtttttatacactctcataagtagttaataagatgaatttaatgtaggcttttattaatttataattaaaataacttgtgcagctattcatgtctctactctgccccttgttgtaaatagtttgagtaaaacaaaactagttacctttgaaatatatatatttttttctgttacaaa

SEQ ID NO: 91432 - DNA, 686 bp, Homo sapiens
  misc_feature (1)...(686): n = a,t,c or g
tttcgttcagaatgtctgggcgaggtaaaggtggcaaggggctgggtaagggaggcgccaagcgccaccggaaggtgctgcgggacaatatccaaggcattacaaagccggcgattcgccgtctcgcccgacgtgggggcgtcaagcgcatttctggtctcatctacgaggagacccggggagtcctcaaagtcttcctggagaacgtgatccgtgacgcggtgacttacacggagcacgccaagcgcaagaccgtcacggccatggatgtggtgtacgcgctgaaacgccagggtcgcaccctttatggtttcggcggttgagctgtccccacagcttctctacagactccaaaaggcccttttcagggcccccaaactgtcacagaaagagctgttaacacttcctagataacgnnnnnnnnnnnnnnnnnnnnnnnnnnnnnnnnnnnnnnnnnnnnnnnnnnnnnnnnnnnnnnnnnnnnnnnnnnnnnnnnnnnnnnnnnnnnnnnnnnnnnnnnnnnnnnnnnnnnnnnnnnnnnnnnnnnnnnnnnnnnnngannnnnnnnnnnnnnngggaaaaannnnnnnnnnnnnnnnnnnnnnnnnnnnnnnnnnnnnnnnnnnnnnnnnnnnnnnnnnnnnnnnnnnnnnnnnnnggggggggattttagggggggagccccg

SEQ ID NO: 91433 - DNA, 430 bp, Homo sapiens
tttcgtgggaaagatgactcagaggttggaagcaggagcctagagatgaaggcaaaagtcatggagaattcttttcccagtgttgagacctaatcaaggaactttcagtgtttgccctgctagatttcagagtcagtatggatcagtgactcttttgtgccccccaatttcctgcctttcttttgtagaaaaagttatgccatttagtgattgcaaggattttagagaacataaacccagagggcaagtgagaaagcagccctaatactctgccatctaggctcccagaatgccatgctgttgttaaattgcctcttttggcttttgcttacaagtcataagtaccagatgatatgtgcaaaactgaacccatcaggagaggatttcccacccccgtatttacccactttctctcatcagtatgaataag

SEQ ID NO: 91434 - DNA, 1824 bp, Homo sapiens
gttcccgtgactgcagaagctaaacttatgggctttacacagggctgtgtgacctttgaggacgtggccatttacttctcccaggaagaatgggggctccttgatgaggctcagaggctcctgtaccgcgatgtgatgctggagaactttgcacttataactgcgctggtttgttggcatgggatggaggatgaagagacacctgagcaaagtgtttctgtagaaggagtacctcaggtcaggactccagaggccagtccatccacccagaagattcaatcctgtgacatgtgtgtcccattcctgaccgacattttgcacctgaccgatttgcctgggcaggaactatacttgactggggcatgtgcggtctttcaccaggaccagaagcatcatagtgcagagaaacccttggaaagtgacatggacaaggcctcatttgtgcagtgctgcctgttccatgagtcaggaatgcctttcaccagcagtgaggttgggaaggacttcctagccccattgggcattcttcagccgcaagctattgctaactatgagaagccaaacaaaatcagcaaatgtgaggaggcctttcatgttggaataagtcattacaagtggagtcaatgcaggagagagtccagccacaaacacactttttttcaccctagagtctgcactggaaaaaggctttatgaatctagcaaatgtgggaaagcctgctgctgtgagtgctcccttgttcagctgcaaagagtccaccctggagaaaggccttatgagtgcagtgaatgtgggaaatcttttagccaaacctctcatctgaatgatcatcggagaatccacactggagaaaggccttatgtgtgtggtcagtgtgggaaatcatttagccaaagagccaccctcattaaacatcacagagttcacactggagaaaggccttacgagtgtggtgaatgtgggaaatcttttagccaaagttccaaccttattgaacattgcagaattcacactggagaaaggccttatgagtgtgatgaatgtggaaaagcctttgggtccaaatccactcttgttcgacaccagagaactcacacaggagaaaagccatatgagtgtggtgaatgtgggaaattattcagacaaagcttcagccttgttgtacaccagagaattcacactacagcaaggccttatgagtgtggccagtgtgggaaatcatttagcctaaagtgtggcctcattcagcaccagttaattcacagtggagctaggccctttgagtgtgatgagtgcggaaaatcctttagccaaagaaccaccctcaataaacaccacaaagttcacactgcagaaaggccttatgtatgtggggaatgtgggaaagcttttatgttcaaatctaaacttgttaggcaccagagaactcacactggagaaaggccttttgagtgcagtgaatgtgggaaattttttagacaaagctataccctcgttgaacaccagaaaattcacactggattaaggccttacgactgtggacagtgcgggaaatcctttatccaaaagtctagcctcattcaacaccaagtggttcacacaggagaaaggccatatgagtgtggcaaatgtgggaagtcctttacacaacactctggcctcattctccaccgaaaatctcacactgtggagaggcctcgtgacagcagcaaatgtggaaaaccctacagcccaagatctaacattgtttaactcttgaaactccaaacctgagaaaagccttagacctgcagggaatgtgccatgtctttcttcagtgttatg

SEQ ID NO: 91435 - DNA, 598 bp, Homo sapiens
gccaagcggcgcccacgcgtccgatatacatgcatatatatatgcttatatacatacacatacacaatttacacattaaaaacattagtactcaaaactcataatttccaagtattttctctgtgctctgtgggtattggcatctgttttgtctgtatgctgtgctgcttaccacgtgtgtgtctttccaactctacgctcaggaaagtcaccttggtagcttgaaactggccatggtggaagtatttacatcgtgagaattactgaacactacacatcagggctttttcattgttttgtcctgaggactgtttcttaaatatttattagcacaccactgactttaagctaaatgagcatcttaagcttttgcctttgataaaaacctgtctaaaatgcattaggatgcttttctaccttaagtgtttagagcatgctaaatatcattgttctaagtgctgaagaagatctttaatacttgagattgctataatgctcagaataattatcttaaacattacaagatcacctcttatgagatgtcaaaagtatatcatttccagatcagttttatgtaaaatgccaaattatgaattct

SEQ ID NO: 91436 - DNA, 7086 bp, Homo sapiens; identical to SEQ ID NO: 59800

SEQ ID NO: 91437 - DNA, 331 bp, Homo sapiens
gtgggctggagcgggcggagctcggcccgcggcttgcgtgagctcaggccggtcccagcgtccagagcgccggcccttcggcttcttctaggccatggcagggccgggcccaggcccgggggacccggacgagcagtacgatttcctgttcaagctggtgctggtgggcgacgcaagcgtgggcaagacgtgcgtggtgcagcgcttcaagaccggcgccttctcggagcgccagggaagcaccatcggcgtcgacttcaccatgaagacgctggagatccagggcaagcgggtcaagctgcagatctgggacacggccggccaggagcgg

SEQ ID NO: 91438 - DNA, 8472 bp, Homo sapiens
  misc_feature (1)...(8472): n = a,t,c or g
cttttctcaagacaactacataagcagacaaaattgcaaagatctgccctgtgtcgagtatgacagccacgactcgtggctctccggtcggagggaatgacaaccagggccaggctcctgatggacagtctctgccccccctccaacagaatcagacttcatcgcctgattcttccaatgaaaattccccggcaactcccccagatgagcaaggtcaaggtgatgccccaccacagcttgaagatgaggaacctgcatttccacatactgacttggccaagttggatgacatgatcaacaggcctcgatgggtggttccagttttgccgaaaggggaattagaagtgcttttagaagctgctattgatcttagtaaaaagggccttgatgttaaaagtgaagcatgtcagcgatttttccgtgatgggctaacaatatcattcactaaaattcttacagatgaagcagtgagtggctggaagtttgaaattcataggtgtctggtggagctatgtgtggccaagttgtcccaagactggtttccacttttagaacttcttgccatggccttaaatcctcattgcaaattccatatctacaatggtacacgtccatgtgaatcagtttcctcaagtgttcagttgcctgaagatgaactctttgctcgttctccagatcctcgatcaccaaagggttggctagtggatcttctcaacaaatttggcactttaaatgggttccagattttgcatgatcgttttattaatggatcagcattaaacgttcaaataattgcagcccttattaaaccatttgggcaatgctatgagtttctcactcttcatacagtgaaaaagtactttcttccaataatagaaatggttccacagtttttagaaaacttaactgatgaagaactgaaaaaagaagcaaagaatgaagccaaaaatgatgctctttcaatgattattaaatctttgaagaatttagcttcaagggttccaggacaagaagaaactgttaaaaacttagaaatatttaggttaaaaatgatacttagattattgcaaatttcttctttcaatggaaagatgaatgcactgaatgaagttaataaggtgatatctagtgtatcatactatactcatcgacatggtaatcctgaggaggaagagtggctcacagctgaacgaatggcagaatggatacagcagaacaatatcttatccatagtgttgcgagatagtcttcatcagccacagtatgtagaaaagttagagaagattcttcgttttgtcatcaaagaaaaagctctgaccttacaggatcttgataatatctgggcagcacaggcagggaaacatgaagccattgtgaagaatgtacatgatctcctggcaaaattggcatgggatttttctcctgaacaacttgatcatccttttgattgttttaaggccagtcggacaaatgcgagtaaaaagcaacgtgaaaagctacttgagctgatacgtcgtcttgcagaagatgataaagatggtgtgatggcacacagagtgttgaaccttctgtggaatctggctcacagtgatgatgtgcctgtagatatcatggacctggctctcagtgcccacataaaaatactagattacagttgctcccaggaccgtgatacacaaaagatccaatggatagatcgctttatagaagaacttcgcacaaatgacaaatgggttattcccgcactgaaacaaattagagaaatttgtagtttgtttggtgaagcgcctcaaaatttgagtcaaactcagcgaagtccccatgtgttttatcgccatgacttaatcaatcaacttcaacacaatcatgccctagttactttggtagcagaaaaccttgtaacttacatggaaagcatgagactatatgctagagaccatgaagattatgacccacaaactgtgaggctgggaagtagatatagtcatgttcaagaagttcaagaacggcttaacttccttagatttttattgaaggatggtcagctgtggctatgtgctcctcaggcaaaacaaatatggaaatgcttagctgagaatgcagtttacctttgtgatcgtgaagcctgttttaagtggtattccaagttgatgggggatgaaccagacttagatcctgatattaataaggacttctttgaaagtaatgtgcttcagcttgatccttctctgttaactgaaaatggaatgaagtgttttgagcgattcttcaaagctgtgaattgtcgagaaggaaaactagtagcaaaaaggagagcctatatgatggatgacttggagttaataggattagattacctttggagggtcgtgattcagagtaatgatgatattgccagcagagctatagatctcctcaaagagatatacacgaaccttggtccaagactacaagtcaatcaggtggtgatccatgaagacttcattcagtcttgttttgatcgtctgaaggcttcctatgacacattgtgtgttttggatggtgacaaagacagtgttaattgtgcaagacaggaagctgttcgaatggttcgagtattaactgttttaagggaatatataaatgaatgtgacagtgattatcatgaggaaagaacaattctccctatgtcgagagcattccgcggtaaacacctctcttttgtagttcgatttccaaaccagggcagacaggttgatgacttggaggtatggtctcatacaaatgatacaattggttcagtacgacgatgtattctcaatcgtattaaagccaacgtagcccatacaaaaattgagctctttgtgggcggtgagctgatagatcctgcagatgatagaaagttgattggacaattaaacttaaaagataaatcgcttattacagccaaacttacacagataagttccaatatgccttcaagccctgatagctcttctgattcctccactggatctcctggaaaccatggtaatcattacagtgatggtcccaatccagaagtggaaagctgtttgcctggagtgataatgtcactgcatcccagatacatctcttttctttggcaagttgcagacttaggtagcagcctaaatatgccaccccttagagatggagcaagagtacttatgaaacttatgccgccagatagcacaacgatagaaaaattaagagctatttgtttagaccatgccaaacttggagaaagcagccttagtccatctcttgactcacttttctttggtccttcagcctcacaagtgctatatctaacagaggtagtctatgccttgttaatgcctgctggtgcacctctggctgatgattcctctgattttcagtttcacttcttgaaaagtggtggcctaccccttgtactgagtatgctaaccagaaataacttcctaccgaatgcagatatggaaactcgaaggggtgcctacctcaatgctcttaaaatagccaagcttttgctaactgccattggctatggtcatgttcgagctgtggcagaagcttgtcagccaggtgtagaaggtgtgaatcccatgacacagatcaaccaagttacccatgatcaagcagtggtgctacaaagtgcccttcagagcattcctaatccatcatccgagtgcatgcttagaaatgtgtcagttcgtcttgctcagcagatatctgatgaggcttcaagatatatgcctgatatttgtgtaattagagctatacaaaaaattatctgggcatcaggatgtgggtcgttacagctagtatttagcccaaatgaagaaatcactaaaatttatgagaagaccaatgcaggcaatgagccagacttggaagacgaacaggtttgctgtgaagcattggaagtgatgaccttatgttttgccttgattccaacagccttagatgctcttagtaaagaaaaggcttggcagacattcatcattgacttactattgcactgtcacagcaaaactgttcgtcaggtggcacaggagcagttctttttaatgtgcaccagatgttgcatgggacaccggcctctacttttcttcattactctactctttactgttttggggagcacagcaagagagagagctaaacactcaggcgactactttactcttttaagacacctttttaattacgcttacaatagtaatattaatgtacccaatgctgaagttcttctcaataatgaaattgattggcttaaaagaattagggatgatgttaaaagaacaggagaaacgggtattgaagagacgatcttagagggccaccttggagtgacaaaggagttactggcctttcaaacttctgagaaaaaatttcatattggttgtgaaaaaggaggtgctaatctcattaaagaattaattgatgatttcatatttcctgcatccaatgtttacctacagtatatgagaaatggagagcttccagctgaacaggctattccggtctgtggttcaccacctacaattaatgctggttttgaattacttgtagcattagctgttggctgtgtgaggaatctcaaacaaatagtagattctttgactgaaatgtattacattggcacagcaataactacttgtgaagcacttactgagtgggaatatctgccacctgttggaccccgcccacccaaaggattcgtggggctgaaaaatgccggtgctacttgttacatgaattctgtgattcagcaactctacatgattccttccattaggaacggtattcttgccattgaaggcacaggtagtgatgtagatgatgatatgtctggggatgagaagcaggacaatgagagcaatgttgatcccagggatgatgtatttggatatcctcaacaatttgaagataaaccagcattaagtaaaactgaagatagaaaagagtacaacattggtgtcctaagacaccttcaggtcatctttggtcatttagctgcttctcgactgcaatactatgtgcccagaggattttggaaacagttcaggctttggggtgagcctgttaatctgcgtgaacaacacgatgctttagaattttttaattcattggtggatagtttagatgaagctttaaaagctttaggacatccagctatgctaagtaaagtcttaggaggttcctttgctgatcagaagatctgccaaggctgcccacataggtacgaatgtgaagaatcttttacgaccctaaacgtagacattagaaatcaccaaaatcttcttgattctttggaacagtatgtcaaaggagatttactagaaggtgcaaatgcatatcattgtgaaaaatgcaataaaaaggttgataccgtaaagcgcttgctgattaaaaaattacctcctgttcttgctatacaactaaagcgatttgactatgactgggaaagagaatgtgcaatcaagttcaatgattattttgaatttcctcgagagctggacatggaaccttacacagttgcaggtgtcgcaaagctggaaggggataatgtaaacccagagagtcagttgatacaacagagtgagcagtctgaaagtgagacagcaggaagcacaaaatacagacttgtgggtgtgctcgtacacagtggtcaagcgagtggggggcattattattcttacatcatccaaaggaatggtggagatggtgagagaaatcgctggtataaatttgatgatggtgatgtaacagaatgtaaaatggatgatgacgaagaaatgaaaaaccagtgttttggtggagagtacatgggagaagtgtttgatcacatgatgaagcgtatgtcatacaggcgccagaaaaggtggtggaatgcttatatacttttttatgaacgaatggacacaatagaccaagatgatgagttgataagatatatatcagagcttgctatcaccaccagacctcatcagattattatgccatcagccattgagagaagtgtacggaaacagaacgtacaattcatgcataaccgaatgcagtacagtatggagtattttcagtttatgaaaaaactgcttacatgtaatggcgtttacttaaaccctcctcccgggcaagatcacctgttgcctgaagcagaagaaatcactatgatcagtattcaacttgctgctaggttcctctttactacaggatttcacacaaagaaagtagtccgtggctctgccagtgattggtatgatgcattgtgtattctccttcgtcacagcaagaatgtacgtttttggtttgctcataacgtcctttttaatgtttcaaatcgcttctccgaataccttctggagtgccctagtgcagaagtgaggggtgcgtttgcaaaacttatagtctttattgcacatttttccttgcaagatgggccatgtccttcaccttttgcctctcctggaccttctagtcaggcttatgacaacttaagcttgagtgatcacttactaagagcagtactaaatctcttgagaagggaagtttcagagcatgggcgtcatttacagcagtatttcaacctgtttgtaatgtatgccaatttaggtgtggcagagaagacacagcttctgaaattgagtgtacctgctacttttatgcttgtgtctttagatgaaggtccaggtcctccaatcaaataccagtatgctgaattaggcaaattatactcagtagtgtcacagctgatccgctgttgcaatgtctcttcaagaatgcagtcttcaatcaatggtaatcctcctcttcccaatccttttggtgatcctaatttatcacaacctataatgccaattcagcagaatgtggcagacattttatttgtgagaacaagttatgtgaagaaaatcattgaagactgcagtaattcagaggaaaccgtcaaattgcttcgtttttgctgctgggagaatcctcagttctcatctactgtcctcagtgaacttctctggcaggttgcatattcctatacctatgaactgcggccctatttggatctgcttttgcaaatcttactgattgaggactcctggcaaactcacagaattcataatgcactgaaaggaattccagatgaccgagatgggctgtttgacacaatccagcgctctaagaatcactatcaaaaaagagcataccagtgtataaaatgtatggtagctctatttagtaactgtcctgttgcttaccaaatcctgcagggcaatggagatcttaaaagaaagtggacctgggcagtggaatggcttggagatgaacttgaaagaagaccatatactggcaatcctcagtacacttacaacaattggtctcccccagtgcaaagcaatgaaacgtccaatggttatttcttggagagatcacatagtgctaggatgacacttgcaaaagcttgtgaactctgtccagaggaggagccagatgaccaagatgctccagatgaacatgagtcgcctccacctgaagatgccccattgtacccccattcacctggatctcagtatcaacagaataaccatgtgcatggacagccatatacaggcccagcagcacatcacatgaacaaccctcagagaactggccaacgagcacaagaaaattatgaaggcagtgaagaagtatccccacctcaaaccaaggatcaatgaaatgcacataattaactggttccatcaagactgtgcacccaggccttacagtccaacctttttctgtgtctggctaatatttaaaactagaaaaactattcctaatcaacatggagtggagagtttattcactgtcttatctgcagaaatttgctgtcaatatgtaacccgcctgcagtggaaagtgtatagtgttttgtaataaatggcctgatgctaatgtgtaaatggcaaaggtgtatatagtatattaatgttgactgttaattcttaagcaagaaacttttttcttgatgagactcacagatctacacaaactacaaaagttaattttcttgttacacccactgcactctgcaaccagtgttgcctgcctgcctcatggcagttggatcagctcctttacaaaaaagaaaaaaaaaaaaccaacagcaacaaaacagagcccatccatgtcagccacaccaaaagtttcatgttaattttttgccactggagtcaattttgctatgagcaatgtaaggcgggaaaccttaaaataattgggtggagggggaaaatgggggaggaaacactgtttctagatttttttcattgcctttttattctgatattaggtaaatcactttgaaggctatagttatgctgtaacatttaggcatggcttcacaccaagttagggtaggcccaatgagggaaaaagttacccttaatgacagcagttgtcccgaggaggtgacagctgtttttactccggngccttttactt

SEQ ID NO: 91439 - DNA, 1958 bp, Homo sapiens; identical to SEQ ID NO: 81747

SEQ ID NO: 91440 - DNA, 2737 bp, Homo sapiens; identical to SEQ ID NO: 59227

SEQ ID NO: 91441 - DNA, 6012 bp, Homo sapiens
gagggcggggaagaggcgtgacggagattcctgaggtgtagtagcctgaggttcccttatgtggccctatagctgttactgaaggaagtagcctacgtccacgcctacaactgaagtctcttgacaaacacctcacccctgcctccgggatgaaagggggtaacctagacctgaatgggcttgaccatctcacaactgctcgcgtgacgaccgcattcgtggcaggtaagaagattgctgtatcaactcaagaaagcagtaacttcactgtctttgtattttgaattgcaacaacaactttgatatcaacaatgaagcaatgatatctaagaacaaaagagtatttgccaacagtcatcataatatcaagtgattgtataagcagaaacaagctgtcacagacctgtgcgtcagctaatatatggagaatgctttcttctgatactatttacttagaggcagttttaatataaatcatttcaattatatctacatcaaataaaataaaaatgagtgaagcccccagattcttcgttggaccagaagatacagaaataaatcctggaaattatcgacatttcttccaccatgcagatgaagacgatgaggaggaagatgattctccaccagaaaggcagattgtggttggaatatgttccatggcaaagaaatcccaaatcccaaacccaatgaaggaaattcttgaacggatctccttatttaaatatatcacagtagtagtatttgaagaggaggttattttgaatgaaccagtggaaaactggcctttatgtgattgtcttatttctttccattctaaaggatttccactggacaaagcggttgcctatgcaaaactcaggaatccatttgtaatcaatgacttgaatatgcagtatctcatacaagataggagagaagtatatagtattcttcaagctgaaggtattttacttcctcgttatgctattttgaaccgtgacccaaataatcccaaagaatgtaatctgattgaaggggaagatcatgtagaagtaaatggggaagtttttcaaaagccatttgtagaaaagccagtcagtgcagaagatcacaatgtttacatttattacccaacttctgctggtggtggaagtcaaagactctttagaaagattggcagtagaagtagtgtttattctccagaaagcaatgtacgaaaaacaggctcatatatatatgaagagtttatgcccacagatggtactgatgttaaggtttatacagtgggtccagattatgcccatgctgaagctcgaaaatctccagcacttgatggcaaggtggaacgagacagtgaaggaaaagaagtaagataccctgttattctcaatgcacgagagaaattaattgcttggaaagtctgccttgcttttaagcaaacagtttgtggctttgatttgttacgggccaatggacagtcctatgtctgtgatgtcaatggcttcagttttgtgaaaaattccatgaagtattatgatgactgtgcaaaaatacttggaaatattgtaatgcgagaacttgctccacaatttcatattccatggtcaatacccttagaagctgaagatatcccaattgtaccaactacatctggaactatgatggaacttagatgtgtcatagctgttatacgtcatggggatcgaacaccaaaacaaaaaatgaaaatggaagtgagacatcagaaattttttgatctttttgaaaagtgtgatggatataaatcagggaaattaaaactcaaaaaaccaaaacagttacaggaagtgctagatattgcacgacagcttcttatggagctagggcaaaataatgattctgaaattgaagaaaacaagccaaaacttgaacaacttaagactgtattagagatgtatggtcatttttctggaataaatcgtaaggttcagttgacctatctccctcatggttgtcctaaaacatctagtgaagaggaggacagccgaagagaagaaccatctttacttttggttctaaaatggggaggtgaattaactcctgcaggcagggtccaggctgaagaacttggaagagccttcaggtgtatgtatcctggaggtcaaggagattatgcaggatttcctggttgtggtttacttagattacatagcacctacagacatgacctcaaaatatatgcctctgatgaaggacgagtccagatgactgcagctgcttttgcaaaggggcttttagctttggaaggagagcttacacccattcttgttcaaatggtgaaaagtgcaaatatgaacggtcttttggatagtgatagtgactctctgagcagttgtcagcaacgtgtgaaggcaaggcttcatgaaatacttcagaaagacagagattttactgctgaagattatgaaaagcttactccatctggaagcatttctcttatcaaatcaatgcatttaattaaaaaccctgtgaagacctgtgataaagtttattccttaattcagagtttgacttctcaaatcagacatcgaatggaagatcctaaatcatcagatattcagctttaccatagtgaaacattggagcttatgctacgtagatggtccaagttagagaaagactttaaaacaaagaatggaagatatgatattagtaaaatccctgacatatatgactgtataaaatatgatgtccagcataatgggttccttgaaattaggaaaacacaatgggaattatataggctttcgaaggcattagcagatattgttatccctcaggaatatggtataactaaagctgaaaaactggagattgccaaaggctactgtactcctctggttagaaaaattcgctcagaccttcagaggacacaagatgatgacactgtaaataaacttcatcctgtgtattctagaggtgttctgtctcctgaacgtcatgttcgtactagattatattttaccagtgaaagtcatgtacattctttgctgtctattcttcgctatggtgccttatgcaatgaatcaaaggatgaacagtggaaacgagctatggattatttaaacgttgtcaatgagctcaactacatgactcagattgttatcatgctttatgaggatcctaataaggatctttcctcagaagaacgctttcatgttgaattacactttagtccgggagccaaaggttgtgaagaagacaaaaatttgccatctggctatggatatagaccagcttccagagagaatgaaggcaggagaccttttaaaattgataatgatgatgaaccacatacttctaaaagagatgaagttgatcgagctgtgatattgtttaaaccaatggtatcagagccaattcatatacacaggaagtctccacttccaagatctaggaagacggctacaaatgatgaagagagccccctgagtgtgtctagcccagagggtactggtacctggctgcattataccagtggtgtgggtactgggcgtcgaagacgcagatcaggggaacaaatcacttcttcccctgtctcccccaaatcattggctttcacatccagtatttttggctcatggcaacaggttgtatctgaaaatgctaattacctgagaacaccaagaactcttgtggaacagaagcagaatcctactgtagggtctcactgtgcgggcctgtttagcacctcggtgctcgggggttcttcaagcgcacctaacctacaggattatgctcgtactcatcgtaaaaagctgacctcttctggctgcatagatgacgccacacgcggttctgctgttaaaaggttttatatctcatttgctcgacacccaaccaatggctttgaattgtattccatggtgccatctatttgtcctctagaaactcttcataatgccctatctttaaagcaagtggatgaatttcttgcttccattgcttctccatcatctgacgttccacggaagaccgctgaaatttcctctacagctttacgttccagtccaataatgagaaaaaaagtatctttaaatacgtatacacctgcaaagatcctcccaacaccaccagctaccttaaagagcactaaagcaagcagcaaaccagctacaagtggaccttctagtgcagttgttcctaatacctcatctcggaaaaagaatataactagcaaaacagaaacgcatgaacacaaaaaaaacactgggaaaaagaaatgaaatcttagcagaagctggaactttttatacttataaaaatagtatgttcttatgtttctccttatgcatttatgtgttcacttaaaaatgtttttaaatctaaggttttctttgtttatgttcaggtaaggaactgttgtcatgatctggaaatgtttaaaacaatgtttgttagcattctgtgagcagcaaaacttatagtgataaaaatcgattgttgttaatatgatgtttaccatgtgcacatagtaatgaaaaggaacataaaagcccagcaggctcgtaccaaagtcacagcagtaatgctatgtactgcagagtctgatgagctggcctttgtgcacacttttattttcatgggattgcatcttagctgttaaaacttctagattgaaatttgacagccagggttacatattggggacttttaaagtgtctttccaaagagatttcattaaccgtttagattagaatatctttcccaattgttacagtgacatatatgctgcaatatttaacaactggagtattagccacatgggttattttttcaatctgtgttttgaatttttttattgtgtgttatttaaaatattacatatgcagctgggagaactacacctttgtgcacatagatttatatattaatttgtagaaaatattttctttatatatttccttaccatacaaggtgccttgttcatcaggaaaacttttgttttgtattttgacaagaaaggcaccttcagagtttctttttaagtatagttgacaagtgtataaatgttacacttactttcagagttctttttagatctaaagaagtcagttcaaaaatggaaatcaacaatgttaggagaaatctgaattctgttaagttagtaagtattatgtatagcatctgtttttaaccatttccattcttatccctagtgtatcagttgatcacactaagaaagcttaaagattgagcatttgaaataaatgctctttataaatgattagatttttgaagggatattgaaatcattgcgctgtgatttcatctgtgatgtgaaaaatcaatttattatccttggtgctttcccccccaccaatgcacaaataattgtgaacagcttgaaatgacttaaactgtaatccaaatgggacaatctgataagaatttcatgcattggtagttaaataacttaaattgctaaagctttagcttgaaatttatgtttagaaaaactattgatttcccatggtatgaatataactattgtaattcttcaaatgagactcttctcaccttaaatagtcatatattaattaacttataggaaataagcatactatatgttagctgttttaaaaggtaccagatgtaagagtcataaatatatgcaattaaagaagttcatagatttcacatgaatgtaaatgtgttatatggagacatgtcttgtaaacagttgaatgtatgtaagttttctgtttgtgaaaatgtagttaatgtactcactgtggaggtcataaggaagctactttttttttaaagtggaacctaattaaaatatttccagaatcaaaaaaaaaaaaaggggggggccgtttaaaagaacccttggggggcccaagtttaacgggggatggaaaggtaaaattttttcccttatggggggccaaataaaacccaacttggaaattttggaaaagaaccttactttggggggggaaacatatgggcccaccctccttacaaaatttaaaggttttaggg

SEQ ID NO: 91442 - DNA, 1247 bp, Homo sapiens; identical to SEQ ID NO: 59460

SEQ ID NO: 91443 - DNA, 965 bp, Homo sapiens
cggcggttgagagcatggcctctccaggggcaggtagggcgcctccggagttaccggagcggaactgcgggtaccgcgaagtcgagtactgggatcagcgctaccaaggcgcagccgattctgccccctacgattggttcggggacttctcctccttccgtgccctcctagagccggagctgcggcccgaggaccgtatccttgtgctaggttgcgggaacagtgccctgagctacgagctgttcctcggaggcttccctaatgtgaccagtgtggactactcatcagtcgtggtggctgccatgcaggctcgctatgcccatgtgccgcagctgcgctgggagaccatggatgtgcggaagctggacttccccagtgcttcttttgatgtggtgctcgagaagggcacgctggatgccctgctggctggggaacgagatccctggaccgtgtcctctgaaggtgtccacactgtggaccaggtgttgagtgaggtgagccgcgtgcttgtccctggaggccggtttatctcaatgacttctgctgccccccactttcggaccagacactatgcccaagcctattatggctggtccctgaggcatgctacctatggcagcggtttccacttccatctctacctcatgcacaagggcgggaagctcagtgtggcccagctggctctgggggcccaaatcctctcaccccccagacctcccacctcaccttgcttccttcaggactcagatcatgaggacttccttagtgccattcagctctgaggccagagcatggtcctccacccttcctgccattctgccctgggctcctcaggtagttggaattcctgacttaggacttggggttgggtccaaggtgcttacatcccaggggcctcatgcctaagatagagggtgggagcgaacccacatgaaccaatacagcccagctccaactagatccag

SEQ ID NO: 91444 - DNA, 576 bp, Homo sapiens
caggtagttcttaaacctttaattatgaaacctttctttacttcattcctttttagcatccggagaaatagcgttctgattctgcggcttgagaattttttgaccgtatatttcaagtgccttaaatgtgcttgaacatacttgcaggtatttgaaatgatggctttatacttggcactctgccctttgcagagatgactaaaataagagagttgccttcaagaaactgctgcctgatcagaggaaagaaaatgaatgctcatgccccagcttcaggtgaaaatacacagtccttggtcattgccatgtcatagaccacaagtagaatgagtacaaatttacagactggagagctctggggtttgggtatctgcgttacgttcacgaatgttctgggtgatggggcatgacttttactcagcttgtatagtattactttactgcgagaggtattcattagtggcatatgttgaccgactgtgaatggtatgcggaaatagtttgacaactactaccagatgacggacgaaataccaagtgccctgaaaacgaaccaaggaccagagggtcctcgcg

SEQ ID NO: 91445 - DNA, 882 bp, Homo sapiens
atctgtaggtggattagaggaagatggggttgaagtcagggagatccactaggaagaagttagataatcaatgcattatgtgatgatgctaaaattaggatggtagggtgagagagacactgaaaaacaagattgatggaacatagtgatttaatggtggttgaatatatatcaaaagatttatggcttctgtcctggattaatactagaggaatgctgttactaatacaaataggtgggtaggcatatgaaggtggcttgggtgcagagatgaagtttttgattatgttatatttgaagagagatgtagcataaccaagctttgtgtttaaaatctagactaaaattcatctgaagtcagtgtagacatagcttaagccatgagattgcatcagagggcagatactgtgttttgggttgaaggttaattattatcttgggaccccacttccctttttcacagggtacagaacttccgaatagagcctcatgcaagcacccaaaccagatgggaacgggggcggcgcctttttgggacacaactttttcctcccggagcttctcagtgtaatctttttttttaggcgcaccaaaatgtgattggctggccctttttttccaacccgggatggggggggaaacccgggccccccgaagcagccagctgaccctgccggccacaccgggcgctaacccggcaagtccgtggactggccccgtgaggcacttacgccaatttcccacccccgggtggggcacttgggtccactgcatttcggtcaacgtgcgcggtaccgcgtcttcccttaaattccacctaccccgattgccttgggggcgggactctccaatttgtctctggcgcggccgggcgcgtgatcg

SEQ ID NO: 91446 - DNA, 519 bp, Homo sapiens
ccggaataacatgaaatatgcatatgtcatccatgaggctgaggttcgtggcagccttagcctcagagccaaattcccaaaccagaaatagagaaaacttaagcaaacaagtcaaatatgtcacaacacccctagcgatggccccactccctaacagagcaccttacatgtactcaaagcctactgattctttcctaacacagtttaaagtaatttttggttggttggttccaaaccttataggagattaataacagctaaagttaagactggtgagaagcaaaatcactgacatgggagagaagtgacagatggcagtcccaggtcagaggaggagacaggaacatggctgtgctgtgtgtcacagcgcaggacaacaccagatgtttctgttgggttgaatttctattgggttaaatggaattaaattaattgagtcaaactgtgctttgtgcctctgtagaaaaatttaaagagttagaaaatataggaaaatttccatggacaaatgctagaaga

SEQ ID NO: 91447 - DNA, 3313 bp, Homo sapiens
atacgcgaagcctggacggagtgggtgggagaacgacacgaatggatagataatcatgtacctacaagcactctagtccaaaactcatgctgctcgtatgtagttaatggagacaacacaccttcatctccgtctcaggttgctgccagacccaaaaatacaccagctccaaaaccactcgcatctgagcctgccgatgacactgttaatggagaatcatcctcatttgcaccaactgataatgcgtctgtcacgggtactccagtagtgtctgaagaaaatgccttgtctccaaattgcactagtactactgttgaagatcctccagttcaagaaatactgacttcctcagaaaacaatgaatgtattccttctaccagtgcagaattggaatctgaagctagaagtatattagagcctgacacctctaattctagaagtagttctgcttttgaagcagccaaatcaagacagccagatgggtgtatggatcctgtacggcagcagtctgggaatgccaacacagaaaccttgccatcagggtgggaacaaagaaaagatcctcatggtagaacctattatgtggatcataatactcgaactaccacatgggagagaccacaacctttacctccaggttgggaaagaagagttgatgatcgtagaagagtttattatgtggatcataacaccagaacaacaacgtggcagcggcctaccatggaatctgtccgaaattttgaacagtggcaatctcagcggaaccaattgcagggagctatgcaacagtttaaccaacgatacctctattcggcttcaatgttagctgcagaaaatgacccttatggacctttgccaccaggctgggaaaaaagagtggattcaacagacagggtttactttgtgaatcataacacaaaaacaacccagtgggaagatccaagaactcaaggcttacagaatgaagaacccctgccagaaggctgggaaattagatatactcgtgaaggtgtaaggtactttgttgatcataacacaagaacaacaacattcaaagatcctcgcaatgggaagtcatctgtaactaaaggtggtccacaaattgcttatgaacgcggctttaggtggaagcttgctcacttccgttatttgtgccagtctaatgcactacctagtcatgtaaagatcaatgtgtcccggcagacattgtttgaagattccttccaacagattatggcattaaaaccctatgacttgaggaggcgcttatatgtaatatttagaggagaagaaggacttgattatggtggcctagcgagagaatggtttttcttgctttcacatgaagttttgaacccaatgtattgcttatttgagtatgcgggcaagaacaactattgtctgcagataaatccagcatcaaccattaatccagaccatctttcatacttctgtttcattggtcgttttattgccatggcactatttcatggaaagtttatcgatactggtttctctttaccattctacaagcgtatgttaagtaaaaaacttactattaaggatttggaatctattgatactgaattttataactcccttatctggataagagataacaacattgaagaatgtggcttagaaatgtacttttctgttgacatggagattttgggaaaagttacttcacatgacctgaagttgggaggttccaatattctggtgactgaggagaacaaagatgaatatattggtttaatgacagaatggcgtttttctcgaggagtacaagaacagaccaaagctttccttgatggttttaatgaagttgttcctcttcagtggctacagtacttcgatgaaaaagaattagaggttatgttgtgtggcatgcaggaggttgacttggcagattggcagagaaatactgtttatcgacattatacaagaaacagcaagcaaatcatttggttttggcagtttgtgaaagagacagacaatgaagtaagaatgcgactattgcagttcgtcactggaacctgccgtttacctctaggaggatttgctgagctcatgggaagtaatgggcctcaaaagttttgcattgaaaaagttggcaaagacacttggttaccaagaagccatacatgttttaatcgcttggatctaccaccatataagagttatgaacaactaaaggaaaaacttctttttgcaatagaagagacagagggatttggacaagaatgaatgtggcttcttattttggaggagctcttgcatttaaataccccagccaagaaaaattgcacagatagtgtatataagctgttcattctgtacagtgaattttccgaacctctcaaagtatgttttccgttcttccacagaaatatgcaaaacagttcatccttttctactttatttattgttcccttgaaatgactgaccaggaaaaagatcatccttaaattttgaagcaagtgagagactttattaaaaatacatatatatctatataaacatatatgatagtggctctagttttatagagctccaagtgtattaaacatgacagccattcattcataaagatctggatttgctttaccttgttaatattatctaggggaaaaagtgcaaattgctccatgttcttctctcccttatgtaacatctcctgagggtgtttagttgcatggctgttcagaaaggtattaagggcttaggccaaatcttactttgagtatgttaaaaaaaaaaaaaatgctgctggcttttctgaagacaggtgcttgaacttgtcagtttgttttaaataaatacaatagttgaaaatttttctctgttacatcagtaatattgttaaagtaatggatagaaccataacttacacatgaaagtcatatactagatccaatactatttagtttattatcgaaattggaaggattcattgagcagcatagaagtttgtttacatgttactttgagatgctaggtatttgtggaattaaaaagaatcaggctcttttgtactttgtttttaaatctgtgatgcttttcaaatttaattcataataaattgatgcaatttcatacttaggaacatacaaaaggtaatgtaaactctgccacttttttgtgttcaaaattttggtttttatgaagccagatggattgaagagttacataagcatttgaatgctctaatataaggctaatgattttctgttagtgtttgaatatcttcattcctctcaaattcataacagttctatttaactgaattaaataaccatatgaaaaatcg

SEQ ID NO: 91448 - DNA, 1919 bp, Homo sapiens
tttcgtggagggagcggagatctcggggctcggagccggccgccgctccgctccgatcgctgtggggcttggttttttgggggtgggggggcggtggggctcacatatggaggcaaatgggagccaaggcacctcgggcagcgccaacgactcccagcacgaccccggtaaaatgtttatcggtggactgagctggcagacctcaccagatagccttagagactattttagcaaatttggagaaattagagaatgtatggtcatgagagatcccactacgaaacgctccagaggcttcggtttcgtcacgttcgcagacccagcaagtgtagataaagtattaggtcagccccaccatgagttagattccaagacgattgaccccaaagttgcatttcctcgtcgagcgcaacccaagatggtcacaagaacaaagaaaatatttgtaggcgggttatctgcgaacacagtagtggaagatgtaaagcaatatttcgagcagtttggcaaggtggaagatgcaatgctgatgtttgataaaactaccaacaggcacagagggtttggctttgtcacttttgagaatgaagatgttgtggagaaagtctgtgagattcatttccatgaaatcaataataaaatggtagaatgtaagaaagctcagccgaaagaagtcatgttcccacctgggacaagaggccgggcccggggactgccttacaccatggacgcgttcatgcttggcatggggatgctgggatatcccaacttcgtggcgacctatggccgtggctaccccggatttgctccaagctatggctatcagttcccaggcttcccagcagcggcttatggaccagtggcagcagcggcggtggcggcagcaagaggatcatgctccaacccggcgcggcccggaggcttcccgggggccaacagcccaggacctgtcgccgatctctacggccctgccagccaggactccggagtggggaattacataagtgcggccagcccacagccgggctcgggcttcggccacggcatagctggacctttgattgcaacggcctttacaaatggataccattgagcaggtgctttcgttgccatctcactctgagagcatacctggatgtccaggcaagactgggcgaagtttctgagtggccctttgtttaggtgatgtcctcagacctggacccccaccagcctcactccccatcccaaccagagatggctcacttcggatcgagggttgactacatctcatcatctcacgaatctgcatgtaatataagacaacagcttttaaatgtatatataacccatgatttcggttttgttttgttttgtttttcttgatggtttccctctccctccctctcttcccattctccttttaaatctctttgaatcacatttggtagtgattttgacttagtccagtagtcacatagctttaatatctagttcaaagctaaccatagtataattgttatattaaggagttattttttcttaaaacattttttttttgcttgttttggttctgttctcaacttttaaaggatgctgagatggtaatatgactctccctattttggtaccaattctgagactgtatgaattttcaggtggaactttagcacacacctggaagcaaagttgtgaagtgcagggccgggagggtgggcgtgacgtttctattttgcggttgtagaaagaagtgagatgtagtaagctaattaacagactttctagcagttttttttgtgatgtctctttgttaatctgagtctatctattttcggcaataaggtaaggacgacagtgttttgagtgtcctccttttctataagtgctttttttctgttgaaagaggtgatattataaggttttttgaaattgtgaattct

SEQ ID NO: 91449 - DNA, 1211 bp, Homo sapiens
gacccacgcgtccggccaaacaccttctccttttcattgaagctttaataggaaaataatttgaaatacttttaaggcatcttaaaaacatgactttttcatcttatggaaaagcagaccaattttgcttttttttcccaacttgttctccagactgtgccaataaaatgtgttcatagcaggaaaatttggaaaatacagaaaagcactatgaagaaaacaaaatgtacccaaaatcccatcactcagataacatcactgttaatgttttgatatgtatttccagtcttttctattgagttaatttttcattttgtttttgaataaataactttcaggaaagaaattgagccttttctgccacctctgaagcctgattactgtgtgaagcaggccatgaaggccatcctcactgaccagcccatgatctgcactccccgcctcatgtacatcgtgaccttcatgaagagcatcctaccatttgaagcagttgtgtgcatgtatcggttcctaggagcggacaagtgtatgtacccctttattgctcaaagaaagcaagccacaaacaataatgaagcaaaaaatggaatctaagaatctttttgtatggaatattacttctatcagaagatgatcaagatgtttcagtccagtgcacatcagcattgctgacattttatggattctaaacttgtgttgtttcttttttaaatcaactttttaaaaaaataaagtgtaaattaaccgactagagtacttggaaaatgtgatcagtacaagtgaacttaggttgttgccaacagggtccttttaggcagaacccagaaaccagtcaaatctgtagagaagcagtgtgacatcttcaggttaccattattttttaatgagcaggaagtctagaaatgataactagactgtatgtttcatgtgtgtgatttttcagaattcccagagtttactcattcttgttattaaactctagccagttgacatcttcgcaatttcaaggactgatagtgctgtattttctcacgttttctaagtttccgttttgcaaggcctaggtgactttttcatggtgtttgtatgtttagctcttttgaaaaggaattttgaaatctccatcaactgaagtaaatgatgtctgagtgttacagtaaaggtgaccaagtctctttcttaaagtcacaatgactaaagtattagttgaa

SEQ ID NO: 91450 - DNA, 1284 bp, Homo sapiens
cggacgcgtgggctctgtgcctgctgtttcctgctgggaagaaggaaagccagtgatgctggcttgaggctgtagtgggaggcccagcggattgtgagaagccagcccgggcagtgagtgtggatggcttggcaggtgagcctgctggagctggaggaccggcttcagtgtcccatctgcctggaggtcttcaaggagtccctaatgctacagtgcggccactcctactgcaagggctgcctggtttccctgtcctaccacctggacaccaaggtgcgctgccccatgtgctggcaggtggtggacggcagcagctccttgcccaacgtctccctggcctgggtgatcgaagccctgaggctccctggggacccggagcccaaggtctgcgtgcaccaccggaacccgctcagccttttctgcgagaaggaccaggagctcatctgtggcctctgcggtctgctgggctcccaccaacaccacccggtcacgcccgtctccaccgtctgcagccgcatgaaggaggagctcgcagccctcttctctgagctgaagcaggagcagaagaaggtggatgagctcatcgccaaactggtgaaaaaccggacccgaatcgtcaatgagtcggatgtcttcagctgggtgatccgccgcgagttccaggagctgcgccacccggtggacgaggagaaggcccgctgcctggaggggatagggggtcacacccgtggcctggtggcctccctggacatgcagctggagcaggcccagggaacccgggagcggctggcccaagccgagtgtgtgctggaacagttcggcaatgaggaccaccatgagttcatctggaagttccactccatggcctccaggtaataaccttggagagagctcagccagggtctggtggctgcgggcacgggcatctcagctccactggttcctccattcagcttaaccagcgcctcccaagcagctgcctatagctggctctataactgagcctggggaagatagaggaaagtcacgtccctgccttcaagggtctcgcagacaggtggggaggcagatggtgaactgtgggtacctagaacagcagaagttcactcaagctacagaaatactagaggagggtagctcatgcctgcaatcccagtactttgggaggccaaggcaggagtattgctggaggccgggagttcgagaccagcctggccaatgtagtaacacccccgtctctacaaaaaatacaaaaataaaaaaattagttgggcaaaaaaaaaa

SEQ ID NO: 91451 - DNA, 2216 bp, Homo sapiens
cgacccacgcgtccggccgccgctgctacagccgccgccgccgctgttgccgcggcttgttattcttaaaatggcgccgctagacctggacaagtatgtggaaatagcgcggctgtgcaagtacctgccagagaacgacctgaagcggctatgtgactacgtttgtgacctcctcttagaagagtcaaatgttcagccagtatcaacaccagtaacagtgtgtggagatatccatggacagttttatgacctttgtgaactgttcagaactggaggtcaggttcctgacacaaactacatatttatgggtgattttgtagacagaggttactatagtttggagaccttcacttaccttcttgcattaaaggctaaatggcctgatcgtattacacttttgcgaggaaatcatgagagtagacagataacacaggtctatggattttatgatgagtgccaaaccaaatatggaaatgctaatgcctggagatactgtaccaaagtttttgacatgctcacagtagcagctttaatagatgagcagattttgtgtgtccatggtggtttatctcctgatatcaaaacactggatcaaattcgaaccatcgaacggaatcaggaaattcctcataaaggagcattttgtgatctggtttggtcagatcctgaagatgtggatacctgggctatcagtccccgaggagcaggttggctttttggagcaaaggtcacaaatgagtttgttcatatcaacaacttaaaactcatctgcagagcacatcaactagtgcacgaaggctataaatttatgtttgatgagaagctggtgacagtatggtctgctcctaattactgctatcgttgtggaaatattgcttcgatcatggtcttcaaagatgtaaatacaagagaaccaaagttattccgggcagttccagattcagaacgtgttattcctcccagaacgacaacgccatatttcctttgaggccttcgcccatcctgctgacccatttttctgccctcttcttaccccaattttcttgtattaccctctacaatatactttttattgagcactttgctgctgaaatgctgcctcttgccttttttttttttaaattttaaattatctaaatttattgttggtggggggtgtctatagcaaagtttttctatcaattttcccccatcccatccccaccctggactcatttgagaagacttgagaaatgtcttaatactcacactgctgcatgtagctcttgcttatttactggtctgggaaacaggatgtgtttcctttttttaaaagccaattgacagattacacctaaatactcctccttttgtatcattcagccttttgttttagtttggtaagttttaagaaatttcagcagcaaagttgttattcagtgggcacgatggactccaaatgcctcaagttatgtatacctgtcccagatgtaaacttcattgtcctttgttggatgatattttaaatggatataaaataaattggtctaaagggctgccctccttgttgtgtttttaaattttagttaaaaactgctacagcttatgactttgtactttaagataattgtattgatcttttttcagattccttgtattttttaataaagtaatcttaaataaaactcagataggttaagtgttagaaattttaaacagcttacattgttagcgtaaagttatcttttcttttttcctaatcagagttcttgaccctttggttattgagtttaaaacttcaattgaaattcaatagtatttatttttgaaaaaaatcactaaactgtgcctaaagaacataactgccatattaatgttttggtttatatcctctatagtaatagaaaaacatttaatacttgtaatgctgatgtgttaatttgataccagttgagtagaatgtgatcaatccagtttacaatctatcatgagtattattaactaaaatctatgtgcttttcaataggaatcattcttctcttgctgtaacacttgaccttaacttttagaaagtgttcatttttaaactgcaactggaaaggttgaaaagttaggactcttgtatttgtgaactgtaatctgaagcagattatttaaagtgtagaaaaagaaacaagttcttttttgcaaaggtctgtgataccatatttcagctttgtgtaagtaatttgaatatc

SEQ ID NO: 91452 - DNA, 1631 bp, Homo sapiens; identical to SEQ ID NO: 59167
  misc_feature (1)...(1631): n = a,t,c or g

SEQ ID NO: 91453 - DNA, 634 bp, Homo sapiens
cctttgttcatactaaatcctgccagatgctgagcctcaaaatgggtctcactgcctccctggggaccttaaactcaagaaatggaaacagtatttttaacatgatgctgttacctaatctccaacagcatccattgacccctctctttggttttgacaatcctgcttggagacagggatggagcctaatggagaccatgggtttggttctaggggatggagttgaggtattggccacagtccatcctgttaattttgccacagggctggagcctaccgtagatcatgagcatatttgagagtactgttgagcccagagggaaagatctggtccccttggaggaaaagctgcagggatccagggaggagggaaagcagaaaagggagacagccggtggctgatgtgaaggtgtaacctgctctccattcccacagatgggtgccattcccatattgtcagaatggagaaatgcatggagaacagtcatttctcattaagtcagaatgcaaaaatgcgtggagaacagcattgccttatgggctcccacccgacggagctatgtgcccaccctctccctcggaattcccattgtgggcacctgacggccgccaaaggcttttaacatcacaacat

SEQ ID NO: 91454 - DNA, 634 bp, Homo sapiens
tgaatatttaaacggcagtaaacaaatgagattctgcagggtccaaagcatttgggttttaatggccgggaagggatagaagataaagccttgggtcaacaggaagaagcaagttagaattcagaattcttcatgaagccagaattttcagtgaaagatagattaggaaaatgtcactctctggcatagggaaattaatgggaaatttgtctgtgttcgctggggctctagacgttaggtgggagaatgggtgttgtggaattgtcttctctaccctcttgcattttggacatttgatatgttagtgaatacccattaatagccaggctaagtcattaacattaggtaggtctagactggtgataactgtggacactgggaaggggcgtatctttgccatcctggctttaggttacttttacctaatatttacttgacttaaggaccttatattcggaattaacacgatccaggattaggatgcctccctataaaggtgtacgtactacgagtggccgagcattaacccttttgagaatcctatgcgaccacccccctgccccccctcgggtgagatttgggcacagaacttacctaccttagcagcctcaaggtggaagactattcaccacgc

SEQ ID NO: 91455 - DNA, 3782 bp, Homo sapiens
gtgaattccgcaccatctctctcctgcctgtggggtttctgtcaactagtcgtggagggaaggagactctttaaagaataacatcttattgtggccatgccagaacccactaagaaagaggaaaatgaagtgccagccccagccccacccccggaagaaccaagtaaagagaaggaggccggaactacaccagcaaaagactggacccttgtcgaaactcctcctggggaggaacaagccaagcagaatgccaactcccagctgtccatcttgttcattgaaaaacctcaaggaggaacagtgaaagttggtgaagatatcaccttcatagccaaagtcaaggctgaagatctttctgagaaacccactatcaatggttcaaggaaatggatggacctggccagcaaagccgggaagcaccttcagctgaaggaaacctttgagaggcacagtcgggtgtacacatttgagatgcagatcatcaaggccaaagataactttgcaggaaattacagatgcgaggtcacctataaggataagtttgacagctgttcatttgatcttgaagtgcacgaatctactgggactactccaaacattgacatcagatctgctttcaagagaagtggagaaggtcaagaggatgcaggagaacttgactttagtggtctcctgaaacgtagggaggtgaagcagcaggaggaagaaccccaggtggacgtatgggagttgctgaagaacaccaaacccagtgagtacgagaagatcgccttccagtatgaatcaccgacctgcagcggcatgctgaagcgactcaagcgcagcatcagagaggagaagaagagcgccgcttttgcaaaaattcttgatcctgtatatcaggttgacaaaggaggcagagtgaggtttgttgtggagctggcagatccaaagttggaggtgaaatggaataaaaatggtcaagaacttcgacccagtaccaaatacatctttgaagacacaagatgccagagcatcctgaatatcgataactgtcagatgacagatgattcagagtattatgtgacagccggtgatgagaaatgttctactgagctcttagtaagagagcctccaattatggtgaccaaacagctggaagatacaactgattattgtggggagagagtggaattagaatgtgaggtgtctgaagatgatgcccaagtaaaatggtttaagaatggtgaagagattatcctggtccaaacaagataccgaattagagttgagggtaaaaaacacatcttgatcatagagggagcaacaaaggctgatgctgcagattattcagtaatgacaacaggaggacaatcatctgctaaacttagtgttgacttgaaacctctgaagattttgacacctctgactgatcagactgtaaatcttggaaaagaaatctgcctgaagtgtgaaatctctgaaaacataccaggaaaatggactaaaaatggcctacctgttcaggagagtgaccgtctaaaggtggttcacaagggaaggatccacaagttagtgatagccaatgccctcactgaagatgaaggtgattatgtatttgcacctgatgcctacaatgttactctgcctgccaaagttcatgttattgatcctcctaagatcatcctggatggtcttgatgctgacaacacagtgacagtgattgcaggaaacaagcttcgtcttgagatccccatcagcggagaaccacctcctaaagccatgtggagccggggagataaggctattatggaaggcagtggccggataagaacagaatcttaccctgatagcagcactctggtcattgatatagctgaaagagatgactctggtgtttaccacatcaatctgaaaaacgaagctggagaggcacatgcaagcatcaaggataaagttgtggacttccctgatcctccagtggcaccgactgtgacagaggtgggagatgactggtgtatcatgaactgggagcctcctgcctacgacggaggctctccaatcctaggatattttattgagaggaagaagaaacaaagctccaggtggatgaggctgaattttgatctctgcaaagaaacaacttttgagcccaagaagatgattgaaggtgtggcctatgaggtccgcatctttgcagtcaatgccattggcatctccaagcccagtatgccctccaggccttttgttcctttggctgtaacaagccctcctactcttctgactgtggactctgtcactgacacgactgtcacgatgaggtggcgccccccagaccacattggtgcagcaggtttagatggctatgtgctagagtattgctttgaaggaagtacatcagcaaaacagtctgatgaaaatggggaggctgcctatgatctgccagctgaggactggatagttgcaaacaaagatctgattgacaagacgaagttcaccatcacaggtctgccaacagatgcaaagatctttgtgcgtgtgaaggctgttaatgcagctggtgccagcgagcccaagtactattctcagcccattctcgtgaaggaaatcatagaacctccaaagatacacagtcccaagcacctgaagcaaacatatatccgccgagtaggagaccgtgtcattcttgttatccctttccagggaaaaccaagaccagaattaacttggaagaaggatggtgcagaaattgataagaatcaaataaacattcgcaactctgagactgatacaatcatatttattagaaaagcagagaggagccactctgggaaatatgatctgcaagtcaaagtggacaaattcgtggagaccgcatcaattgacatcagaatcattgaccgtccaggtccaccccaaattgtgaagattgaggatgtctgggggagaaatgtcgctctcacatggactccaccaaaggatgatggaaatgctgctatcacaggctataccattcagaaggctgacaagaagagcatggaatggttacgtgtcattgagcatatcatcgaaccagtgccacatactgaattggtcatagggaatgaatattacttccgggtcttttctgaaaacatgtgtggcctcagtgaggatgccaccatgactaaagagagtgcagtgatcgccagggatggtaaaatctacaaaaatccagtgtatgaagactttgatttctcagaggcacccatgtttactcagcctttggttaaccgcctatgccatagcggttacatggccaccctaaactgcagtgtgagaggaaatcctaagcctaaaataacctggatgaaaaacaaagttgctattgtggatgatccaagatacaggatgttcagcaaccagggagtctgtaccctggaaattcgcaagcccagcccctatgatggaggcacttactgctgcaaagcagtcaatgaccttgggacagtggagattgaatgcaaactggaggtgaaagtcattgcacaataaggatttttgaatgtataatatcatctaaggtgggctctccttctgcagactcctcttgcaaggcgtacctccaaacataattgattcatatctgcgagacttacactcaagcaatcctgaggaatactgagggagggcctggctactgtctctctgcactctgctgctttgaaatctggttgaaatgagaaaaagcattttctgttttcccaccaggcccccaagtgtggtctttttctttcctcctaatgttgaagagaaaaaaaaaa

SEQ ID NO: 91456 - DNA, 1908 bp, Homo sapiens
tccgaattgccgcgtcgacccacgcgtgcgcccgtcatccccagccagatttagctgctgacagctgcttgggactctgccgccagggcctggcccagacctgcctgcctctctcctctccctcagtgactcctgagccacagcccctccatggcccagaaggaagaggctgctgtggccactgaggctgcctcccagaatggggaggatctggagaacctggacgaccctgagaagctgaaagagctgattgagctgccgccctttgagattgtcacaggagaacggctgcctgccaacttctttaaattccagttccggaatgtggagtacagttccgggaggaacaagaccttcctctgctatgtggttgaagcacagggcaaggggggccaagtgcaggcatctcggggatacctagaggatgagcatgcggctgcccatgcagaggaagctttcttcaacaccatcctgccagccttcgacccagccctgcggtacaatgtcacctggtatgtgtcctccagcccctgtgcagcgtgtgctgaccgcattatcaaaacccttagcaagaccaagaacctgcgtctgctcattctggtgggtcgactcttcatgtgggaggagccggagatccaggctgctctgaagaagctgaaggaggctggctgtaaactgcgcatcatgaagccccaggacttcgaatatgtctggcagaattttgtggagcaagaagagggtgaatccaaggcctttcagccctgggaggacattcaggagaacttcctatactacgaggagaagttggcagacatcctgaagtagggcaactgggctttgcctcacgtattcctgctgccaccaagagacagcaatgacatgtacagccatctgggacatgcctgtcttcctaataccatttggagctggacaacatttgacaccaaccaatcatactggacaaggcccttagaggacttgaaatatacttctcatgctgtagtttatttaggctgtgactctctctctaatgctgctctcgggaaggacgaaagtgacctgcaaggagagaaatgcaaccatacatgggctccagtcaactatgggactgaaggtcctaattgctcacccaagggggctgcttaacacaaacagcctcagacccgaggtttagatttctgaaatatgcattttatgttaagttgggtatttttttaaaaaaagaaaaacagcaacattaataaaagaagtggtgtgtttttcccgtggccagatttttaagaaacttgaacatctggaagttgccacagacaagcgagctagtccagacacagggacactccaggctatgaaccaagccatggttaaaccaagacttgcctagacaatgcagaataactctcccatacagacttcttacgacaatcaagtgagggcctttcccttctctgaaggcaagtaatagggcagaaggtggaacaaaaagcatgagaaatctaaggtagccacatcccaaatgccagttaataagcaactagcttttttattagagaggagcgggtgaaaagtagtagtttaatgttcagatatacaatcatttaaaagtattcaatacatggtgtttgatggtaatggcaggatgatgtcaagtctctctttttttttttttaaaggtttgtttgagtcctatgtggaagcaaaaattcacaggtgaatttccgggtgtttgccaaactctaactaggtttccaggaataatgtgttcactctgattaccagggcatgcctcctttcctcaggcttcaagtgtgataagtcgtcggaatttgacccaagactactatcggcaaatgacaaagtgctttatcacattcctgctaagtcccagaattccacttacagccaatc

SEQ ID NO: 91457 - DNA, 2435 bp, Homo sapiens; identical to SEQ ID NO: 58924

SEQ ID NO: 91458 - DNA, 2572 bp, Homo sapiens
tttttttttttcatgcctctaggcaagcctttattctggggctccttcatccaggaaggggctgttagttgcatctcacccaaatggaatgcgatgggaattgggggcttgagttgtttggagaaggagctgttgatcttggcaaatgaatatagctggtcgtgtggtgtcccatcaaatcccttgagtgctttggcccatggagacttagggaatggtcagaacagacccagaggtccccagatctttacaataccaaggttcaggaggtatagacagtaaggaaaaagtccatttcctattttctgtccattttcagtaaagttttttgttttgactggcttttaaaaaattacctaggaaatgggaaagcttataaacattccgtaagtgaattgttgaactgctaccccaagtggtttccttacccagtcaccacttaaccagaaatattagaatacacggttcaaccagaattcagaccaggcagataacctgcctgttgctcaagcaatcatcagagttttaaaaaacaaaattaagcaaaaaagacctttccccaaatagcatcattaccacttagctttgtacgacccattcctaggaaagccacattccacttcagagaacatgaccgcttaaggtacagttaaaacaaagtccttccctttaggtgcttactttttgttttaaattagcctctcgaaatgcttttcttgtgtcttctgctgcattcctgaaaactataacttttaaggacacagccctcacttttatagaggaggaagaaaacagcaaagaggtgtctcattagggaggcagaaggttatgaccaatgctggaggtcttcctcttccttacttgttattcaacaagatgggttctatggtgtcgcatgaggtgtgagttggaaatgaaagctgcaccacacttctcacattcatagggcttctccccagtgtgggttctctggtgcacggtgaggctcgacctctgtctgaaggccttcccacactcattacatgtgtaaggtttttctccattatgaattctctgatgaataagtaggtatgagctacatgtgaaggccttcccacattcattacacacgtaaggaagatctccactgtgaattctctggtggacaataaggcaagagagctgactgaaggctttcccacattcgctgcagtcgtaaggtttctctgcagtgtgaattctctggtgcacaataaggtgtgaaaaacaactaaaggctttcccacactctttacactcatatggcttctcaccagtatggcttcgctgatgtacaataagatttgcactctgggtaaaggctttgccacagtcgttacaggcaaagggcttctccccagtgtggatcctctggtggacaatgaggtttgagctcctagtaaatgttttcccacattcattacattcatagcatttttccgtaatgtggactttctggtgccgagcaagttgtgagctgtaactaaaggctttctcacattcattgcacttaaaagttttttctaaggagtggattttttgatgtacagtcagatttgaactctgagtgaaggctttcccacattttgagcaaacataaggtttctgtccagtgtggattctctgatgcacaacgaggtttgcactctgaatgaaggccttcccacactcatgacattcaaagggtttctctccagtgtggattcgctgatgcacaacgaggtttgcactctgactaaatcctttcccacacacgctacacgtaaaaggcttttgtccaagctgggtttttggatttttaacagcgccagaattaaggctatattttcctccagatttcttacatttctggttttcctcttctttgaagctttcaggtaagtgacagtcattcactatcacttgtctgaaatctttcttttctctctttattctctgcctctttaacatgtttcccttttcacaagcttctcctaactcaggtccttgaggatcagctttctggattctttctgatatgatgaggggtttttcagcttcctcacatatctcagtttttggaaccagtaactgtaggttcttggtttcagcacctagaaagttcatggtcccatgagtctccagtatctcactcttggccagagtccctggtaatgagtagctgccaagggttgaagcagcaggtgcctcctgagttgctttcaggactaccgccatatcccaggatatgttctgacccttttcttcctcttctgatccatcaaggcctgtctgaagaccctgcactggggcccagactttgatgttctcggagtgcacttgttggctggatgcctgacctgggaagttttcttcttcttcctcctcctttttcaccttcactgggccccatggggctagggccatggcttctctcaattctgcagtcatcttctctgctcagcaggggaactcctatagctgggcgctgccctgcagaggtcaaaccccatccaagctttatgtttcaaaagcttcttcttgagtttcttcccagggccaagatgagtactgc

SEQ ID NO: 91459 - DNA, 586 bp, Homo sapiens
ttttttttttttctcgggtggagcatgggacctttattcgttaagacatcaggctccagatatgaactttcagcagaagcgcttgccgggagcaaagggacagaaaagctgagatgaacagtgcctggcagcaatcacagccgggcaagggtgctccgagcctcgcatcccccggccgggggcagctggaggtgcctcagaaggtgcattctgcttcctgcaggggcttgaaacaccaaggcactccagggatcctggagtcaaagcagcagccccggttgttgcactccttgggggtgacatgggggtagccgcagtccaccctgtccttggctggcacggcacactggtttgcagacaggcccacgtactcctcagcagagctggaggacagcaaggccaggaccagccccagcatgcagagcgctctggcagccatgaccaccgtgggctccgggacgcagctcaggactcgcttcatggtccaggaggcctcatttatgcaccgttgtttgcacagctgctctggattgtttgcttggggaaggctctccctcctggctgtggctgctcctgttctctcctg

SEQ ID NO: 91460 - DNA, 5275 bp, Homo sapiens
tttcgtgtggacagtcccctgcccacgggggaagcaggcgggccccccagcacccgggaggccgagctgaagctgcggctaaagctggtggaggaggaagccaacatcttgggccggaagatcgtggagctggaggtggagaaccgtggcctcaaggcagagatggaggacatgcggggccagcaggagcgggagggcccgggtcgggaccacgcacccagcattcctacctcacccttcggtgactccctggagtcctccactgagctccgccgccacctgcagtttgtagaagaggaagcggagttgctccggaggtccatctccgagatcgaagaccacaaccggcaactgacccacgagctcagcaagtttaagtttgagcctccccgggagccgggctggctaggagagggtgcaagtcctggtgccgggggtggggcccccctgcaggaggagctgaagtcagccaggctgcagatcagcgagctcagcggcaaggtgctcaaactgcagcacgagaaccacgcgctgctgtccaacatccagcgctgcgacctggcagcccacctggggctgcgtgcccccagtccccgggacagcgatgccgagagtgatgcgggcaagaaggagagtgatggggaggagagccgcctgccccagcccaagcgggaagggcctgttggcggggagagtgactcggaggagatgtttgagaagacgtcgggcttcgggagcgggaagccatcggaggccagcgagccatgccccacggagctcctgaaggcccgggaggactctgagtacctagtgaccctaaaacacgaggcccagcggctagagcggacggtggagcgcctcatcacggacaccgacagcttcctccatgatgcggggctgcggggtggtgcgcccttaccggggcctggcctccagggcgaagaggagcagggtgagggggaccagcaggagccccagctgctggggaccatcaacgccaagatgaaggctttcaagaaagagctgcaggccttcctggagcaggtgaaccgcattggggatggcctatcccccttgccccacctcacagagtcctctagcttcctctccactgtgacttccgtgtcccgggactcccccatcgggaacctggggaaggagctgggcccagacttgcagtccagactgaaagagcagctggagtggcagctcgggccggcccgaggggacgagcgggagagcctgcgcctccgagccgcgcgggagctgcaccgccgcgcagacggggacaccgggagccacgggctgggaggccagacctgcttcagcctggagatggaggaggagcacctctatgccttgaggtggaaagaactggaaatgcacagcctggctttgcaaaacaccctccatgagcgaacctggagtgatgagaagaatctgatgcagcaggagctccggtccttgaagcagaacattttcctcttctacgtcaaactcaggtggctgctgaaacactggcggcaagggaagcagatggaggaggaaggagaggagttcactgagggtgaacatccagagaccctctccaggctcggggagcttggagtccaggggggtcaccaggcggatggcccagaccacgacagtgaccgaggctgtggctttccagtgggggagcactccccacactcccgggtgcagattggagatcacagcttgcggctgcagaccgcggacaggggacagccccacaaacaggtggtggaaaaccagcagctgttcagcgccttcaaggccttgctggaggacttccgtgcggagctgcgggaggatgagcgtgcccgactacggctgcagcagcaatatgccagcgacaaggcggcctgggacgtggagtgggccgtgctcaagtgccgtctggaacagctggaagagaagactgagaacaagttgggagaactaggctcctccgctgagagcaagggggccttgaagaaggagagagaggtgcaccagaagctcctggcagacagtcacagcctggtcatggacctgcgctggcagatccatcacagcgagaagaactggaaccgggagaaggtggaacttctcgaccgcctggacagagatcggcaggagtgggagcggcagaagaaggaattcttgtggaggatagagcagttgcagaaagagaacagtccccggagaggtggcagtttcctctgtgatcaaaaagacggcaacgttcgcccctttccccaccagggaagcctccgcatgccccgtccagtggccatgtggccttgtgcagatgctgactccatcccgtttgaagaccggccgctgtccaagctgaaggagtcggacaggtgctcggccagtgagaatctctacctggatgccttgtccctggatgacgagccagaagagccaccagcccacaggcccgagagggagttcaggaaccgcctccctgaggaagaagaaaatcacaaaggaaatcttcaaagggcggtgtccgtgtcctccatgtctgagttccagcgtctaatggacatctcccccttcctgcctgagaagggcctgccgtccaccagcagcaaggaggatgtcaccccacccctgtctccagacgacctcaagtacatcgaggagttcaacaagagctgggactacacacccaacaggggccacaatggtggggggccggacctttgggccgacaggaccgaggtggggcgggcagggcacgaggacagcacagagcctttccccgactcctcctggtacctaaccacaagtgtcaccatgaccacggacaccatgaccagcccagagcactgccagaagcagccactgcggagccacgtcctcaccgagcagtcggggttgcgcgtgttacacagcccgcctgccgtgcgcagggtcgacagcatcacggcggcaggtggtgagggtccctttcccacgagcagagccagagggagcccgggagacaccaaggggggccctccagaacccatgctcagcaggtggccttgcacctcccccaggcactcccgggactatgtggagggggcacggcgcccccttgatagtcccctctgtacctccctggggtttgcctccccactgcacagcctggagatgtccaagaacttgagtgatgacatgaaggaggtggccttctctgtcaggaatgccatctgctccggccctggcgagctgcaagtcaaggacatggcctgccagaccaatgggtcccggacgatggggacccagactgttcagaccatcagtgtgggcttgcagactgaagccctgcgtggcagcggtgtcaccagcagcccccacaagtgtctcactccaaaggctgggggcggtgctacacccgtgtcgtctccttcccggagccttaggagcagacaggtggcccctgccatcgagaaggtgcaggccaagtttgaacgcacatgctgctcccccaagtatggttctcccaagctgcagaggaagcccctccccaaagccgaccagccaaataacaggacgtcaccagggatggcccagaaagggtacagtgagtcagcctgggcccgctccaccaccacaagggagagccccgtgcacaccaccattaatgatggcctctccagcctcttcaacatcattgaccacagccccgtggtgcaggaccccttccagaaggggctgcgggccggcagtcggtctcgctcagcagagccccgaccagagctgggcccaggccaggaaacaggcaccaattcccgaggaaggtcgcctagccccattggggtggggtcagagatgtgcagggaggaagggggagagggcacgccagtgaagcaggacttatctgctccccctggctacaccctcactgagaacgtggcccggatcctcaacaagaagctgctggaacatgccttaaaggaggagaggaggcaggctgcccacgggcccccgggtctccacagtgacagccactcgctgggggacacagccgagccagggcccatggagaaccaaactgtcttgctaactgccccctggggactctagccctgcctgcctcacgctgaactaccttgttctgcactagctccatccctagagccctgcttctccaggcccgagagaccagcaaaccgtcgccctccgtcccgttgggccccacattcccccactgcctcacagcctcagtcacccggagacccgacgtccttggaggagcatggtggcgaggagccgcccgaggagcagccacaccgagatgcaagcttgcatggattatcacagtataattcactgtaatttgcataaccacaccatcaccatgaacaaaactctgcccaacaggagagatctagttttctcaaggtcaaagaatgttttttaaaaacacaaagctgctgaatgttcaacctgtgaaactgagatgtttctagaatgaaacagtaaatgtgcctgtaataacttaatttttttcatagctcagaaaactatttttgtctccatcttttttacacacagtatattaaacgaaaacgtaaataaggtataaatagatttaaaaaataaaagttttaaaaaatgtacattttaagagattctgaacaccctcgctgtcaatacctgactgcctctgttaaatttgcactgttacattttggttcagtttatttccatgttgaattagagtggattaagttaattttattttgtcagtgttactgttttttatgaattttttaatgcttcagactgtctgattcagtgaactttttgtagtgaaaaagccatgaagccagtagacaagacagatattctgtatgctggaggggatacaggatgattttgaaaaggtacaaagtcctcagtgggcttagaaaattcactgtatgatccttatattatcctacttggcttgcacgtcttcgggtgcatgtatataccgctactgtgtcctcgccatcacctaaatgtgactcagtctgttccactgtaatatgttgtgaatttccttgtactgtacttttattgttggtcttcttgcatcgatgatccaacagcaacaccatttttaaattattgtgaaaagattaactggcaatgtacagagtttactcaaagttttcttaagggaaaacactacaaaaagtcacaaggataccaaatggaaacacatgatgatgcctctgggtctgtatgagaccgtgatgaagtagaaataaagcccttctgagatggc

SEQ ID NO: 91461 - DNA, 639 bp, Homo sapiens
taaaaatgattcctgattgataaactgcatcaggactgggagaactagaaatacctagtaagaagccatatctctggacttgcctgaatgtggtaactcttgtaacttggcacactcatagagatccctagaagctatgcatctgtgtgtggcgttattaggggagatagtggcttttacagggcataaggctttaagcagccttaaacagctcccacacctaccaagtgtggatcttgtctttttgtacctgagctgtccctgagggagggatggctcctgtttaattcttgccaagtgtggtcttgagctggaatgcctagtggagcctaaataaaacttttttgggtgggtattgcactgttgtctaacacatagaggtgttttctgaaacacacagttttatttattgtagtagaaccctcgtaaaaatgtcttttgttaaaaccaggatacaaatcccaaagtgtgatcctgatcttctgtgaagaccaatacaattcttaagattaccatccaattccttaaagtcagaacctggataagaatcccaatttcaggtctttgtcccaaaatgtgaatgtttgcttaaaaaaatgtaaaaatacttttattgggtctttacataatcattgggct

SEQ ID NO: 91462 - DNA, 640 bp, Homo sapiens
  misc_feature (1)...(640): n = a,t,c or g
aggacattagattttgtttacatgtttgtggttttagacagcaaacatgcattgaagaatgttagacaggaataaacttgaaatagcctcactcacactaaagagcccagagtgttaattgacatcctgttttccataatttttttcttttgtttgcttgccaataaaaccctcatgcaacctgagtggaaggggagagtcattaatgcggtagatctggatgattttctgaacaacctaacctcacgctaatgaggcgagtattaccacaggccctttctcctacgagctgtccacccacagttgaagagctaattttactctcaaaactctcacgaatgcttttggttcctgccggctcttgagtagtaacagagtgctttagccctctgtggaaaatgatggaggcattgtcagggcacatgaaccctctaagaagtggatgtggtcccacctctacttaaacctggaccatgcagcttaagggttccattctcaagccagngaacatcactgtcttcatgtgaatgttcttcaggtagaatttttttaccattaaaaaatttccaaaccaggccggggcgcggtggggctcaacgccctgtaaatcctaagcactttttgggaggtccgaaggtgc

SEQ ID NO: 91463 - DNA, 2246 bp, Homo sapiens
atgtttggctttgaaaatgtcaagataataggagaagcaacttctgctgactacaaggcagccaacaatgtcccagaatcttccggcgtctttccggtggtggtcgtttttgctgcctgcgagcgcgtccgcgggctgggcgtttccggctcgctgggtccgggccaggtaactggagccggaaaccggtggaggtggtgtccgcccgcagaggagcttgcctggtctcggtctgagcgtcgcccagcgatttgccaccgcacgcacgccggatcccgggctttaccgcccgcctttccaggccccgccccgcctaaagtcccatggccgaggcagcgctagtgaatacgccgcagattcccatggtaacagaagagtttgtgaaaccatcacagggccatgtgacctttgaggatattgctgtgtacttctcccaggaggagtggggcctccttgatgaagctcaaaggtgcctgtatcatgatgtgatgctggagaacttttcgcttatggcctcagtaggttgtttgcatggaatagaggctgaggaggccccttctgagcagactctttctgcgcaaggagtgtcacaggccaggactccaaagctaggtccttccatcccaaatgctcattcttgtgagatgtgtatcctggtcatgaaagacattttgtacctcagtgagcatcaggggacacttccctggcagaaaccttatacgtctgtggccagtgggaaatggttttcatttggttctaacctgcaacagcaccagaaccaggacagtggagagaaacacatcagaaaggaggagagcagtgccttgcttctgaatagctgcaaaattcctctgtcagacaatcttttcccatgcaaagatgttgagaaggattttccaaccatcctgggccttctccaacaccagaccacccacagcagacaagagtatgcacatagaagcagggagacctttcaacaaagacgttacaaatgtgagcaagttttcaatgagaaagttcatgttactgagcatcagagagtccacactggagaaaaagcttataagcgtagggaatatgggaaatccttgaactctaaatacttatttgttgaacaccagagaacccataatgcagaaaagccttatgtgtgcaatatatgtgggaaatcattcctccataaacaaacactcgttgggcaccagcagagaattcacactagagaaaggtcttatgtgtgcatcgaatgtgggaaatccttgagctccaaatactcacttgtggaacaccagagaacccataatggagaaaagccttatgtgtgcaatgtatgtgggaaatcattccgccacaaacaaacatttgttggccatcagcagagaatccacactggagagaggccttatgtgtgtatggaatgtgggaaatcttttattcattcctatgaccgcattcgacaccagagagttcacactggagaaggggcttatcagtgcagtgaatgtgggaaatccttcatatacaaacagtcacttcttgatcaccatagaatccacacgggagaaaggccttatgagtgcaaagaatgtgggaaggccttcattcacaaaaaaagacttcttgagcaccagagaattcatactggagaaaagccttatgtgtgcatcatatgtgggaaatcatttatccgctcgtctgactacatgcgacaccagagaattcacactggagaaagggcttatgaatgcagtgactgtgggaaagccttcatctccaaacaaacacttcttaagcatcacaaaatccacactagagaaaggccttatgaatgcagtgaatgtggaaaaggcttctaccttgaggttaaacttcttcagcaccaaagaatccatactagagaacaactttgtgagtgcaatgaatgtggaaaagtcttcagccaccaaaaaagacttcttgagcaccagaaagttcacactggcgaaaagccctgtgagtgcagtgaatgtgggaaatgctttagacaccgcaccagcctcattcaacaccagaaagttcacagtggagagaggccttataactgcactgcatgtgagaaggcctttatctataaaaacaaacttgttgagcatcagcgaatccacaccggagaaaagccgtatgaatgtggtaaatgtgggaaagccttcaacaaaagatattcccttgtcaggcaccagaaggtacatataacagaagagccctag

SEQ ID NO: 91464 - DNA, 3441 bp, Homo sapiens
cgtacaggacctgtttcactgcagggggatccaaaacaagccccgtggagcagcagccagagcaacagcagccgcaagacattgtttctctccctctgcccccccttccccacgcaaccccagatccatttacactttacagagcatcgtgcatcaagtcaccagggtggtccattcaagctgcagatttgtttgtcatccttgtacagcaatctcctcctccactgccactacagggaagtgcatcacatgtcagcatactggagcatagtgaaagagtctattttgaagcttcaaacttagtgctgctgcagaccaggaacaagagagaaagagtggatttcagcctgcacggatggtcttgaaacacaaatggtttttggtctaggcgttttacactgagattctccactgccaccctttctactcaagcaaaatcttcgtgaaaagatctgctgcaaggaactgatagcttatggttctccattgtgatgaaagcacatggtacagttttccaaagaaattagaccattttcttcgtgagaaagaaatcgacgtgctgttttcatagggtatttctcacttctctgtgaaaggaagaaagaacacgcctgagcccaagagccctcaggagccctccagagcctgtgggaagtctccatggtgaagtataggctgaggctacctgtgaacagtacgcagtgaatgttcatccagagctgctgttggcggattgtacccacggggagatgattcctcatgaagagcctggatcccctacagaaatcaaatgtgactttccgtttatcagactaaaatcagagccatccagacagtgaaacagtcaccgtggaggggggacggcgaaaaatgaaatccaaccaagagcggagcaacgaatgcctgcctcccaagaagcgcgagatccccgccaccagccggtcctccgaggagaaggcccctaccctgcccagcgacaaccaccgggtggagggcacagcatggctcccgggcaaccctggtggccggggccacgggggcgggaggcatgggccggcagggacctcggtggagcttggtttacaacagggaataggtttacacaaagcattgtccacagggctggactactccccgcccagcgctcccaggtctgtccccgtggccaccacgctgcctgccgcgtacgccaccccgcagccagggaccccggtgtcccccgtgcagtacgctcacctgccgcacaccttccagttcattgggtcctcccaatacagtggaacctatgccagcttcatcccatcacagctgatccccccaaccgccaaccccgtcaccagtgcagtggcctcggccgcaggggccaccactccatcccagcgctcccagctggaggcgtattccactctgctggccaacatgggcagtctgagccagacgccgggacacaaggctgagcagcagcagcagcagcagcagcagcagcagcagcagcagcagcagcagcagcagcagcagcagcagcagcagcatcagcagcagcagcagcagcagcagcagcagcagcagcagcagcacctcagcagggctccggggctcatcaccccggggtcccccccaccagcccagcagaaccagtacgtccacatttccagttctccgcagaacaccggccgcaccgcctctcctccggccatccccgtccacctccacccccaccagacgatgatcccacacacgctcaccctggggcccccctcccaggtcgtcatgcaatacgccgactccggcagccactttgtccctcgggaggccaccaagaaagccgagagcagccggctgcagcaggccatccaggccaaggaggtcctgaacggtgagatggagaagagccggcggtacggggccccgtcctcagccgacctgggcctgggcaaggcaggcggcaagtcggttcctcacccgtacgagtccaggcacgtggtggtccacccgagcccctcagactacagcagtcgtgatccttcgggggtccgggcctctgtgatggtcctgcccaacagcaacacgcccgcagctgacctggaggtgcaacaggccactcatcgtgaagcctccccttctaccctcaacgacaaaagtggcctgcatttagggaagcctggccaccggtcctacgcgctctcaccccacacggtcattcagaccacacacagtgcttcagagccactcccggtgggactgccagccacggccttctacgcagggactcaaccccctgtcatcggctacctgagcggccagcagcaagcaatcacctacgccggcagcctgccccagcacctggtgatccccggcacacagcccctgctcatcccggtcggcagcactgacatggaagcgtcgggggcagccccggccatagtcacgtcatccccccagtttgctgcagtgcctcacacgttcgtcaccaccgcccttcccaagagcgagaacttcaaccctgaggccctggtcacccaggccgcctacccagccatggtgcaggcccagatccacctgcctgtggtgcagtccgtggcctccccggcggcggctccccctacgctgcctccctacttcatgaaaggctccatcatccagttggccaacggggagctaaagaaggtggaagacttaaaaacagaagatttcatccagagtgcagagataagcaacgacctgaagatcgactccagcaccgtagagaggattgaagacagccatagcccgggcgtggccgtgatacagttcgccgtcggggagcaccgagcccaggtcagcgttgaagttttggtagagtatcctttttttgtgtttggacagggctggtcatcctgctgtccggagagaaccagccagctctttgatttgccgtgttccaaactctcagttggggatgtctgcatctcgcttaccctcaagaacctgaagaacggctctgttaaaaagggccagcccgtggatcccgccagcgtcctgctgaagcactcaaaggccgacggcctggcgggcagcagacacaggtatgccgagcaggaaaacggaatcaaccaggggagtgcccagatgctctctgagaatggcgaactgaagtttccagagaaaatgggattgtctgcagcgcccttcctcaccaaaatagaacccagcaagcccgcggcaacgaggaagaggaggtggtcggcgccagagagccgcaaactggagaagtcagaagacgaaccacctttgactcttcctaagccttctctaattcctcaggaggttaagatttgcattgaaggccggtctaatgtaggcaagtagaggcagcgtgggggaaaggaaacgtggctctcccttatcatttgtatccagattactgtactgtaggctaaaataacacagtatttacatgtt

SEQ ID NO: 91465 - DNA, 1330 bp, Homo sapiens
tttcgtcttcgtgcgtgcgtgcgcgcgcagatgtgggccccgcgggagcagctactgggctggactgcggaagctctgcctgccaaggattctgcctggccctgggaagagaagtctagatatctgctggaagctgagaccagctggtcactgctgggcctgctaggagcccacacggaagctgcccacagccagacaccagagcctcaaaggccgccatcttgaaaaaccaaccctgacctccacaatgattgattttcaaatgttgaaccagctttgcagaactataataaacccaagtgtgataccctgtctcaagtattgcggtgatcaaataggaccagtgactttcgaggatgtggctgtgcttttcactgaggcagagtggaagagactgagccttgagcagaggaacctatacaaagaagtgatgctggaaaatctcaggaatctggtctcattggaatcaaagccagaagtccatacctgcccttcttgccctctggcctttggcagtcagcagttcctcagccaagatgagctacacaatcatcctattccaggtttccatgcaggaaatcaactccacccaggaaatccctgcccagaggatcagccacagtcacaacatccttctgataaaaatcacaggggggctgaagcagaagatcaacgagtggaaggaggcgtcagacccttgttttggagtacaaatgaaaggggggctttagtgggtttctctagcctgttccagagaccaccaataagctcttggggaggcaacagaatattagagatacagctcagtccagcccagaatgcaagctctgaggaagtagacagaatttccaagagggcagaaaccccagggtttggagcagtcaggtttggggagtgtgcactagcttttaaccagaagtcaaacctgttcagacagaaggcagtcacagcagaaaaatcttcagacaaaaggcagtcacaggtgtgcagggagtgtgggcgaggctttagcaggaagtcacagctcatcatacaccagaggacacacacaggagaaaagccttatgtctgcggagagtgtgggcgaggctttatagttgagtcagtcctccgcaaccacctgagtacacactccggggagaaaccttatgtgtgcagccattgtgggcgaggctttagctgcaagccatacctcatcagacatcagaggacacacacaagggagaaatcgtttatgtgcacagtgtgtgggcgaggctttcgtgaaaagtcagagctcattaagcaccagagaattcacacgggggataagccttatgtgtgcagagat

SEQ ID NO: 91466 - DNA, 5943 bp, Homo sapiens
atgggcagatggaggctctaacaggtccttcccaggaggtggcaggaccaggactggagccctcatctttaccactgtgtccagtaaacatcacaggcacggccatggaaggcagcgggggtgtgctgggcacttctccagcggcgacggccgaggagcgggctgcgggcggagcggcgtcggccgctgaggaggtgcgagcccctgccgggtcccccctgcgccggaccatgtattcggcccacaggcccctgatgcccgcgtccagcgcggcctcccgtggcctcggcatgttcgtgtggacgaatgtggaacctcgctctgtggctgtgttcccttggcactccttagtccccttcctggcacccagccagcctgacccctccgtgcagccgagcgaggcccagcaacctgccagccacccagtggcctccaaccagagcaaagaacctgctgagtcggcagctgttgctcatgaacggccaccaggtgggatagggagtgctgaccctgagcggccccctggagccacatgccctgagagcccaggacccggaccccccacaccctttgggggtggtggaatctggtaagggtccgcctcccaccacggaggaggaggcctccggccccccaggagagccccggctggacagtgagacagagagtgaccatgatgatgccttcctctccatcatgtctcctgagatccagttgcctctaccgcccggaaaacgtcggacccagtccctcagtgccctacccaaggaacgggactcatcttctgagaaggatggacgcagccccaacaagcgggagaaggaccacatccggcggcccatgaatgccttcatgatcttcagcaagcggcaccgggccctggtccaccagcgtcatcccaaccaggacaaccggaccgtcagcaagatcctgggcgagtggtggtatgccctggggcccaaggagaagcaaaagtaccacgacctggccttccaggtgaaggaggcccacttcaaggcccacccagattggaagtggtgcaacaaggaccgaaagaagtccagctcagaggccaagcccacgagcctggggctggcaggagggcacaaggagacgcgggagcggagcatgtcggagacgggcactgctgctgcccctggggtgtcctctgagctcctgtccgttgcagcccagacactcctgagctcagacaccaaggctccggggagcagctcctgtggggcagaacggctacacacagttgggggacctggctcagcccggccccgagctttctcccacagcggggtacacagcctggacggcggagaagtagacagtcaggcgctacaggaactgacgcagatggtgtctggccctgcatcgtactctggcccaaagccttctacccagtatggagctccaggaccctttgcagcccctggtgagggaggtgccttggcggccactgggcggcccccgctgctgcccacccgagcttctcgttctcagcgtgcggccagtgaggacatgacgagtgatgaggagcgcatggtcatctgtgaggaggaaggggatgatgatgtcattgctgacaatggcttcggcaccactgacattgatctcaagtgcaaggagcgggtgaccgacagcgagagtggggacagctctggggaggacccaaagggcaacaagggctttggtcggaaggggttttcacctgtgatccgttcctcctttacccactgccgccccccactggaccctgagcccccagggcccccggatcctcctgtagcctttggcaaaggctatggttccgccccatcctcctctgcgtcctcgcctgcttcctcctcagcctcggcagccacctccttctcactgggctcaggaaccttcaaggcccaggagtctggtcagggcagcacagcgggccccctacggcccccaccccctggggctgggggtccagcgacaccttccaaggcaacccggttcctcccaatggatcctgccaccttccggcgcaagagacccgaaagtgtgggtggcctggagccaccaggcccctcagtcatcgcggcccctcccagcggaggaggaaacatcctgcagacactggtgctgcccccaaacaaggaggagcaagagggcggcggagccagagtgccctccgcccccgccccatcactggcctatggggccccagcagctcccctgtcccgtcctgccgccaccatggtcaccaatgtggtgcggcctgtcagcagcactcctgtgcccatcgcctctaagcccttccccacctctggccgggctgaggcgtctccaaatgacacagcaggtgccaggactgaaatgggcactgggtctcgggtgcctgggggctccccgctgggtgtcagcttagtgtattcggacaagaagtcggcagcagccacctcaccagccccacacttggtggctggacccctgctgggcactgtggggaaggcgcctgccactgtcactaacctactggtgggcaccccggggtatggggcccctgcgccccctgctgtccagttcattgcccagggggcccctggtggtgggaccactgcgggctcaggagcaggtgctgggagtggccccaatgggccagtacccctgggcatcctgcaaccaggtgccctgggcaaggctgggggaatcacccaggtacagtacatcctgcccacgctgccccagcagcttcaggtggcacctgccccagcaccagcccctgggaccaaggcagcggctcccagcggccctgcacccaccaccagcatccgtttcaccctcccaccgggcacttccaccaacggcaaagtcctggctgccactgcacccactcctggcatccccatcctgcagtctgtaccctccgccccaccccccaaagcccagtcagtttctcccgtgcaggccccgcccccgggtggctcagcccagctgctgcctgggaaggtcctagtgcctctggccgcccctagcatgtcagtgcggggtggaggggccggccagccactgccactggtgagcccgcccttctcagtacctgtgcagaatggtgcccagccccccagcaagatcatccagctgaccccggtgcctgtgagcacacccagcggcctggtgccgcccctgagcccagccacactccctggacccacctctcagcctcagaaggtcctgttgccctcctccaccagaatcacctatgtgcagtcagcgggcgggcacgcgctgcccctgggtaccagccctgcgtccagccaggctggaacagtcacctcgtacgggcccacgagctctgtagctctaggcttcacctcgctggggcccagcggccccgccttcgtgcagcccctgctctcagcaggccaagccccactgctggctcccggtcaggtgggcgtgtcacctgtgcccagtccccagctgccgcctgcctgtgcagcccccggaggtcctgtcataacagcattttactctggcagccctgcacccacctcctcagcacccctggcccagccatcccaggcccccccaagcctggtctacactgtggccaccagcacaaccccacctgcagccaccattctgcccaagggcccgccagcccctgccactgccaccccagccccgactagccctttccccagcgccacagcaggttccatgacctacagcttagtggcccccaaggcccagcggcccagcccgaaggccccccagaaagtgaaggcagccatcgccagcattcccgtggggtcctttgaggcaggtgcctctgggcggcctggccctgcaccccggcagcctctggagcctggcccagtccgagagccaactgccccagagtctgagcttgaggggcagcccacaccaccagcccctccacccctgccagagacctggactcccacggcccggagcagccccccactgcccccacctgctgaggagcggaccagcgccaagggccctgagaccatggccagcaaattccccagctcatcttcagactggcgcgtccctgggcagggcctggagaatcgtggggagcctcccactcctcccagcccggccccagctccagctgtagcccctggtggcagcagcgagagcagcagtgggcgggcagccggggacaccccggagcgcaaggaggcggctggtactggcaagaaggtgaaggtgcggcccccgcccctgaagaagacctttgactctgtggacaacagggtcctgtcagaagtggacttcgaagagcgctttgctgagttgcctgagtttcggcctgaggaggtgctgccctcccccaccctgcagtctctggccacctcaccccgggccatcctgggctcttaccgcaagaagaggaagaactccacggacctggattcagcacccgaggaccccacctcgcccaagcgcaagatgagaagacgctccagctgcagctcggagcccaacacccccaagagtgccaagtgcgagggggacatcttcacctttgactgtacaggtacagaagccgaggacgtgcttggggagctagagtatgacaaggtgccatactcctccctgcggcgcaccctggaccagcgccgggccctggtcatgcagctctttcaggaccatggcttcttcccgtcagcccaggccacagccgccttccaggcccgctatgcagacatctttccctccaaggtttgtctgcagttgaagatccgtgaggtgcgccagaagatcatgcaggctgccactcccacggagcagccccctggagctgaggctcctctccctgtaccgccccccactggcaccgctgctgcccctgcccccactcccagccccgcagggggccctgaccccacctcacccagctcggactctggcacggcccaggctgccccgccactgcctccacccccagagtcggggcctggacagcctggctgggagggggctccccagccctcccccccacccccaggtccctccacagctgccacaggcaggtgagggacccctgagaagatgccaggacttatagtaccccctcaggacatggacagtatgtgggggcaggaaggttatctcctcccgggtaaagccatttcgtcctctccagtttggggcggaatgaggcctgctcctcttgtaaatacccccttccctcgaagctccctcccggtgctggggggcagctgaggggctgcaggggcagtctccctcctccaagcccctgtacataacctggagcgtgtgaccttcagagcttttcactttatgcaaaatggctcctgtgagggctgcaagctggagggtggtgcaggccttgggccacagggaggcgcctgtggaatagggggagttcatgcaccccttttttccccagaggggctggactcaggttagtttgggggtgggggctcctgcactttgccacaggcacggggagggttttctcctcaccccctctgccctcccaacttgggttgtactttctaagaaggtgattccccctgcccttgcccccttccccagaacaaaacatgttgatcatgtgcaatatttcttactgtgccgagaagccgcaatgagcgagattaaagctgtttaacacaaaaaaaaaaaaagggggggcccttttaaaagaacccttggggggcccaattttacccggggttggcaaggtaaaatttttttctttatggggggccatttaaaaccctccttgggatttttggaaaagaaccttttttttgggggggggacttatgggcccaccccccctccaaaatttaagccttttggggaaaaaaaaaatttttaaggggaaaagggggaaaaaaaaccccaattccctggctgttaaaaatttttctttccggagtagaattaaga

SEQ ID NO: 91467 - DNA, 1582 bp, Homo sapiens
tcggaattcccggcccgacgatttcgttggccggctcctaccctgaaggtgcacctgcagtcctcgccgataagaggcagcagttcggaagccggttcctgagagatccggcgcgcgtcttccaccacaatgcctggtaatcactctgccccttcgcccggcctgtcgctgaccctctgtcccgccgcctcggagcactccgaaaagcccctgaccgccggccacgagtcaagctgccctacccgaggcactctccaaggggagagaaactcctaggccagcgactcaccctgcccgcagccaggacgtgaggcccctaagctgcccgtttgattttctcagggacaatgtggagtggtcggaagagcaagccgcggcggcggagagaaaagtccaggagaacagtatccagcgggtgtgccaggagaaacaagttgattatgagatcaatgcccacaaatactggaatgacttctacaaaatccacgaaaatgggtttttcaaggatagacattggctttttaccgaattccctgagctggcacctagccaaaatcaaaatcatttgaaggactggttcttggagaacaagagtgaagtacctgaatgtagaaacaatgaggatggacctggtttaataatggaagaacagcacaagtgttcttcgaagagccttgaacataaaacacagacacctcctgtggaggagaatgtaactcagaaaattagtgacctggaaatttgtgctgatgagtttcctggatcctcagccacctaccgaatactggaggttggctgtggtgtgggaaacacagtctttccaattttacaaacgaacaatgacccaggactctttgtttattgctgtgatttttcttccacagctatagaactggtccagacaaattcagaatatgatccttctcggtgttttgcctttgttcacgacctgtgtgatgaagagaagagttacccagtgcccaagggcagtcttgatattatcattctcatatttgttctttcagcaattgttccagacaagatgcagaaggctatcaacaggctgagcaggcttctgaaacctggggggatggtacttctgcgagattacggccgctatgacatggctcagcttcggtttaaaaaaggtcagtgtctatctggaaatttctatgtgagaggtgatggaaccagagtttacttcttcacacaagaggaactggacacgcttttcaccactgctggactggaaaaagttcagaacctggtggaccgccgactgcaggtgaaccgagggaagcaactgacaatgtaccgggtttggattcagtgcaaatactgcaagccccttctgtccagcaccagctaagaggcacctgctgccaacacgatgcaagcccgttgtgtttccgagcttttttaaaaaaaaatttgtagcaccgggcatggtgcatgcctgtaatcccagccactcaggaggctgagacagggaggatccattgagcccaggagtccagcctgggcaaaatagcgagagaccctgaatctgaaagtaatgataaaataaaaagaatataaatga

SEQ ID NO: 91468 - DNA, 4670 bp, Homo sapiens; identical to SEQ ID NO: 59797

SEQ ID NO: 91469 - DNA, 4306 bp, Homo sapiens
tccggagccgggcggaacgctagcggtgttggcgcggagtttacttcggctgcggcccctgggtgtttccacaccggtagccagctgtgccctgaggtggaagaggaccggccacccaggaattttccaacaatggcgccaccatcggtcccggagtcccagtgatgctctgtgccatagagcccccataacttcactactacgtgatagtaaatccccggcaaaaaccagcagcgccttgcaagcccacgccaccccaagcatcccaggactcttctgaaacgactccgggctaccagatcggccgtccagctggaatcaaccgatggaggctccgctgcaaactggaatggtgcttggcgtgatgatcggggccggagtggcggtggtggtcacggccgtgctcatcctcctggtggtgcggaggctgcgagtgccaaaaaccccagccccggatggcccccggtatcggttccggaagagggacaaagtgctcttctatggccggaagattatgcggaaggtgtcacaatccacctcctccctcgtggatacctctgtctccgccacctcccggccacgcatgaggaagaaactgaagatgctcaacattgccaagaagatcctgcgcatccagaaagagacgcccacgctgcagcggaaggagcccccgcccgcagtgctagaagctgacctgaccgagggcgacctggctaactcccatctgccctctgaagtgctttatatgctcaagaacgtccgggtgctgggccacttcgagaagccactcttcctggagctctgccgccacatggtcttccagcggctgggccagggtgactacgtcttccggccgggccagccagatgccagcatctacgtggtgcaggacgggctgctggagctctgtctgccagggcctgacgggaaggagtgtgtggtgaaggaagtggttcctggggacagcgtcaacagccttctcagcatcctggatgtcatcaccggtcaccagcatccccagcggaccgtgtctgcccgggcggcccgggactccacggtgctgcgcctgccggtggaagcattctccgcggtcttcaccaagtacccggagagcttggtgcgggtcgtgcagatcatcatggtgcggctgcagcgagtcaccttcctggcactgcacaactacctgggtctgaccaatgagctcttcagccacgagatccagcccctgcgtctgttccccagccccggcctcccaactcgcaccagccctgtgcggggctccaagagaatggtcagcacctcagctacagacgagcccagggagaccccagggcggccacccgatcccaccggggccccgctgcctggacctacaggggaccctgtgaagcccacatccctggaaaccccctcggcccctctgctgagccgctgcgtctccatgccaggggacatctcaggcttgcagggtggcccccgctccgacttcgacatggcctatgagcgtggccggatctccgtgtccctgcaggaagaggcctccggggggtccctggcagcccccgctcggacccccactcaggagcctcgtgagcagccggcaggcgcctgtgaatacagctactgtgaggatgagtcggccactggtggctgccctttcgggccctaccagggccgccagaccagcagcatcttcgaggcagcaaagcaggagctggccaagctgatgcggattgaggacccctccctcctgaacagcagagtcttgctgcaccacgccaaagctggcaccatcattgcccgccagggagaccaggacgtgagcctgcacttcgtgctctggggctgcctgcacgtgtaccagcgcatgatcgacaaggcggaggacgtgtgcctgttcgtagcgcagcccggggaactggtggggcagctggcggtgctcactggcgaacctctcatcttcacactgcgagcccaacgcgactgcaccttcctgcggatctccaagtccgacttctatgagatcatgcgcgcacagcccagtgtggtgctgagtgcggcgcacacggtggcagccaggatgtcgcccttcgtgcgccagatggacttcgccatcgactggactgcagtggaggcgggacgcgcgctgtacaggcagggcgaccgctccgactgcacttacatcgtgctcaatgggcggctgcgtagcgtgatccagcgaggcagtggcaagaaggagctggtgggcgagtacggccgcggcgacctcatcggcgtggtggaggcactgacccggcagccgcgagccacgacggtgcacgcggtgcgcgacacggagctagccaagcttcccgagggcaccttgggtcacatcaaacgccggtacccgcaggtcgtgacccgccttatccacctactgagccagaaaattctagggaatttgcagcagctgcaaggacccttcccagcaggctctgggttgggtgtgcccccacactcggaactcaccaacccagccagcaacctggcaactgtggcaatcctgcctgtgtgtgctgaggtccccatggtggccttcacgctggagctgcagcacgccctgcaggccatcggtccgacgctactccttaacagtgacatcatccgggcacgcctgggggcctccgcactggatagcatccaagagttccggctgtcagggtggctggcccagcaggaggatgcacaccgtatcgtactctaccagacggacgcctcgctgacgccctggaccgtgcgctgcctgcgacaggccgactgcatcctcattgtgggcctgggggaccaggagcctaccctcggccagctggagcagatgctggagaacacggctgtgcgcgcccttaagcagctagtcctgctccaccgagaggagggtgcgggccccacgcgcaccgtggagtggctaaatatgcgcagctggtgctcggggcacctgcacctgcgctgtccgcgccgcctcttttcgcgccgcagccctgccaagctgcatgagctctacgagaaggttttctccaggcgcgcggaccggcacagcgacttctcccgcttggcgagggtgctcacggggaacaccattgcccttgtgctaggcgggggcggggccaggggctgctcgcacatcggagtactaaaggcattagaggaggcgggggtccccgtggacctggtgggcggcacgtccattggctctttcatcggagcgttgtacgcggaggagcgcagcgccagccgcacgaagcagcgggcccgggagtgggccaagagcatgacttcggtgctggaacctgtgttggacctcacgtacccagtcacctccatgttcactgggtctgcctttaaccgcagcatccatcgggtcttccaggataagcagattgaggacctgtggctgccttacttcaacgtgaccacagatatcaccgcctcagccatgcgagtccacaaagatggctccctgtggcggtacgtgcgcgccagcatgacgctgtcgggctacctgcccccgctgtgcgaccccaaggacgggcacctactcatggatggcggctacatcaacaatctgccagcggacatcgcccgcagcatgggtgccaaaacggtcatcgccattgacgtggggagccaggatgagacggacctcagcacctacggggacagcctgtccggctggtggctgctgtggaagcggctgaatccctgggctgacaaggtaaaggttccagacatggctgaaatccagtcccgcctggcctacgtgtcctgtgtgcggcagctagaggttgtcaagtccagctcctactgcgagtacctgcgcccgcccatcgactgcttcaagaccatggactttgggaagttcgaccagatctatgatgtgggctaccagtacgggaaggcggtgtttggaggctggagccgtggcaacgtcattgagaaaatgctcacagaccggcggtctacagaccttaatgagagccgccgtgcagacgtgcttgccttcccaagctctggcttcactgacttggcagagattgtgtcccggattgagccccccacgagctatgtctctgatggctgtgctgacggagaggagtcagattgtctgacagagtatgaggaggacgccggacccgactgctcgagggatgaaggggggtcccccgagggcgcaagtcccagcactgcctccgagatggaggaggagaagtcgattctccggcaacgacgctgtctgccccaggagccgcccggctcagccacagatgcc

SEQ ID NO: 91470 - DNA, 2064 bp, Homo sapiens
ttttttttttttataaaaaaaagtctgaaacattttacttcatattacacatactttttttttaaaaaaaggcagtaacattgaaggaaacaacactcaacatgaaagaaccttgtgccggagttctagaaggaccttgaaaatcagttttaaaaggccttgctgtcacatagtctttttcatggctgcttgagtcatgctgaagagataggcttcatagattatatttaagaagttgtcatcattctgaatgaggtacagcagtgcctcctggagctggagcttggtgagtgggctgctgggtgatcacggagggctccgggctctgtatgggcaggaggaggcctggtggcagcagcaggtgcgctcctgggctcccacaggcaaagaaggccgctctccctttcctttggcgggaccggaggtgggttgtgcgaacaccatggggggtgataagcataggccgagactgctgttacaggtgtagtctgaggtgagatgacctggaaaagaggagtctgctgttctgtgttgggtgtcttgttgatccaggattccaagggtttccctgttccagagctctgagcgagcacaggaaacttagcggccaaggctggccggttagaggcatgcagctgctgctcctgctgtacaatctgaagcttcttcagtaactcttgaggggagatcactccagagctgccagtctgactaccagagatggggagtgtttgtcttgggagtgtggacctgttcctccttcccatgagccctgatgtccctactgtcctgaggtggaagggagcccattgaaataggcctgtggtggctgagccagaccctttccctggagccacaggggtgacagaagtgggagctctgctgcggttcagggcagctgagctggcaggtgctggtgtactagggtcacacttgtttgctgcccctggggtactctgaagtttctcgaacaggttctgagttctggaagcattttgtacaccacgagaagttccaatgttgtgaggagaccctggctggacaggtcctgtaaaaaattctcccgcagaatgggtactgccattttcacaaggccggttttcaggcagctctgacaatgggtggaggtctgcgctcctgaccatgagtttctgaatggctggacagagctgcttctcaatggggggtgagtgtcttctgggttcctcataggacagggagcgtacaaccccctgcctaattggaagcttctcttgctgctgctgctgctgctgctgctgctgctggtggagagtctgcggaggctccacagtttcctgacatgtagctttgtcctgcttcccaaacagagctgtcaaggataagtgttggggttcagggtctaaggtctggttgggctgaggtatacgctgttgctggttttcactgggtttcactggaattggtttgatgagatttggattgtcatagatggcagaggaactggttatcttttttggctcagaacaggttttacactttgtgtattcgtctttggccttgatgagcattcgtaaaatgtctacttctttgccctctcctgaattgaggatcactggggaaattcctgctccagttccctgatgggctttcaactgttcatactgagttaggtttttcataagctctgcaattctttggcattcttccttatcataaaaccaaattccatagatggacaatctggcatttctgtagagaaggaaagggtcctggagttggaaatccaagtctttagtaataggttctgtcctattttccatgctcagcctattcataatggtgaatccatgctttggagaagcagaccttgtataaacaaataaggttccttccacatcagttttctcccactcgttggcccgatggccgaaggtgtacagagccacctggctggccacgtccacgatgcggttgatataggggtcgtggcgctgcagggccgctaggctgatgtcgcgcccctttcccaccaggccgcctgccgccacggctgccatcttccctccctcccagacaacgaaa

SEQ ID NO: 91471 - DNA, 2392 bp, Homo sapiens
gcgactcgtcccgccttctggggcactagtttgactttgtgattggctactagtatcaaggaatcccggcgtggacagcgcgaggagaaagatggcggcgatggcggtcgggggtgctggtgggagccgcgtgtccagcgggagggacctgaattgcgtccccgaaatagctgacacactaggggctgtggccaagcaggggtttgatttcctctgcatgcctgtcttccatccgcgtttcaagagggagttcattcaggaacctgctaagaatcggcccggtccccagacacgatcagacctactgctgtcaggaagggactggaatacgctaattgtgggaaagctttctccatggattcgtccagactcaaaagtggagaagattcgcaggaactccgaggcggccatgttacaggagctgaattttggtgcatatttgggtcttccagctttcctgctgccccttaatcaggaagataacaccaacctggccagagttttgaccaaccacatccacactggccatcactcttccatgttctggatgcgggtacccttggtggcaccagaggacctgagagatgatataattgagaatgcaccaactacacacacagaggagtacagtggggaggagaaaacgtggatgtggtggcacaacttccggactttgtgtgactatagtaagaggattgcagtggctcttgaaattggggctgacctcccatctaatcatgtcattgatcgctggcttggggagcccatcaaagcagccattctccccactagcattttcctgaccaataagaagggatttcctgttctttctaagatgcaccagaggctcatcttccggctcctcaagttggaggtgcagttcatcatcacaggcaccaaccaccactcagagaaggagttctgctcctacctccaatacctggaatacttaagccagaaccgtcctccacctaatgcctatgaactctttgccaagggctatgaagactatctgcagtccccgcttcagccactgatggacaatctggaatctcagacatatgaagtgtttgaaaaggaccccatcaaatactctcagtaccagcaggccatctataaatgtctgctagaccgagtaccagaagaggagaaggataccaatgtccaggtactgatggtgctgggagcaggacggggacccctggtgaacgcttccctgcgggcagccaagcaggccgaccggcggataaagctgtatgctgtggagaaaaacccaaatgccgtggtgacgctagagaactggcagtttgaagaatggggaagccaagtgaccgtagtctcatcagacatgagggaatgggtggctccagagaaagcagacatcattgtcagtgagcttctgggctcatttgctgacaatgaattgtcgcctgagtgcctggatggagcccagcacttcctaaaagatgatggtgtgagcatccccggggagtacacttcctttctggctcccatctcttcctccaagctgtacaatgaggtccgagcctgtagggagaaggaccgtgaccctgaggcccagtttgagatgccttatgtggtacggctgcacaacttccaccagctctctgcaccccagccctgtttcaccttcagccatcccaacagagatcctatgattgacaacaaccgctattgcaccttggaatttcctgtggaggtgaacacagtactacatggctttgccggctactttgagactgtgctttatcaggacatcactctgagtatccgtccagagactcactctcctgggatgttctcatggtttcccatcctcttccctattaagcagcccataacggtacgtgaaggccaaaccatctgtgtgcgtttctggcgatgcagcaattccaagaaggtgtggtatgagtgggctgtgacagcaccagtctgttctgctattcataaccccacaggccgctcatataccattggcctctagccctgcgtgccaagtgtccagagccttggaagcagcttcaggttctgctcctgtagtacagaaggtgcagtacatctatgggctgtgattccccttgcccatcagagaggagcatttcaatctgctttcctgccttacatcaaggtgggcaagggattataattaattgcagggctcaagccaccaatctatgaagacctcaggccagggggtgaggaattagtgctggatttgaagctacgcactcagcctcaagaactccctggaatatccctgagaacatggggtttgaacggattttcagcctttttctgttcttgttttgatgggtttgtgtaagaggaaatacaaataaagttatagccctttactgcccgaaaaaaaaaa

SEQ ID NO: 91472 - DNA, 790 bp, Homo sapiens; identical to SEQ ID NO: 59803

SEQ ID NO: 91473 - DNA, 989 bp, Homo sapiens
agttggcggcggggtcgggtccgcgcgagccgcgatggagctgcacatcctagaacaccgggtgcgggtgctgagcgtcgcccgtcccggtctctggctctacacccacccgctcatcaagctgctcttcctgccccgccgcagccggtgcaagttcttcagcctgacggagacccctgaggattacacgcttatggtggacgaggagggctttaaagagctgcccccatctgagttcctgcaagtagctgaggccacatggctggtgctgaacgtgtcgtctcacagcggtgcggcagtgcaggctgctggggtcaccaagatcgcccgttcggtcatcgcgccactggccgagcaccacgtgtctgtgctgatgctgtccacttaccagacggacttcatcctggtgcgggagcaggacctgtccgtggtgatccacacgctggcccaggagttcgacatttaccgcgaggtgggcggagagcctgtgcctgtgacgagggatgattccagcaatggctttccccgcactcagcatgggcccagccccacggtgcatcccatccagagcccacagaaccgcttctgtgtcctcacactggaccctgagacgcttccagccatcgccaccaccctcatagatgtcctcttctactcgcacaggttccccagtgacctcctgctgaccagctcctcgggggagctgtggaggatggtgcgcatcggtggacagcccctgggctttgatgaatgtggcatcgtggcacagattgcaggtcccctggctgccgctgacatctctgcctactacatcagcaccttcaacttcgaccacgccctggtgcccgaggacggtatcggcagcgtcatcgaggtcctccagcggcggcaggaaggcctggcttcctgaggcccatgggcaacagagcagcctccctgctctcccctcgacccaggcttccaaagacttctctaagctatttccttaa

SEQ ID NO: 91474 - DNA, 2415 bp, Homo sapiens
ttttttttgaagggcacaagatgcttttattttaaacccctaaaagtgttgcaaagtgtttttaatttcatataaatagttaaggatcacatgaacacaatccagtacaaatgggtccaggagcttcgacgagcgttccagcttcttcgtaacgttcccacaccgtgcagcaagcggagggaagagaacttccggcgcccccacctaccgctccccagccgtgtcccgctgctctaaatctgcagacttgatcgattgcttctgcctgggcggtaccgcccgaattgactgctcctgtctgatgcgtccccgggcgcgggaaacgagtttcaatccactttcctgaccccaaccatcctgcccagtctccgcttccccgtcttgtacacccctaactcctgaggctcctccgaatcacgcgagtggaagcggagaagctcaagtggccgccatgtcagaggcttatttccgagtggagtcgggtgcgctggggcctgaggagaactttctttctttggacgacatcctgatgtcccacgagaagctgccggtgcgcacggagaccgccatgcctcgccttggcgctttcttcctggagcggagcgcaggcgccgagactgacaacgcggtcccacagggttccaagcttgaactacccttgtggctggcaaaaggactttttgacaacaagcgacggatcctttctgtggaactccccaagatctaccaagagggttggaggactgtgttcagtgcagatcccaatgtggtggacctccacaaaatggggccccatttctacgggtttggctcccagctcctgcattttgacagtcccgagaatgcagacatttcccagtctctgctgcagacttttatcggacgttttcgccgcatcatggactcctcacagaatgcttacaacgaagacacttcagccctggtagccaggctagacgagatggagaggggcttatttcaaacagggcagaaaggactgaatgactttcagtgttgggagaaggggcaggcttctcagatcacagcttccaacctcgttcagaattacaagaagagaaaattcactgatatggaagactgaaagccggaagaacacagaatggctcctcacagacgtatccctccgtgtgtccttgataggagctggttgaccttgtacagaaccagaatcctgtcccatttcatggcttatttcctgtggccatagagaattatagggaactggacatgctggaggatgtgggtgtccctggctctgtgagtcttccaggaccgtcccaccctgctgacccacagcccaggccctttaacccaagaacccatggccaaggagaaatcaaagtccttcctaaataagaatcactgccatataatatatcacagtagagttgcaactgagattccttgtgtctgggagtttggacagcttcagatgtacagtttcactagccacaaagcacaggtacaaactgggtcatcgcctgttcacaaaatgctctcttgatcttatttgcctcatcttcctcatggttgtacagaggatagcaccccaccatgccagcctgacttggagatatctcctgctgcctgcctgcagggagttaccccagtttccaaaaacagtcgcccagataaaggaggaaaagggaaaggcagacgaatggcatggcttttactaaagaaaagatgttggcctcatactctatactcagggcttaatgaactggaatctgcataactcagcagtcaacccagaagggaaatggttaaactgagcttgttattgcctcggagagcctaagagcacccgcacacttaattctactccctgtctagaaaagctgtcagggagtcgtttggaattgcaatgtagttattaagggctgttaaccagcctgcattacatctggaagtcaggacttgggtgctgactatgaagggccctgttttcaaaatctaacattgcaagtgtaaatgggcaagaagcctccgttgtgcttttttttcctcttcagtaacttttgcaacattattgcatagaagatccctgaccatttactaggaacctgggttaagcaagcactaatctcttttcctggagatcaaggatgcaacctcaggttgatgaaagaaacagggtttccctggggcccatttagactgtttgcagggcatcactgcttccccctgacacctcacaactagcaaaaattgtctttgtctttggaaattatagagggatttgggtatccagattgtgcagatgcaaacttaggctgtcttgatgcaaacttagaaccacagaaatgcttttaaaatgcctgttttaagatggaattgttgtttttataatttgattttagtgctaaataaatgattggctttgtacatgaa

SEQ ID NO: 91475 - DNA, 3629 bp, Homo sapiens; identical to SEQ ID NO: 82468

SEQ ID NO: 91476 - DNA, 402 bp, Homo sapiens
catgtctctgagacccccactcctaaggaagggggtttggcattgatgggggtgtctgggaagccgagggaggatgcctgccagttatgagaaagatgcatctttgtcgcaaacacatgtggggcgctctatgtaaattgtttcagcgcctaacaggaagaagaaaaatgaggctttgatgcgagccaccacctctcagccaggcgtggtgtcactcaggcgcgtccgaggcctgcttctattaaggagctgtaagctcttctcaggccagagacccagggtgctctctgggcaggaggtggctctgctctgtctgccgaactctgggcgtcagcactggggcgtgctggggcctcaacccatccccacctccaaggcaggcggagagcactgctgatggat

SEQ ID NO: 91477 - DNA, 901 bp, Homo sapiens; identical to SEQ ID NO: 59351

SEQ ID NO: 91478 - DNA, 421 bp, Homo sapiens
  misc_feature (1)...(421): n = a,t,c or g
gtaattttttttacttgctgggcttggtaattcttcaatggacatgaaagctatgacctagagagactatagagtcgctggtaagcgtacgcccgaggccctgggcgtccccactggtagatggtggcgtgtggacgaacagcttagtccttgggcaaagcttgtgctggtcgagagtggcgagtctgggacagagacccaggctgctccctgctgcttccaggctcctctctcttagacttaatgcccaggaaactgagtattttcatcagcagcaaatntacgatctccccttcctccgacagctgcaagagaaagaaccaggcaatgcccatagaaccatcttctttgggggcttttctttctaaggggaagtcatagtttttatttttatttattttattttattttattgtttgag

SEQ ID NO: 91479 - DNA, 1043 bp, Homo sapiens
  misc_feature (1)...(1043): n = a,t,c or g
gaaaatagtattaacccaaattgctgggtctggacccatttatggtatctctaaaggatctcagtgatgatgacaggatcttcagtaacaaggacataaagcagacatagatgtacactcatattcaactagcagatgccaaaaaaagtgttactgttctactgatcttgctgactaagtcaaatgaattgtacattacattatggctatggtatgctgtagctgtaatttttagaaaacctttgacttgtgaaatacaaggaagcagcatacacagaataaaaaagacgggtcacagctatttttatgagtgctcttaaaatttagactaaacagtgaaaagtcccatagaaaaagcagggaggaaagcaaggaaacataaattataggcctgattaccaaaatttatctcaaataaagaagctttccaataaattccatgtaattactctgcaaactgctagaaatccatggttatttaaccatgaacacagctactatcaacgcaacacagttaaaattatgtattagacaagaattgctaaaagataaaatgggatataatcataatcaggctatcaaagtctagctgtgagagcagatataaaaataaataaaggagtgtgatgtatgcagttttctgcttagtaatcaacatattaaatcangaagaaaaagtaatgtattaaactagctctggaataatgagaacaaatacaggaatttaagcccatcaaaatgaagttacatacttangactagggtgactgttacactggttcaacaatctaagaccaaacaagcttggatcatcataacatttggtgtaccgggagaaactgtaagatgataaaatgattgggcagaatacaagcaggtttgggaaaaaaacaaaaaaaagaagacagcgcctgccaaaaactgtactgttttttcacaagggggagaaataatgccctaccgctaaacttggtgaccctttaaaaccgccccagggtccacttattccaagagttcaaaaacccggttttaaaacactttcc

SEQ ID NO: 91480 - DNA, 388 bp, Homo sapiens
cataaaaagagatttctcaaattcataatgaataataaggccccacacttggctcatgaggaaacgcaaggtactatatgttctttcactgagtctcacaggggctcatcacatgcccacattaggcacagaggcaaaatgttgtattgtaagttatcagaatgcacgccgctgctcattatctaaccctcaggaaaacgcctgagacagaccgccaattcatgagattcaactgaaaaaggagtgaaaaacaagaagtccatcatgtgacattggaggccatggcattttcagtggaggaaggagttgaagggttgaagagaaaagctcaatttgcagcctcaccactcgtggaaccatcctacacaggtgttgagatagcgccaaa

SEQ ID NO: 91481 - DNA, 2188 bp, Homo sapiens
tttcgtccgtcgggcagcagcggggctgtctatcccggctgaggacccgcggccagtgcgggtggctggctttgccattagcgggggcctttcctgaggacggcgtacggagtgtggggaatgaaggatggcagcatgccgtgcattaaaagctgttttggtagatctcagtggcacacttcacattgaagatgcagctgtgccaggcgcacaggaagctcttaaaaggttacgtggtgcttctgtaatcattaggtttgtgaccaatacaaccaaagagagcaagcaagacctgttagaaaggttgagaaaattggaatttgatatctctgaagatgaaatattcacatctctgactgcagccagaagtttactagagcggaaacaagtcagacccatgctgctagttgatgatcgggcactacctgatttcaaaggaatacaaacaagtgatcctaatgctgtggtcatgggattggcaccagaacattttcattatcaaattctgaatcaagcattccggttactcctggatggagcacctctgatagcaatccacaaagccaggtattacaagaggaaagatggcttagccctggggcctggaccatttgtgactgctttagagtatgccacagataccaaagccacagtcgtggggaaaccagagaagacgttctttttggaagcattgcggggcactggctgtgaacctgaggaggctgtcatgataggagatgattgcagggatgatgttggtggggctcaagatgtcggcatgctgggcatcttagtaaagactgggaaatatcgagcatcagatgaagaaaaaattaatccacctccttacttaacttgtgagagtttccctcatgctgtggaccacattctgcagcacctattgtgaagcaatgtgtgcatctgaagcaacttgaaatgcagcttcttattgtctggaatgaatcccttaccaactcagtgccagcatcggtagacaccagtcagtgctgatcgctttttaaccctcttttgttgtgcattaattagaaagaaaggtattgaattgcggctagccagtaagccttgctaatctcttttattttgtaactgaagatgagacccaaagaaagggaaagctgagattttgtgccattccttttaaaatattcatcaggttaggtggggctgtgggggaaaagctactacagggaagagtgttctctgctgtctcttcactggaaaacagggaggggggatttcagactgtgaagaaagttgaatggtggtttttaaattataaagtaatgtattaaaaggtgcattaggctgtagttctaatattgagttcaactgtgaaatccatcagatgtgccaaatggagaagacagaaagcaacaaagtgaattgttctttagcccaagtggtacagtgaatttgctttaacagatgttgaaaactaaattttctactgtattcccagcacgggtgacttctttttctcttcattagccagagatgactaatttaaatttagaaccagattttaatttaaattaatatttccattaataacctattcattgcagatacctattatactgtgtaacagttgttttggaaattttatgtaaaattaaaactatcagtattttacagatgttttaattagacattgttattaacaggaacagtgcagaaactagaatcaagccttataatatcttatagaccatgcatttttgaagttagtgtccactagggtcctattaactgtacatttgcaagatttcattatttttgcctctgacactatgggaaaaattttttagaagctattgggacagattcaagcttttatgcacttggttactacagctgtaaaatgaaatctcgtcttgtagcatggattattcttctcatgttaaacccaccaaaataaaggggactaaataggtaatgattttcctagtgcatttgcatactgtgataatcctgggccttgcaatagttctacagggctcttgggcattgaattattaggatgtaattgtacatcattgtagtgttcaccttattgaagctcactctgatgttaatgagcttcgggttttgatgcttgtttagagatcagcagtcttggatgggagggaacaaagctaaataaatgttagtttggtgaaaaaaaaaa

SEQ ID NO: 91482 - DNA, 1332 bp, Homo sapiens
tttcgtgcctgcggcgggctttagggagtggtccctggctgtggatagatctgctgatgagtccaggccccggtccattctcctcgcgctgcaaggatgctcctgggatttcggagaggccgcaggagtcatttcaaacacatcatccatggccttttacctgcagccagcgttgctccgaaggcagctgtgccacgcacacctcctccccgcagccccaacccatctccagagagaccaagatctgctctggcagcagccattctggcgacaacattgactgggcggacggttgctattcctcagcctcgccagaggtcccggtctgagagtgatgtgagcagtgttgaacaggacagcttcatcgagccctatgccaccacctcacagctgaggcctcgaccaaattggcagagtgagatgggaagaagatcttctttgccatcctttgaaacactggactatggggacgaagaggacattgaaactcagctgtcatccagcggcaaggaattgggggatgtcagtgcccgggaggacagaggaggccacagtgatgacctgtacgctgtgccacacagaaatcaggtgccattgttacatgaggtgaacagtgaagacgatgaaaatatttctcatcaagatgggtttccaggctcccctcctgcaccacagcggacacaacaaaaagatggtaaacaccctgttctgaatttaaaggatgaaaaacctccattatgtgagaaacctccaccctccccagatataactggtagagcacgtcaaagatatacagaaataaccagagaaaagtttgaggcattaaaagaagaaaatatggacctaaacaatatgaatcaaagccttacccttgaactaaacacaatgaaacaagcaatgaaagaactacagttaaaacttaagggaatggaaaaagagaagagaaagctcaaagaggctgagaaggcgtcgtcacaggaagttgctgcacctgaattactttatctgcgaaaacaagctcaagaactggtggatgaaaatgatggattgaaaatgactgtccatcgtttgaatgtagaactcagtcgatatcagacaaaattcaggcatttgtccaaggaagaggtaacgtttccgattgtgaaaatcagcttttcagatttttaagcctttactgttgaattgatttccaatcttgagaggttcttatttattataatttgatgtaagaaaagctctgtccaaggcacaatgtttctaaggaccattctgtttcttgcctccttcccttccttcttccccgtaataaaggcaataaagactgttaaaaaa

SEQ ID NO: 91483 - DNA, 754 bp, Homo sapiens
cgtttttcgagtcacgacttcgttgcaagtgctgcgaaccacgtgggtcctgggcgcgtttcgggtgctggcggctacagccggagttcaaacctaagcagctggaagggtaagaggtgttcgggatcctgagaggaaaaagaaaggagtgtagtcgcgggagtgggttaggtgaggagttagtgaagagatgagttcagctctaagaggtggcgaggaggatcggatgggaggaggggcagggagcgcctgtggacaagtgcataccggtcggcgcacgtcccacgccacgtggactcgcctttgtcggtggccgcctttctcgtcaggccgcgacgacagggctgtgccttatttgtgtctgtcgagagcagtgccgggcacggagttggcgctctgtaagtgcttgctgaataaatgacgggtgtgtgtgtcattcattcagcaagcgctgagtgcttactgttgtgtcaccgggaccgatgtggagggacatttttagggtgtatttctggcgctttagtcctgttttctcctggacaatttatgcttgccccgcaccccatcgtgcgattctccgcaggctttgggctttgactctctctctttttttttttttggaagggccaaagggggaaaaaagaattttttttctccaaatgaccggtaagccctggggttaggacccaaaaaagctttaacccggaaaaaattaacctgggggggaggggggggcaaccccccaccaaaaaat

SEQ ID NO: 91484 - DNA, 1915 bp, Homo sapiens
aaattcccgggtcgacgatttcgtctgtcctcggagcaggcggagtgaagggacttgagcgagccagttgccggattattctatttcccctccctctctcccgccccgtatctcttttcacccttctcccaccctcgctcgcgtagccatggcggagccgtcggaggccactcagtcccattccatctcctcgtcgtccttcggagccgagccgtccgcgcccggcggcggcgggagcccaggagcctgccccgccctggggacgaagagctgcagctcctcctgtgcggtgcacgatctgattttctggagagatgtgaagaagactgggtttgtctttggcaccacgctgatcatgctgctttccctggcagctttcagtgtcatcagtgtggtttcttacctcatcctggctcttctctctgtcaccatcagcttcaggatctacaagtccgtcatccaagctgtacagaagtcagaagaaggccatccattcaaagcctacctggacgtagacattactctgtcctcagaagctttccataattacatgaatgctgccatggtgcacatcaacagggccctgaaactcattattcgtctctttctggtagaagatctggttgactccttgaagctggctgtcttcatgtggctgatgacctatgttggtgctgtttttaacggaatcacccttctaattcttgctgaactgctcattttcagtgtcccgattgtctatgagaagtacaagacccagattgatcactatgttggcatcgcccgagatcagaccaagtcaattgttgaaaagatccaagcaaaactccctggaatcgccaaaaaaaaggcagaataagtacatggaaaccagaaatgcaacagttactaaaacaccatttaatagttataacgtcgttacttgtactatgaaggaaaatactcagtgtcagcttgagcctgcattccaagctttttttttaatttggtgttttctcccatcctttccctttaaccctcagtatcaagcacaaaaattgatggactgataaaagaactatcttagaactcagaagaagaaagaatcaaattcataggataagtcaataccttaatggtggtagagcctttacctgtagcttgaaaggggaaagattggaggtaagagagaaaatgaaagaacacctctgggtccttctgtccagttttcagcactagtcttactcagctatccattatagttttgcccttaagaagtcatgattaacttatgaaaaaattatttggggacaggagtgtgataccttccttggtttttttttgcagccctcaaatcctatcttcctgccccacaatgtgagcagctacccctgatactccttttctttaatgatttaactatcaacttgataaataacttataggtgatagtgataattcctgattccaagaatgccatctgataaaaaagaatagaaatggaaagtgggactgagagggagtcagcaggcatgctgcggtggcggtcactccctctgccactatccccagggaaggaaaggctccgccatttgggaaagtggtttctacgtcactggacaccggttctgagcattagtttgagaactcgttcccgaatgtgctttcctccctctcccctgcccacctcaagtttaataaataaggttgtacttttcttactataaaataaatgtctgtaactgctgtgcactgctgtaaacttgttagagaaaaaaataacctgcatgtgggctcctcagttattgagtttttgtgatcctatctcagtctgggggggaacattctcaagaggtgaaatacagaaagcctttttttcttgatctttttcccgaggtttcaaatctccgattcccatttggggaaaagatcaaga

SEQ ID NO: 91485 - DNA, 6118 bp, Homo sapiens
gaattccgtgggcggaggtctgggatctcctggctgttgctgtcttctgctctcatcctgcaggtgggactctcagctgacaccatgagtagtgacactgaaatggaagtgttcggcatagctgctcctttcctccggaagtcagaaaaggagaggatcgaggctcagaaccagccctttgatgccaagacgtattgcttcgtggtggactcaaaggaagaatatgccaaggggaaaatcaagagttctcaggatgggaaggtcactgtggaaactgaggacaacaggaccctggtggtcaaaccagaggatgtgtacgccatgaacccccccaagttcgacaggatcgaagacatggccatgctgacgcacctgaatgagccagccgtgctgtacaacctgaaggaccgttacacatcttggatgatctatacctactcaggcctcttctgtgtcactgtcaacccctacaagtggctgccggtgtacaaccccgaggtggtggaaggctaccgaggcaaaaagcgccaggaggccccaccccacatcttctccatctctgacaacgcctatcagttcatgctgactgatcgtgaaaaccagtccattctgatcacgggagaatccggggcaggaaagactgtgaacaccaaacgggtcatccagtactttgcaacaattgcagctactggggacctggccaagaagaaggactccaaaatgaaggggactctggaagatcaaatcatcagtgccaatcccctgctggaggcctttgggaacgccaagactgtgaggaatgacaactcctcccgttttggcaagttcatccgaatccattttggaaccactgggaagctggcctctgcagatattgaaacttatcttctggaaaaatcaagagtcactttccagctgaaggctgaaagaagctaccacatcttctaccagattctttctaacaagaagcctgagctcatagagctgctgcttattacgaccaacccttacgactacccgttcattagccagggggagatcctggtggccagcatagatgatcgagaggagctgctggctacagacagcgccattgacatcctgggcttcaccccagaagagaaatctgggctctacaagctgacgggagccgtgatgcactacgggaacatgaagttcaagcagaagcagcgagaggagcaggccgagccggatggcacagaagtggctgacaaaacagcctatctgatgggcctgaactcttcggacctcctaaaagctttgtgctttcctagagtgaaagttgggaatgagtacgttaccaaaggtcaaactgtggatcaggttcaccatgctgtgaatgctctttcaaaatcagtttatgaaaagttgttcttgtggatggtcactcgcattaaccagcaactggatacgaagcttccaagacaacacttcattggtgttttggacattgcaggctttgaaatctttgagtataacagcctggagcagctgtgcatcaacttcaccaatgagaaactgcaacagtttttcaaccaccacatgttcgtgctggagcaggaggagtacaagaaggaaggcatcgagtggacgttcattgacttcgggatggacctggctgcctgcatcgagctcatcgagaaggtatccagttccatccccacccctatgggcatcttctccatcctggaagaggagtgcatgttccccaaggcaacagacacctccttcaagaacaagctgtatgaccagcatcttggaaagtccaacaacttccagaagcccaaggtggtcaaaggcagggccgaggctcacttctcactgatccactatgcgggcaccgtggactacagtgtctcaggttggctggagaagaacaaggaccctctgaacgagactgtggttgggctgtaccagaagtcttccaacaggctcctggcacacctctatgccacgtttgccacggcggatgctgacagtggaaagaagaaagttgccaagaagaagggttcttccttccaaactgtctctgcccttttcagggaaaacctgaacaagctgatgtcaaatttaagaactactcaccctcattttgtgcgttgtataattcccaatgaaaccaaaactccaggggctatggaacacagccttgttctgcaccagctgcggtgtaacggtgtcctggagggcatccgcatctgcaggaaagggttcccaaacaggattctctatggagattttaaacaaagataccgagtgctgaatgccagtgcaatcctggagggacaattcattgacagcaagaaagcctgtgaaaagcttctggcatccattgatattgaccacactcagtacaaatttggacataccaaggtgttcttcaaggctggcttgctgggaaccctggaagagatgcgggatgaccgcctggccaaactaatcacccggacacaagctgtgtgcagagggttcctcatgcgtgtggaattccagaagatggtgcagaggagggagtccatcttctgcatccagtacaacattcgctcattcatgaacgtcaagcactggccctggatgaaactcttcttcaagatcaagcccctcctcaagagtgcagagactgagaaagagatggccaccatgaaggaagaattccagaaaaccaaagatgaactcgccaagtcggaggcaaaaaggaaggagctagaggaaaaactggtgactctggtccaagagaagaatgacctgcagctccaagtacaagctgaaagcgaaaatttgttggatgctgaggaaagatgcgatcagctgatcaaagccaaattccagctcgaggccaagatcaaggaggtgacagagagagctgaagatgaggaggagatcaatgctgagctgacggccaagaagaggaaactggaggatgaatgctcagagctcaagaaagacattgatgaccttgagttgaccctggccaaggttgagaaggagaagcatgccacagagaacaaggttaaaaaccttactgaggaactctctgggttagatgaaacaattgcaaagttaaccagagagaagaaggccctccaagaggcgcaccagcaggccttggatgacctccaagctgaagaagacaaagtcaattctttgaacaaaaccaagagcaaactggaacagcaagtggaagacctggaaagctccctagaacaagaaaagaagctccgagtagacctggaaaggaacaaaaggaaattggaaggagacttgaagcttgctcaagagtccatattagatctggagaatgacaagcaacagctggacgaaaggctcaagaagaaagattttgaatattgtcaacttcaaagcaaagtggaagatgagcagacactgggcctccagtttcagaagaaaatcaaagagttgcaggctcgaatcgaggagctggaagaggagatagaggcggagagggccacccgcgcgaagacagagaaacagcgcagcgactatgcccgggagctggaggagctgagcgagcggctggaggaggcgggaggcgtcacctccacgcagatagagctcaacaagaagcgggaggcggagttcctgaagctgcgcagggacctggaggaggccacactgcagcacgaagccatggtggccgcgctgaggaagaagcatgcggatagtgtggccgagcttggggagcagattgacaacctgcagcgggtcaagcagaagctggagaaggagaagagcgagttcaagctggagatcgatgacctctccagcagcatggagagtgtgtcgaaatctaaggtgctgcgcggggcaaatctggaaaaaatctgccgaaccctggaggatcagttaagtgaggccaggggcaagaatgaggaaattcagaggagcctgagcgagctgaccacacagaagtctcgtttgcagaccgaggctggtgagctgagtcgtcagctggaagaaaaagaaagcatagtatcccaactttccaggagcaagcaagcctttacccagcaaacagaagagctcaagaggcagctggaggaagagaacaaggccaagaacgccctggcgcacgccctgcagtcctcccgccacgactgtgacctgctgcgggaacagtatgaggaggagcaggaaggcaaagctgagctgcagagggcgctgtccaaggccaatagtgaggttgcccagtggagaaccaaatacgagacggacgccatccagcgcacagaagagctggaggaggccaagaaaaaacttgctcagcgccttcaagattccgaggaacaggttgaggcagtgaatgctaaatgtgcttcactggagaagaccaagcagaggctgcaaggagaggtggaggatctgatggttgatgttgaaagagccaattccttggccgccgctctggacaagaagcagaggaactttgacaaggtgttggcagagtggaagacaaagtgtgaggagagccaagcagagctggaggcatccctgaaggagtcccgctccttgagcactgagctcttcaaactgaaaaatgcctacgaggaagccttagatcaacttgaaactgtgaaacgggaaaataagaggttagagcaggagatagcagatctcacagaacaaattgctgaaaatggcaaaaccatccatgaactggagaaatcaagaaagcagattgagctggaaaaggctgatatccagctggctctcgaggaagcagaggctgctcttgagcatgaagaagccaagatcctccgaatccagcttgaattgacacaagtgaaatcagaaattgatagaaagatcgccgagaaggatgaagagatcgagcagctgaagaggaactaccagagaacagtggaaaccatgcagagcgccctggacgccgaggtgcggagcaggaatgaagccatccggctcaagaagaagatggagggggacctgaatgaaatcgagatccagctgagccacgccaaccgccaggcggcggagaccctcaaacacctcaggagtgtccagggacagctgaaggatacgcagctccacctggatgatgccctccggggccaggaggacctgaaggagcagctggcgattgtggagcgcagagccaacctgctgcaggccgaggtggaggagctgcgggctactctggagcagacggagagggcccggaaactggcggaacaggagctcctggactccaacgagagggtgcagctgctgcatacccagaacaccagcctcatccacaccaagaagaagctggagacagacctcatgcagctccagagtgaggtagaagatgccagcagggatgcaaggaacgctgaggagaaggccaagaaggccatcacggacgctgccatgatggcggaggagctgaagaaggagcaggacaccagcgcccaccttgagcggatgaagaagaacctggaacagacggtgaaggacctgcagcatcgtctagatgaggccgagcagctggcgctgaagggcgggaagaagcagatccagaaactggagaccaggatccgagagctggagtttgaacttgagggagagcagaagaagaacacagagtctgttaagggcctgaggaagtatgagcggagggtcaaggagctgacgtaccagagtgaagaggacaggaagaatgtgctgagattgcaggatctggtggataaactgcaagtgaaagtcaagtcctacaagaggcaggcggaggaggctgatgaacaagccaatgctcatctcaccaaattccgaaaggctcagcatgagctggaggaggccgaggaacgtgcggatatcgcagaatctcaagtcaacaagctccgcgctaagactcgagacttcacctccagcagggtgagtcgctgagctgggaggagcccccctccagggactgtagaaacttcttagctggaaggaacctcagagaaccctttactttagagctggggagtctcaggctcaggaagagaaagtgcttaaagtcacttagctgactggaccctcgctagaatcctggtctgtgagtcacaataaaaaccgccatcctgcacatgtaccg

SEQ ID NO: 91486 - DNA, 853 bp, Homo sapiens
ggcagaacacaagatgttctggtcctgactttcccctgaataaaatctgcactaactaacaccgaggcatagccaaacctcacctccagatcaaattggctgaaataggcagggttccaatttgtgatggtcatttatttttaatggcctttctattccctgaaatgtagacaaatttgccctttgctgcctcattgcagtggaagagcctcatacctgtgtgcagagctgatgatgaaaggcatctatgtgtgtatgtgtgttgtagataaatagtgtattaactatgtgtaattccttatttcaaagtagcattttatgggtgagttttgcaataaatcttcaacgcttaatgctcactatgtcttgcttcatttgatatcactgaaaatgcagagggtcaggccacattcactctgtctctccctggcatgttaggttgccttctagagctctgtgtttcacaaatcattttgatgtagagactgtggagaaatattctcaggctttatcactgctgacttaattgagtttcatgatgcgcttttttttttttcattgtgggataaattaaaaggggttgaaaaacctgcccgaaaaaccaaaattggaagggtaaacccgccctggggttttaaaggaatggaaaagggattttgccccccattttaaaaccacttttttaaacgccccagggggttttatttcccagaaaattgcgcaaaaaactggcttttttggccccccccccatatttcctttttaaatcccttttggaaacccccccggaacaggatttaaaaggggcccaattttttcccccctattttcctttgttggaaataaaattgcg

SEQ ID NO: 91487 - DNA, 3432 bp, Homo sapiens
agcggccgccgcgcgccagcgggaggcgctccctctgcccacctccgccccctgcggaccgagacccggagatgtcgagttgtggagttcggctcggcccggcgacgggctagctgcccgggaacccccgcgggtggacacatgcatgccggagctccgggaggggccgcgccgccaccgtctgaactaggatgtcccgacatgaaggtgtcagctgtgatgcatgtttaaaaggaaattttcgaggtcgcagatataagtgtttaatttgctacgattacgatctttgtgcatcttgttatgaaagtggtgcaacaacaacaaggcatacaactgaccacccaatgcagtgcatattaacaagggtagattttgatttatactatggtggggaagctttctctgtagagcagccacagtcttttacttgtccctattgtggaaaaatgggctatacggagacatctcttcaagaacatgttacttctgaacatgcagaaacatcaacagaagtgatttgtccaatatgtgcagcgttacctggaggcgatcctaatcatgtcacggatgactttgcagctcatcttacacttgaacacagagcccctagagatttagatgaatcgagtggtgttcgacatgtacgtagaatgtttcaccctggccggggattaggaggtcctcgtgctcgtagatcaaacatgcactttactagcagttctactggtggactttcttcttctcagagttcatattctccaagcaatagggaagccatggatcctatagctgagcttttatctcagttatcaggagtgagacgttctgcaggaggacagcttaattcctctggcccttccgcttctcagttacaacaactgcagatgcagctgcagctagaacggcagcatgcccaggcagcacggcaacaactggagaccgcacgcaacgcaacccggcgtactaacacaagcagtgtcaccactacaatcacacaatccacagcaacaaccaacatagctaatacagaaagcagtcagcagactctacagaattcccagtttcttttaacaaggttgaatgatcctaaaatgtctgaaacggagcgccagtccatggaaagcgagcgtgcagaccgcagcctgtttgtccaagagctccttctgtccactttagtgcgtgaagagagctcatcctcagatgaggatgatcggggggagatggcagattttggtgctatgggctgtgtagatattatgcctttagatgttgctttagaaaacctaaatttaaaagagagtaataaaggaaatgagcctccaccacctcctctttgatgacatcccaattcgcagacaatgtcctctgtgctgtatttgccaatgaaagtggacaacaactatcttgggtttgtttggtgattgtaatttcaggtctgtcactcttgttacattgtgtacattcaaaaggaagagagaaaatatatatgataatcatttccacttaactaatttttacttctagcaggtaaatgtaggtagcagtgcaggggtgatctctgcttcctgtaccttgacatgcaaaaggctctcctaatactccacattcaaactgaagaggaaaattgaaatctctaatgaagctgctgtgtgtatttatgaatattaatgaataaaaactgcttggatggtttaccttaactactgcatgaggttttttgcagcgtgcatgagttttagtgaccttgttatttaagaagttaaatacaaggagtaaaacttaaaaaaaaaatacaaagcccaaagctttcccaaacattattcaatggttacacgacgaagtaggcttttgaataatgtctgcctgaatcacctttctttgtgtgcctcctacgcacaaagccagctctgcagtgggaatctgggggattatagccgggtgtggcactccgccctgtgtgactgtcctgtcgccctgttagtcatcttgcctgtgtggagctcagcctgtctctttaactcatctgtagaagacacaccagtaaagctactgttggaatctgctgcaggggcctttgtgtgccctaaaaacaaatcctgttcatgtttgtttaaagtttttactttttgtggttgtttaaaattttttcaattgttaaatatgttttattcaggtgtagatgaatttcatttattgactgttcaacagagttaacctgaattatgttgtctttgtttttaaaaatctcacattctcaatcatattttgcattatttatgtatttgctttgtagtttgctgagacagatcagtatcaggggagctttgaggatttgccttcccagatttgtcagtatattacaaccaaattcttaatgctaattttagcaccttttatttattgggttttttctggcataaaaagtaaagccttttaattgaatcatgccacctatatgcctatattattaatcctatgtgtaaaaaaaatgtacagctttttttgggtttgttttggggtttggaagggccgggttattttttatttcctgtttcagtttttgtgcatagactttcacaatagctccaaggcagggacagcgggtttgggggttgggagggcagtttttggaatgtaaatttaggacttttaaaaaggtgcgcacagcttctgataaatttataactagacttaacctaatcatgtctcgttccagttctcttttctctgagcccttttcaaagtctcctctctttctcctgtcatccttttcctttcctgtccgtgtatctccgtttcttcaacatgacaagcatacagacttgaacacccctccggtgttcttccgagaactgtgaagtccatgttcatccaaatgtaaccaaaaaagaagtcaccctacatgtctgaaaaactgttgcttctcctctgaaacttcaaactccaacgatttccaaatacaatagctttgttttctttagttctgtaatggataatgtttaaaggaaaactttacaccaggcttctggttacactagaagtcaagcccattagggattttcattttttttcatttggttgttgagaagtttcaaaaatcagttttcaagctgtggtctttcaaacacatctgcacataagtcacacatttcaataaagcattttcaagactgttgaccacttgaatttctttggtgttagtggattaacctaaccattactctgagattttatatctctaatccagtattttttttctttttatgctaaacatgggagatcctggttttgtgtgaatgcattattttggatgtgagaaataaatgccaattatatgtactttcccttttctgcacaaattctgggaaaatgtaaaagccttcattttttaacatggttttagggaacaactgtaagtccattcagagcagg

SEQ ID NO: 91488 - DNA, 5273 bp, Homo sapiens
cggacgcgtgggcactcacaaaccagttctcagatagtaaacagcacattgaagtgttgaaggagtccttgactgctaaggagcagagggctgccatcctgcagactgaggtggatgctctccgattgcgtttggaagagaaggaaaccatgttgaataaaaagacaaaacaaattcaggatatggctgaagagaaggggacacaagctggagagatacatgacctcaaggacatgttggatgtgaaggagcggaaggttaatgttcttcagaagaagattgaaaatcttcaagagcagcttagagacaaggaaaagcagatgagcagcttgaaagaacgggtcaaatccttgcaggctgacaccaccaacactgacactgccttgacaactttggaggaggcccttgcagagaaagagcggacaattgaacgcttaaaggagcagagggacagagatgagcgagagaagcaagaggaaattgataactacaaaaaagatcttaaagacttgaaggaaaaagtcagcctgttgcaaggcgacctttcagagaaagaggcttcacttttggatctgaaagagcatgcttcttctctggcatcctcaggactgaaaaaggactcacggcttaagacactagagattgctttggagcagaagaaggaggagtgtctgaaaatggaatcacaattgaaaaaggcacatgaggcagcattggaagccagagccagtccagagatgagtgaccgaatacagcacttggagagagagatcaccaggtacaaagatgaatctagcaaggcccaggcagaagttgatcgactcttagaaatcttgaaggaggtggaaaatgagaagaatgacaaagataagaagatagctgagttggaaagtctcacctcaaggcaagtgaaagaccagaataagaaggtagcaaatctgaagcacaaggaacaggtggaaaaaaagaagagtgcacaaatgttagaggaggcgcgacgacgggaggacaatctcaacgacagctctcagcagctacaggacagtctccgtaagaaggatgacaggattgaagagctggaagaagcactaagagaaagtgtacagataactgcagagcgggaaatggtgctagcacaagaggaatcagccaggaccaatgctgaaaaacaggtggaggagttactgatggccatggagaaggtaaagcaggaactagaatccatgaaagcaaagctgtcctccacccagcagtctctggcagaaaaggaaactcacttgactaatcttcgggcagagagaaggaaacacttagaggaagttctggagatgaagcaagaagctcttctggctgccattagtgaaaaagacgccaatatagctctcttggagctttcgtcctctaagaagaagacccaagaggaagtggctgccctgaagcgggagaaggatcgtctggtacagcagcttaagcagcagacgcaaaatcgaatgaagctaatggccgacaactacgaggatgaccacttcaaatcctcccattccaatcaaacaaatcacaagccctccccagaccaggatgaggaggagggtatatgggcatagccaatcagaggcttagttcagccattttgttcagaacgatcatccagcccctcttagaacttgaccaaaatagaagtaaattaaagttgtacattggacacctgacaaccctctgccatgaccgagaccccctgatcctccgtggactcactccaccagcttcctataacttggacgatgaccaggcggcttgggagaatgagctgcagaagatgacccgggggcagcttcaggatgagttagagaaaggtgaacgggacaatgcagaactgcaggagtttgccaacgccattcttcagcagatagcagaccattgtcccgacatcctagagcaagtggtcaacgccctggaagagtcctcttgaccctgctttatggggaagcctgaggtagtcaacccaggagccaagaaaagagaactacgaggaacaggtgcccggaaccttcttggcaccaaacactacaaacttcatcccaacttgctcacttgaagaagtgtgattccagcaccgtttctacatctgccatcttactctgcctttctgctttggatgtggtctctacactaaccttcttgatgtccagggtagataaagggtcgaatctctctgaagaactgccacctggtcatcagcagtggagaactgtgggagctggtggctctgccctgacagagagccatggagcagaggagcctctcacctcctgtcctctgacatgagaatgaaaccaggaatggacttggagttcaacaggctgagaggatgcctccaatggaccagagagctgagtgttctaatatcacaataggtgctttctcctaaaagggcaaaaaacaatctcaaaaagattagaaaaagagaaggggggaagggaagagaaaatcgactcttctttttactgtctcttctgcttactttccacatgagatgctttgtaccggggagctgtgagcaggcctcacgatggcttgggagcactcgttctcccaaggtctgagtcttcatccagccctgcctgtctgtcgcagccttcctcactctgttcctcggccagttaacaagaagatggtgtgaggtgttctctaccagtctctcctgtttgagactgttgacgttatcatactgaggtgttagatcaaatatctctaattgaagaacatgtgaggttgaaagagcaccagccagggcaacatagcgtgaccctgtctctacaaaaaattaaaaagagaacatacaaagttgacatatgagaccctgttgtccccgcctgcagctttgccccagtaacaaatgcccgttgctcttgggctggtttcccctgaacacctccaagaggctgcctgccttgccagcacccgtgtcctgagctcctgcagcccagtggctgctgaagttgtgatccctcactcaccctgctagctttgcccttgactcgtcttctctgaacctcagcctcgtgcattgcctggaaccttcttctagcataaatgaaggtttttcctcctacacacattccttcctcggttatttcattcagagaatatttatgaaatgcctactgtgtgcaagtcatccatccttgaaaaggccacttctcagtgagggagagatgtagtggattctgtgagacatacctgctggagttgaagcagtaaatagcatgtccttcccctccccgatcttaaggtgtgttttctagaaaagttccctaatggaattcatgagtttgggggtctcagtcacccgcttgcctgtaggattccatttgatgattctggatttttgctgtttgttattgcccttagaggggctctgagtatctacttgtgggtggccatttcctgacatctgcatgtacctcgtggaattcagccagcttcatgttgcaaatcagaaagctgaccccaagactgcaaatcaatgaaggtattggcattgttaaggtcgtagcgtagacaacagcagtcataaataattaggcaggaacttaacccaaatctagttctttgaccacctctaccaccagaacccagcagacactcacatctcctgataagagttgctggactcgatgtttttgttttgcattttctcctctccttccccacttactcagagaatttaaagtctgtagagtcagcacagccccatcagtccaggaacttcccaccaccagcccttgactgtcccattaactgacatggtcagatttccagctccccctactccctgctgtgaaacaatccctctccctgtgagaggaaactgtggagcgtttcttatcgaaggttaaatggactctgctcataaacctcttactgagatgcttcctgatagccaggctggccagagaggggtgcaggggttagatagtaagtggtggtcgtttgtggtcagttacctcaattctgttcattgcagtgcccgtaaaccatgtagaaagctcccagcactgaaaggcaggagtgttagcatctcgctttatccaccataacgtaaagaactgcggtgtgataacaagccttcacggggccacggtggaaccaagacagcaggcgaggccatgcctaaaacaagttggtctggcacgggcactggccagctgctctctccaagcaggtggcccagatcccacccacgtggactttctcatcaggtgcagcgcctgccactctcagccactgggtgtgtcactctcctcttcatctcagcattctccatcacttcccctccagaaaaacggatggaaggaagccctctgtgacactgcttctgagaagaagcatttccgggaccgatatcatctgtctggtctctgtgaacagcaaggaatcttcttgaccgttcttgggcactggaggctggttaggagttcagtaataaacgtggccttcgtgctgtagggcagagtggatgcagtttgtagctttcagagtgtctcattgagtctagatcattgaaccaacacttaaccaaatgtcccactcccatcacactaggacttgtcattccatgcccctctcctagtggtcatggtttcatatgggcatacaactgctactgaagttatatagccttgaaaactcagtgcaggttgcccttaattttccccaaacccctccatcggcaagtctagttgccctttagcacctaaagatctgcaccccaaaccaatgtcaccataaagagggcacgaagaagagtgggtgtgatcccaacggggttttgtaactgaagaagcccagtgtgagcttctcatcttttcatatacctctaacccccggtactcattgaatcattgatgaggtatctcaattgagatttgcaaggactttgataccatttgaaatggaaaaattttgaacgggctttaacatgtttaagaaatatggatggggccggccacagtggctcacgcctgtaatcccagaactctggaaggctgaggcaggcggatcacctgagatcaggagttcgaggccagcctggccaagatggcaaaaaccccgactctactaaaaatacaaaattagccaggcgtggtggcgtacgcctgtaatcccagctactcaggaggcaggagaatcgcttgagcctgggaggcagaggctgcggtgagccgagatcgtgtcactgcactccagcctgggtgacagagactccattt

SEQ ID NO: 91489 - DNA, 2811 bp, Homo sapiens
ggggctcggagacccagcacctgccccgggacccccagcacctgccctgggacccccagcagcaccaggaccgccgccgccctgagcttttccacgcctttgcccgggactcagctcctccgcccagcatggtcctggcggcagagaccacgtcccagcaggagcggctgcaggccatcgcagagaagcggaagcggcaggcggagatcgagaacaagcgccggcagctggaggacgagcggaggcagctgcagcacctgaagtccaaggcactgcgggagcgctggctgctggaggggacgccgtcctcggcctcagagggggatgaggacctgaggaggcagatgcaggacgacgagcagaagacacggctgctggaggactcggtgtccaggttggagaagggaattgaggtgctggagcgtggagactccgccccagccgctgccaaggagaacgcggcggccccgagcccagtccgggccccagccccgagtccagccaaggaggagcgcaagacagaggtggtgatgaattcacagcagacgccggtgggcacgcccaaagacaagcgagtctccaacacgcccctgaggacggttgacggctcccccatgatgaaggcagccatgtactcggttgagatcactgtggagaaggacaaggtgacaggggagaccagggtgctgtccagcaccacgctgctccctcggcagccgctccctctgggcatcaaagtctacgaggacgagaccaaagtggtccatgctgtggacggcaccgccgagaacgggatccaccccctgagctcctccgaggtggacgaactcatccacaaagcggacgaggtcacgctgagcgaggcagggtccacggccggggcggcagagacccggggggctgtggagggggcagcccggaccacgccctcccggcgggagatcaccggtgtgcaggcacagccaggcgaggccacgtccggcccgccggggatccagcccggccaggagcccccggtcacaatgatcttcatgggttaccagaacgtggaggatgaggccgagaccaagaaggtgctgggccttcaagataccatcacggcggagctggtggtcatcgaagacgcggctgagcccaaggagcctgcaccacccaacggcagtgctgccgagcctcccacggaggccgcctccagggaagagaatcaggcggggcccgaggccaccaccagcgacccccaggacctcgacatgaagaagcaccgttgtaaatgctgctccatcatgtgagccggcccccgagaccccggcccccaccccacaccacagacacccaccagcccggcccctcccggcgcctgcccaccctccacccacaggctcacgggtccaggacttggcgtgttgttacatgttccttccgagttttctttcgctggaaagagggacaggggcccccacccgtcaccacgccccaacactccccccgaaccagagccgtgcacttgtgcctggtaggagagagacaggacagacccgcttttcccgagacaaggaccccccatgtcacggcagcttcacagacgcggctcgcgcccaccggggtcctggcgggtgggacccgcggcctccacgcggcccaggccagcctgccaccctctgggcctcctacctgtgcctttctctgaggggacaccccgccagagagggccccgggagccgggggtgggtactgaggcctgctcaggccctggaagtgaggctctatggggttccctggccaaggcgctggccccccaatctcaggcagttggggtgaggccgtgcctctttgggggctaaaggtcttgggtggaggacaggcccctctgctgtgcccctatgccctgtgtgggcccaaccagtggacaatggagtctgggggagggggaaccccggggacatgcccccacccgggaggggccggtaacccctgggctatcttctagacggggcgaaccaggggtcattgacctgccccctgcacagggcagggaccgagtgagccactccttgtcccgagctcccgcccccactgggccctccttcctcctggtgctaatttggggaccccaggggccgcccccggcctcttctccatcctgcttggaccagggtcctgggtcttcccaaccataccccgagatcaggccccacctgccagctctactgggcttggagcacgtccgggcagtggagggagggacacagcctgggacaggaagcctcttgggttggagcaggagaccctcatttgccacccagaccaatgtgagcctgcccccagccccctctcattggaagtggcaaggggcttccctcctgggggcagctacactcgtccccagaggcacattcgtgcacattctcacagacaccgtctcacacgttggctttggacaaccaggccccaacttggtccctgccctagggacctccagcctggtgcccagtgctcaggccacctcctggtccagtcaccacctgcagcctcggcagggcaggtacaggggccacctcggatgggagcctgggtccctgcctccgctctgcccctgggtggctgggaggagaggccctctcgggggtgacctgggcgtcagccgtggaaccccctcctcctccctggagtctgcctgagtccctcgagccgcgagccttcgctgaagtgcccttgctataaccccctctgcttctggtgtgtgacgaggcccccgatgttcttgattttcccagagaagcaaataaacagcgtgaacagccccaaaaaaaa

SEQ ID NO: 91490 - DNA, 1931 bp, Homo sapiens
gaagtttgcaggagacccgcgctgcctaggcaaagggacccggcgaccaagacacccccgcaagggcccagggcgcgtccctcccgccaggccccagactccggctctgcgccaccccctcctacgccccggcgcgggcgcagccagtccggcttcctccaggcccccaagtcccggaccgagtgtggggccgcctctccctctcggaaggagccatcgccgctttaagtggaagaggagaggaagggggcgggggagcggggggcggggagcggaggcggaggagggggagggggatccccctggctcccacgtggtccgggcgcctgtgaatcgcgcccaccggagggtctcacagcgaaatacaaaagcagctgggaagcggcggggactcgagttcccagcgccgggcggagcgccggacagagccccgcagcgccccgcggccgcgatggggccgaagcgcccgaagccccggagcccacaaactgccgggcccgcctcgccgccgggacccgggtgcctgggctcggcttgaagcggcggcggcgcaccggcacagccgcgggagcatgggcaggaggatgcggggcgccgccgccaccgcggggctctggctgctggcgctgggctcgctgctggcgctgtggggagggctcctgccgccgcggaccgagctgcccgcctcccggccgcccgaagaccgactcccacggcgcccggcccggagcggcggccccgcgcccgcgcctcgcttccctctgcccccgcccctggcgtgggacgcccgcggcggctccctgaaaactttccgggcgctgctcaccctggcggccggcgcggacggcccgccccggcagtcccggagcgagcccaggtggcacgtgtcagccaggcagccccggccggaggagagcgccgcggtgcacgggggcgtcttctggagccgcggcctggaggagcaggtgcccccgggcttttcggaggcccaggcggcggcgtggctggaggcggctcgcggcgcccggatggtggccctggagcgcgggggttgcgggcgcagctccaaccgactggcccgttttgccgacggcacccgcgcctgcgtgcgctacggcatcaacccggagcagattcagggcgaggccctgtcttactatctggcgcgcctgctgggcctccagcgccacgtgccgccgctggcactggctcgggtggaggctcggggcgcgcagtgggcgcaggtgcaggaggagctgcgcgctgcgcactggaccgagggcagcgtggtgagcctgacacgctggctgcccaacctcacggacgtggtggtgcccgcgccctggcgctcggaggacggccgtttgcgccccctccgggatgccgggggtgagctggccaacctcagccaggcggagctggtggacctagtacaatggaccgacttaatccttttcgactacctgacggccaacttcgaccggctcgtaagcaacctcttcagcctgcagtgggacccgcgcgtcatgcagcgtgccaccagcaacctgcaccgcggtccgggcggggcgctggtctttctggacaatgaggcgggcttggtgcacggctaccgggtagcaggcatgtgggacaagtataacgagccgctgttgcagtcagtgtgcgtgttccgcgagcggaccgcgcggcgcgtcctggagctgcaccgcggacaggacgccgcggcccggctgctgcgcctctaccggcgccacgagcctcgcttccccgagctggccgcccttgcagacccccacgctcagctgctacagcgccgcctcgacttcctcgccaagcacattttgcactgtaaggccaagtacggccgccggtctggggacttagtgtcaccgggaggaaaagagagagatctggggctggggtatgga

SEQ ID NO: 91491 - DNA, 373 bp, Homo sapiens
ggatttccaatatctctgtaattttggtgttggcatctgttgattggccttttctatttaaattatagttttcctggtgtttggcatgataaatgatttttttatttgaaacttgaacattttgagtactatggtattgccaagtggagttaaaaggtcggcctctctacttggcctctctacatctgtgagggagaagcagcttcttgttattgctgagtggatatgggagttctggctcctttctggacattaactgataccaccctgactagaggagtaggagttccttatactgttccccacataatctctactgacaccaaatgattcttcttcagtggatagagaaaatgttcttagtactattatt

SEQ ID NO: 91492 - DNA, 3053 bp, Homo sapiens
gagttgagcactttctgcagtacttaagagtgtccagggaagatgtgggagtcagacccgttaagcaggggagagacggtggagactggatgaactggacagtgggggtagggagaaagggagtggccgtgttcctgcggtccgctgggatccggcaggtccagggtgaaggagatggggctggagaggctgagcagtccgggttcgctgtccgccacttcggcgcggaatcagagcaggacttgctgagccctcctaccgctccctttccccctccccctctgtcttcccttctgtttccttttccctccccctggagctgtagcggcagcagcagcaggaagccgagccgggttgagcgactcggaggcgagcggaggagctggaatatggggatggctatggagcaggcgggcaccagacctgcggcgacagagcatccacggctccggcggcccatgccctggctgctgctactgcctctcctgctgctgttgctgctgctgctacctggcccagcggcctcccagctgcgatactctgtgccagaggagcaggcacccggcgcgctcgtgggcaacgtggctcgcgcgctggggcttgagctgcggcgcttggggccgggttgcttgcgcatcaaccatctgggtgcgcccagtccgcgctacctggagctggacctgacgagtggagcgctcttcgtcaacgagcgcattgatcgggaggcgctgtgtgagcagcggcctcgctgcctgctcagcctggaagtgctggcgcacaaccccgtggcggtgagcgccgttgaggtggaaatattggacatcaacgacaactcaccgcgtttcccgcggcccaactaccagcttcaggtaagcgaatcggtggcgcctggagcgcgctttcacatagagagtgcgcaggaccccgacgtgggcgccaactcagtacagacctacgagctcagccccagcgagcacttcgagctggaccttaagcccctgcaggagaacagtaaagtgcttgagctggtgctgcgtaagggcctaaaccgggagcaggcagccttgcaccacctggttctcacagccgtggatgggggcatcccagcccgctcgggtacggcacagatctctgtgcgtgtcctggacactaacgacaactctcctgcctttgaccagtccacttatcgcgtccagctacgggaggactcacccccaggcacattggtggtgaagctgaatgcctcagacccggatgagggctccaatggtgagctcaggtactccttgagcagctacacgtcggaccgggagaggcagctcttcagcatagatgccagtaccggggaagtgcgagtaattggggggctggattatgaggaagcctcctcctaccagatctatgtgcaggcgactgaccggggtccagtgcccatggcaggtcactgcaaggtgctggtggacatcgtggacgtgaatgacaatgccccagaggtggtgctcacggacctgtatagcccagtgcctgagaatgctacacccaacaccattgtggccgttctcagtgtcaatgaccaagactcaggccccaaccggaaagtgagcctgggtctggaggccacactgcctttccgactgaatggctttggaaactcctatacactggtggtgagcggcccactggaccgagagcgggtggctgtctacaacatcacggtgacagccacagatgggggaataccgcagctcacatccctgcgtacactgaaggttgagatctctgacatcaatgacaatccaccaagcttcctggaggactcctattccatctacatacaggagaacaatttgccaggtgtgttgctctgtactgtgcaagccacagacccagatgaaaaggagaatgcagaggtgacctactcccttctggagagggagattcaagggctgccagtcacctcctatgtctccattaacagtgccagtggcagcctttatgctgtcaactcctttgactatgagaagtttcgggagttctttgtgactgtggaggctcaggacaaggggagcccaccactgagcagcactgtgactgccaacgtatatgtggtggacatgaatgaccatgcccctcacattctgtaccctacctcaaccaactcgtcagcagccttcgagatggtgcctcgaactgcccctgctggctacctggtcaccaaagtcatagctatggactcagactctgggcaaaatgcttggcttttttaccatctagcccagacttctgacctggacctctttaaggtagagctgcacacaggagaaattaggactaccaggaagatgggagatgagagtggtagcactttcaacctgaccgtggtggtccgagataatggagagccatcactatcagcctctgtggccattacagtagctgtggtggatagggtttccaaaatcctccctgacactcagaggcatgttaagagccctcggacatactctgaaattaccctttatctaataatagcattaagcacagtgtcttttatatttcttttgacaatcatcattttgagcatcatcaagtgctaccgctacactgcgtatggcactgcatgctgtggaggcttctgtggagtaagggaaaggtcccctgcagaactgtacaaacaagccaacaacaatattgatgccaggataccgcatggcctcaaagtgcagcctcacttcattgaagttcgagggaatggctccctcaccaagacctactgctacaaggcctgtctgacagcaggctcagggagtgacactttcatgttttacaatacaggggcccagacaggaccagggccttcgggagcccaagcagcagtgactgacagcaggaatctcacaggccaaagtggtcagaatgctgggaacctgattattctcaaaaatgaggctgtttctcaaaatgaggtgagacagtggtcagggggtcttctacaaactcatgcatttgttacacatcccccaatatcctgtgatttggctttattgagtcat

SEQ ID NO: 91493 - DNA, 840 bp, Homo sapiens
gcagtgtcgtggaattcattctgtggttttccttgaacttctggataaaatctaagctctttagcatgatatataaggctttttattcccaccttaatctacctgcccccctttatttcatgccccagcttctcacagttgagatagttgctactccagaatacaccatgcccttgttgccttctttcacatggtttcttctctcaagaatctctcctcctgccttattcctttctccctattctgcttaatgcacatagttaaggtccagcctaaataccattccttccactgggcacctgagatatttaacacattgtgttgaaaccactttgctttcacatttttaaaaaatgtgtatcacttagtgagagaaactatcttaaggctctggagaatagtgatgaacaaaacaggattctgctttcatagagtttatgttctagttggggagacagttaataagcaaaatatcaattactgatacacgtgtaaaaaaaagggttatgtgtgagtgactggttgcttttggtgggtggtcatagaagacctctttgagcagggatgagaagagctatgaataacaaaaaggaaccagtcatgcaaagaaatcaagggaaaagcattacaggcagagggaaccagcaagtacaaggaccttacagtgagaaaaggaggggtatttttgggacagagaacaggccaattgcctgggtaggggtggcatcaaaggaggcccgatggattggcgagggccgaacacatggaggtttgcacaccacaggaaggcttccgcgaggcccttgcgcttgccataataccgaaccgggcctggccgcg

SEQ ID NO: 91494 - DNA, 1544 bp, Homo sapiens
gggtcgacccacgcgtccgcggacgcgtgggcgcaatggttctgcactgaggccctcgtcatgggggcgcctgtgtggtacttggtagcggcggctctgctagtcggctttatcctcttcctgactcgcagccggggccgggcggcatcagccggccaagagccactgcacaatgaggagctggcaggagcaggccgggtggcccagcctgggcccctggagcctgaggagccgagagctggaggcaggcctcggcgccggagggacctgggcagccgcctacaggcccagcgtcgagcccagcgggtggcctgggcagaagcagatgagaacgaggaggaagctgtcatcctagcccaggaggaggaaggtgtcgagaagccagcggaaactcacctgtcggggaaaattggagctaagaaactgcggaagctggaggagaaacaagcgcgaaaggcccagcgtgaggcagaggaggctgaacgtgaggagcggaaacgactcgagtcccagcgcgaagctgagtggaagaaggaggaggagcggcttcgcctggaggaggagcagaaggaggaggaggagaggaaggcccgcgaggagcaggcccagcgggagcatgaggagtacctgaaactgaaggaggcctttgtggtggaggaggaaggcgtaggagagaccatgactgaggaacagtcccagagcttcctgacagagttcatcaactacatcaagcagtccaaggttgtgctcttggaagacctggcttcccaggtgggcctacgcactcaggacaccataaatcgcatccaggacctgctggctgaggggactataacaggtgtgattgacgaccggggcaagttcatctacataaccccagaggaactggccgccgtggccaacttcatccgacagcggggccgggtgtccatcgccgagcttgcccaagccagcaactccctcatcgcctggggccgggagtcccctgcccaagccccagcctgaccccagtccttccctcttggactcagagttggtgtggcctacctggctatacatcttcatccctccccaccatcctggggaagtgatggtgtggccaggcagttatagattaaaggcctgtgagtactgctgagcttggtgtggcttggtgtggcagaaggcctggcctaggatcctagataagcaggtgaaatttaggcttcagaatatatccgagaggtggggagggtcccttggaagctggtgaagtcctgttcttattatgaatccattcattcaagaaaatagcctgttgcacatttactctgtttctttgtgccctgcaagccctgcccccaagacctagataagatctttctcttcttttgcccccactcaaattagaagtggggagcctcttgggccacatctctgttaactggggaggggaggtctcatgggtctttttttaactgatcaggagccctaagtagggctgagagccagcggggagaagaattaatgagaagcatcaaggatagagtcctagggagctgtat

SEQ ID NO: 91495 - DNA, 445 bp, Homo sapiens
gtaagcgcggtggaattcgtttgtgcatatatgctcccctatgatatttataatttacacaaataaaagtctgttaaaaaagactgtaactgatatgattaaaatattttgttgaaactttaatatattatagtgaggtattttctgctgaaatatgaggtttgcttcaaaataatctgggcgggggtgaaaggatgaaaggaagaaaagatgaagtaagagaggctatgtgttgttggccttgcatctgggtgataggtacatgggcatcattgcactactctttctactttcgtgtatgttgaaaggttcctgtaataaacagttttttaaagttccaatagattagattgttatcactaaaaccataaagattcttggcagcggttcttttggcatacaatttgtatgtaattatatgtggccatggttggtttccttaaat

SEQ ID NO: 91496 - DNA, 850 bp, Homo sapiens
gtggtggaattctttttttttcagcattttagctatcctgtttattctggttgggcttttttaaatttaaaaagtagctggccgactacgtggggaatcagttcaaggttttagaagtggtgacgtaaccgctgggttttgaaggagaagagttcacaagcagatagagaggatgttgcaggcagaggaggcagaatggtccaggtgctagtcctgacaccaccatccccaggttgatcagttgaatcaggctgtagcttgaactcaatgggtaggagccagagtttggaatggaactaatgatggtggaggtgagaatcagaaagtgtatggctgaatgttctagtctttccatatcatagtactggagaaatcgaggcaggaaatcccactgaaatccttttggttcccaaggcaggagaataaaaaaacacagcacaggataagccaaaattctgccccagaactggcctggaacctgtctcctaccctggctgccccgcccttcagctccaagagcaaaccatttattttctatgatttttaaaaattggctcatctcctaaatgttccagaggcggaacaagctgagccgtgggggagcaaaaactgctgactcaattaaccctgccaccctgtgaggctgaagaaaaagattggatgtgcgcccaccacccaagtccctggggtccgcgaggttctggggccgtccgcccacttttttcttttctttcgaacacacaggggtggtgcgattggaaacatgtgcacacaactttgggcccccctcggcccgcagtctagccccaccctcgtggtcaaaacgtagacgacccctcgccgcttttac

SEQ ID NO: 91497 - DNA, 7973 bp, Homo sapiens
gaggaggagctggagggggcgcggcttcctctcggtcgctccctggcgccgggcctctttctctgcctggcccagggctggcggccggcgggggtcgcggcggcggcagtgggggcgctggcgggccgcgggtggcgggggccgggccgcggctccgggtgttaggagacaagatggcggcggctctcagaaggccggtctcctcctctccgccgtcctccgccccgccgctcgccgcctcctcctctcgggtctcctcctcctcgtttgctgcctcctcctcctcctgcagcagcaccagcgaccgccgaagcgccggctcgctcacccggagctccggaggtggatagacggggcagctgcaggctccggcgaccgaggccgagctggggccggggcggggacggcggcggcggcggcggcgacggcggcggcgccgggtggggatggggtcgcagacgctgcagatcctccgacagggggtgtgggccgcgctcagcgggggctggtactacgacccgcaccaggccaccttcgtgaacgcgctgcacctctacctgtggctctttctgctgggcctgcccttcaccctctacatggcccttccttctaccatgattatagtagcagtttattgtcctgtgatagctgctgttttcattgttctgaagatggtcaactatcgactacacagagcacttgatgctggagaagttgtagataggactgcaaatgagttcacggatcagcgaaccaaagctgaacaaggcaactgttcaaccaggagaaaagacagcaatggaccgagtgatcctggtggagggattgaaatgtctgagttcatccgagaggccacacccccagttggttgcagttccagaaattcttatgccggtctagatccaagcaaccagattggatctggttcctcgcgtcttggaacagcagcaactattaaaggagatacagacactgctaagacttctgatgatatcagtttaagtctgggccaaagttctagtctttgtaaggaaggaagtgaagaacaagatttggcagctgatcggaagctctttcgtcttgtctccaatgactccttcatctctattcagccttccttatcctcttgtggacaggacttgccaagggacttcagtgacaaagtgaacctgccaagtcataaccaccaccaccatgttgatcagtctctgtccagcgcctgtgacacagaagtagcttctcttgtacctttacactcacactcttatagaaaagaccaccggccgcgaggtgtaccacggacttctagctctgctgtggcttttccagacacttcactgaatgattttcccctttatcagcaaagacgtggattagatccagttagtgagttagaatcttccaagcctctttctggatccaaagaatccttggtggaaaattctggtttatctggggaatttcagcttgctggtgacttgaaaatcaatacttctcagccacccacaaaaagtgggaagagcaaacctttgaaagcagagaaaagcatggacagcttgaggagcctgagcacacggagtagtgggtcaacagaaagctactgcagtggaacggaccgggacactaacagtactgtcagcagctataaaagtgagcagaccagctcaactcacatagagagcatcctgtcagagcatgaggagtctcctaaagcaggaacaaaaagtgggaggaagaaagagtgctgtgcaggcccagaggagaagaatagctgtgccagtgacaaaaggactagcagtgaaaagattgctatggaagcgagtaccaacagtggggttcacgaggccaaggaccccaccccctctgatgagatgcacaaccagagaggtctcagcacctctgcatctgaagaagccaataaaaatccccatgcaaatgaatttacttcccaaggggacagaccacctgggaacactgcagaaaacaaagaagagaagagtgataagtcagctgtttctgtggattccaaagtgcgtaaagatgttggtggaaagcaaaaggaaggggatgttcgacctaaatcttctagcgtaatccatcggacagcttctgcccacaagtcaggcaggagacgcacaggaaaaaaacgggctagcagttttgattcaagccggcatagggactatgtttgctttcgaggtgtttctggtaccaagccacacagtgctatattttgtcatgacgaagactctagtgatcagagtgacttgagtagagcatcaagtgttcagtctgctcaccagttcagcagtgatagctcttctagcaccacttctcattcctgtcagtctcctgagggcagatacagtgctctaaagaccaaacacactcataaagaaaggggcacagactctgaacacacacacaaagctcatttggttcctgaaggaaccagcaaaaagcgtgcaacacgacggacttctagcacaaatagtgccaagactcgtgcccgagtgttgagcctggacagtggcacagtagcatgtttgaatgactcaaacaggttaatggcacctgaaagtataaagcccttaaccacttcaaaatcagatcttgaggccaaagagggagaggtgctagatgagctatctttattaggacgggcttcccagttagagacagtcactcgatctaggaatagcttgccaaaccaggttgcatttcctgaaggggaagagcaagatgcagtcagtggagcagcacaagccagcgaggaggcagtgtcatttcgccgtgaacgcagcacatttaggcgccaggcagtacggcgccggcacaatgcagggagtaaccctacccctcctacattgctcatcggatcacccctaagccttcaagatggtcagcaaggccagcagtccacagcccaggtcaaagtccagtcccgccccccttcccaggctgcagtgctcagtgctagtgcctccttgctggtaagttctcttctacgctgtatgagactggtggctgtgatatgtcacttgtgaattttgaaccagcagcaagaagagcatccaatatctgtgacacagattctcatgtatccagttctacctcagttcgattttatccacatgatgtgctctctctcccacagattcgattgaatagactattgaccattgatacagatttgttggagcaacaggacattgatctaagccctgacttggcagctacttacggcccaacagaagaagctgcccaaaaggttaaacactattatcgcttttggatcctaccccagctgtggattggcattaactttgacagactcacacttttggccctgtttgatagaaatcgtgagatcctggaaaatgtgttagctgtcatcctggctattctcgtggcctttttgggatctattcttctcatacaaggattcttcagagatatctgggtcttccagttctgcctcgtcatagccagctgtcaatactcactgcttaagagtgttcaaccagattcttcttctcccagacatggtcataatcgtatcattgcctacagtagaccagtttatttctgcatatgttgcggtcttatttggctcttggattatggtagcagaaacctgactgcaaccaagttcaaattatatggaataactttcaccaatccactggtgtttatatcagccagggatttagttatagtgtttacactctgtttcccaatagtgtttttcattggtctcctgcctcaggtgaatacatttgtaatgtacctttgtgaacaattggatattcatatttttggtggtaatgccactacaagcctgcttgcagcactttacagttttatctgtagcattgttgcagtagccttattgtatggattatgttatggggctttaaaggattcttgggatggccagcatattccagtacttttctccattttttgtggtttattagtggcagtgtcttaccatctcagccgacaaagcagtgatccatctgtacttttctctttagtgcaatccaagatttttccaaaaacggaagagaaaaatccagaagaccctctatctgaagtaaaagatccactgcctgaaaaacttagaaattctgttagtgagcgattacagtctgacctggtagtatgcattgtaattggtgtgctgtattttgctattcatgtaagcacagtcttcacagtattgcagcctgccctcaagtatgtgttgtatacattggttggctttgtgggttttgtaacccattatgtgctgcctcaagttagaaaacagctaccatggcactgtttctctcatcctctgctaaagacactagagtataatcagtatgaagttcgaaatgcagccactatgatgtggtttgagaaacttcatgtgtggcttctttttgtggagaagaatataatctatccattgattgttctcaatgaactgagcagcagtgcagagacaattgctagtccaaagaaactgaatacagaattaggtgctttaatgatcactgttgctggtttgaagttgctacgatcctcttttagcagccctacatatcagtatgttacagtcatctttactgtgctgtttttcaaatttgactatgaagctttttcagagaccatgctgttggatctcttctttatgtccatactcttcaacaagctttgggaactactttataaattgcagtttgtgtatacctatattgccccatggcagatcacatggggttctgctttccatgcttttgctcagccttttgcagtgcctcattcagccatgctgtttattcaggctgctgtctcggccttcttctctactccactgaacccctttctgggaagtgcaatattcatcacttcatatgtccgacctgtgaaattctgggagagagactataacacaaaacgagtggatcattcaaataccagattggcttcccagcttgatagaaatccaggtacctactgtcaacaacgggaagtggaggccattactgaaggtgtagaggaagatgaaggattttgctgttgtgaacctggccatattcctcacatgctttcatttaatgctgcatttagccagcgatggctagcttgggaagtgatagtcacaaagtacattctggagggttatagcatcactgataacagtgctgcttctatgcttcaagtctttgatcttcggaaagtactcaccacttactatgtcaagggtatcatttattatgttacgacctcgtctaagctagaggagtggctagctaatgagacaatgcaggaaggacttcgtctgtgtgctgatcgcaattatgtcgatgtggacccgacctttaatccaaacattgatgaagactatgaccaccgactggcaggcatatctagggagagtttctgtgtgatttacctcaactggatagagtactgctcttcccgaagagcaaagcctgtggatgtggacaaagattcatccctagtgactctctgttatggactctgtgttctgggacggagagctttggggactgcatcccatcatatgtccagtaatttagagtcattcctctatggattgcatgccctatttaaaggagatttccgtatttcttcaattcgagatgaatggatctttgctgacatggaattgctaagaaaagtagtagtccctgggatccgtatgtccattaaacttcatcaggatcattttacttctccagatgaatatgatgaccctactgtgctctatgaagccatagtatctcatgagaagaacctcgtaatagcccatgaaggggaccctgcatggcggagtgcagtacttgccaactctccctccttgcttgctctgcggcatgtcatggatgatggcaccaatgaatataaaattatcatgctcaacagacgctacctgagcttcagggtcattaaagtgaataaggaatgtgtccgaggtctttgggcagggcaacagcaggagcttgtttttctacgtaaccgtaacccagagagaggtagcatccaaaatgcaaagcaagccctgagaaacatgataaactcatcttgtgatcaacctattggctacccaatctttgtctcacccctgacaacttcttactctgacagccacgaacagcttaaagacattcttgggggtcctatcagcttgggaaatatcaggaacttcatagtgtcaacctggcacaggcttaggaaaggttgcggagctggatgtaacagtggtggcaatattgaagattctgatactggaggtgggacttcctgcactggtaacaatgcaacaactgccaacaatccccacagcaacgtgacccagggaagcattggaaatcctgggcagggatcaggaactggactccacccacctgtcacatcttatcctccaacactaggcactagccacagctctcactctgtgcagtcgggcctggtcagacagtctcctgcccgggcctcagtagccagccagtcttcctactgctatagcagccggcattcatccctccggatgtccaccactgggtttgtgccttgtcggcgctcttctactagtcagatatcgcttcgaaacttgccatcatccatccaatcccgactgtcgatggtgaaccaaatggaaccctcaggtcagagcggcctggcctgtgtgcagcacggcctgccttcctccagcagctccagccaaagcatcccagcctgcaaacatcacactctcgtgggctttcttgcgacagagggaggtcagagcagtgccactgatgcacagccaggcaacaccttaagtcctgccaacaattcacactccagaaaggcagaagtgatttacagagtccaaattgtggatcccagtcaaattctggaagggatcaacctgtctaaaaggaaagagctacagtggcctgatgaaggaatccggttaaaagctgggagaaatagctggaaagactggagtccgcaggagggcatggaaggccatgtgattcaccgatgggtgccttgcagcagagatccaggtaccagatcccacatcgacaaggcagtgcttctggtccagattgatgataaatatgtgactgtaattgaaactggggtactagaacttggggctgaagtgtgagccagtgtttattataaagacatttctttttccctctcaattccaaggcattggaaaaagagaggaacaagcagaagatgcctgcaggtatcactttgatcctatgtgggagcgactgaaaatagaatgagcttggttaagcacctctcctttgcccttcaccctgactcctgtcactgtctccatccccaaataaagctgaaatatttttttaagttagctgccgagaaaacattttgcatgaaggataaagttctgttaaaatacatccttaaaaaaagtttttcctatgcattgcctatgctttaaatcaacaaactcttcatttctaaactatgatctcatatttttctaatttctttgccaaaaataattgccatgttttgtcatagaacatgaaattcatttaccttgatttttaagaacagaccagtgtagaaatgttccttttgacttatagcagtataaaagtttaatgtacagtgaaagagactatgaacagacatagatttatcttattccttgagcgctaaaaactttaataaaaaaaactgcactaattttttacagcaatgcactaaagtctgagatttctcagaacatttatttatatataaaaataaaataccattatttaaattgcctttgggattagccccttccctttccttataaacacaggtagcaggaactgtgctgctcatttttctgttagtagtgtgtacttcatgccaggacattgggtattttctttaaagtgaatatagaatctcaagatatacgtagcttcatcattgac

SEQ ID NO: 91498 - DNA, 1635 bp, Homo sapiens
ttttttttttttcgtttatgccaacaactttattgagcaccaattagggcaagggactaccaccttcacagttctcttgggcttattaacgtcgtggcccactcatttatttcacaaatgaggaaaccgaggaccctgctgggagagtttggggcccaaccagggctcccactgagtctggggcaccctcagctcctgcaccacaaagcttcggttgacttgtttcaatgtaaagaacgttacttaaacaggtctgagtgctaggcaaactcacaagacctagctcaaagtttgagcacattggtatgaaaaaaagaaaaaaggagaatcagcaccttgtgatatttaagcaggggcatttggcattagccaaccaagcccagaaagtcggcaaaattcttagcctgaggcatccccagaacacctgagactagctcctgcagctgagggttaaactcgtgcacctgcacttgcaccacatcctgtctgagctcttgctgacagcccgtctctggtttgtgaagctcctggcaagggtggggggactccagagcagacaagcaggatccacagcacagaagggcagtgcctcttcccaaacccaagggagcctggctgaactgtcactgacttgtatactcactctcctcccagagatgacagcaatgctaccattggcccccaactctgctcaagactttggaagaagtgtgagggtcagaagggcaaggaaatggcacatccagggaccaagacccccagaagcagccctgaagcgtggtcacagtgccagacaaggcggtaaaaaacaaggatagctggggtcccatcactccagcttcagagtcacccacaccaaggctgctctacagacagcgtccgcagtggtgtgatgagagacaccagaagccagctgacctccagactgccccatgaggcagtctgaactgaggcagtctgaacttctacagtccgaatctcatgctttggtaagaatttgttcaccaaaatacaaaggactcctggggaacagagccccatgggcgactctttcactgaacccagtggaactgccactcactccagaagataaaggtccttcctgagggattctgacaggaaaaaaaggctggaatggagtagaaaggaggccctgaatttgaaaggaagcacaaagctaggcttcatatttgtcccagtgcctgttactttgaccctgacaactctgaggtaggacacactggggccatgacccctttgacagaagaggaacatgagactagctgtgactaaaggattcacccagatctcctagcccaactctgccccagagcccaaagtgctcaagggagaactcctttgagaggagactgccccgcctttaatgtgaaaagcaggcctggaggcccagggtggacgtggtcctcagccagaccaagggcctcctctagtggaggggcttcctgggctctctctgcactgcccctcagggtgctttctggggtccagtcaatggatcttacacacccatgaacactgagcccttggggagacgtgtccaggcttcagtttcccctcccagctgacaacaaaagtaaataatggatgtgactatcctgtggggaaggactagcc

SEQ ID NO: 91499 - DNA, 1501 bp, Homo sapiens
  misc_feature (1)...(1501): n = a,t,c or g
cggacgcgggggcggtttttgggtctgttacccaaagaatgataaaggtggttttatttcaagaagtcgatcaaaaagaaagccccagcgctctagagctcagctgacgggaaagggggtgcgcagcctcgagtttgagagctacccggagctccaagacaggggtgcgtgcgacgacctgggacgctggaaacccggagctgcgcgctgggcggaaaggactcctagtgggcccggctganaaggcggaggtggcgcgcgaggggcgggctcgtgccaacgctggcctgggccgaggccactggtgcatatgttcccgggagggataagccagacctgccaacctggaagaggaatttccgctctgccctcaaccgcaaagaagggttgcgtttagcagaggaccggagcaaggaccctcacgacccacataaaatctacgagtttgtgaactcaggagttggggacttttcccagccagacacctctccggacaccaatggtggaggcagtacttctgatacccaggaagacattctggatgagttactgggtaacatggtgttggccccactcccagatccgggacccccaagcctggctgtagcccctgagccctgccctcagcccctgcggagccccagcttggacaatcccactcccttcccaaacctggggccctctgagaacccactgaagcggctgttggtgccgggggaagagtgggagttcgaggtgacagccttctaccggggccgccaagtcttccagcagaccatctcctgcccggagggcctgcggctggtggggtccgaagtgggagacaggacgctgcctggatggccagtcacactgccagaccctggcatgtccctgacagacaggggagtgatgagctacgtgaggcatgtgctgagctgcctgggtgggggactggctctctggcgggccgggcagtggctctgggcccagcggctggggcactgccacacatactgggcagtgagcgaggagctgctccccaacagcgggcatgggcctgatggcgaggtccccaaggacaaggaaggaggcgtgtttgacctggggcccttcattgtaggctccctggggcccccagatctgattaccttcacggaaggaagcggacgctcaccacgctatgccctctggttctgtgtgggggagtcatggccccaggaccagccgtggaccaagaggctcgtgatggtcaaggttgtgcccacgtgcctcagggccttggtagaaatggcccgggtagggggtgcctcctccctggagaatactgtggacctgcacatttccaacagccacccactctccctcacctccgaccagtacaaggcctacctgcaggacttggtggagggcatggatttccagggccctggggagagctgagccctcgctcctcatggtgtgcctccaacccccctgttccccaccacctcaaccaataaactggttcctgctatgaaaa

SEQ ID NO: 91500 - DNA, 1705 bp, Homo sapiens
gccaacatggctccagtggagcacgttgtggcggatgctggggctttcctgcggcatgcggctctgcaggacatcgggaagaacatttacaccatccgggaggtggtcactgagattcgggacaaggccacacgcaggcggctcgctgtcctgccctacgagctgcggttcaaggagcccttaccggaatacgtgcggctggtgactgagttttcaaagaaaacaggagactaccccagcctctctgccacggacatccaagtgcttgcactcacataccagttggaagcagagtttgttggggtgtctcacctaaaacaagaaccacagaaggttaaggtgagctcatcgattcagcacccagaaacacctctgcacatttctggtttccatctgccctacaagcctaaacccccacaagaaacagaaaaaggacactcagcttgtgagcctgagaacctggaatttagttccttcatgttctggagaaaccctttgcccaacatcgatcatgaactgcaggagctgctgattgacagaggtgaggacgttccaagtgaggaggaggaggaggaagaaaacgggtttgaagacagaaaagatgacagcgatgacgacgggggtggctggataacccccagtaacatcaagcagatccagcaggagctggagcagtgtgacgtccccgaggacgtgcgggttggctgcctgaccacagacttcgccatgcagaatgttctgctgcagatggggctgcacgtgctggcggtgaacggcatgctgattcgtgaggcccggagctacatcttgcgctgccatggctgtttcaagacaacgtctgacatgagccgagtgttctgctcacactgtgggaacaagaccctgaagaaagtgtccgtgaccgtcagcgacgacggcaccctgcacatgcacttctcccgcaaccccaaggtgctgaacccccgcggcctccggtactcgcttcccactcccaaagggggcaaatacgccatcaacccccatctcaccgaggatcagcgcttccctcagctgcgactctcccaaaaggccaggcagaaaaccaacgtgttcgcccctgactacatcgccggggtgtcaccctttgtcgagaatgacatctccagccgctcagctaccctgcaggtccgggacagcaccttgggagctgggcggagacgcttaaatcccaacgcttccagaaagaagtttgtgaagaaaaggtgaagagcgagttcccgcaggcaaattggatgggcgtctggccgccgtggagttccggtgacccatttccccagccgtgtcgtctccaggaccacccgatggaaataacaggcgggcttcacggtgcggctctgtccgcccatgccccgctgggtctgcagggaactggactgtcccatggcctgtgagcaccggagcgcctggctgcctgccaaggaagtgcaattgcataaaaacagaaagaacaacgccctggagccaatcttcaagaaaggaatttccaaaggataatatttttctaataaatgcggctgcaacctcctgtgcatttaattaaataggccaaatttttgctgcttaggtcatctcaaggctgatacttgagctgtgtgcccagagatcatgcatttagatttatatttttgccagaaaatacaaggttataataaaactaagaactacc

SEQ ID NO: 91501 - DNA, 850 bp, Homo sapiens
acaacaatggttttattgtgcaaaagaagcggttgtctccgtaggagggtcagaaagatattttagtgagaaaagatgaaggaaaaattgcctctgcattccaggagaagggggtctctgaactgttgctcgctgagatggggccctgtgaaagactctttgcagaaagctctgctctgctgagcaaatgcacatggtggtccctgaccctgtgatccccaaggcccattttagtaacaaacaattacataatgtctcctttcctcgcccgaaattagaatcatagatagtatcacctcctacacgtattagaggaatacacatcagcataatgccctaactggaatatgaagaagaaataacataagacaattcataatgaaagtgtgcatttcaggccaggcgaggtggctcacgcccgtagtcccagtactttgggagactgaggcgggcagatcacttgagctcaagagtttgagaccagcctgggcaacatggggaaaccccatctctacgaaaataaataaataaagtgcatttcagcatatcaatgctcgggccaggccacaccaacagaagacacagtaagagacagacacttaggtctatccacggcgacagctacgaatacaagggaaaaggggcagttcaggcactgggaatgttggccttggattttccagaatggcaactgactctcagtgaagcgctgaaccaaagaacaatcttctctagagtcacacagaagggatattcctggattaaacaacatttttaaacacttgttgaaggctttcatttaaaagcctaaaaaatcttgaaccagccccagaggggctcacacctggta

SEQ ID NO: 91502 - DNA, 2313 bp, Homo sapiens; identical to SEQ ID NO: 59313

SEQ ID NO: 91503 - DNA, 430 bp, Homo sapiens
  misc_feature (1)...(430): n = a,t,c or g
ttgacgtcccggtccggnnnnncgggtcgacgatttcgtaggaagggctggaggagggctccggaggaagggctggaggaagggctggaggagggctccggaggaagggctggaggagggctccggaggaagggctggaggaagggctggaggagggctccagaggaaggcggttgctcctcactctgtggtctttgtctgtccagaccttcccttcttggattgagtaatgtctcacctgcttgcggcctgcagcagcacctgcttctagaaagtctccttagctgaaaagtgccgagtaatctcccttccctccccaaaccctgctgctggagttcccaggctgatcagcctggggtgtagggggacacagcaaggtcaagctaggcaaggacgaggtggctggccccttcgaggggctcctgtcctg

SEQ ID NO: 91504 - DNA, 1327 bp, Homo sapiens
tttcgtagaccttcctcagagccgctttcagaaaagcaagctgcttctggttgggcccagacctgccttgaggagcctgtagagttaaaaaatgaaccccacggatatagcagacaccaccctcgatgaaagcatatacagcaattactatctgtatgaaagtatccccaagccttgcaccaaagaaggcatcaaggcatttggggagctcttcctgcccccactgtattccttggtttttgtatttggtctgcttggaaattctgtggtggttctggtcctgttcaaatacaagcggctcaggtccatgactgatgtgtacctgctcaaccttgccatctcggatctgctcttcgtgttttccctccctttttggggctactatgcagcagaccagtgggtttttgggctaggtctgtgcaagatgatttcctggatgtacttggtgggcttttacagtggcatattctttgtcatgctcatgagcattgatagatacctggcgatagtgcacgcggtgttttccttgagggcaaggaccttgacttatggggtcatcaccagtttggctacatggtcagtggctgtgttcgcctcccttcctggctttctgttcagcacttgttatactgagcgcaaccatacctactgcaaaaccaagtactctctcaactccacgacgtggaaggttctcagctccctggaaatcaacattctcggattggtgatccccttagggatcatgctgttttgctactccatgatcatcaggaccttgcagcattgtaaaaatgagaagaagaacaaggcggtgaagatgatctttgccgtggtggtcctcttccttgggttctggacaccttacaacatagtgctcttcctagagaccctggtggagctagaagtccttcaggactgcacctttgaaagatacttggactatgccatccaggccacagaaactctggcttttgttcactgctgccttaatcccatcatctacttttttctgggggagaaatttcgcaagtacatcctacagctcttcaaaacctgcaggggcctttttgtgctctgccaatactgtgggctcctccaaatttattctgctgacacccccagctcatcttacacgcagtccaccatggatcatgatctccatgatgctctgtagaaaaatgaaatggtgaaatgcagagtcaatgaactttccacattcagagcttacttaaaattgtattttagtaagagattcctgagccagtgtcaggaggaaggcttacacccacagtggaaagacagcttctcatcctgcaggcagcttttt

SEQ ID NO: 91505 - DNA, 804 bp, Homo sapiens
cttcgttatccgcgatgcgtttcctggcagctacattcctgctcctggcgctcagcaccgctgcccaggccgaaccggtgcagttcaaggactgcggttctgtggatggagttataaaggaagtgaatgtgagcccatgccccacccaaccctgccagctgagcaaaggacagtcttacagcgtcaatgtcaccttcaccagcaatattcagtctaaaagcagcaaggccgtggtgcatggcatcctgatgggcgtcccagttccctttcccattcctgagcctgatggttgtaagagtggaattaactgccctatccaaaaagacaagacctatagctacctgaataaactaccagtgaaaagcgaatatccctctataaaactggtggtggagtggcaacttcaggatgacaaaaaccaaagtctcttctgctgggaaatcccagtacagatcgtttctcatctctaagtgcctcattgagttcggtgcatctggccaatgagtctgctgagactcttgacagcacctccagctctgctgcttcaacaacagtgacttgctctccaatggtatccagtgattcgttgaagaggaggtgctctgtagcagaaactgagctccgggtggctggttctcagtggttgtctcatgtctctttttctgtcttaggtggtttcattaaatgcagcacttgggttagcagatgtttaattttttttttaacaacattaacttgtggcctctttctacacctggaaatttactcttgaataaataaaaactcgtttgtcttgtcaaaaaa

SEQ ID NO: 91506 - DNA, 396 bp, Homo sapiens
  misc_feature (1)...(396): n = a,t,c or g
nacagttcccaaattaatatctccagtctgtccctttcccctgaatgccaaatccatatatgcaactgcctagtcaacatctcccttgggttgtctaatacgcatctcaaaattaaaacatgtccaaaactgacctcatcttcccctaaaaaaacacctgcttccctccccacaaaaagacggcctttcccatctcaatcaatggcaattccatccttccaactgctcaggccaaaaactctatcattcttgactcccttctttctcgtaaatcctatacccaatccatatcaaatcctgatgtgtatcttcaaaacacatccagaatctatttacttctcaacacttttactgctaccatcctgtcccaaagcaccacatatccccacgcgtccg

SEQ ID NO: 91507 - DNA, 1777 bp, Homo sapiens
ggcaagatggcgcttgccgagtgattctcctcgaatacctcctgccggcgcggagacaccggggcgggggtcctgccgcaactacctcccttcctcctctcccccgcccccggagccttcatccttcccttccccccccacctcgaggggcgggcctggttcccgggacaccatgtcggactctgaggaggagagccaggaccggcaactgaaaatcgtcgtgctgggggacggcgcctccgggaagacctccttaactacgtgttttgctcaagaaacttttgggaaacagtacaaacaaactataggactggatttctttttgagaaggataacattgccaggaaacttgaatgttacccttcaaatttgggatataggagggcagacaataggaggcaaaatgttggataaatatatctatggagcacagggagtcctcttggtatatgatattacaaattatcaaagctttgagaatttagaagattggtatactgtggtgaagaaagtgagcgaggagtcagaaactcagccactggttgccttggtaggcaataaaattgatttggagcatatgcgaacaataaaacctgaaaaacacttacggttttgccaggaaaatggttttagtagccactttgtctcagccaagacaggagactctgtcttcctgtgctttcagaaagttgctgctgaaatccttgggatcaaattaaacaaagcagaaatagaacagtcacagcgtattgtcagggcagaaatagtgaagtacccggaagaagaaaatcaacataccacctctactcagagtagaatctgttcagtacagtagtgcagagggtggtgaaggcagatattgtaaactacaaccaggaacctatgtcaaggactgttaaccctcctagaagctctatgtgtgcagttcagtgagcgcatttttcttttgtgttgatagttctggctgcccttcacctctgggtgggcccgaggacttctaggaacttgttttatcagtgaccatctctgtagttcagttaacactttactcccaacttgcttcatcattgctattgcctcacagtggcaggcagctccttggatttgaaagaattcaactttgggaccacacactttgaattcaaaatggaaaacccattccctggaattagactgcttcattgcaaaagaatgatgttgtttctttgtatgtccttgcttcttttttcattgatgtaaatttttttaacttaatatgaaaactctccaagtcttgatcatcagccaggattttgccacagcaatttcattctcttatcggaacttgtatgtgtcaaagtatacttcagagtgcaaacattaagcaagtaatatattttacctacagatacttatgaagacattctttcgctatcgtgagtaaaagtatataaagctgtttctaactgaaaatgcttgaaataagcctgtaatagaaatattttttcattttttaaaaaagggcctaaattgtttatattgtagtttgtaactcacaaagtaatatttgatattgtatttttattactgtatcgttgtcgttatgtattgtgtaatactcaggtttgaaggctttctgaattctgataaatgttcagctgatgctccacgtggaatttctcttgcaaactgcataagagtactcccgagaatgagttatgacattgtggatccagactgtacctggatgttcagatgtttttctttcacaaataaacttatttaaattaaaaaaaaa

SEQ ID NO: 91508 - DNA, 642 bp, Homo sapiens
atctaattaggtcactgtggtttattgccttgttcaaatcctctggatctttgctgatttgggggaggcctattccatcagttcttgagagggcattagatatccaaatataattgtgaaaattatctgtgtttccctttataccagtttttacttcattcatttagaagctctgataattagcttctaattatttaagattgttatatcttcctgatataacacatttaagattgttatatcttcctgatagagtggcctatcatgaaatgtcccttttgtctctgggaatactcttaccttgaaatctctcttacctatcatttatatataactgcatcaaatttatttactgtttgcacgatgtatctttttcttggcttttaaaattttagcctgtgtttgtctttaaattaaaagcgattgccttgtagacaacatttggttgggtccagttatttccccctgaatctcatctcgtaggtttccctaccccctttcccatcggcatgcttcacgaacccttccattgcctcccattctggtccgccatatttttattgggtttctgcttggccattctggtttttgtttcactgggaactccttatttaccttcttttggggtaatcaaacaaacac

SEQ ID NO: 91509 - DNA, 3271 bp, Homo sapiens; identical to SEQ ID NO: 60254

SEQ ID NO: 91510 - DNA, 912 bp, Homo sapiens
  misc_feature (1)...(912): n = a,t,c or g
tttttttaccccattgtagaagaggaataatttatttctataaggattttaataatgttccctaagtaattagtaatcaagattttcttcaaattcaaattaacaaatatgtttgttaatctaaataatatacatatttatgtatttatatatgtatatattttaatctttctgtaattcagtctttaactgtgaacttttacatgatggaagcagtgaaggactcaatgtcatagtacattttgatagtatttgataggctttttcaggtcaattaatttagttgcttgcaaatataaatcaagcttgctccagttccacaaggactccaccacagtctttaggatggagaaaaatcactggttttccatgtgctcctattttgacctcttcacttagactgcggatcttcttttttttcaaatccatcacagctgcattaatattatccacctcgatgcagatgtgatgcattcctccagccttgtttttctgcagaaaacctgcaattggactgtcacgtcccaatggatgaagcagttccatcttggtatttcccaggttgacaaaaacaacagatactccatgttcaggaagagggaccgcttcacttacctgggcccccagaatattcttataaaatgctgcagccttttccaaatctggcactgctatggctacatggttgagtcgacccaggttccacacagaacctgtcacttgatccaagggctgtgatgtggaagaagctcttactgttggaatgggagcttgaagtctggaaaaaagccctacggcattcgcggctgcagccttcagcacccgcgccattttggaaagcaacccgccacgtcaagactgaattccacggcactcaatatggtcatcgaannnnnnnnnnctngggcctca

SEQ ID NO: 91511 - DNA, 5993 bp, Homo sapiens
atgacaacattgatgagacatacggtgtgaatgtgcagtttgagtctgatgaggaggaaggtgatgaagacgtatacggggaggttcgagaagaggcatctgatgatgacatggaaggggacgaggctgtcgtgcgctgcaccctctcggctaatatgtatgttgatgaaatcttagtctggtgtgcttctgaactcaatattccagagttttttcctctggaaagtcctcacaagaaggtgggctatggattgtcaagtagaacttggttgcagggtggtggcaaagtgatcgaggctggcagagacctgctcgtagcctcaggtgaactgatgagttccaagaagaaggatttgcaccctcgggatattgatgcattttggctgcagcggcagctcagtcgtttctatgatgatgccatcgtgtcgcagaagaaggcagatgaagtattggagattttgaagacggccagtgatgatcgggaatgtgaaaatcagctggttctgctgcttggtttcaacacctttgatttcattaaagtgttgcggcagcacaggatgatgattttatactgtaccttgctggccagtgcacaaagtgaagctgaaaaggaaaggattatgggaaagatggaagctgacccagagctatccaagttcctctaccagcttcatgaaaccgagaaggaggatctgatccgagaggaaaggtcccggagagagcgagtgcgtcagtctcgaatggacacagatctggaaaccatggatctcgaccagggtggagaggcactggctccacggcaggttctggacttggaggacctggtttttacccaagggagccactttatggccaataaacgctgtcagcttcctgatggatccttccgtcgccagcgtaagggctatgaagaggtgcatgtgcctgctctgaagcccaagccctttggctcagaagaacaactgcttccagtggaaaagctgccaaagtatgcccaggctgggtttgagggcttcaaaacactgaatcggatccagagtaagctctaccgtgctgcccttgagacggatgagaatctgctgctgtgtgctcctactggtgctgggaagaccaacgtggccctgatgtgcatgctccgagagattgggaaacacataaacatggacggcaccatcaatgtggatgacttcaagattatctacattgcccccatgcgctccttggtgcaggagatggtgggcagctttggaaagcgcctggccacttatggcatcactgttgctgaactgactggggaccaccagctgtgcaaagaagagatcagtgccactcagatcatcgtctgcacccccgagaagtgggacatcatcacccgcaagggtggtgagcgcacctacacccagctggtgcggctcatcattctggatgagattcatcttctccacgatgacagaggtcctgtcttagaagctttagtggccagggccatccgaaacattgagatgacccaagaggatgtccgactcattggtctcagtgccaccctacccaactatgaagatgtagccacctttctacgtgttgaccctgccaagggtctcttttactttgacaacagcttccgtccagtgcctctggaacagacatatgtgggtatcacagagaaaaaagctatcaagcgtttccagatcatgaatgaaatagtctatgaaaaaatcatggaacatgctggaaaaaatcaggtgctcgtgtttgtccattctcgcaaagaaactgggaagacagcaagggcaatccgtgacatgtgtctggagaaggacactttgggtctgtttcttcgcgagggttctgcctccactgaagtccttcgtacagaagcagagcagtgcaagaacttggagctgaaggatcttttgccctatggctttgctattcatcatgcaggcatgactagagttgaccgaacacttgtagaagatctttttggtgacaagcatattcaggttttagtttccaccgcaactctggcgtggggtgtaaatcttcctgcacatacagtcatcattaaaggtacccaagtgtacagtccagagaaggggcgttggacagagctgggagcactggatatcctgcagatgctgggccgtgctggacggccgcagtatgacaccaagggtgaaggcatcctcatcacatcccatggggagctccagtactacctctccctcctcaaccagcagctgcctatcgagagccagatggtctccaagctgcctgacatgctcaatgcggaaattgttctgggcaatgtccagaatgcaaaggatgcagtgaactggctgggctatgcctacctatacatccgaatgctccggtcccctaccctctatggcatttctcatgatgacctcaagggagatcccttgctggaccagcgccgactcgatcttgttcacactgctgccttgatgctggacaagaacaatctggtcaagtacgacaagaagacaggcaacttccaggtgacagaacttggccggatagcaagtcactactatatcaccaatgatactgtgcagacctacaaccagctgctgaagcctactctgagtgagattgagcttttccgagtgttctccttgtcctcagagttcaagaacatcactgtaagagaggaggagaagctggagctgcagaagttgctggagagagtgcccatccctgtaaaggagagcattgaggaacccagcgctaagatcaacgtgcttctccaagccttcatctcacagctgaaactcgaaggctttgcgctgatggctgacatggtgtatgtgacccagtcggctggccggttgatgcgtgcaatcttcgaaattgtcctgaaccgaggttgggcacagcttacagataagaccctgaatctctgcaagatgattgacaagcgcatgtggcagtccatgtgtcctcttcgccagttccgaaaacttcctgaggaagtagtgaagaagattgagaagaaaaacttcccctttgagcggctgtatgacttgaatcataatgagataggtgaacttattcgaatgccgaagatggggaagaccatccacaagtatgtccatcttttccccaagttggagttgtcagtgcacctgcagcctattacacgctctacgctgaaagtagagctgactatcacaccagatttccagtgggatgaaaaggtccatggttcgtcagaggcattttggattctggtggaggatgtggacagcgaggtgattctgcaccatgaatattttctgctgaaggccaagtatgcccaggatgagcacctcatcacattctttgttccagtctttgaaccactacctcctcagtacttcattcgagtagtgtctgatcgctggctctcttgtgagacgcagctacctgtctccttccggcatctgatcctaccagagaagtacccacctccaactgaactgttggacctgcagccattgcctgtgtctgctctgagaaacagtgcttttgagagcctttaccaagataaatttcctttcttcaatcccatccagactcaagtatttaataccgtgtacaacagtgatgataacgtgtttgtgggggcccccacgggcagcgggaagactatctgcgcggagtttgccatccttcggatgctgctgcagaattctgagggacgctgtgtctacattacccctatgaggctctggcaggagcaggtatacatggactggtatgagaagtttcaggacaggctcaacaagaaggtcgtgctgctgacgggggagaccagcacagacctgaagctcctgggcaaaggcaacatcatcatcagtacccctgagaagtgggacatcctctctcggaggtggaagcagcgcaagaacgtccagaacattaacctctttgtggtggatgaggtccaccttattgggggcgagaatgggcctgtcttggaagtgatctgctcccggatgcgctacatctcctcccagattgagcggcccattcgcattgtggcacttagctcctcactctccaatgccaaggatgtggctcactggctgggctgcagtgccacctccaccttcaacttccatcctaatgtgcgccctgtacctttggaactgcacatccagggcttcaacatcagtcacacacagactcgcctgctctctatggccaagcctgtgttccatgctatcaccaaacactcacccaagaagcctgtcatcgtttttgtcccatctcgtaagcagacccgcctcactgcaatagacatcctcactacctgtgcagcagacatccagcggcagaggttcctgcactgcaccgagaaggacctgatcccttacctggagaagctcagtgacagcacactcaaagagaccctgttaaatggggtgggctacctgcatgaaggcctgagccccatggagaggcgcctggtagagcagctcttcagctccggggctatccaggtggtggtagcttctcggagtctctgctggggcatgaatgttgctgctcatctagtgatcatcatggatactctgtactacaatggcaagatccatgcctatgtggattaccccatctatgatgtgcttcagatggtgggccatgccaaccggcccctgcaggatgatgaggggcgctgtgtcatcatgtgtcagggttctaaaaaggattttttcaaaaaatttttgtatgagccattgccagtagagtctcacctggaccactgtatgcatgaccacttcaatgctgagattgtcaccaagaccattgagaacaagcaggatgctgtggactacctcacctggacctttctgtatcgcagaatgacacagaaccccaattactacaacctgcaggggatatcccatcgtcatctgtctgaccacctgtcagagctggtggagcagaccctcagtgacctggagcagtccaaatgcatcagtattgaggacgagatggatgtggcccctctgaacctgggcatgattgctgcctactattacataaactacaccaccattgagctcttcagcatgtctctgaatgctaaaaccaaggttcgaggacttattgagatcatttccaatgcagcagagtatgagaacattccaatcaggcatcatgaagacaacctcctgcgccagttggctcagaaggtcccccacaagctgaataaccccaagttcaatgatccacatgtgaagaccaatctgctgctgcaggctcacctgtcccgcatgcagctaagtgctgaactacagtcagacacagaggagatccttagtaaggcaatccggctaattcaggcctgtgtggatgtactctccagtaatgggtggcttagtcctgctctggcagccatggaactggcccagatggtcacccaagccatgtggtctgaggactcttacctgaggcggttgccccctttcccttcggggcttttcaaacgttgcacagataagggagtggagagtgtttttgacatcatggagatggaggatgaagaacggaatgcattgcttcagttgactgacagccagattgcagatgtggcccgcttctgtaaccgctacccgaatattgaactgtcctatgaagtggtggataaagacagcatccgcagtggcggaccagttgtggtgctagtgcaactggagcgagaggaggaagtcacgggcccagttattgcacctctcttcccacagaaacgtgaagagggctggtgggttgtgattggagacgccaagtccaacagcctcatctccatcaagaggctgaccctgcagcagaaagccaaggtgaagctagactttgtggccccagccacaggtggccgccacaataccctgtacttcatgagtgacgcatacatgggatgtgaccaggagtataagttcagtgtggatgtgaaagaagctgagacagacagtgattcagattga

SEQ ID NO: 91512 - DNA, 403 bp, Homo sapiens
  misc_feature (1)...(403): n = a,t,c or g
ccgtctttaaaataaagaaattaaaaccatacttcacagtcattttggctattgtagcagttgaacatacaatgtttcttggtgagaaatgtancaatgtgtgtgtttgagatggttcccccatttccatcagggtttgatggtgtttaaattgcattatcttaaactgaacttccagaggaatgaacaaatcacacaggttcttccctgaaagacctgagtgatatctaggggatagtcccatcttaaagagattcagaaacatgattcacccagacaattcttgaatggaggcgctgggcatttcgcccaatcagcgctctgtaaaggcttttgctccatgagctgagctttatgatgaggcagtttgcttagtggtggctgatgacgccaaaacagagcn

SEQ ID NO: 91513 - DNA, 4040 bp, Homo sapiens
ggtcgtgaaacggccgagctgaccctgacacccattaggctcagcaaattaccaaggctgtactgctgcaaagcttcacagacagcctccattacttcaatcaagcccaaatttcatcctcatctgttacctatctcggcataattctcataaaaacacacgtgctctccctgccaatcgtgtctgactgatctctcaaaccccagcaccttctacaaaacaacaactcctttccttcctaggcatggttagcgtggtcagaattcttacacaagagccaggaccacaccctgtagcctttctgtgcaaacaatttgaccttactgttttagcctagccctcatgtctgcgtgcagcggctgccactgctttaatacttttagaggccctaaaaatcacaaactatgctcaactcactctctacagttctcataacttccaaaatctattttcttcctcatacctaacgcatgtactttctgcttccccgctccttcagctatactcactctttgttgagtctcccacaattaccattgttcctggcccggacttcaatccggcctcccacattatacctgataccacacctgaccctcatgactgtatctctcggatccacctgacattcaccccatttccccaaatttccttctttcctgttcctcaccctgatcacgcttgatttattgatggcggttccaccaggcctaatcgccacacaccggcaaaggcaggttatgctatagtatcttccacatctatcattgaggctactgctctgcccccctccactacctctcagcaagccgaactagttgccttaactcaagccctcactcttgcaaaaggactatgcgtcaatatttatactgactctaaatatgcctttcatatcctgcaccaccatgcagtcatatgggctgaaagaggtttcctcactacacaagggtcctccatcattaatgcctctttaataaaaactctgctcaaagccgctttacttccaaaagaagctggggtcattcactgcaaggggcatcaaaaggcatcagatcccattgctctaggcaatgcttatgttgataaagtggctagacaagcagctagctctccaacttctgtccctcacggccagtttttctccttcacttcagtcactcccacctactcccccactgaaacttccacctatcaatctcttcccacacaaggcaaatggttcttagaccaaggaaaatatcttcttccagcctcacaggcccattctattctgtcatcatttcataacctcttctatgtagacataattcctcagtttagccttcccacctcaatacagtctgataacagacgagcctttattagtcaaatcagccaagcagtttttcaggctcttagtattcagtgaaacctttatatcccttacggtcctccatcttcaagaaaagtagaatggactaaaggtcttttaaaaacacacctcaccaagctcagccaccaacttaaaaaggactggacaatacttttaccactttcccttctcagaattcaggcctgtcctcagaatgctacagggtacagcccatttaagctcctgtatagatgctcctttttattaggccccagtctcattccagacaccagaccaacttagactgtgccccaaaaaacttgtcatccctactatcttctgtctagtcatactcctattcaccattctcaactactcatacatgccctgctcttgtttacactgccggtttacactgtttctccaagccatcacagctgatatctcctggtgctatccccaaactgccactcttaactcttgaagtaaataaataatctttcctggcaggactatggtgaatctccttaagcactctctaatcagacatcctgagtcgtcccaattcttagaccttttatacctgtttttctccttctgttattccatttagtttttcaattcatacaaaaccgtatccaggccatcaccaatcattctatatgacaaatgtttcttctaacaaccccacaatatcaccccttaccacaagacctcccttcagcttaatctctcccgctctaggttcccacgccgcccctaatcccgcttgaagcagccctgagaaacatcgcccattctctctccataccaccccccaaaattttcgccgccccaacacttcaacactattttgttttatttttcttattaatataagaaggcaggaatgtcaggcctctgagcccaagccaagccatcgcatcccctgtgacttgcatgtatacgctcagatggcctgaagtaactgaagaatcacaaaagaagtgaaaaggccctgccccgccttaactgatgacattccaccattgtgatttgttcctgccccaccttaactgagtgattaaccctgtgaatttccttctcctggctcagaagctcccccactgagcaccttgtgacccccgcccctgcccaccagagaacaaccccctttgactaattttccattaccttcccaaatcctataagatggccccacccttatctcccttcgctgactctcttttcggactcagcccgcctgcacccaggtgaaataaacagccgtgttcctcacacaaagcctgtttggtggtctcttcacacggacgcgtatgaaatttggtaccatgactcggattggggggacctcccttgggagatcaatcccctgtcctcctgctctttgctccatgagaaagatccacctacgacctcaggtcctcagaccaaccagcccaagaaacatctcaccaatttcaaatccagaaaagtagaacggactactggtcttttaaaaacacacctcaccaagctcagccaccaacttaaaaaggactggataatacttttaccactttcccttctcagaattcaggcctgtcttcggaatgcgacaggatacagcccatttgagctcccatatagatgctcctttttattaggccccagtctcattccagacaccagaccaacttggactgcgcccccaaaaaaacttgtcatccctactatcttctgtctagtcatactcctattcaccattctcaactactcatacatgccctgctcttgtttacactgccggtttacactatttctccaagccatcacagctgatatctcctggtgctatccccaaactgccactcttaactcttgaagtaaataaataatctttgctggcaggactatgctgaatctccttaggcactctctaatcagatgtcctaggtcctcccaattcttagtccttttatatctgtttttctccttctcttattccatttagtttttcaattcatacaaaaccgtatccaggccatcaccaatcattctatacaacaaatgtttcttctaacgtccccacaatatcaccccttaccacaagatctgccttcagcttaatctctcccactctaggttcccacgccgcccctaatcccgcttgaagcagccctgagaaacatcgcccattctctctccataccaccccccaaaaattttcgccgccccaacacttcaacactattttgttttatttttcttattaatataagaaggcaggaatgtcaggcctctgagcccaagccaagccatcgcatcccctgtgacttgcacatatacgcccagatggcctgaagtaactgaagaatcacaaaagaagtgaaaaggccctgccccgccttaactgatgacattccaccacaaaagaagtgaaaatggccagtgccttgtccttaactgatgacattaccttgtgaaagtccttttcctggctgcatcctgggctcaaaaagcacccccactgagcaccttgtgacccccactcctgcccgccagagaacaaacctcctttgactgtaattttcctttacctacccaaatcctataaaacagccccacccttatcttcccttcgctgactctctttttggactcagcccgcctgcacccaggtgaaataaacagccatgttgctcac

SEQ ID NO: 91514 - DNA, 1204 bp, Homo sapiens
ttttttttttttaggtttttcaataccttctttattatgtctataaaattatatgtagcattggaaatgttattgaatatgacaccaacaacgtgctattggattttttaaattttgacttcttttaaagaaggggataacaatctgtggaaaatgcttttactcgtatcatgccaatatactgcaaggagtatttcaaaataatataaaagtaattcacagacttagattaagtgaagatcaaatgaccccaaaatttttcttccttagtttttcacagcaactgctaaagtccataagctgatttttccaagaaaattattctaataattttgagtgttcaatccgtgcaatggtccagtcaggctttactccttgtgtgaactccctctgaaactcatagcttgcactaagaagttgtttagtttccacattctgattccccaacttaacctggaatacactggctcctcttaaagtttcactggggatgttggcactggttagataccaaaagcacatcaggatgttaacaaacttccttcctttctcatcatagtaaatggagatgtctcctgttgatgtaaatacaatttcatctatgttagcagcaagggcatttttatggttgtcaggtagtgaagtaaccttttctttcaatgcatgtagcacctctttggccacaagttcttccaacagatcaaatttacactgtgacagcaacttggatacatgagcaaaagcctgcttcgctccctcggagaactctgtgatgctgaactctttgtcgaaataggcccagataaggaaggccttaattcgagtcctaacccagttgatggggttggagaatcccaggacgatcatcttggttttctggtgctgctggggcttctcctccgtgctgtagctgcgctgagggcaggcagggaaagaagcgaaggctgcggggagtcccgggctgctgagcactggccaccgggagccctgggcaggtagcgccgaggctgccaaggccctagcgcttcgtggaaataacgccgctcccaagccgaggcgacagcggcagaagtagcaaagtgtggccgacggcagcctcacctcggccacagcaggagtccggagtcggacggccccgcagggcagcgaccgagagtgcaggaactggggtagcaaacgagcggccagcgccatttttatgacg

SEQ ID NO: 91515 - DNA, 4874 bp, Homo sapiens; identical to SEQ ID NO: 59225

SEQ ID NO: 91516 - DNA, 3387 bp, Homo sapiens; identical to SEQ ID NO: 60012

SEQ ID NO: 91517 - DNA, 604 bp, Homo sapiens
tcacagagccttacacttggttggtgtcccagtgatgctttttgacgaatctcttctttgtagaaattttatttcatacatatgcttgcctggtgtgcttaagagttccaggctgtatcctggcaataagaaattgtttgtctgctcaaaaacaccctcctttccctttcggattcccgacgctgtggttgctgtaaggggtcctccctgcgccacacggccgtcgccatggtgaagctgagcaaagaggccaagcagagactacagcagctcttcaaggggagccagtttgccattcgctggggctttatccctcttgtgatttacctgggatttaagaggggtgcagatcccggaatgcctgaaccaactgttttgagcctactttggggataaaggattatttggtcttctggatttggaggcaatcagcggacagcatggaagatgtgtgctctggctcggataagagatgggacatcattcagtcactagttggatggcacaaggctcttcacagacgcatctgtagcagagtggaacttgtactaacttatgatagaatgtatcagaataaatgtttttaacagtgttaaaaaaaaaa

SEQ ID NO: 91518 - DNA, 489 bp, Homo sapiens
gaaggcatttaatcctcttgagaaacagcatgtgattggtggagtcctggctctgcttctggtttgccagggtgattatgctagtttcacaacaatgccatgttttcttctaccgagagcagtattggtatcattaagataccaagaaatgctgaggtttcattggtattctgtaacttgtattttgctgctacggggaagatagctgttaggtttatcctgttgttagctttcaattctaaagtgagccactgcgcccaaccttaatggctttttggtattaaaaaccaggactctgaatgtgcatcaataattcaaataattttatatagttactctttctagtaatagatacccccctccatttttaagtaaagataaacattttttaattaggaaaattaggcacatttaattttagcaaatttagtttttcaactttttttctttcttttttttttttgggggaaaccccccccaaaaaaaaaa

SEQ ID NO: 91519 - DNA, 1442 bp, Homo sapiens
  misc_feature (1)...(1442): n = a,t,c or g
gatttcctcgcgttataacgaatcggcgtctaagggtttaagtgtcacttgacattactgctcccacgtgttctttcccatctggcggccgcggctcctgtccagaccctgaccctccctcccaaggctcaaccgtcccccaacaaccgccagccttgtactgatgtcggctgcgagagcctgtgcttaagtaagaatcaggccttattggagacattcaagcaaaggttggacaactacttttccagaacagaaaggaaactcatgcatcagaaaaggtgactaataaaggtaccagaagaatatggctgcacaaataccagaatctgatcagataaaacagtttaaggaatttctggggacctacaataaacttacagagacctgctttttggactgtgttaaagacttcacaacaagagaagtaaaacctgaagagaccacctgttcagaacattgcttacagaaatatttaaaaatgacacaaagaatatccatgagatttcaggaatatcatattcagcagaatgaagccctggcagccaaagcaggactccttggccaaccacgatagagaagtcctgatggatgaacttttgatgaaagattgccaacagctgctttattggaaatgaggactcatctgatagaatcccctgaaagcagtagccaccatgttcaaccatctgtcatgactgtttggcaaatggaaaccgctggagaaacaaaattgctatttaccaggaataatcacaatagaaggtcttattgttcagtgaaataataagatgcaacatttgttgaggccttatgattcagcagcttggtcacttgattagaaaaataaaccattgtttcttcaattgtgactggttaattttaaagcaacttatgtgttcgatcatgtatgagatagaaaaatttttattactcaaagtaaaataaatggaaatatcactgagcagttgtttatactgtatggtaccatagtattctcactggactgtggatacgttgaaatgtttttcaatcaggatcatcctccaagcagtcctgttcattcatgtctgcctcaaattgctggtgaatacataaaatagttacttgctaatcatttcaatgcatgatccttttcttgcctcccttgtgtcagggtgggcattacatatacttttcnnnnnnnnnnnnnngaaaacggannnnnnnnnnccccccccaggaggaggggaaggggaaaattttaatttaattgaaccctccccttcccaagtaaagcaatttttgtgccccaaccccccaaggaggggggaataaaggggggggcccccctgccccggtaaattttggttttttaaaaaaaaggggggttaaacaaattggcccgggtgggtttaaaattttgaacctaaggggaccccccggcctaaccctccaaaagggta

SEQ ID NO: 91520 - DNA, 384 bp, Homo sapiens
ccagaactttagcttcaactctctgaccctgtgcaagttcaggcctgatcagggatggccagcagtggccccggtggcccttgaattgtaactaaaagtagttgatgatatttttatctctttccagcattcatttcttttcttgaatatttagacttccctctagtttgttcttcctttaaaaggtgtttattctttagtaaataagtaagtagctactaagtgatatagttagatggaggcaattggattgattcagggaattgtgtgttatgtatttagtagcctgagaatatgtaattcttggagttttttctcttttgaaaaggttctgctggttcttttctgttcctggggcctgcatgcataaaagtcagcgatccc

SEQ ID NO: 91521 - DNA, 2938 bp, Homo sapiens
ctcctgacctcaagtgatccacccaccttagcctcccacagtgctgggattacaggcatgagtcaccacacccggccagtagaactctttaaacctgaaaaatcagtcaactttgcagactagaggaggatgttgaacacctatgtgggttttttttttttttaccaactatgcacctatttttcaaacacctaaaagtaatgtctgtgaaacaggggttttctttttctacatattacagcaggaagtgttcctatttatgtactgtctgtatcaaaactaacggggcatgataagcaaaattttaaactttggtagttaaacctttatgttgccttccctctgggctgccagctgtggggatgtgcttctcccttaaggactttggcaagaataacaagttcattggaatttgactttctgacatagagcagacagccttgccctgtcatgccaggcctttcatgtgaagttaccatttattagctgcttctgtctctccagggaaggatttcccttttataagcctgggccagggggatgatagtaagattccccatgtgataccagagttggaataggctgtagtgagattagggccaggactgtcccattttgattcttgaatggtttctgttacaacttgtcatggggaaaaagtaacacttattttttttttcctcccttaaaaaacaaaaatactaatgcatttgaaaaagcggtagttttggggggagggggaaaaagcaactgctttcctgatctgcaacttggctggatgctaaaatgtcagtggacatgaatagccaggggtctgacagcaatgaagaggactatgacccaaattgtgaggaagaggaagaagaagaagaagacgaccctggggacatagaggactattacgtgggagtagccagcgatgtggagcagcagggggctgatgcctttgatcccgaggagtaccagttcacttgcttgacctacaaggaatctgagggtgccctcaatgagcacatgaccagcttagcttctgtcctaaaggtatctcattcagttgctaaacttatattagttaatttccactggcaagtttcagagatattggacagatacaagtccaattctgctcaactgcttgttgaggctcgagttcagcctaatccatcaaaacatgttcccacatcccatccccctcaccactgtgcagtgtgtatgcagtttgtgcgaaaggaaaacctactctctctggcctgtcagcaccagttttgccgcagctgctgggagcagcactgctcagttctcgtcaaggacggcgtgggcgtgggagtctcttgcatggctcaggactgtccactccgtacaccagaggactttgtgtttccattgcttcccaatgaagaattgagagagaaatacaggcgctacctcttcagggactatgtggagagtcattaccagctccagctgtgccctggtgcagactgccccatggttattcgggtacaggagcctagagctcgccgagtacagtgcaatcggtgcaacgaggtcttctgtttcaagtgtcgtcagatgtatcacgcacccacagactgtgccacaatccggaaatggctcacgaagtgtgcagacgactctgaaacagccaactacattagtgctcacactaaagactgtcccaagtgcaacatctgcattgagaagaatggaggctgcaatcacatgcaatgctccaaatgtaaacacgacttctgctggatgtgtctaggagattggaagactcatggcagtgaatactatgagtgcagtcgttacaaggagaatcctgacatcgtgaaccagagccaacaagcccaggcgagggaagccctcaagaagtacttattctactttgagaggtgggaaaaccacaataaaagcttgcagctagaggcacagacataccagcggattcacgagaagattcaggagagggtcatgaacaatctggggacatggatcgactggcagtacctacagaatgctgccaagctcttggccaagtgtcgatacaccctgcaatacacctacccatatgcatattacatggagtccggacccaggaagaagctgtttgaataccagcaggctcagctggaggctgagatcgaaaacctctcatggaaagtggagcgtgcagacagctatgacagaggggacttggagaaccagatgcatatagcggagcagcggaggagaaccctgctgaaagatttccatgacacctaagttgggatgtggatgtgccggggtgaggaagatgtggctgcaaggtctcccggctgccatactgcatgctgcaggctctgcctttcatgaccccaggcaacagccagggccccactcctgagagacactggcaacacctcttagttgatttctgttttcttctcttttcactttttgtttctaccagggtagaggccatgttgaactggcctcttttcaggacttttatttccccctggatggttgttgggagggagggaaagtgttttctgaatggctattaatagtattagatcattacaacttatgtaactttcaaaggttgtacaattatacaaaaaaaaaaaaaggggcaccttttggaaaaccacagccccttttttaaaaaaaaatgggattgggggggttaacccctcaaccggtttaattaaaaaggaaaaataggcggccaccccccctaaaaatgtttttcctgaaaaaggccccgggcccttttttttcaatattcccgtgggcccaaagtggaaccccaaaaaaaaacctggggggcaaaatggtaggaaatgaaacggccctgggaaagggccttgaaccaaagggggtcacaaaaggcctcctgctttaccggggaaaccggagacagccaaaaaatggtttttttgcacagggg

SEQ ID NO: 91522 - DNA, 399 bp, Homo sapiens
caattcacacataaggaatacaactggtgatatctataactatatctggctaacatactcagtatttccacttcttcagttttagtcgtatactttagcgttttctgtgtgcacataaccataggaaatattaagtgctctatatttcataaagatgcttatttttctcgattttatatctccagagggaaagtgtatatttgtggctataagggggcttgtaggaattgcttttgaagcatgcttatcttgctgtttctttaacaaggctcacagctggattcatgcccagtaaagggacacctgaatggaactgagtcacttttagacttaatatgggatgttatgacaattcttaagttaaaaaatgcaggtacagtaataattttcctttcaatg

SEQ ID NO: 91523 - DNA, 371 bp, Homo sapiens
  misc_feature (1)...(371): n = a,t,c or g
ctncagtgagataatgtagttataagctgtgaatcgcgtaaaatgctgatagttcctgttataatatgtccttaagtataatagtccccatatattatgtgaaaaaagatatcaaagtcccacatgccactggaagtaaaaagtgttttaattcccaaatgcatatgcacttatttttcactgcgtgcattcaatgtcttaaagtaatgaaatataatggttttgcttatgtgtttgttctgctacttttaaatggagctgaaatcagccataagaagaaattgtccctggtgccaagacaattcaatgtggaaagaatagtctttttaacaaatggtgctagggcaactctatatccatcaacaaaagaa

SEQ ID NO: 91524 - DNA, 356 bp, Homo sapiens
agtccctagggtttgtttgttaaaagaatttgagaagcttcccataataactttaacataacagaaaagaaaactgataattgtgtgtatttcgtgtatttatggttatatacattatgtagtttatttcatccatagacttgatttttctcaatcatttctttagttgttttagaattaaaaaaatgcattcatacattgttgaggaaagagtcttgaactcattggattcaccaatgtttaaaatctttattgcaccaatttttttaaatctttattggctttcattgatctgatgtggttcatgatttttcatgacattcactcttttaaaatgaatcataaaatccagcatg

SEQ ID NO: 91525 - DNA, 1623 bp, Homo sapiens; identical to SEQ ID NO: 77137

SEQ ID NO: 91526 - DNA, 750 bp, Homo sapiens
  misc_feature (1)...(750): n = a,t,c or g
gacatctgtatctcaatgatgctggtaagatggctgttctgttcatttgtgatcacctcaaataaaattgtagttatcgaagctatatatcatcttgataatttgttagagaaattttacctccttatgattaagacagaaattatctaatagaaatctgacgtatacatttgcagtcctgacagcaaatgaagtattatggcatcaattaatgaaaaatgtaatcacaaaataaatatttaagatgacattgtcaaatttggcatcttaatatatcaatctttaattctgagatgacaaatactataattgtatacttacaccatgcacattgacaactactggttcaaacttatttatttttggaatttgtttttgtaaagcatattatacttacagttgctgagatactcctacaatgctaaccaaaagagcactatacaaaagactcatgacttgaatacaggttcataacttgaataaaataaatatacattatttaaatggcatgcatcacttctggggccatctggtgcatttgttggcagtcctaatcattaaaaagtctaaatgttctcttgtagaggcctattgaaacttggcatgaaagtacctttggcttccctgcgagaaaaagaacttttatatttaagggtcctcttctaaggccctgatggagagctcaattaaaattataaagacggggaggtgcgnanaacggggttgggcggggaaataattttttttggt

SEQ ID NO: 91527 - DNA, 854 bp, Homo sapiens
ttttttttttttgggtaagaaaggatgtttattcaggcctgatgcctcgatacagctagatgtacaaaaatatatcattcaaagtcatgaaaaccatcatcatattggtgtgacctccttcctccccttgggcacagcttttgcaactacctcctttgaaatctgggagttggtggggcaagggtcacttcttggcagcttcttcttgggcagccaaatctgcctccttctgagcagccaggaagatggctcgttccttctggaaagctgcaagctcttctgaactgaggtccttcaccacgcgaatgcccagagaacgggcagacccgatgatggagcggacaacagacgacaggggtacatcctgcagggcaaatgcctcatcctgagctttgatgcgggcaatctcatacacatgcttcaaggtcaccaggcctgccacctctttccctgtttgccgggcccccttttcaatcccagctgctgccttcaggaagtaggaaacagtgggctgtccaatcttaatttcaaatgtcctgtcaggcttcactaaaatcttggtaggcagaggaatgccttccttgatgtcctttgtcctctcattgaactccttgcaaaactggttgatggaaacgcctctctgacccagcactgggcctagtgggggcccgggcatggccaggcctgcccgcacgatcgcccggatcacaccgccgacctcgggcttcctgaggccccgggcggcccggccgagctttgacatgatgcggggctgctggcttcagttcacctcaggggagcagcaagagcgaagctctgggcgccaccatcttgggcacgaaatcgtcgacccg

SEQ ID NO: 91528 - DNA, 395 bp, Homo sapiens
tcaccatctgttttctccatgccaggtcattcatgtaacattcattcacataacaaatacaaataaatgagtggattcattcatcagctattaattcagaatctcttttgtgtctaccacactaggctcaagacttcccagggtctttgtctcctctccctcaaatctctccacccaatgtcttgacaaatactgtagatccttcctgcacagcatcaccagaatgtttttctttcttttcattcacctctgtcatcatccatgctatggagtttatggaggatgtattctgcagcaggaagtgtgatgggcactgacgctgcagaaagactcctgttgtccacctcgggagctgacacgataaatgcgggtaaatctcaatcctttaatatctt

SEQ ID NO: 91529 - DNA, 741 bp, Homo sapiens
  misc_feature (1)...(741): n = a,t,c or g
atgataacaacttaatgaagcaacactttgagatcatgatagacctctcacaagggaggacctgatttgtatgatgcctgtatcatagtacagcccacaattctttgtcatcttatggaaaattcaccaacatgtagggaaaatacttcctacctgcaactcaaatcaattcacaaagctcttacctctcaggtagggataatgtaacagcagatgaaatggttggaggtggggaggagggtgattagcatagctacaacattctgcagagccaggacaggagaggagagatgtctgaccgaggaaagctcaggaaagagtaaaggacagcatccccaacaggaccagcctctacctggcttcagtggtggtcactcccagtccccagacggacagatggcaagcattaaagctgcttttgggcaataagtggcagctacctgtggagggcacagcctggatggggactctagggggctgggctctacctgctgctttacttctggattaagatgatctcatgctgctaatacggacccgagactgggtattttttaaggaagaaagtgatttgatttaaaagccccctgtttgggggggtccccgaaacttaaataatggggaatggggggggatttngtcttttttccttgcccccccccccccccatcttattttttccggcgcccccccctctaaaagtttttttttggggccctttttagaacccttttggggcct

SEQ ID NO: 91530 - DNA, 1381 bp, Homo sapiens; identical to SEQ ID NO: 59605

SEQ ID NO: 91531 - DNA, 373 bp, Homo sapiens
gaaatggtgaataatctagtattaagttctctttgtctagcctctttttggttttttgatggtcagttttgccataacagtgtatttatacacccagtgtgtattcacttttattctgtataaaatcaaagaaaaagttttatatttgaagacgctatcttttatatagctcctgatttgttttaaaaaagaataagggtataatccaaatatagagatataagttatagataatttgttctttattagaaaatgaagtctgaaaactacttttgtatgttattcttggaggcctgttttcttgaagaattaaacatatagtatactagagtattcagaatatcccctttttaacctctactaaatttggcag

SEQ ID NO: 91532 - DNA, 393 bp, Homo sapiens
gagatggcattgtaaacgccagagcgagggtctgcctaccccgagactgctgctgttcggagacctgcaggtgaatgccccatcaccatgtctgacctggaggcaaaactttcaactgagcatttgggggataagataaaagatgaagatattaaactcagggttattggacaggatagcagtgagattcatttcaaagtgaaaatgacaacacctctcaagaaactcaagaaatcgtactgtcagagacagggcgttccagtgaattccctcaggtttctctttgaaggtcagagaattgctgataatcatactccagaagaactgggaatggaggaagaagatgtgattgaggtttatcaggaacaaatcggaggtcattcaacagtttag

SEQ ID NO: 91533 - DNA, 804 bp, Homo sapiens
tgcacgagcacctctttatgttgtgaaaacaagtgttgtacagagtttgaggatacatatgtcacttatttacattggaagattcttgcctagggggcaatgctgaagttagctttatgtattgagttgagactcttggcttgcagtacctgtcatttgatatgtgcctcctgttccaggttttattttagttcccacttttgcatctgaaaaatcactgccagttactcagtgagtgaagtaaagagatggcacttgacctccccaaaaatatgtcattatatggattttaaacatagggaagaaaacataaggaagaaaaaatttcacaagctgagaagacctgttaagcatgcatacacaaatcatttttataaaaatgataaaacctgtacattgttaaatctccttgtccctattgtcttctttcccaggtggtttcctaattgttttggtttcttcctctcccaaacccaggctggctacagcaaacatgattcaatatgtccagaacagggagcagcacagatggcggaacacacttagctaatggtaaggggccaaaatgaaggtgaagctatttttactatgagctgaggttgtcctcctccctgcgagcaacagtggaggcctggatttttagggacagagggaaacctttcctggggtggccggggtttaggggaactccccggggggagccccctggggaaaatttttttaccctgggctttcttctcgcaatcttccgggggggggtggggcgaaggggccatattccccgactttgtctttttttaagga

SEQ ID NO: 91534 - DNA, 1831 bp, Homo sapiens
gcccccgcccgccccgggccctgatggactgaatgaaggctgcctacaccgcctatcgatgcctcaccaaagacctagaacgtgcgccatgaacccggagctgacaatggaaagtctgggcactttgcacggcgcgcgcggcggcggcagtggcgggggcggcggcgggggcggcgggggcggcggcgggggcccgggccatgagcaggagctgctggccagccccagcccccaccacgcgcgccgcggcccgcgtggctcgctgcggggccctccgccgcctccaaccgcgcaccaggagctgggcacggcggcagcggcggcagcggcggcgtcgcgctcggccatggtcaccagcatggcctcgatcctggacggcggcgactaccggcccgagctctccatcccgctgcaccacgccatgagcatgtcctgcgactcgtctccgcctggcatgggcatgagcaacacctacaccacgctgacaccgctccagccgctgccacccatctccaccgtgtctgacaagttccaccaccctcacccgcaccaccatccgcaccaccaccaccaccaccaccaccagcgcctgtccggcaacgtcagcggcagcttcaccctcatgcgcgacgagcgcgggctcccggccatgaacaacctctacagtccctacaaggagatgcccggcatgagccagagcctgtccccgctggccgccacgccgctgggcaacgggctaggcggcctccacaacgcgcagcagagtctgcccaactacggtccgccgggccacgacaaaatgctcagccccaacttcgacgcgcaccacactgccatgctgacccgcggtgagcaacacctgtcccgcggcctgggcaccccacctgcggccatgatgtcgcacctgaacggcctgcaccacccgggccacactcagtctcacgggccggtgctggcacccagtcgcgagcggccaccctcgtcctcatcgggctcgcaggtggccacgtcgggccagctggaagaaatcaacaccaaagaggtggcccagcgcatcacagcggagctgaagcgctacagtatcccccaggcgatctttgcgcagagggtgctgtgccggtctcaggggactctctccgacctgctccggaatccaaaaccgtggagtaaactcaaatctggcagggagaccttccgcaggatgtggaagtggcttcaggagcccgagttccagcgcatgtccgccttacgcctggcagcgtgcaaacgcaaagagcaagaaccaaacaaagacaggaacaattcccagaagaagtcccgcctggtgttcactgacctccaacgccgaacactcttcgccatcttcaaggagaacaaacgcccgtcaaaggagatgcagatcaccatttcccagcagctgggcctggagctcacaaccgtcagcaacttcttcatgaacgcccggcgccgcagcctggagaagtggcaagacgatctgagcacagggggctcctcgtccacctccagcacgtgtaccaaagcatgatggaaggactctcacttgggcacaagtcacctccaaatgaggacaacagataccaaaagaaaacaaaggaaaaagacaccggattcctagctggggcccttcactggtgatttgaaagcacaattctcttgcaaagaaacttatattctagctgtaatcataggccaggtgttcttcttttgtttttaatggctatggagtccaagtgcaagctgaaaaattaatctcttagaaccagacactgttctctgagcatgctaagcatcagaaacccaaatggggccg

SEQ ID NO: 91535 - DNA, 382 bp, Homo sapiens
aaggggaaggcctggcacgggtggggagtgggggttccgagggaaggtgaggacagcaagctctggtgacatggctgtttcgctgttcatatggcagtgttaaagaaacaagagtctgttgatgaaatggcttaaaggagtgtccatacaacatcgggaatccagaagtgcctgggactcagggcttatgtgtattgctgaactcagctgcctgagtttgggctttttcagggcctttggctgattgtagtgtgggatttgcaagagtgagttgtccgagtttcttgtaactaacctgatgctattttgcaggtgtgcagtaaagtttttcccacattatgttaaagctggaggtagtaaaaacacagagaaaaatgaaacc

SEQ ID NO: 91536 - DNA, 526 bp, Homo sapiens
cctgctcctcctcatcgcctccattgtggcagcttccaagagttacaaccagagcggactggtagccggagcggtgaggatgttttggggagcctttaggaatgaattcttatttaaaatgctcattttcttcctgatgggggaagagaagggcttggtttctggggcattcccttcatagaattaatacctaccttgatccagccatcagctctctccaaagagccttaagcagaggcgtacagtcccagaaggtggattgtcagggctgccagcaaattcatagaccccagcagcccaggcctctctctcttacaggcactactgaaatcagggggccaggcgggttttaattcacacacccactctgatcatttgctcgttggctgcctcagcactatgcagagacagatgctgggagcctcttttgggcccagtggggaaatgtactgtgatcaattagagatacatgccatgagcctgagctttgccattcctgattttttaacagtatttcaggccagga

SEQ ID NO: 91537 - DNA, 3215 bp, Homo sapiens
  misc_feature (1)...(3215): n = a,t,c or g
tttcgtagcggcggcgcggcgactgaagcgcgcgaaaagctgaggcggcaacgtcggggacggctgcgcgggacggctctgtaggaaggaacttggttccccctccctcagcttccgccccaaaagcagaagtagaaagtaatgaaaaggacaacagacctgaggaagaagagcaagtaatacatgaagatgatgaaagaccttctgagaaaaatgaattttctagacgaaaacgttctaaatcagaagacatggacaatgtacagtctaaacgtcgtcgatatatggaagaagaatatgaggcagaatttcaagtaaagattacagccaaaggagacattaaccagaaacttcaaaaggttatacagtggttgctggaagaaaaattgtgtgcgctgcagtgtgctgtatttgataagactttggcagaattgaaaacacgagtggaaaagattgaatgtaacaagaggcataaaacagttctcactgaactacaggccaagatagccaggttaaccaaacgctttgaagcagccaaagaagatcttaagaaaagacatgaacatccacccaacccaccagtatcaccaggaaaaactgtaaatgatgtcaacagcaataataacatgtcttacagaaatgcaggcacagtgagacagatgctggagtccaaaagaaatgtaagcgagagtgcaccaccatcctttcaaactcctgtgaatacagtatcttcaaccaatcttgtcactcctccagcagttgtcagtagtcaacctaaattgcagactccagtgacttcgggttccctcacagcaacgtcagttcttcctgcacccaatacagctactgtagttgctactactcaggtgcctagtggaaatccccagcctacaatctctttacagcctttgccagtgattttgcatgtacctgttgcagtatcctcccagcctcagcttctacagagccatccagggactttggtgactaatcaaccatctggcaatgttgaattcatttctgtgcaaagcccacctacagtgagtggtcttaccaaaaatccagtatccttgccatccttgccaaatcccactaaaccaaacaacgttccttctgtgcccagtcctagtattcaaaggaaccctactgccagtgctgcaccattgggaacaacacttgctgtgcaggctgttccaacagcacactctattgtacaagccacaaggacttctttacccacagtgggcccatcaggactctatagtccatcaactaatcgaggtcctatacagatgaaaattccaatttctgcatttagtacttcgtctgctgcagaacagaacagcaataccaccccaagaattgaaaaccagacaaacaaaacaatagatgcttctgtcagtaagaaagcagctgatagcacatcacagtgtggaaaagccactggcagtgattcaagtggtgtcattgatctcacaatggatgatgaagagagtggagcttcacaagaccccaaaaaactaaatcacactcctgtatcaaccatgagttcttctcagcctgtgtcacgaccattgcaacccatacaaccagcaccgcctcttcaaccatctggggtgccaacaagtggaccatctcagaccaccatacacttactacctacagctccaactaccgtgaatgtaacacatcgtccagtaactcaggtgaccacaagactccctgtaccaagagctcctgcaaaccaccaggtggtttatacaactcttcctgcaccaccagctcaggctcccttgcgaggaactgttatgcaggctcctgctgttcggcaggtcaatccccaaaatagtgttacagttcgagtgcctcaaacaaccacatatgttgtaaacaatggactaaccctgggatcaacaggacctcagctcacagtgcatcaccgaccaccacaagtgcatactgagcccccacgccccgtgcacccagcacccttaccagaagctccacaaccacagcgtctgcccccagaagctggcagcacatctcggccctcagaagccacactggaagttagccacgcgttcagagtcaaaatggccatagtactggtcatggagtgtcctggaggtggatcgaagctgtgccactgttgatagctaccatctctatgcttaccatgaggaacccagtgccactgtgccctcacaatggaaaaagattggggaagtcaaggcacttcccttgcccatggcatgtactctcacccagtttgtatctggtagcaaatactactttgcagtacgagccaaggatatttatggacgttttgggcctttctgtgatcctcagtcaacagatgtgatctcttctacccagagcagttaaaccttggagcctttatattttcctcttttaaaatttccaccttttggtcttgtttttaatcttgtgcatgataccccatgtaaaatccaccttgtgcaagatttcttggacagatgtgtgtatacactacatttgtttataaccagaagcaaaataaactcagcccacaaagctagaatatttatcctggacagtttaaaatatggggtttggaaatgtaaatgtgtaccttgctttagttttgaggctggggaatatgtgtgggtgtttatgtgtgtttttccttatgtaggtgttattgcattggagtctcccattttcattctcaaatttacctcttaaagtacgaagtaagtagatcaaaggatttgagatgtgtaactggcatgattctgcttttgaaggatctatagtatcattttagttaagtgggtcaaacagaatcaaaacaaaacccaaagaaataaaaaacaaaatggctaaatagtttaaaataggttaattcgaacacaggaaaggatctatttgttgtttcttttgtctggtctcctgagttgttaattaggtgaaaaaagatctgcaatggccccctccctttcctaatctggcttttacatttattttgtgccttaaagattaactacaaagataaacatggccaaaaataaataaataaatatggccatatgtccgntgttgcttagtcttcccttgcagccttttacccttgatttctccttcatctctaccaaatatagcacaactcctcaagtaattttttttttttgaaatggagttttgctcttgttgcccaggctggaaaggcgggg

SEQ ID NO: 91538 - DNA, 740 bp, Homo sapiens
tgtagttggaggtgactatttaatgtattaaattgcagtttttaacttgctgatctaaattattggtcccatacattgtttttatgaccattacctatggccattttagttggtttttacttaactataatggtgtgtttttgttaattatgaggtaatggcagcatattctggtagggccagacttgaagaattacagaaatccagtaagtccaccattttagtcatgagaaaaaaaacacttagcagatggaaaatcctttttatataagaaccctgaagtggtgaggtagttcaccatttatgtagtatcttttttagtttcacataataaaattagttaaaatgtacttatactatcataaaatcccctgcaaaaaaactttgcttttctcctgttaatctaaattgaggttagtttttaatttgtttgtacatgcttatggctagacttagaattggcaatcccctcagctctagtttttagaatatgagttactcaagggcaaggccaggattatagctagacttaagtacatttaaatgtcagagccactgccagaggctgccctgtgtcatcagatgggttggtctaccctctgtcaggctttgtaaaaatggcccccccttttaaaataaaatattttggcccggagaagattctctcttcccccccatttggcccccccaatttttttttttataaaattttgggggaacgggttgtttaaaaaaaacaa

SEQ ID NO: 91539 - DNA, 742 bp, Homo sapiens
gctactgcaaatgaattaatgttgcttgggccttaagactggggaaaacctgagagacttcagggaagactgcatgtcagatataattttattcacaaattcagtgttttaccgggactttaggtgggattgaatggcatggcaagcctggagagtgtggctacccaaaaaggattcatggaggttacaggcatggaggcagaagaatccctgatgaagccatgtctccttatatgtgtgtggaccacattagtttttgtcttttttcaagaaaatatcctcaagtttttctccataggaatgaaatttatttttgctaaattctttgcaaggccttagaatagaaggtgtaatagttctgaaacatacaagcttctggtggatttgggatgctctctctattaaatgtttttgggcccaatgataattaaataaactaagcagatacatctctaacggagcagtgcttgttcactgcccaaatttgtacagccaattagagcctcacagtggtaaattggcttcattatcttggtaattttaattggaaaagtttatgacagacatgctgcttaaaaatggccgtgactcaatacctcctatggtggaacaggcttttttttccggggggtaacacaaaattctggcttataacttttttttggtgaggggggcccccaacccttaaagatattaaaggaccggggttttaaaaatttaacacccacaaaactggcccttt

SEQ ID NO: 91540 - DNA, 1251 bp, Homo sapiens
ggagagaagcagcttcggctgcagcaaaccacgcaggtccttcttgatcatctagaactgaccgctccgccttgccaggagtctgcagaaccacgtggctagcctgcctgaagttctcacctctccaggaaggcggggggtttctaatggctgcagctgcgctgggggctgggggctcccgctgggactccacttccgtggatgtctaagcttcacctttcttgcgcccgcaggggcatgactcaggtgaaagggagccattttctcagacccctggcctcatgcagcccttcagcatccccgtgcaaatcacacttcagggcagccggaggcgccaggggaggacagcctttcctgcctcagggaagaagagagagacagactacagtgatggagacccactagatgtgcacaagaggctgccatccagtactggagaggaccgagccgtgatgctggggtttgccatgatgggcttctcagtcctaatgttcttcttgctcggaacaaccattctaaagccttttatgctcagcattcagagagaagaatcgacctgcactgccatccacacagatatcatggacgactggctggactgtgccttcacctgtggtgtgcactgccacggtcaggggaagtacccgtgtcttcaggtgtttgtgaacctcagccatccaggtcagaaagctctcctacattataatgaagaggctgtccagataaatcccaagtgcttttacacacctaagtgccaccaagatagaaatgatttgctcaacagtgctctggacataaaagaattcttcgatcacaaaaatggaacccccttttcatgcttctacagtccagccagccaatctgaagatgtcattcttataaaaaagtatgaccaaatggctatcttccactgtttattttggccttcactgactctgctaggtggtgccctgattgttggcatggtgagattaacacaacacctgtccttactgtgtgaaaaatatagcactgtagtcagagatgaggtaggtggaaaagtaccttatatagaacagcatcagttcaaactgtgcattatgaggaggagcaaaggaagagcagagaaatcttaagacggtggccaaattaaagtgctggccttcagatgtctgtgatttctgcaactgaggacctaattatgcctgtctgcaaactaataatgtaaaaggtaataattaaagtatcatattttcatgtgggaaaaaattt

SEQ ID NO: 91541 - DNA, 390 bp, Homo sapiens
ctcctcttatctgacctgtgctttctcagctcttcaagggacacacacttcaatctgactccgacccctcccgcccttccttcctttgggccatggggcaggtaggaaagggtgcagtccattcaagtgatttctccttatattacaagttagggccggggacagactattctaagatacagatttccatgcttatcttcctccttttgattattattattatattttagcctcacaaatacttccacctaccccactgactcttggagaagtaataaaataaatgggattaccatctgaatttgtaattacagtagggtcctttggtcctaaaaagtgtattctaacatggatatgtgtatgcataccatacatactagctctgcatgg

SEQ ID NO: 91542 - DNA, 687 bp, Homo sapiens
gcccagcactagattctagagaaagtggtgaacgaaataatctacagtatagtgcacgacctgaccagcttcccaagatgtggagatggcaggcatgagcaggcatgagccactgtgcttaaccatcccaaagctgttatgtatgctttgggatggttaattttcaagtcatagtgatttcgacaccttgcacatcccttttgttgctgatatgctggtttgctttcccttttatatgttcttctcattgcgccctgccatcataattacgaagttgatgaggatggctaacgtttgctgagtgcctgctatgtgctgagttctgtgtactgtgaatatatgaattcattcaggtcacacaacagccatatgagctggatacaggtatttttctcattgtacaggtgaagaagtgggggagaaaaacattaaataacttacccaatgccctgcctgtaagaaataatttacatgggattcccacttccggagggctgattccaggctgttgatagtaatgtgtatgctctgtattctccgcatggcgagacagatacattagtgggaacgactgcggttatactttcttgagcgctatatctgctatcacactgccttgcatactaagccgttgagagatgctaactgaaggcaggagaaaataactactgggaatggaactttgag

SEQ ID NO: 91543 - DNA, 2637 bp, Homo sapiens; identical to SEQ ID NO: 59594

SEQ ID NO: 91544 - DNA, 720 bp, Homo sapiens
ctcgcatcctctagagcggccgcaatacatggggtcagtgggggtgggcggcgggcaggcgggcgttccgggctcacatgagggtgcatttgcccttgacgcggtctgtcctcttctgcttcccggagcgcttgccgtcgatgttgaggctcatgttccggcgcgtctccagcgtcagcagctcctggaagagctccttgacgttgtagttcatcttggccgaggtctccatgaaagcgcacttccactcctgggccaccgcctgcgcctcgcgcgtgtccacctcccgctgcgtctcatcgcacttgttgcccacgagcatcacggggatgtcctccacgctgcccttgatctgcacgatgagcttgtagatgggccccagctcctccagcgactgcttgctggtgacggagaacaccaggatgaaggcgtggcccttggagatggacaggcgctgcatggccgggaactggtggctgccggtggtgtctgtgatctgcagcgtgcacacgctcttgtcgcagctgatcatctgccggtaggtgtcctcgatggtggggatgtaggtgtcgcggaacgtgcccttcacgaagcgcagcaccagcgagctcttgcccacgccgcccgccccgaacaccaccacgcggtaatcgttactctgttccggcatcttccccgcggcgggtgggcggccggggccgggagggctggtgccagctg

SEQ ID NO: 91545 - DNA, 4183 bp, Homo sapiens
ttttttttttttgtacaaaacctggaaatatttttacttttttaaaactttgatctaagttgccttagacctcatggactcgatacaagagtaaatatgaattgggaaataaaaccactttaatagccacgataaactttgttagaaatgtacatgttgccaaaataataataataaaattaaaaaaaagagagagagagaacagcttgatgtccaggttagattatataaatgttcaacaagggcagggtaaaggaaactttaaaaacaccagttctgaataagcctggggccccgtgagactccccctctcccacccagtctcgggccctagggactgcgtccctccaaacaggacaagtgggagtggataaggcctccaccaagctgcctctcccagtggacaaaaacatccaggtaatgggtatataaacaaagctcataagaaatgtacaaatataaaaagctacaaacattaataaattacagcatcacaaaacacggaaacacttcacaaggtgctagtaaaataactgtatcccccaatcccctcatcatacaaggaaaacaaagagctggtattaaagttgaagattcatcttcaaaatgtgtctgaaatagatcttttgtgtactatttgcttctgtaaagacagagtgtaaggctgcacagacatcacttgtttttcaggcaataccttagttcttaaaagaaaaaaataataataataaaaggaaaggagaaggaaaaagcatcagaacccaactgtccatctgactcagcaaaaaactcgtataaatgttaatgaagaactctatagaaagaaattcctaaagatacttttactcttataaaaaagaagttatttaaaaagctatttacacgctacattctatgaaaaatatgcttcaggaaatacatctaaaattaaaatacaggattgcctgagaaacaaatccagcccctccgtgtcgatggtggacacaccatccaggtacgacccatgcaggcgacaccacacgctgacacgggagaacagagaagtgccgaccgtaagtcctcgggccgcctggccactgtccctgcccctgcccctgccctgccagtcccagggcaggggtgccttggctgagaagtgcttctccagagtgtggccagcagggcaagacggtccctgccacatggcttagcctgggcctcccagaccccaagatgtggctgagcccttgccctttcctggggaccccacaatggctcccctgcccgctaacacaccaacccagctgccagtcttagctgccccccagaaatgctcctgggcattcaggctgaacacccaccatcctgctgccacctgccaaccagaaagctcggggcagacccttcctcacccgccgagcactgtctggacttggctgagaatcactcaggaagagaaggggggacataaacatcccacttgctcctcctctttctgtgttctttgcctttttttttaagcccctggaggctgccagcctgtggccagctctgactctggggctggtgagcattggctcactctgtcttccttgaaggactcatgctctcagcagagctgcagaggccctgcaatcacacccacgctcagggggcctgaaggctgtccttaaagtggaataagcggtcctcaaacttgcagggccgcttttctgggacagatcactcttagcaacttgagaaaagacgtccattttcaaattgaggggccacgctgggctcgctctgccggctgaagggacagacgcttgttggggagatggcagccgggaagaggcaaggccctccctggtgaggcagctcggcaccctcctgggaggcagatgttttcgcggggctccgggggtcctgagcggagcagaaggatcctggctttccaaatcttaaaggagtagtttcccgttccgatgaattttcaaaattttcccaagcctctgcttggcggtcgccatgccctttttcgtacgttttcctttggcagcggtgttgttgtttggagacgatgcggagggccgcctctgtgtgagaaagaccccaggggccatgggctgggaggtgcggccagcctgggccccggtgaaggtgccagcggctgtgtactcatggtccgccaggctgctgctatgcgactcaggcgggggctctggcgagctgccctcctgcgaggcctggctgctggccgtgctggtggaggccggggtggtggaggccggtgtggtggaggcaggggtggtagaggctggcgtggtggaggtggaggtggtacccgtggaggcggaggcagaggtggagatggagggggaggcagtgttaggagccggcttccttttggtgttcttcttcttcctgtttttctgctcctcctgctgggacagcttggctgcagcagctgccagccccgtctcaatggaggccactctggtcccctcacgcacaggcctgtcttgtcttggcaccgatggaccgaccctggctgtggggctgtacggagcatcgtctgagcctttcctcttctttgaccgggacttgaagacggggttatcttcgtcagactccagtgaggggtaaacatagtctgagtccttgaagcaggcatccaggtgatcctgctcttcctcgtagtcgtccaggtcgacactgttcttggcagccctcttcagcagtcgtttgcctgcactcttgccactgccacccccattcttccgggcaccatgggcagccagcgagctccccttggcctggccagctccccacgtggtctgcaggcaggagtcggaggcctgcaggttggccatggacagcattccctgaatggcttcctgtgtgctgggggaggccgggggctggctgctggggttgtactccagcgcgccaacctcctcactggcctgcagcaggtccaagatgccagctgccgagctcccactctccttcttgactctggcattgcggccgggcttggtgtctgtgtcgatgtgcagcgaaccctcgtccgaggagtcatcactctgcttgtacgctgccgagtccagctttggcttcgtgacaggcgtgggcagcacagccttcttatccaacaagaaggacaagtcccttttcggggcgtttttcttcctcctgatgggaaactcgtcgatcttgagctcaccgtcatccgacacgtactcatactcatcccgcacgggcttgggcttgtcctccttgaagttctgcaaggccccgaacacaccagggctcgtcgggggcctgagagccttggagccgaggagtttcttgttggagaaagaaaaagagaacttattgtctttgtttccagctagaggcgacttctctagcttctgctcctcttccatcttcagtaaggagtcaggtttgctgttcttgtacttccacttggcctctgacttgctcttggtttgctctcgaatttccagcctctccacatcattctgcatgtgaaccacatctttgttgggcacactcaggacactctttgtggccttgcccttcttgggcggctccatcttggtcagtgcctccttggtgtgggcttcgagcaggtccaggttggggatggtgggtgaggctgactcccgggacttcttccctttcttcttgcctccatctttgagcttcagcgttttggggggccttgggggcttagggggcttcgggggcttggggattttggatggcttgggcatcttcacagttttgggagtcttttttttggacactttctccaggagggattgaggcggggtggcctcaatgggagacgggggctcctccttctcccggtccccgtcacacacctcatctgacgaggcgacagtattcacttccggtcggacggctttggaggcattctgggatacagaaaggagagggtcacatgctgcttctgccaaactgtggcccaggacggtccacacaccaggatgctggagacactcagtgccaggctggcggggaactatcagcccagaaaggctcagctaccccacaccatcatgtgacacactcacacccaacccatgctattgtgtgacacactcacacctgcgacatgccatgagtcacttgctctccccaaggctcttctgtcctaccccagcacagcggctgagggctcatccaggaa

SEQ ID NO: 91546 - DNA, 414 bp, Homo sapiens
  misc_feature (1)...(414): n = a,t,c or g
nacgggactaatgggcaaaacagagatttttaagtcttccgtatgctgtttgacttttatatttttaagttatattttcatactattgtatttaaaaactctttttagtccccaaagaaatgggtttatttgcctttcatggggtgtgggctggcaggaggaaaaatcgggagttttttatttggaatattattagatgatgccctatgataagatgagacaaatgatggggagggaaggaggatggcccttctctagaatcagcaaacccaatggttctgtgaaggtcagacccaagcttggagcagctggtctggatgcagatccaggagctgcagagtgtggaacaggaaaggctctgcccagggcccacgagctctagcattcctgctggcagattagagatcatgtatt

SEQ ID NO: 91547 - DNA, 414 bp, Homo sapiens
aatacatcccctggacttaatatatataaggtgcttagaatagggtctggcaccaagtatggactcagtaaatgttagcttttgtaagtaacggattaataacatcccttgttttatagatgaacagaatgaagtgcagaggagacaagcacatttgcttaaatggcactgcttgctggagatggagcaggagctagaagccaagtctctgctatcaagcccctgctttcttgctgccacccccgccccacccctctcctacccacagtcctctctggctgtgctttgctgaccctacacattctttgggtttcattctggatccttctaggctaggttagcagccccaaccccaacctttgtgtcttcccctgtgaagctggtattgtaaatatattgcaactatcaatttct

SEQ ID NO: 91548 - DNA, 1258 bp, Homo sapiens; identical to SEQ ID NO: 59429

SEQ ID NO: 91549 - DNA, 906 bp, Homo sapiens
tcagagatgctctgggtcacccaaccaccttctcctcctggacacctcctgggcatctccttttcctttgaggtcaccagccttttttgaagttagatcaggccgtataactgacctctgctgtaagtatatgttaacaggatgcttatcttggttctggccaaggccccagaagccaagaataaaattagatgcaggtgcccccattaggtgcttgaatttgagataaaatctggaggtgtatctttctggggctcgatcagggtctctgctttcattcaaagtttctccaaagacttcttttgccaaggaaatccttccacaaaccaaaatccggggaactctccgaaacttggcatctgcctgtccctctctgcccaaggtgcaggatcctctgtaacccacagtaatgaaaccccacttgcggtcggcagggagcagggaggaaggggggcagattcttgtgtcgcttccttgggaggcatcttcaaagtcactgtggcagaattcatctgggctttgcttgatttcatcgggggtcaggagtttgaccaagtctgggagctggaagtattcagcttcccttttcagtcttcctttttctggaaagtgatcaggcaggaccacctgcctgtccctgagatagtccagaatataacggaacaagaatccatctctgtcaatgaaaaaccttcccttggagtccttggctagatcattagccgtgtctctctttggggaaaacattttccacaggagggaatgagggatgcttatcaatgtggaatggcgagtaaaataaacttgacccccgacattcagctctaccacctcagggaaggagttgggaactgcggacccttgttctcgaggataataacgactacagtttccactcagagccat

SEQ ID NO: 91550 - DNA, 4088 bp, Homo sapiens; identical to SEQ ID NO: 58690

SEQ ID NO: 91551 - DNA, 624 bp, Homo sapiens
accgccgctgccggcgcctctgctgtaggggaccagcgcgggtgcgcagacgaaaggcgctctttgccagctgaaagttcccacggaaaaactaccatctcccctgcccaccatggcagacgaaattgatttcactactggagatgccggggcttccagcacttaccctatgcagtgctcggccttgcgcaaaaacggcttcgtggtgctcaaaggacgaccatgcaaaatagtggagatgtcaacttccaaaactggaaagcatggtcatgccaaggttcaccttgttggaattgatattttcacgggcaaaaaatatgaagatatttgtccttctactcacaacatggatgttccaaatattaagagaaatgattatcaactgatatgcattcaagatggttacctttccctgctgacagaaactggtgaagttcgtgaggatcttaaactgccagaaggtgaactaggcaaagaaatagagggaaaatacaatgcaggtgaagatgtacaggtgtctgtcatgtgtgcaatgagtgaagaatatgctgtagccataaaaccctgcaaataaacggaaacatcaggcatgaacactgtttatgtctgaatcaactgcaaaaa

SEQ ID NO: 91552 - DNA, 395 bp, Homo sapiens
ttcgccttctgtggcctcttcattcctcagaccctctatgaacttggaaggcatggccctgacggtgagcatggctgaggtcctctccttcccgcacatgcacaggtactccccagcgtcctctgccacgaggccgcggatctgcagctcacacctggccccgtcctgcctcaggctgtgtctgtctccatctctgagggtctcatgccccttccaccactccacgggggccatcttgctcagctcacaccgcagcacggctgttgccccttctgtggcctcttcgttcctcagaccctctgtgaacttgatgggtagagccctgacggtgagcatagccgaggtcctctcctgcccgcacacgcacgagtactccccagtgtctgccatggccc

SEQ ID NO: 91553 - DNA, 2214 bp, Homo sapiens
cgccaccaactggtaggagaagtggaagtacatcttctttatcctattccacttggacatcttcccattctgataagacgcatgcaagagaaactacttatgatagagaaagctttgaaaaccctcaagtcacaccatcagaagcccaagacatgacttacacagcattttctgatgtggtgatgcaaagtgaggtttttgtttcagatattggaaatcagtgtgcatgttcttcaggaaaggtcaccagtgagtacacagatggatcacaacaaagactagttggagaaaaagagacacaagcactaacaccagtttctgatggcatggaagtccccaatgattctgcattacaagagttcttttgtttatcccatgatgaatccaatagcgaaccacattcacagagctcatacaggcacaaggaaatgggccaaaatctgagagagacagtgtcctattgtcttattgatgatgaatgccctttaatggtgccagcttttgataagagcgaagctcaagtgctgaacccagagcataaagtcactgagactgaagacacacaaatggtctccaaaggaaaggatttgggaacccaaaatcatacctcagaattgattctaagtagcccgccaggacaaaaggtgggctcgtcatttggactgacttgggatgcaaatgatatggtcattagcacagacaaaacgatgtgcatgtcaacaccagtcctagaacccacaaaagtaaccttttctgtttcaccgattgaagcgacggagaaatgtaagaaagtggagaagggtaatcgagggcttaaaaacataccagactcgaaggaggcacctgtgaacctgtgtaaacctagtttaggaaaatcaacaatcaaaacgaataccccaataggctgcaaagttagaaaaactgaaattataagttacccaagaccaaacttcaagaatgtcaaagcaaaagttatgtctagagcagtgttgcagcccaaagatgctgctttatcaaaggtcacgcccagacctcagcagaccagtgcctcatcaccctcatcagtgaattcaagacaacaaacagtcttgagcagaacaccgagatctgacttgaatgcagacaaaaaagcagaaattctaattaacaagacacataagcagcagtttaataaactcattactagccaggctgtgcatgttacaactcattctaaaaatgcttcacacagggttccaagaacaacatctgccgtgaaatcgaatcaggaagatgttgacaaagccagttcttctaactcagcatgcgagaccgggtccgtttctgcgttgtttcagaagatcaaaggcatactccctgttaaaatggaaagtgcagaatgtttggaaatgacctatgttcccaacattgataggattagccctgaaaagaagggtgaaaaagaaaatgggacatctatggaaaaacaagagctgaaacaagagattatgaatgagacttttgaatatggttctctgtttttgggctctgcttcaaaaacaacgaccacctcaggtaggaatatatccaagcctgactcctgcggtttgaggcaaatagctgctccaaaagccaaagtggggccccctgtttcctgtttgaggcggaacagtgacaatagaaatcccagtgctgatcgagccgtatctcctcagaggatcaggcgtgtgtccagttctggtaagaataaaatagttcaatagtttatgagttaattgaatgtaaaattggacagtcatgattataggtctaatgccttctgtcactaaagcagttagccttttgtggatcagcatcctgagcacaggaggtagaaaaagaagatgacaacatatatcccttatctttgagcaaggcaaaggctagttgaggagagaggtataggtgtataaaccatcttataagctattcagaaggatgtgtacataaatatacaattgggtggctgatgtaaatttgaatcatttcattaagttttttcaaatggttaagtgcttaacaatgctgaagtgttgtacggtaggtccctagtgtgccctcaatacatgtgaagagattaattttttttttaattttactgaaagatgtatgatagatttaggagggatatgagggtgactaaaaagttaaatttttctaatgtgaacttttatttatgttggcttggatcttaca

SEQ ID NO: 91554 - DNA, 1003 bp, Homo sapiens
attaatttacccttgggcattgaagcacccatttcattccaaaagtattcatttggttaaaggtcctgagggacttttctcaattcgtgtcgtcctgaactcactgggatgtttcatgctgtttaccaacatgtgttggaagactgtgagctctgtgagagcagaagtattctgtcctgtccaccactttatccccagtattgagcatgaagtctgacttgtaatatttgctcaacaacagatattgaatgaatgaagcctttcccacttgcactgaattattctcctttctctgatttctctcagatctccttttatgacacttatttcctctttttgcccattttgtgcagcctttcacatggttgtcttttaattatcttctccctctatactctcttcctaatcaaagtgtggctttgattcttattttgatggggagttatctcttgagtgtatagtctgctccattcctcttctgctcgtcagactcataagaaagttttaccagcaccttaaagtcagtatgtctaaaaagacatgctctatcttctgaaaacaattatcgtggcaacattttttgaggcacgttgttaaaaaaaaaaaaaggggggggccccttctttagggcattttcacatgggggaaagggccccaaaacatgttgtttattgggcaataaaaaaggcccgtgctcggtttccattccccaaccgggatatgtttcacatcctttttagcccgggggtacatcctattggcataatggttttccccctcaaacccctaatttggtgacccaccttggccaaaatatctcgcaaagttttatagccccccccttctttcaaacaaaaccctttccttctggattaagggtccccaaacaggaccccgggctccccttacggtacagaccggccgccgccacaaacttttttttatctttcggaaaacaccttctctccagactgcatcctcacgaccatccgtgcgcctcctc

SEQ ID NO: 91555 - DNA, 1911 bp, Homo sapiens
  misc_feature (1)...(1911): n = a,t,c or g
tttcgtccaggcggctggcggaggaggagagacggaggaggccgagaccggagcgccgctcgccgcagacttacttccccggctcagcagggaaaggttcctagaaggtgagcgcggacggtatgcaaagttgtgaatccagtggtgacagtgcggatgaccctctcagtcgcggcctacggagaaggggacagcctcgtgtggtggtgatcggcgccggcttggctggcctggctgcagccaaagcacttcttgagcagggtttcacggatgtcactgtgcttgaggcttccagccacatcggaggccgtgtgcagagtgtgaaacttggacacgccacctttgagctgggagccacctggatccatggctcccatgggaaccctatctatcatctaacagaagccaacggcctcctggaagagacaaccgatggggaacgcagcgtgggccgcatcagcctctattccaagaatggcgtggcctgctaccttaccaaccacggccgcaggatccccaaggacgtggttgaggaattcagcgatttatacaacgaggtctataacttgacccaggagttcttccggcacgataaaccagtcaatgctgaaagtcaaaatagcgtgggggtgttcacccgagaggaggtgcgtaaccgcatcaggaatgaccctgacgacccagaggctaccaagcgcctgaagctcgccatgatccagcagtacctgaaggtggagagctgtgagagcagctcacacagcatggacgaggtgtccctgagcgccttcggggagtggaccgagatccccggcgctcaccacatcatcccctcgggcttcatgcgggttgtggagctgctggcggagggcatccctgcccacgtcatccagctagggaaacctgtccgctgcattcactgggaccaggcctcagcccgccccagaggccctgagattgagccccggggtgagggcgaccacaatcacgacactggggagggtggccagggtggagaggagccccgggggggcaggtgggatgaggatgagcagtggtcggtggtggtggagtgcgaggactgtgagctgatcccggcggaccatgtgattgtgaccgtgtcgctaggtgtgctaaagaggcagtacaccagtttcttccggccaggcctgcccacagagaaggtggctgccatccaccgcctgggcattggcaccaccgacaagatctttctggaattcgaggagcccttctggggccctgagtgcaacagcctacagtttgtgtgggaggacgaagcagagagccacaccctcacctacccacctgagctctggtaccgcaagatctgcggctttgatgtcctctacccgcctgagcgctacggccatgtgctgagcggctggatctgcggggaggaggccctcgtcatggagaagtgtgatgacgaggcagtggccgagatctgcacggagatgctgcgtcagttcacagggaaccccaacattccaaaacctcggcgaatcttgcgctcggcctggggcagcaacccttacttccgcggctcctattcatacacgcaggtgggctccagcggggcggatgtggagaagctggccaagcccctgccgtacacggagagctcaaagacagcgacaaaatagaagccacctggaggcaacttcctcacccatcgacaagctcaccagccttcatgcctgtcctttggagcttccctgcagacagaggcagctagttctcaatttggtgtggtgtcctagccccacctgtggagtcaagtcccacctcctacctcaatcagaacctgagtttttttccaacacgagctccaggaaacaacttttggcttcatgatcctctcttttattctggctgttggccacttgangtata

SEQ ID NO: 91556 - DNA, 1976 bp, Homo sapiens
cagcttggtacgaggcgctgcctgcgtggggacaaggttaccaacgccatgcaggactttttggtcaccaacctggagccacgcttcattgaaccccagacagccaatctgtcagtggtgttcaaagactccaactccaccacacccctcatctttgtgctgtcacccggcacagaccctgctgccgacctctacaagtttgccgaagaaatgaagttctccaaaaagctctctgccatctccctgggccaggggcagggccctcgggcagaagccatgatgcgcagctccatagagaggggcaaatgggtcttcttccagaactgccacctggcaccaagctggatgccagccctagaacgcctcatcgagcacatcaaccccgacaaggtacacagggacttccgcctctggctcaccagcctgcccagcaacaagttcccagtgtccatcctgcagaacggctccaagatgaccattgagccgccacgcggtgtcagggccaacctgctgaagtcctatagtagccttggtgaagacttcctcaactcctgccacaaggtgatggagttcaagtctctgctgctgtctctgtgcttgttccatgggaacgccctggagcgccgtaagtttgggcccctgggcttcaacatcccctatgagttcacggatggagatctgcgcatctgcatcagccagctcaagatgttcctggacgaatatgatgacatcccctacaaggtcctcaagtacacggcaggggagatcaattacgggggccgtgtcactgatgactgggaccggcgctgcatcatgaacatcttggaggacttctacaaccctgacgtgctctcccctgagcacagctacagcgcctcgggcatctaccaccagatcccgcctacctacgacctccacggctacctctcctacatcaagagcctcccactcaatgatatgcctgagatctttggcctgcatgacaatgccaacatcacctttgcccagaacgagacgttcgccctcctgggcaccatcatccagctgcaacccaaatcatcttctgcaggcagccagggccgggaggagatagtggaggacgtcacccaaaacattctgctcaaggtgcctgagcctatcaacttgcaatgggtgatggccaagtacccagtgctgtatgaggaatcaatgaacacagtactagtacaagaggtcattaggtacaatcggctgctgcaggtgatcacacagacactgcaagacctactcaaggcactcaaggggctggtagtgatgtcctctcagctggagctgatggctgccagcctgtacaacaatactgtgcctgagctctggagtgccaaggcctacccatcgctcaagcctctgtcatcatgggtcatggacctgctgcaacgcctggactttctgcaggcctggatccaagatggcatcccagctgtcttctggatcagtggattcttcttcccccaggctttcttaacaggcactctgcagaattttgcccgcaaatttgtcatctccattgacaccatctcctttgatttcaaggtgatgtttgaggcaccatcagagttaacacaaagaccccaagtagggtgctatatccatggattattcctggaaggtgcccgctgggatccagaggccttccagctggctgagtctcagcccaaggagctgtacacagagatggccgttatctggctcttgccaacacccaaccgcaaggcccaggaccaggacttttacctgtgccccatctacaagacactgactcgtgctggaacactatcaaccacaggacactctaccaactatgtcattgctgtggagatccccacccatcagccccagcgacactggataaagcgtggtgtggccctcatctgtgccctggactactagactcagacagaagggctggggccattaaagctgaattttctaagcaa

SEQ ID NO: 91557 - DNA, 368 bp, Homo sapiens
tgaacgtgaagttaatgcctgcttgtgaaggtcatcacagttgttgggaatatattggttatgctacctttgcaaaatttcacatgcctttttaggcctgttcccattggatgacaaatctgtttattgagccaaaaaacagctcctggaactatgcagaataagtcaaatccaccatctacattaatagtccttcgaatacttgaagacggctttcatgaatttaataactgctttctgtggcttctttttttttaatttcaagaatagaacacagtagactgtaaaaatgagcattatcagtcttcctttggattttctatgtaaatgttggttaacattcaaatggtactgattataatttgaga

SEQ ID NO: 91558 - DNA, 3199 bp, Homo sapiens
atgaggatgcaaaggcataagaacgacacaatggactttggggactcggggaaaaggataggagggggagttctgtgcctgctgcaccagtcaaatacttccttcattaagctgaataataatggctttgaagatattgtcattgttatagatcctagtgtgccagaagatgaaaaaataattgaacaaatagaggatatggtgactacagcttctacgtacctgtttgaagccacagaaaaaagattttttttcaaaaatgtatctatattaattcctgagaattggaaggaaaatcctcagtacaaaaggccaaaacatgaaaaccataaacatgctgatgttatagttgcaccacctacactcccaggtagagatgaaccatacaccaagcagttcacagaatgtggagagaaaggcgaatacattcacttcacccctgaccttctacttggaaaaaaacaaaatgaatatggaccaccaggcaaactgtttgtccatgagtgggctcacctccggtggggagtgtttgatgagtacaatgaagatcagcctttctaccgtgctaagtcaaaaaaaatcgaagcaacaaggtgttccgcaggtatctctggtagaaatagagtttataagtgtcaaggaggcagctgtcttagtagagcatgcagaattgattctacaacaaaactgtatggaaaagattgtcaattctttcctgataaagtacaaacagaaaaagcatccataatgtttatgcaaagtattgattctgttgttgaattttgtaacgaaaaaacccataatcaagaagctccaagcctacaaaacataaagtgcaattttagaagtacatgggaggtgattagcaattctgaggattttaaaaacaccatacccatggtgacaccacctcctccacctgtcttctcattgctgaagatccgtcaaagaattgtgtgcttagttcttgataagtctggaagcatggggggtaaggaccgcctaaatcgaatgaatcaagcagcaaaacatttcctgctgcagactgttgaaaatggatcctgggtggggatggttcactttgatagtactgccactattgtaaataagctaatccaaataaaaagcagtgatgaaagaaacacactcatggcaggattacctacatatcctctgggaggaacttccatctgctctggaattaaatatgcatttcaggtgattggagagctacattcccaactcgatggatccgaagtactgctgctgactgatggggaggataacactgcaagttcttgtattgatgaagtgaaacaaagtggggccattgttcattttattgctttgggaagagctgctgatgaagcagtaatagagatgagcaagataacaggaggaagtcatttttatgtttcagatgaagctcagaacaatggcctcattgatgcttttggggctcttacatcaggaaatactgatctctcccagaagtcccttcagctcgaaagtaagggattaacactgaatagtaatgcctggatgaacgacactgtcataattgatagtacagtgggaaaggacacgttctttctcatcacatggaacagtctgcctcccagtatttctctctgggatcccagtggaacaataatggaaaatttcacagtggatgcaacttccaaaatggcctatctcagtattccaggaactgcaaaggtgggcacttgggcatacaatcttcaagccaaagcgaacccagaaacattaactattacagtaacttctcgagcagcaaattcttctgtgcctccaatcacagtgaatgctaaaatgaataaggacgtaaacagtttccccagcccaatgattgtttacgcagaaattctacaaggatatgtacctgttcttggagccaatgtgactgctttcattgaatcacagaatggacatacagaagttttggaacttttggataatggtgcaggcgctgattctttcaagaatgatggagtctactccaggtattttacagcatatacagaaaatggcagatatagcttaaaagttcgggctcatggaggagcaaacactgccaggctaaaattacggcctccactgaatagagccgcgtacataccaggctgggtagtgaacggggaaattgaagcaaacccgccaagacctgaaattgatgaggatactcagaccaccttggaggatttcagccgaacagcatccggaggtgcatttgtggtatcacaagtcccaagccttcccttgcctgaccaatacccaccaagtcaaatcacagaccttgatgccacagttcatgaggataagattattcttacatggacagcaccaggagataattttgatgttggaaaagttcaacgttatatcataagaataagtgcaagtattcttgatctaagagacagttttgatgatgctcttcaagtaaatactactgatctgtcaccaaaggaggccaactccaaggaaagctttgcatttaaaccagaaaatatctcagaagaaaatgcaacccacatatttattgccattaaaagtatagataaaagcaatttgacatcaaaagtatccaacattgcacaagtaactttgtttatccctcaagcaaatcctgatgacattgatcctacacctactcctactcctactcctactcctgataaaagtcataattctggagttaatatttctacgctggtattgtctgtgattgggtctgttgtaattgttaactttattttaagtaccaccatttgaaccttaacgaagaaaaaaatcttcaagtagacctagaagagagttttaaaaaacaaaacaatgtaagtaaaggatatttctgaatcttaaaattcatcccatgtgtgatcataaactcataaaaataattttaagatgtcggaaaaggatactttgattaaataaaaacactcatggatatgtaaaaactgtcaagattaaaatttaatagtttcatttatttgttattttatttgtaagaaaatagtgatgaacaaagatcctttttcatactgatacctggttgtatattatttgatgcaacagttttctgaaatgatatttcaaattgcatcaagaaattaaaatcatctatctgagtagtcaaaatacaagtaaaggagagcaaataaacaacatttgg

SEQ ID NO: 91559 - DNA, 1998 bp, Homo sapiens
gaccggccgaattccggtcgaccacgcgccgcccttgcggccggctctacgttccctgttctcgcctgcagctccgccatggctcctaaaggcagctccaaacagcagtctgaggaggacctgctcctgcaggatttcagccgcaatctctcggccaagtcctccgcgctcttcttcggaaacgcgttcatcgtgtctgccatccccatctggttatactggcgaatatggcatatggatcttattcagtctgctgttttgtatagtgtgatgaccctagtaagcacatatttggtagcctttgcatacaagaatgtgaaatttgttctcaagcacaaagtagcacagaagagggaggatgctgtttccaaagaagtgactcgaaaactttctgaagctgataatagaaagatgtctcggaaggagaaagatgaaagaatcttgtggaagaagaatgaagttgctgattatgaagctacaacattttccatcttctataacaacactctgttcctggtcgtggtcattgttgcttccttcttcatattgaagaacttcaaccccacagtgaactacatattgtccataagtgcttcatcaggactcatcgccctcctgtctactggctccaaatagaccatgtcagcttcaccccctggctttgtgtctatgggtggcctgtggtatatggaaaagtagcagggtggtcagggtgggagacacaagatgtttttatagtctagagcctttaaaaaacccagcagaatgtaattcagtatttgtttattggctgttttttgacagattgttgaaattaaatgaattgaaagggaaactcagagtactaggacgtttattaaaaggaaaaaaatgtcttgcaatgtgctgtaatcacaagaggagaaaataacttgtttccttgatctgtcagaggtcacagtaacctgggccgagctgttattatttattatataatagtagtaggaagttaataactggttctctgtgttccaagcacaatattacaacttcttttgaaccgtaaatatcagaatgaatcctcttcccaggggattgaacagaagcttaatgtttacaagtgtttgaatttgtgatctgaaataacacaaaattaaaaacatgatttctctaattttccaactagaggaagagaaacttgtggaaaagttctttttttttcttttttttttcttaaaaaagggcagccaaggtagtaacctaaaaatagtgcccaggcatatgaaagttgtcctacaaggttaaaaaacacactgttccactgtatggctttggccctgaggggccagggaggtcaacttgaccctgccatgttggtttgacttactaagacacaggaatcattgttttccttgaccagggtctcacaccctggaggaatgttaagtaagagaaagaacctctttcctgaatattgacatgtaaaagaccaaagtaatttttctgaacttctgcaattctgagaactctccaaggaatttacagtgattttagtgcttgtcagcatttttccatgaggactttcatacatttgactctttagttcacaggttcccattgattgtgagcaagatatttatctctttagcccttggggatccagctgagagcaatctcttgcatttttttacccgtgtatgtacagatatcatttcttgtgtatgccatgacttgaaaaagtttgggaagctctttagcaatatcagctaaaaggatatgaaatcacaggtgatagcagttgtcattcagtaatttcctacaagcagcaccccaaaggaaatatagtcctaatctttactatccacttctaaatttaatgtgaatttcatacatgttattagttgttttctttataattttataaaaattattcatcgggagtttaacttccacttccatgctatcggatgtgttgggctccatgcaagaacttggaagaaaaacaggcaggctcgtgcc

SEQ ID NO: 91560 - DNA, 1017 bp, Homo sapiens
  misc_feature (1)...(1017): n = a,t,c or g
aacttgagaaaaatctaaattgatcagtatgattagcactgactataagttgatctgaactgatattttactgtcaaatgaatggtgtgggcttttttgtatagcaggagtcattttttcctttactattttagcccctcaaacaggcacactgtagagaacttctgttcttctttccaaatcacatttcttactggggcttccatggtgggagaaattgaggaaagggcaggacacatattgctcaggcctttggggctaatttacagattgcctccttcctgcctccagcattaaatttgtcgctttttgggagatgcctaagacttggtagttaagtatctgctctgtagacgtgatttgcctcacttgtgtatcccaaggagaagagtgcagaaatcatgttttgggtactgattcaaactgtgtcctccaattctgctttaccaaccatgaagatgattgtttcatcctaactccccgcacgccttagaaacctcagaattctgtgactcttttattgcatattttaggaaacctctataaatgacaacaatttgcttgtttgttttggattgggaaattcatatttaggtctaaaggataacaggaatgactgataaagtgagaaagccctcaggtggagtccagtaagagcgcatggtaaaagaactctttgtgaagatctttcatttttaaagctgcttatctattcctaaatattcaccagaaaattactattattgggaaaaaaaaaaaaaaggggggccgttctaggggtccagtttcggccgcgggttggaagtaaaatttttttatgggccccaaaataaataccggccgggttaaaaagggggagggggaacaantttcgcgagccacctctaacaagcagccagtaccttggtactcatcgtccacctctcggtccgcgaacaacgggtgccccgtaaatagacccgatgtttcaccccctgaccgagacaagaacatctggccgccccgcccgcacctccc

SEQ ID NO: 91561 - DNA, 1023 bp, Homo sapiens
gatggctggacaccagttcacgcagctgtggacactggtaatgtggacagcctcaagcttcttatgtaccatagaataccagctcatggaaattctttcaatgaggaggagtccgagtcaagtgtctttgacttggatggaggagaagagagtcctgaaggcatatccaagcctgttgttcctgcagacctcattaaccacgccaacagagaaggctggactgctgcccacattgctgcttccaaaggttttaagaactgcctagaaatcttgtgtaggcacggagggcttgagccagaaaggagagacaagtgcaatcggactgtgcatgatgttgccactgatgactgcaagcatttgctggagaatctgaatgctcttaaaatacccttaaggatttcagtgggtgagattgaaccaagcaactatggttctgatgacttggaatgtgaaaacacaatatgtgctttaaatatccgcaaacagacatcatgggatgatttttcaaaagcagtgagtcaagctctgacaaatcatttccaggcaatctcttctgatggatggtggagtctggaagacgtgacttgcaataacaccactgattccaacatcggcctcagtgcaagaagcatacgatccatcacgctaggaaatgtgccgtggtcagtgggtcagagcttcgcgcagtccccgtgggactttatgaggaagaataaggcagagcacatcactgtgcttttgtcaggtcctcaagaaggctgtctcagtagtgtgacttatgcctccatgatccctctccagatgatgcagaactacctcaggctggttgagcaatatcataatgtcattttccacggcccagaaggaagcttgcaagactacatagtacatcagcttgcactctgcctgaagcacagacaaatgggctggcaggattctcctgtggaaatagttgaggagcttgaagtaggatgctggttttttccaagggaacagctacttaggacctgttcattagtagcg

SEQ ID NO: 91562 - DNA, 435 bp, Homo sapiens
  misc_feature (1)...(435): n = a,t,c or g
nnnnnaccagttatctgcctatttgctctcatgccttcaccccttccttctgtgttcttctatggattgtagggggctggagccatctccttaactacacttcccagactgcctttccaactagttggatactgccaatagaagggattcatgagagactggaaggccagagccagggagaagcaactctcttgtctggcttctgatagcatttctgtcagcagcagcagtgatagtgcaacagcaatggcagtactaaccatggtaactgcgttggcagagattccagccttggttgaggcatcacatcttcagcaggtctacaattacagtgacaccctccctgaaagcccagcaggggatatagacttgttgacttcagtttagcagtgatgcagcttctgatctctggttatcaacgcttcttactttttg

SEQ ID NO: 91563 - DNA, 1140 bp, Homo sapiens
  misc_feature (1)...(1140): n = a,t,c or g
ggattgaaaaagattgatggttaaagttgccctttaaaattctccaggttaagattgctgtaagaatgctatctagctagtggatcttcattcaatggaaaagcttttcccaaatgagaaactatccattccctggaggcattttgtaggtctctgcagctgtgtcctagcacctcttttatttctggaattttagaaattatttaattattgggcatatgatatttgaaagaggctgaatctttcaaggaattcaagcaaatcagaccctctcgtaatgttctctagcatagctcaagatgggttcaactgtggcaagtaacactaaaagggtagggttaggattagggttagagttttcttttttatgagaaaaggtttccatagataacatgaagcattaatttgccatgggaaacagaatcttgaacccttaagacttttgaatttgaaaacttcacattgctacatacttgcaagcattattaacgggcttgcatgctgagcaataccaggtaaaagttacaccccctaacatcaaagttctcatcatgttctagctctgatgctatttctcattgagaactgaaatgaaacatgggttaatcttgaacatacaaccccccttcttgattttaaaaacaaagaccagccaaccaaccagtatataatcccatagactcaagaattntctcatgagttctctccagtggatgacttaataattgatatgattggtggaataataactgatccattggtaccaccaggaatggcaaatgcctaataaactggccattgtaagcccctttaagaagtggtgatcgccgggcccatggcttaccctcgatccggcaccttggaagtgagcgggccaacatgggtaggaaccaaaacaccctgccacggggaacccctcctctaaatacaaattaccgccggggggcccccgtatccactctggagctaacaggacactttaccagataaagtgggggccgatggcccgccccccgggacaagggactgtcaaaaacagaacgatcgatcgacaaggcgcgcttaaccactcccccggcccattttttggagctatccggcggcaagaggagaaaaaattggattgaatgctcgcattcg

SEQ ID NO: 91564 - DNA, 987 bp, Homo sapiens
cggacgcgtgggctgccacctcattattttgcattgaagatacattgccagctactgcagccgaggaactaagagttgctaatgaattatgaatggaagtgatcattcatctccagttgtcttcctctttctgtgattgaaacccagatttggagctgagtcagctttgagcagacaagaatgctaatgcttaagagccacagcttgttctcggctctctccctgcatgaatcaacagcagtcccaggacaggcagagaccatcaggagcttaaccttcacacagagagagactccagatctcagagagcagtgctcaagattccaagacagaaccctgggattttctactggatatttcttccttcaaggagtcacagtgcttcacatgggtcaaggcaaagacaggtctcctgccaaggcacccaagatgaaatcttgaaaatgagaaacacatttgctgaactgaagaattcattagaggctctcagcagtagaatggaccaggcagaggaaagaattgggacccaggctggagtgcagtggcgtgatcatggctcactgcagcctcaacctcctgaattcaagcaatgctttcacctcagtctcccaagtagctgggactacagggcgtgcctttcttagagcaatcctggtgccactaaaagctgcattttcaatatgagataaaaatgtattttacaaaaagtgcaaggtcttcatgtctgctggcattgctgcaacagtggcttgtgtgagagatcactttttacggcaatacccaatttattggagagacaaactgctcaagcaaggatgattagcattctatggcattttaaaaggatacttgcaatgcttgaccttaccacaatagcaacaggaggtagctacaaaattattacaatagtagagtatggtaccacagttaattttatgtagctataatttaatactgcatctttaatgttgttcacatttctctgga

SEQ ID NO: 91565 - DNA, 744 bp, Homo sapiens
ccttctctcagaatggcatccatgctctaggaagaggacattgggtaaaaacagtaacccgtggtcttcttggcttccccctccctgcatggaacctctgccttgtgaattagctggagcagggctgattggggcctagtattctcagattacttttcctagggtagagcttccgtcctgtgactggtcacttgattgaggaaaggagctccagacctctataacatgattgcctccatagagcttttgtaacctagagctgagggtaggatgaaaaattccaatcacctgctagagggaaaagtgcatgcccttggtttttggctgccccagccataagcaaaactttatcctgctaagccatccaggggaagggggagggagcaggttgtggctcagatgccacagactcttgctcttcttactgagatttcatagattttactaaaaatgtttctccatttgccgtataccatcaggacagattctagagactctaaatggttatttttcaaacaaataattttccccagttgtggttgttttgctgggagctcctcatgttgccattgcacatgtatctcttctaacgtggagaaacatttgacatacaaaaagtatactgtaataataacagtctaaccaaactttccagacaacagcaggattttcctccaacatctgtgtttgatacacagttgcttattttgtttgtactcttgtatatgtcactgccctgcagcc

SEQ ID NO: 91566 - DNA, 2458 bp, Homo sapiens
cttccctctctcctccagcctctcacactctcctcagctctctcatctcctggaaccatggccagcacatccaccaccatcaggagccacagcagcagccgccggggtttcagtgccaactcagccaggctccctggggtcagccgctctggcttcagcagcgtctccgtgtcccgctccaggggcagtggtggcctgggtggtgcatgtggaggagctggctttggcagccgcagtctgtatggcctggggggctccaagaggatctccattggagggggcagctgtgccatcagtggcggctatggcagcagagccggaggcagctatggctttggtggcgccgggagtggatttggtttcggtggtggagccggcattggctttggtctgggtggtggagccggccttgctggtggcttcgggggccctggcttccctgtgtgcccccctggaggcatccaagaggtcactgtcaaccagagtctcctgactcccctcaacctgcaaatcgaccccagcatccagagggtgaggaccgaggagcgcgagcagatcaagaccctcaacaataagtttgcctccttcatcgacaaggtgcggttcctggagcagcagaacaaggttctggaaacaaagtggaccctgctgcaggagcagggcaccaagactgtgaggcagaacctggagccgttgttcgagcagtacatcaacaacctcaggaggcagctggacagcattgtcggggaacggggccgcctggactcagagctcagaggcatgcaggacctggtggaggacttcaagaacaaatatgaggatgaaatcaacaagcgcacagcagcagagaatgaatttgtgactctgaagaaggatgtggatgctgcctacatgaacaaggttgaactgcaagccaaggcagacactctcacagacgagatcaacttcctgagagccttgtatgatgcagagctgtcccagatgcagacccacatctcagacacatctgtggtgctgtccatggacaacaaccgcaacctggacctggacagcatcatcgctgaggtcaaggcccaatatgaggagattgctcagagaagccgggctgaggctgagtcctggtaccagacaaagtacgaggagctgcaggtcacagcaggcagacatggggacgacctgcgcaacaccaagcaggagattgctgagatcaaccgcatgatccagaggctgagatctgagatcgaccacgtcaagaagcagtgtgccaacctacaggctgccattgctgatgctgagcagcgtggggagatggccctcaaggatgccaagaacaagctggaagggctggaggatgccctgcagaaggccaagcaggacctggcccggctgctgaaggagtaccaggagctgatgaatgtcaagctggccctggacgtggagatcgccacctaccgcaagctgctggagggtgaggagtgcaggctgaatggcgaaggcgttggacaagtcaacatctctgtggtgcagtccaccgtctccagtggctatggcggtgccagtggtgtcggcagtggcttaggcctgggtggaggaagcagctactcctatggcagtggtcttggcgttggaggcggctttagttccagcagcggcagagccactgggggtggcctcagctctgttggaggcggcagttccaccatcaagtacaccaccacctcctcctccagcaggaagagctataagcactaaagtgcgtctgctagctctcggtcccacagtcctcaggcccctctctggctgcagagccctctcctcaggttgcctgtcctctcctggcctccagtctcccctgctgtcccaggtagagctggggatgaatgcttagtgccctcacttcttctctctctctctataccatctgagcacccattgctcaccatcagatcaacctctgattttacatcatgatgtaatcaccactggagcttcactgttactaaattattaatttcttgcctccagtgttctatctctgaggctgagcattataagaaaatgacctctgctccttttcattgcagaaaattgccaggggcttatttcagaacaacttccacttactttccactggctctcaaactctctaacttataagtgttgtgaacccccacccaggcagtatccatgaaagcacaagtgactagtcctatgatgtacaaagcctgtatctctgtgatgatttctgtgctcttcgctgtttgcaattgctaaataaagcagatttataatacaaaaaaaaaaaaagggggggcccttttaaaagaacaaattttaattaccgggggttggaaaggtataaatttttttatggggccccaaaaataaattccggggccggggtttaaaaaccgcgggaagggaaaaacccgggggttacccaatttaatcccttggg

SEQ ID NO: 91567 - DNA, 402 bp, Homo sapiens
agacgggcaatgttattaccccaagaatatcctgttggttccatatctgtatctagaatcattctaacgttgatatatctgctttattgttggggttttttttgaaccatagagacttattagtgagttaacaagtcagtcggtgaacaagatagaaatgagtggaaaaagaggtgatcaatcttggatcgatgataactgctggtggcgtttgactcttacatgatgaatacgtgtctggaactctgaggtccatcacagaagtagagctccttccgtatgtttgaaatgatcctatgtgtatagatgtcagagatacagaatttatttggtgatggcctttgcttttacttattttcattgcataattatagatgctcaatgtgagaacctatatatatg

SEQ ID NO: 91568 - DNA, 402 bp, Homo sapiens
  misc_feature (1)...(402): n = a,t,c or g
cccacgcgtncgaccacgcgtgcgtgagcatagcacaatgcatcgggcagggagggatcccgggggatcttggtttttacctttgagccatctgtggtcttgagtgatctacgtgcattatcaattaaaaggacctgatattcttgtttgggcatattgaaaaatgtgctcttacagataggtttcctctctctactgccccccgccccccaattttttttattgtggtaaaatacataaaacagaagttaccatcataaccatttctaagtacactgttcaacaacattaaatattctttacattgtgcaatcctcaccacgatccatctgcagaactttttcatcataccaaacagaaaactgccccattaaacacaaactccctattcttgcctcccca

SEQ ID NO: 91569 - DNA, 3421 bp, Homo sapiens
actttccatatgcccctgaagaataacttctttgaatgcaaagaggtggggacacggaggctctgtcattacgggttattatgggtgggacccagagacgggagtgaagggagggtgtggcccgcgggtgggatctgtagagcagacaaaatatggggcccctggcgcttaaagttcagtttgtctctcttgagcttggagaaaatcatccgtagtgcctccccgggggacacgtagaggagagaaaagcgaccaagataaaagtggacagaagaataagcgagactttttatccatgaaacagtctcctgccctcgctccggaagagcgctgccgcagagccgggtccccaaagccggtcttgagagctgatgacaataacatgggcaatggctgctctcagaagctggcgactgctaacctcctccggttcctattgctggtcctgattccatgtatctgtgctctcgttctcttgctggagatcctgctttcctatgttggaacattacaaaaggtctattttaaatcaaatgggagtgaacctttggtcactgatggtgaaatccaagggtccgatgttattcttacaaatacaatttataaccagagcactgtggtgtctactgcacatcccgaccaacacgttccagcctggactacggatgcttctctcccaggggaccaaagtcacaggaatacaagtgcctgtatgaacatcacccacagccagtgtcagatgctgccctaccacgccacgctgacacctctcctctcagttgtcagaaacatggaaatggaaaagttcctcaagtttttcacatatctccatcgcctcagttgctatcaacatatcatgctgtttggctgtaccctcgccttccctgagtgcatcattgatggcgatgacagtcatggactcctgccctgtaggtccttctgtgaggctgcaaaagaaggctgtgaatcagtcctggggatggtgaattactcctggccggatttcctcagatgctcccagtttagaaaccaaactgaaagcagcaatgtcagcagaatttgcttctcacctcagcaggaaaacggaaagcaattgctctgtggaaggggtgagaactttctgtgtgccagtggaatctgcatccccgggaaactgcaatgtaatggctacaacgactgtgacgactggagtgacgaggctcattgcaactgcagcgagaatctgtttcactgtcacacaggcaagtgccttaattacagccttgtgtgtgatggatatgatgactgtggggatttgagtgatgagcaaaactgtgattgcaatcccacaacagagcatcgctgcggggacgggcgctgcatcgccatggagtgggtgtgtgatggtgaccacgactgtgtggataagtccgacgaggtcaactgctcctgtcacagccagggtctggtggaatgcagaaatggacaatgtatccccagcacgtttcaatgtgatggtgacgaggactgcaaggatgggagtgatgaggagaactgcagcgtcattcagacttcatgtcaagaaggagaccaaagatgcctctacaatccctgccttgattcatgtggtggtagctctctctgtgacccgaacaacagtctgaataactgtagtcaatgtgaaccaattacattggaactctgcatgaatttgccctacaacagtacaagttatccaaattattttggccacaggactcaaaaggaagcatccatcagctgggagtcttctcttttccctgcacttgttcaaaccaactgttataaatacctcatgttcttttcttgcaccattttggtaccaaaatgtgatgtgaatacaggcgagcatatccctccttgcagggcattgtgtgaacactctaaagaacgctgtgagtctgttcttgggattgtgggcctacagtggcctgaagacacagattgcagtcaatttccagaggaaaattcagacaatcaaacctgcctgatgcctgatgaatatgtggaagaatgctcacctagtcatttcaagtgccgctcaggacagtgtgttctggcttccagaagatgtgatggccaggccgactgtgacgatgacagtgatgaggaaaactgtggttgtaaagagagagatctttgggaatgtccatccaataaacaatgtttgaagcacacagtgatctgcgatgggttcccagactgccctgattacatggacgagaaaaactgctcattttgccaagatgatgagctggaatgtgcaaaccatgcgtgtgtgtcacgtgacctgtggtgtgatggtgaagccgactgctcagacagttcagatgaatgggactgtgtgaccctctctataaatgtgaactcctcttcctttctgatggttcacagagctgccacagaacaccatgtgtgtgcagatggctggcaggagatattgagtcagctggcctgcaagcagatgggtttaggagaaccatctgtgaccaaattgatacaggaacaggagaaagagccgcggtggctgacattacactccaactgggagagcctcaatgggaccactttacatgaacttctagtaaatgggcagtcttgtgagagcagaagtaaaatttctcttctgtgtactaaacaagactgtgggcgccgccctgctgcccgaatgaacaaaaggatccttggaggtcggacgagtcgccctggaaggtggccatggcagtgttctctgcagagtgaacccagtggacatatctgtggctgtgtcctcattgccaagaagtgggttctgacagttgcccactgcttcgaggggagagagaatgctgcagtttggaaagtggtgcttggcatcaacaatctagaccatccatcagtgttcatgcagacacgctttgtgaagaccatcatcctgcatccccgctacagtcgagcagtggtggactatgacatcagcatcgttgagctgagtgaagacatcagtgagactggctacgtccggcctgtctgcttgcccaacccggagcagtggctagagcctgacacgtactgctatatcacaggctggggccacatgggcaataaaatgccatttaagctgcaagagggagaggtccgcattatttctctggaacattgtcagtcctactttgacatgaagaccatcaccactcggatgatatgtgctggctatgagtctggcacagttgattcatgcatgggtgacagcggtgggcctcttgtttgtgagaagcctggaggacggtggacattatttggattaacttcatggggctccgtctgcttttccaaagtcctggggcctggcgtttatagtaatgtgtcatatttcgtcgaatggattaaaagacagatttacatccagacctttctcctaaac

SEQ ID NO: 91570 - DNA, 1798 bp, Homo sapiens
gaagcacgaagttcctgtatacgggtcccgatgtgtggacatcaccggcaatatattctggacaggaggtgaagacaccatcctgtattcctgggacctgaggagctaccagaggctgcaccaacacaacttacagaatgagatcctcagcattacccacgaccccggtgaagaatgggtattggcgggcctgagaacgagtgatatcgtgttccttcacactcgtcggaatgagcagtttaaggctctcatgaaaaaatacacccgccaccacagcctcaagtttgcctcctgtgggagactattttgtgaccgcgatagatacgcgcctcagtggcttggaggcaccttctctgcaaaagttgtttcagaacaacagcccccttggtcccctgccctgctgcagctgcagttccccaggacagagctgacgccatccagagaccctcccctgggctcccagcatcatctgggaggattttctccagcaaacccacacaaggtgaggagcaggggcacagagcgggagcgctggccaaatgggaagcacgacaagcaatgcagacgcaggcagaaggagacagaagtggatggcaggactcacaacaccctcttcctggtcttccacttcagcacaatgctactgcctaaaaaaatgaagctcctgctgtttctggtttcccagatggccatcttggctctattcttccacatgtacagccacaacatcagctccctgtctatgaaggcacagcccgagcgcatgcacgtgctggttctgtcttcctggcgctctggctcttcttttgtggggcagctttttgggcagcacccagatgttttctacctgatggagcccgcctggcacgtgtggatgaccttcaagcagagcaccgcctggatgctgcacatggctgtgcgggatctgatacgggccgtcttcttgtgcgacatgagcgtctttgatgcctacatggaacctggtccccggagacagtccagcctctttcagtgggagaacagccgggccctgtgttctgcacctgcctgtgacatcatcccacaagatgaaatcatcccccgggctcactgcaggctcctgtgcagtcaacagccctttgaggtggtggagaaggcctgccgctcctacagccacgtggtgctcaaggaggtgcgcttcttcaacctgcagtccctctacccgctgctgaaagacccctccctcaacctgcatatcgtgcacctggtccgggacccccgggccgtgttccgttcccgagaacgcacaaagggagatctcatgattgacagtcgcattgtgatggggcagcatgagcaaaaactcaagaaggaggaccaaccctactatgtgatgcaggtcatctgccaaagccagctggagatctacaagaccatccagtccttgcccaaggccctgcaggaacgctacctgcttgtgcgctatgaggacctggctcgagcccctgtggcccagacttcccgaatgtatgaattcgtgggattggaattcttgccccatcttcagacctgggtgcataacatcacccgaggcaagggcatgggtgaccacgctttccacacaaatgccagggatgcccttaatgtctcccaggcttggcgctggtctttgccctatgaaaaggtttctcgacttcagaaagcctgtggcgatgccatgaatttgctgggctaccgccacgtcagatctgaacaagaacagagaaacctgttgctggatcttctgtctacctggactgtccctgagcaaatccactaa

SEQ ID NO: 91571 - DNA, 3364 bp, Homo sapiens
aggttcgggctggttgttccgttgcgagctgcagctgcgatctctgtggtaggcccagatattttttaccgtcatttgctttcttaagtgtatgctgacttgtaaagtgaagaagccagtggtgctgcgggtgttcttttggggtagtgtctgggatccagtacgagttgaatcattgttcaaataaggtgtaattgaaaagtgatcctctcttcagagatgtcaaaaacaaacaaatccaagtctggatctcgctcttctcgctcaagatctgcatcaagatctcgttctcgttcattttcgaagtctcggtcccgaagccgatctctctctcgttcaaggaagcgcaggctgagttctaggtctcgttccagatcatattctccagctcataacagagaaagaaaccacccaagagtatatcagaatcgggatttccgaggtcacaacagaggctatagaaggccctattatttccgtgggcgtaacagaggcttttatccatggggccaatataaccgaggaggctatggaaactaccgctcaaattggcagaattaccggcaagcatacagtcctcgtcgaggccgttcaagatcccggtccccaaagagaaggtccccttcaccaaggtccaggagccattctagaaactctgataagtcgtcttctgaccggtcaaggcgctcctcatcctcccgttcttcctccaaccatagccgagttgaatcttctaagcgcaagtctgcaaaggagaaaaagtcctcttctaaggatagccggccatctcaggctgccggggataaccagggagatgaggtcaaggagcagacattctctggaggcacctctcaagatacaaaagcatctgagagctcgaagccatggccagatgccacctacggcactggttctgcatcacgggcctcagcagtttctgagctgagtcctcgggagcgaagcccagctctcaaaagccccctccagtctgtggtggtgaggcggcggtcaccccgtcctagccccgtgccaaaacctagtcctccactttccagcacatcccagatgggctcaactctgccgagtggtgccgggtatcagtctgggacacaccaaggtcagttcgaccatggttctgggtccctgagtccatccaaaaagagccctgtgggtaagagtccaccatccactggctccacatatggctcatctcagaaggaggagagtgctgcttcaggaggagcagcctatacaaagaggtatctagaagagcagaagacagagaatggaaaagataaggaacagaaacaaacaaataccgataaagaaaaaataaaagagaaagggagcttctctgacacaggcttgggtgatggaaaaatgaaatctgattcttttgctcccaaaactgattctgagaagccttttcggggcagtcagtctcccaaaaggtataagctccgagatgactttgagaagaagatggctgacttccacaaggaggagatggatgatcaagataaggacaaagctaagggaagaaaggaatctgagtttgatgatgaacccaaatttatgtctaaagtcataggtgcaaacaaaaaccaggaggaggagaagtcaggcaaatgggagggcctggtatatgcacctccagggaaggaaaagcagagaaaaacagaggagctggaggaggagtctttcccagagagatccaaaaaggaagatcggggcaagagaagcgaaggtgggcacaggggctttgtgcctgagaagaatttccgagtgactgcttataaagcagtccaggagaaaagctcatcacctcccccaagaaagacctctgagagccgagacaagctgggagcgaaaggagattttcccacaggaaagtcttccttttccattactcgagaggcacaggtcaatgtccggatggactcttttgatgaggacctcgcacgacccagtggcttattggctcaggaacgcaagctttgccgagatctagtccatagcaacaaaaaggaacaggagtttcgttccattttccagcacatacaatcagctcagtctcagcgtagcccctcagaactgtttgcccaacatatagtgaccattgttcaccatgttaaagagcatcactttgggtcctcaggaatgacattacatgaacgctttactaaatacctaaagagaggaactgagcaggaggcagccaaaaacaagaaaagcccagagatacacaggagaatagacatttcccccagtacattcagaaaacatggtttggctcatgatgaaatgaaaagtccccgggaacctggctacaaggctgagggaaaatacaaagatgatcctgttgatctccgccttgatattgaacgtcgtaaaaaacataaggagagagatcttaaacgaggtaaatcgagagaatcagtggattcccgagactccagtcactcaagggaaaggtcagctgaaaaaacagagaaaactcataaaggatcaaagaaacagaagaagcatcggagagcaagagacaggtccagatcctcctcctcttcctcccagtcatctcactcctacaaagcagaagagtacactgaagagacagaggaaagagaggagagcaccacgggctttgacaaatcaagactggggaccaaagactttgtgggtccaagtgaaagaggaggtggcagagctcgaggaacctttcagtttcgagccagaggaagaggctggggcagaggcaactactctgggaacaataacaacaacagcaacaacgattttcaaaaaagaaaccgggaagaggagtgggacccagagtacacacccaaaagcaagaagtattacttgcatgatgaccgtgaaggcgaaggcagtgacaagtgggtgagccggggccggggccgaggagcctttcctcggggtcggggccggttcatgttccggaaatcaagtaccagccccaagtgggcccatgacaagttcagtggggaggaaggggagattgaagacgacgagagtgggacagagaaccgagaagagaaggacaatatacagcccacaaccgagtaggggccacccttgacgggattcctgcccaggggagagaggcgctgggaagatggctggtgaggagcttaacagaggaacctcaagaagattctgaaaatcctacccccaccccccaccagccgcacagattgtactaccgcgagaggcatccctggcgctgtctcccactggacagaggaggctggccatggggcccaggggtcaggcccagcttttgagcagaatacaacgcattgggctttagctgtttttctcatttggtggagtgtggggtggg

SEQ ID NO: 91572 - DNA, 2775 bp, Homo sapiens
atcgtctgggaagacagaaagaacaatcctttaagggagaacctagaagccattcaacaaggttaaaatcttcaggcttccgaggatttggtagacagatcagaggcacgtttcccacaactgcgaagaggcgctgaggcaattctgcaagaagattttggggttttggaaaagaagctatggaaaacggaggggcaggcactctgcagataaggcaagtcctgcttttctttgttttgctgggaatgtctcaggcgggctctgaaactgggaactttttggtgatggaggaattgcagagcgggagctttgtaggaaatttggcaaagaccctgggactcgaggtgagtgagctgtcttcgcggggggctcgggtggtttctaatgataacaaagagtgtttgcagctggacacaaacactggggatttgctcctgagagaaatgctagacagggaggagctctgtggctccaatgagccttgtgtgctgtatttccaagtgttaatgaaaaaccccacgcagtttttacaaattgagctccaggtcagggatataaatgatcactctcccgtcttcttggaaaaagaaatgctcttagaaatcccagagaacagtcctgttggtgctgtgttcttgcttgaaagtgcaaaggatttagatgtaggaatcaatgctgtaaaaagctacacaataaatccgaactctcatttccacgttaaaataagagtcaatccagacaataggaaataccctgagttagttctggacaaggcgctggattatgaagagcgcccggagctcagtttcatcctcactgctctggatggcgggtcccctcccaggtctggaactgccttggtcagggtggtggttgtagatattaatgacaactcccctgagtttgagcaggctttttatgaggtgaagattctggagaatagcatccttggctccctggttgtgaccgtctcagcctgggatttagactctggaacaaacagtgaactatcctataccttttcccatgcctcagaagatattcgcaagacatttgaaattaatcaaaagtctggtgacattactttaacagcacctttggattttgaagcaattgagtcatactcaataatcattcaagccacagatgggggaggactttttggaaaatctacagtcagaattcaggtgatggatgtaaacgacaacgctcctgaaatcactgtgtcatcaattaccagtccaatcccagaaaacactccagagactgtggttatggttttcaggatacgagacagagactctggggacaacggaaagatggtttgttctatcccggaggacatcccattcgtgctaaaatcttcggtaaataattactacactttggaaacacagagaacactggacagagagagccaagccgagtacaacatcaccatcactgtcaccgacatggggacacccaggctgaaaaccgagcacaacataacggtcctggtctctgacgtcaatgacaacgcccccaccttcacccaaacctcctacaccctgttcgtccgcgagaacaacagccccgccctgcacatcggcagcgtcagcgccacagacagagactcaggcaccaacgcccaggtcaactactcgctgctgccgccccaggacccgcacctgcccctcgcctccttggtctccatcaacgcggacaacggccacctgtttgccctcaggtcgctggactacgaggccctgcaggcgttcgagttccgcgtgggcgccacagaccgcggctccccggcgttgagcagcgaggcgctggtgcgcgtgctggtgctggacgccaacgacaactcgcccttcgtgctgtacccgctgcagaacggctccgcgccctgcaccgagctggtgccccgggcggccgagccgggctacctggtgaccaaggtggtggcggtggacggtgactcgggccagaacgcctggctgtcgtaccagctgctcaaggccacggagcccgggctgttcggcgtgtgggcgcacaatggcgaggtgcgcaccgccaggctgctgagcgagcgcgacgcggccaagcacaggctggtggtgctggtcaaggacaatggcgagcctccgcgctcggccaccgccacgctgcacgtgctcctggtggacggcttctcccagccctacctgcctctcccggaggcggccccggcccaggcccaggccgactcgctcactgtctacctggtggtggcattggcctcggtgtcgtcgctcttcctcttttcggtgctcctgttcgtggcagtgcggctgtgcaggaggagcagggcggccccggtcggtcgctgctcggtgcctgagggcccctttccaggacatctggtggacgtgagtggcaccgggaccctgtcccagagctaccactatgaggtgtgtgtgactggaggctccaggtcaaataagttcaaatttctgaaaccaattatccccaacttcctaccccagagcacaggtagtgaagtcgaagaaaatcccccatttcagaataatttgggtttctgataaagaatgaaaaataaaacctgtgtttatgaatacatttataattaggaacttatcgtgaggtgcctgtaaagtagtatttttgatcacttcaaatacatactcttcaagtcaagaaataaatttctttacatagaaaaggatacagatttagtaccaagaacacttcacaaagcaggaaatgtgcatgtgtaatggtttatgtcaa

SEQ ID NO: 91573 - DNA, 850 bp, Homo sapiens
caattttatatcctgcctcatttcaaatagattgtgataatcactttagcagatgatttgcattgcagcaactgttctcccagtcctggttaggatctgtgcctgaggccttttgtggggagttggggtgggggccggagaacatctcagtctgatctcaggagagataaagacacaggagtgagaactgccagttccaaggtttccgtgatgttccgggaagccaggagaagtgacatagtggagagccggcatgctgggagcctagtgacttggatcttaatcctgtctcacactgatggctgtatggcctccacatacttctgtgcccagggtcagagttccctcctgccgcctgtttctagtcaagagctagaagaatagccagcttctttgggtggtggcaaaggggattgtttatttatagtacagattcctgccctccccctttgacctcctgaatcagaatctctagggacacagcctgggagacagagctagactccatctcaaagaaaaaagaagaagaagaagaaagctaactcagtacactaagagtgatttacatgcctgcaaataatttgtgtctggggtcttgaccctccccaaatgccttgttatttatatctctgcttttagaaaacagatggtcatgtgtctatgggcttgtaccggcagaggcaacagcaggtccttaagactccccaggtgccatgatgaaaagacccttagaaaatattgaaataagctcaaaacttaaaaaaaaaaataccagaaataaaagctagtaaaggtgagaggtgtggggcttttggaacatagagcataataaatcagaataaaaaaaaaa

SEQ ID NO: 91574 - DNA, 490 bp, Homo sapiens
catgagagagaggctggggatgatgtgacatggaccttccccgccggaaatcagtcccgcatcaatcccgctgagcccggcagcttcacttgctgtgaactgaggacagctgcaggtcaggttgtcatgtgagctaaggacaaactccagcctgctaaggtatcaaaatatgtgccctgtgggggatgaagatgaccggaaggaggcaggaagggttgtgggcacgttcaggtccttggtgtgggtgctgcagtcagtttttgagcattcatccagctgtttgcttatggtctacacacttttcggtatatatttcatattcaataaaagagttacaaagttccagctggctgggagattcatccttactctgatagcttttttagtccttccccaagaaaaaaccaaaccaaactaaaacaaaacaaaaaacccaaaaacaaaaaaaaaaaaccccaccaaaacccaaaccaaccaaccaaaaaaaaaa

SEQ ID NO: 91575 - DNA, 385 bp, Homo sapiens
agcagataaaagagtttcattacacttttatgataaacacttctcaaagcgaatgcataccccttgttctgattaaatactcacctagcaaccttgaaagaatatggtttttcatgtggctcatggagccattcgtagcagcagcctctcaattttttaacctgggtaactgcagtgaagcctcatttcatggaggggaattagaagcaggttccacattccaagagtggggtaaaataatatatcatgaaaattcctttgaaaatccattagagaaggaattgaggaaatttttagaaactgatacccatacataaacctccatgcagactatggtgaaaattataacaaagtcccaccaagtcttcttggataatagaaaccc

SEQ ID NO: 91576 - DNA, 962 bp, Homo sapiens
cggctgcaagcacctgctccaaaactcctggtatgacccacgcgtccgagaggccgatcgcgtcgggcagcgggcgcggcggccccgcgcagccatggactggctcatggggaagtccaaagccaagcccaatggcaagaagcccgctgcggaggagaggaaggcctacctggagcctgagcacaccaaggccaggatcaccgacttccagttcaaggagctggtggtgctgccccgcgagattgaccttaacgagtggctggccagcaacaccacgacgtttttccaccacatcaacctgcagtatagcaccatctcggagttctgcacaggagagacgtgtcagacgatggccgtgtgcaacacacagtactactggtatgacgagcgggggaagaaggtcaagtgcacggccccacagtacgttgacttcgtcatgagctccgtgcagaagctggtgacggatgaggacgtgttccccacaaaatacggcagagaattccccagctcctttgagtccctggtgaggaagatctgcagacacctgttccacgtgctggcacacatctactgggcccacttcaaggagacgctggccctggagctgcacggacacttgaacacgctctacgtccacttcatcctctttgctcgggagttcaacctgctggaccccaaagagaccgccatcatggacgacctcaccgaggtgctatgcagcgggggccggcggggttccacagtgggggcagtggggatggggccggcagcgggggccccgggagcacagaaccacgtgaaggagagatgagccccccgggccggacaggggcacacgtgtgcaaagagacggtggtgtgtgatctctcctgcataagcgtgagcacacatgtgctgggcacgcgtgtggcgaggacttgcagggccccggactgacctggtgtgtggctgcataaggcacg

SEQ ID NO: 91577 - DNA, 801 bp, Homo sapiens
ggagccagacgcatgctttaaaagagctgcttggccgcggagggcgtggtaggacaggaggcctggaggagaggagagagggatgtgtgttccaccatgggaccatgaggggccccaaaaggtgggggggggactccctgcaaggtgagtcagctcccataagccccagggcctggttcggctgtcctggccccggcctgatgccctgcactaggtggaagacaggatctccagggaacccggctgctttgggcccatgacagtggggtgggtgggcagaaggccaagagcaaacaggaaaatctggagtccctggaggcaactggcagagaagaggaaggaggccaaggcccaccagtgaccacgaagggtgtgctgcttgccctgttgatggcaggcttggccctgcagccaggcactgccctgctgtgctactcctgcaaagcccaggtgagcaacgaggactgcctgcaggtggagaactgcacccagctgggggagcagtgctggaccgcgcgcatccgtgagtggggggacgacagccgccaggcctaggtctctgccactgaactattaatctttctggccatctgtccgcatctgtgtgctgttttccttccacctgtccccgacccgtcccgcacctgcacccccaacaatcacccagcatctgtccctccagccatcctcctccatctgccactcctccactcatctgtccctccccatcctccatcttccactcctccacccatctgtccctccccatccctgagctcacttactcactcaccccatttc

SEQ ID NO: 91578 - DNA, 1141 bp, Homo sapiens
  misc_feature (1)...(1141): n = a,t,c or g
gcccacgcgtccgcagagggggatgctgagggggaggccgaagggccagtgggcagcaccctaggcagttatgctacccttacccggcggccaggacgcagtgcccttgtccggaccagtcctagtgtgaccccaaccccagctcgggggactcctcgcagccagtcctttgccctgcgggcccggcgcaaaggccccccgcccccgccccccaagcgcctcagctccgtctctggccccagcccggagccacctccactagatgggagcccagggcccaaggaaggggccacagggccccgaaggcgaacactgagtgaacctgctggcccctcagagccccctggcccacctgccccggctgggcccgcgtcagacacggaggaggaggagccaggccctgaggggacgcccccatctcggggcagctctggggaagggctgccgtttgcagaggaagggaacctgaccatcaaacagcgcccgaagcccgctggccccccgccccgagagacacccgtgccccccggcctcgatttcaacctcacggaatcagacactgttaagcggaggcccaagtgccgggagagagagccactgcagaccgcactgctggccttcggagtggccagtgccacgcctggccccgctgccccactgccttccccaactcctggcgagtctcctccagcttctagccttccccagcccgagcccagcagccttccagcccaaggagttccaaccccccttgctcccagccccgccatgcagcctccagtgccgccctgcccagggccaggtctggaaagctcagcagctagtcggtggaatggggagacagaacccccggccgcccctgctgccctcctcaaggtgcccggagcaggaacagcccccaagcctgtgtcggtngcctgcacccagctggcattttctggccctaagctagcgccccggcttcggcccccgcccagtggcctcctccacggcctgagagcactgggattgtggggcccagggcagggcccagcagagattggagcagaccagttcgttcctgggcagttgcattgagagncgcagagaagagcatttggcaccaaggagcaagaggggaaccncagcgttttcaaccatg

SEQ ID NO: 91579 - DNA, 1429 bp, Homo sapiens
ttttttttttttcagagtgaaaaactttattaacaacaggtttcaacgagaaagcaaatgaatacccctagaaacatggacagcatctcccccagcagcaggcaggggaagggaggcaggaggggtaagcctagggtgttccctaggaaagggccaggttccctctatccagctgggggcaccgagacggcctcattcagggaagtccaggatggcagctgaaggcagcaggtttagcagccaaagcccaggcctagtggatagacagggtccaaaatgtgacccttctaggctggtatcaccatgggggcgtcatgggctgaggattctgcagataggacatcaccacggcagagatggacagcatgaagctactcatcatttgcttcgtgtcctccgagctccgagagttggcaaagctgatgaaggagcagtagacagcgacccaagcacaccacttcagcttaagcatgaggccgcacatgctgaagatcatgcccagcaggttcatgtagtccggcgtcgggtcgtccaaggccgggttacattcgctcggcgggggcttgtacctcagcactttgttcggcctccgtgggtccgacatattgttagtggaccataccgagtcgaaggccagatcacgccctcttccgctgcaggaatcgcagcttccgggcgtgcaagctgagggcggattttagagtaacacccgagggccctcgcatttccgttcctcatgacagaggcttggactccccttacccagagaacggagatttaggagaagccagaagtcttcctttcaaagggaaaatggggaaaagaacctgaaagcgggcttcaatagttccaacccgatcaccgaaatgccaaaatgatgaacccggaagtgataaacaggaagtaggtcaggaagaacaataataaggttacacccaagcgtgggtttctaaggcgcggaattttccgtacagaccgatttaaggctgcaaggaaggagtcctgggagcatggctttccctgagccaaagccgcggcctccagagctgccgcagaaacggttgaagacgctggactgcgggcagggggcagtgcgagccgtacgatttaatgtggatggcaattactgcctgacgtgcggcagtgacaagacgctgaagctgtggaacccgcttcgggggacgctgctgcggacgtacagcggccacggctacgaggtgctggatgcggccggctcctttgacaacagtagtctctgctccggcggcggggacaaggcggtggttctgtgggatgtggcatcagggcaggtcgtgcgcaaattccggggccacgcagggaaggtgaacacggtgcagtttaatgaagaggccacagttatcctgtccggctctattgattccagtatccgctgttgggattgccgctc

SEQ ID NO: 91580 - DNA, 2324 bp, Homo sapiens
ggcacgagatccggatgtctcggttatgaagtggagcagtgagtgtgagcctcaacatagttccagaactctccatccggactagttattgagcatctgcctctcatatcaccagtggccatctgaggtgtttccctggctctgaaggggtaggcacgatggccaggtgcttcagcctggtgttgcttctcacttccatctggaccacgaggctcctggtccaaggctctttgcgtgcagaagagctttccatccaggtgtcatgcagaattatggggatcacccttgtgagcaaaaaggcgaaccagcagctgaatttcacagaagctaaggaggcctgtaggctgctgggactaagtttggccggcaaggaccaagttgaaacagccttgaaagctagctttgaaacttgcagctatggctgggttggagatggattcgtggtcatctctaggattagcccaaaccccaagtgtgggaaaaatggggtgggtgtcctgatttggaaggttccagtgagccgacagtttgcagcctattgttacaactcatctgatacttggactaactcgtgcattccagaaattatcaccaccaaagatcccatattcaacactcaaactgcaacacaaacaacagaatttattgtcagtgacagtacctactcggtggcatccccttactctacaatacctgcccctactactactcctcctgctccagcttccacttctattccacggagaaaaaaattgatttgtgtcacagaagtttttatggaaactagcaccatgtctacagaaactgaaccatttgttgaaaataaagcagcattcaagaatgaagctgctgggtttggaggtgtccccacggctctgctagtgcttgctctcctcttctttggtgctgcagctggtcttggattttgctatgtcaaaaggtatgtgaaggccttcccttttacaaacaagaatcagcagaaggaaatgatcgaaaccaaagtagtaaaggaggagaaggccaatgatagcaaccctaatgaggaatcaaagaaaactgataaaaacccagaagagtccaagagtccaagcaaaactaccatgcgatgcctggaagctgaagtttagatgagacagaaatgaggagacacacctgaggctggtttctttcatgctccttaccctgccccagctggggaaatcaaaagggccaaagaaccaaagaagaaagtccacccttggttcctaactggaatcagctcaggactgccattggactatggagtgcaccaaagagaatgcccttctccttattgtaaccctgtctggatcctatcctcctacctccaaagcttcccacggcctttctagcctggctatgtcctaataatatcccactgggagaaaggagttttgcaaagtgcaaggacctaaaacatctcatcagtatccagtggtaaaaaggcctcctggctgtctgaggctaggtgggttgaaagccaaggagtcactgagaccaaggctttctctactgattccgcagctcagaccctttcttcagctctgaaagagaaacacgtatcccacctgacatgtccttctgagcccggtaagagcaaaagaatggcagaaaagtttagcccctgaaagccatggagattctcataacttgagacctaatctctgtaaagctaaaataaagaaatagaacaaggctgaggatacgacagtacactgtcagcagggactgtaaacacagacagggtcaaagtgttttctctgaacacattgagttggaatcactgtttagaacacacacacttactttttctggtctctaccactgctgatattttctctaggaaatatacttttacaagtaacaaaaataaaaactcttataaatttctatttttatctgagttacagaaatgattactaaggaagattactcagtaatttgtttaaaaagtaataaaattcaacaaacatttgctgaatagctactatatgtcaagtgctgtgcaaggtattacactctgtaattgaatattattcctcaaaaaattgcacatagtagaacgctatctgggaagctatttttttcagttttgatatttctagcttatctacttccaaactaatttttgtttttgctgagactaatcttattcattttctctaatatggcaaccattataaccttaatttattattaacatacctaagaagtacattgttacctctatataccaaagcacattttaaaagtgccattaacaaatgtatcactagccctcctttttccaacaagaagggactgaa

SEQ ID NO: 91581 - DNA, 1335 bp, Homo sapiens
acttttctttttagaaaatcaccttttctcccctaattcttctgcagaagaaaagaggtttcgaaagagggaaaaggaaaaaacaagccggctccggtatcagccggtcagcccaggtggaaaacgagagtgaaagtagggcttaacggggagcgcaccgcctctttcgaaagccgctgggccaccaccagtgcgtgagccttggatccctcaacgtattgcgagacgccggtgtatagcccggacctgtgccccaacatgatcgccgctcaggccaagctggtttaccagctcaataagtactacactgagcgctgtcaggcgcgcaaggcggccatcgccaaaaccatccgagaggtctgtaaggtggtctcggacgtgctcaaggaagtggaggtgcaggagcctcgcttcattagctccttgagcgagatcgatgcccgctacgaggggctcgaggtcatttcgcccaccgaatttgaggtggtgctctacctaaaccagatgggcgtcttcaacttcgtggacgacggctcgctggccggctgcgcagtgctcaaactgagcgatgggcggaagcggagcatgtctctctgggtcgagttcatcacggcgtcgggctatctctcagcgcgtaagatccgctcgcgtttccagacgctggtggcccaggcggtggacaagtgcagctatcgggatgtggtcaagatgatcgcggacaccagcgaggtcaagttgcgcatcagggagcgctatgtggtgcaaatcactccggcgttcaagtgcaccgggatctggcctcgcagcgcggcacagtggcctatgccccacatcccttggcccggccccaatcgggtggccgaggtcaaggccgaagggttcaacttgctctcgaaggagtgctactcgctgaccggcaagcagagctcggcagagagcgacgcctgggtgctacagttcggggaggcggagaaccgcctgctgatgggcggctgccgaaacaagtgcctctcagtgctgaagactctgcgggaccgccacctggagctacccggccagccgctcaacaactaccacatgaagacgctgctgctgtacgagtgcgagaaacacccacgagaaacggactgggacgagtcgtgcctgggcgaccggctcaacggcatcctgctgcagctcatctcctgcctgcagtgccgccgctgccctcactactttctgcccaacctcgacctctttcagggcaagccccattcggccctggagagcgctgccaagcagacctggaggttggccagggaaattctcaccaatcccaaaagccttgacaaacta

SEQ ID NO: 91582 - DNA, 1463 bp, Homo sapiens
ctgaagtgggagctacgtcccggaggtgcggtgtggggcaccgggcggggcgcgggaaccggcgccccacggagctgctgctgtcagaccaaccccgggcccccatcatcactgcgccgcgctttcaggcgccgagaactaccgttcccggcatgccatgaaattggcctcggcgctgaggcggggtccggccctccacccgctcccgccgcgcgcgaatcgcggtcgcgagccatggaggaggaggcatcgtccccggggctgggctgcagcaagccgcacctggagaagctgaccctgggcatcacgcgcatcctagaatcttccccaggtgtgactgaagtgaccatcatagaaaagcctcctgctgaacgtcatatgatttcttcctgggaacaaaagaataactgtgtgatgcctgaagatgtgaagaacttttacctgatgaccaatggcttccacatgacatggagtgtgaagctggatgagcacatcattccactgggaagcatggcaattaacagcatctcaaaactgactcagctcacccagtcttccatgtattcacttcctaatgcacccactctggcagacctggaggacgatacacatgaagccagtgatgatcagccagagaagcctcactttgactctcgcagtgtgatatttgagctggattcatgcaatggcagtgggaaagtttgccttgtctacaaaagtgggaaaccagcattagcagaagacactgagatctggttcctggacagagcgttatactggcattttctcacagacacctttactgcctattaccgcctgctcatcacccacctgggcctgccccagtggcaatatgccttcaccagctatggcattagcccacaggccaaggattcccaggtgataagggtgaagagcagtagtgaagaccagccagagggtgacatggtgaaaacatataccaccaccacaagaactgaaatgctgctttttaaagcattattgtaaggtggatttagctgttaaacagataacttataatatcaaaatgaatagaagaaaatgtgttcactggaaactggctgttgagcccctccaatgggagctgaggagctgtgtctctgcaggcatggggactggccacaagcaaagagtcagcagcatgaagccccggagctgtagcgtgtgcagcaggcgccaatccaacagcatgggaacaacagtgtcgcaatcattcctcagttatggcaagaatgtgctatttttcactgttaggtgttgcttctgagaactacaaataaaactctccaaccaagtgaacagactctctgctggccaaggggactccagagaaccttagaaactgagtttctgaccataacaggatgggaggtcagacacacctcatcataccccctcccttttgtggttttagacacaacaactgatcagcattgatatta

SEQ ID NO: 91583 - DNA, 1812 bp, Homo sapiens
atggcagcctcggcgcaggtgtctgtgacctttgaggatgtggctgtgacattcacccaggaggagtggggacagttggatgcagcccagagaaccttgtatcaggaggtgatgctggagacctgcggacttctcatgtctctgggctgtcctttgttcaaaccagagctgatctaccagttggatcacagacaggagctatggatggctacaaaagacctctcccaaagctcctatccaggtgacaacacaaaacccaagaccacagagcctaccttttctcacctggccttgcctgaggaagtcttactccaggaacaactgacacaaggagcctcaaagaactcccaattagggcaatccaaggatcaggatgggccatctgaaatgcaagaagtccacttgaaaatagggataggcccccagcgggggaagctgctggagaaaatgagttctgaacgtgatggtttggggtcagatgatggtgtatgtacaaagattacacagaaacaagtttcaacagaaggtgatctctatgaatgtgattcacatggaccagttacagatgccttgattcgcgaagagaaaaattcctataaatgtgaggaatgcgggaaagtgtttaaaaagaatgccctccttgttcagcatgaacggattcacactcaagtgaagccctatgaatgcacagagtgtgggaaaacctttagcaagagcactcatcttcttcagcacctcatcatccacactggggagaagccctataagtgcatggagtgtgggaaggcttttaaccgcaggtcacacctcacacggcaccagcggattcacagtggagagaagccttataagtgcagtgaatgtggaaaggccttcacccaccgctccacttttgtcttgcatcacaggagccacactggagaaaaaccctttgtgtgcaaagagtgtggcaaagcctttcgagataggccaggtttcattcgacactacatcatccacacgggagagaagccctatgagtgcattgagtgtattgagtgtgggaaggccttcaaccgccggtcatacctcacgtggcaccaacagattcacactggagtgaaaccctttgaatgcaacgagtgtggaaaagctttttgcgagagtgcagacctcattcaacactacattatccacactggggagaagccctataagtgcatggagtgtgggaaggcgttcaaccgtaggtcacacctcaagcagcatcaacggattcacactggggagaagccttatgaatgcagtgaatgtggaaaggccttcacccactgctccacttttgtcttgcataaaaggacccacacaggagaaaaaccctatgaatgcaaagaatgtggaaaagcctttagtgatagggcagacctcattcgccacttcagcatccacactggagagaaaccctatgagtgcgtggagtgtggaaaggccttcaaccgcagctcacacctcacgaggcaccaacagattcacactggagagaaaccctatgaatgcatccagtgtgggaaagccttttgccggagcgcaaaccttattcgacactccatcattcacactggagagaagccgtatgaatgcagtgagtgtggaaaggcttttaatcgcggctcatccctcacacatcatcaaaggattcatactgggagaaaccctaccattgtaacagatgtgggaagaccttttatgactgcacagacttcagtcaacatccaggaacttttattagggaaagagtttttgaatatcaccactgaagaaaatctgtggtga

SEQ ID NO: 91584 - DNA, 596 bp, Homo sapiens; identical to SEQ ID NO: 58744

SEQ ID NO: 91585 - DNA, 1310 bp, Homo sapiens
aaaagaacgttgtcaattcgtagtcaaaccaatgttgtcaacagttggttcattccttcaggacctacaaaatgaagataagggtatcaaaactgcagccatcttcacagcagatggcaacatgatttcagcttctaccttgatggatattttgctaatgaatgattttaaacttgtcattaataaaatagcatatgatgtgcagtgtccaaagagagaaaaaccaagtaatgagcacactgctgagatggaacacatgaaatctttggttcacagactatttacaatcttgcatttagaagagtctcagaaaaagagagagcaccatttactggagaaaattgaccacctgaaggaacagctgcagccccttgaacaggtgaaagctggaatagaagctcattcggaagccaaaaccagtggactcctgtgggctggattggcactgctgtccattcagggtggggcactggcctggctcacgtggtgggtgtactcctgggatatcatggagccagttacatacttcatcacatttgcaaattctatggtcttttttgcatactttatagtcactcgacaggattatacttactcagctgttaagagtaggcaatttcttcagttcttccacaagaaatcaaagcaacagcactttgatgtgcagcaatacaacaagttaaaagaagaccttgctaaggctaaagaatccctgaaacaggcgcgtcattctctctgtttgcaaatgcaagtagaagaactcaatgaaaagaattaatcttacagttttaaatgtcgtcagattttccattatgtattgattttgcaacttaggatgtttttgagtcccatggttcattttgattgtttaatctttgttattaaattcttgtaaaacagaagtattgtttgaagttctcaactgagatttttactttttggatttttatgacttgctaatgttagaaagggcttgtatgcgtctatcaaagcaacagtggctgctgttagctaaaaatccttgtcagcttgtcccacgtttattctctatgtggaggtgaaagggtctgtgcttggcattcacttccattcttagacttaatttggaatcatccttttaaaaaaatcagagaccaggtcttgccaaatcaaactcctgggctcaagcaaccctcctgcctcaacctcccacggaatcgtcttgtcattaacttctttttttaatatgcagtagttgggagtaagatctttttatcatttatcaaaaaggcataaatgttccaccaaccataaagtatagttggtacttt

SEQ ID NO: 91586 - DNA, 417 bp, Homo sapiens
tttcgtccgggccacggttcccgggcgaggacgggggcggggcgcagccgggcgtgcagtgaccttggacagctcagatcctgcggaccttggctttccactccgctcgctgagccggagcatcacagcctgggctccacctgtagaggagatgtagcaggagggtccgccaggccaccttccaaaatccgagtgacgggcaggtccgtgcgttcgtgcatttttctgggcagagatggtagatttaatccggttgccacaggggacggcatgcagagaaggccacatacctactcatttgtgatgctgtctgcagtcgtcttacgaaggaaaagcaggccggaggggtgtggcccgttcctaagatggggccgaatctaaagctggcgaccaggtagaaaagcgtgcccagccact

SEQ ID NO: 91587 - DNA, 4790 bp, Homo sapiens; identical to SEQ ID NO: 59754

SEQ ID NO: 91588 - DNA, 909 bp, Homo sapiens
gacagcaaatacttccgtaaaacagaccatcaagctttccacttagagcccagtgtggccccaatacctttccttgtcgctcctgcgtgccagtccgcctccgcgtggtccggccgctgcgccacgcccccgctcgccccgcccctggatttgctccctcaaagctgaagtgaggccgggctgaggctcttacagtggtccctgctggcccttggtgacgggtcgcctcagttccgacccggacccgtacgctgctgcgctgacgtggctcccggaagtagggctggcgtagggccgccatgttgcagcaggatagtaatgatgacactgaagatgtttcactgtttgatgcggaagaggagacgactaatagaccaagaaaagccaaaatcaggtaggaggagagaagttgcatgagctgtgttagtgtccagtgctgttctgtatgtatgtcagtgctagctgatgggagtcaaggcagagttgtttcaatgtgcttgtgaatactgcatgttgctaatttgacgtttagtgtacgacaaagatgacatttcagattttcttgtgaataattggcatacttaatactgagttttaaaatcagcaaatccaattatttgaacacctgtgtttttaattctgtgctattttccaagaatgcaccatttctttatatagtttctatagatacattacattttgatttattgtgcacatttcaaaatcacataacatttctattctaaatttaattctctctaaagaaattcacttactgaaagcaaattctacttgggaggctgaggcaggacaatggcgtgaacccaggaggtgaagttggcggtcacccgagattgtgccaaccacccccagcctgggcgacggagcgagactcattctcccaaaaaa

SEQ ID NO: 91589 - DNA, 1398 bp, Homo sapiens; identical to SEQ ID NO: 59508

SEQ ID NO: 91590 - DNA, 2687 bp, Homo sapiens; identical to SEQ ID NO: 58952

SEQ ID NO: 91591 - DNA, 4019 bp, Homo sapiens
cgcttctctttcggagggagtgttcgccgccgccgcggccgccacctggagtttcttcagactccagatttccctgtcaaccacgaggagtccagagaggaaacgcggagcggagacaacagtacctgacgcctctttcagcccgggatcgccccagcagggatgggcgacaagatctggctgcccttccccgtgctccttctggccgctctgcctccggtgctgctgcctggggcggccggcttcacaccttccctcgatagcgacttcacctttacccttcccgccggccagaaggagtgcttctaccagcccatgcccctgaaggcctcgctggagatcgagtaccaagttttagatggagcaggattagatattgatttccatcttgcctctccagaaggcaaaaccttagtttttgaacaaagaaaatcagatggagttcacactgtagagactgaagttggtgattacatgttctgctttgacaatacattcagcaccatttctgagaaggtgattttctttgaattaatcctggataatatgggagaacaggcacaagaacaagaagattggaagaaatatattactggcacagatatattggatatgaaactggaagacatcctggaatccatcaacagcatcaagtccagactaagcaaaagtgggcacatacaaattctgcttagagcatttgaagctcgtgatcgaaacatacaagaaagcaactttgatagagtcaatttctggtctatggttaatttagtggtcatggtggtggtgtcagccattcaagtttatatgctgaagagtctgtttgaagataagaggaaaagtagaacttaaaactccaaactagagtacgtaacattgaaaaatgaggcataaaaatgcaataaactgttacagtcaagaccattaatggtcttctccaaaatattttgagatataaaagtaggaaacaggtataattttaatgtgaaaattaagtcttcactttctgtgcaagtaatcctgctgatccagttgtacttaagtgtgtaacaggaatattttgcagaatataggtttaactgaatgaagccatattaataactgcattttcctaactttgaaaaattttgcaaatgtcttaggtgatttaaataaatgagtattgggcctaattgcaacaccagtctgtttttaacaggttctattacccagaacttttttgtaaatgcggcagttacaaattaactgtggaagttttcagttttaagttataaatcacctgagaattacctaatgatggattgaataaatctttagactacaaaagcccaacttttctctatttacatatgcatctctcctataatgtaaatagaataatagctttgaaatacaattaggtttttgagatttttataaccaaatccatttcagtgtaacatattagcagaaagcattagtctttgtactttgcttacattcccaaaagctgacattttcacgattcttaaaaacacaaagttacacttgctaaaattagaacatgtgttctctttgaaatgaagaatatagtttaaaagcttcctcctccatagggacacataatctctaacccttatctaaagtgtaggattttaaaattaaatgtgaggtaaaataagtttatttttaatagtatctgtcaagttaatatctgtcaacagttaataatcatgttatgttaattttaacatgattgctgacttggataattcattattaccagcagttatgaaggaaatattgctaaaatgatctgggcctaccataaataaatatctccttttctgagctctaagaattatcagaaacaggaaagaatttagaaaaacttgagaaaacctaatccaaaataaaattcacttaagtagaactataaataaatatctagaatctgactggctcatcatgacatcctactcataacataaatcaaaggagatgattaatttccagttagctggaagaaactttggctgtaggtttttattttctacaagaattctggtttgaattatttttgtaagcaggtacattttataaaatgtaagccctactgtaaggtttagcactgggtgtacatatttattaaaaatttttattataacaacttttattaaaatggcctttctgaacactttatttattgatgttgaagtaaggattagaaacatagactcccaagttttaaacacctaaatgtgaataacccatatatacaacaaagtttctgccatctagctttttgaagtctatgggggtcttactcaagtactagtaatttaacttcatcatgaatgaactataatttttaagttatgcccatttataacgttgtttatgactacattgtgagttagaaacaaacttaaaatttggggtatagaacccctcaacaggttagtaatgctggaattcttgatgagcaataatgataaccagagagtgatttcatttacactcatagtagtataaaaagagatacatttccctcttaggcccctgggagaagagcagcttagatttccctactggcaaggtttttaaaaatgaggtaaatgccgtatatgatcaattaccttaattggccaagaaaatgcttcaggtgtctaggggtatcctctgcaacacttgcagaacaaaggtcaataagatccttgcctatgaatacccctcccttttgcgctgttaaatttgcaatgagaagcaaatttacagtaccataactaataaagcagggtacagatataaactactgcatcttttctataaaactgtgattaagaattctacctctcctgtatggctgttactgtactgtactctctgactccttacctaacaatgaatttgttacataatcttctacatgtatgatttgtgccactgatcttaaacctatgattcagtaacttcttaccatataaaaacgataattgctttatttggaaaagaatttaggaatactaaggacaattatttttatagacaaagtaaaaagacagatatttaagaggcataaccaaaaaagcaaaacttgtaaacagagtaaaaatctttaatatttctaaagacatactgtttatctgcttcatatgctttttttaatttcactattccatttctaaattaaagttatgctaaattgagtaagctgtttatcacttaacagctcattttgtctttttcaatatacaaattttaaaaatactacaatatttaactaaggcccaaccgatttccataatgtagcagttaccgtgttcacctcacactaaggcctagagtttgctctgatatgcatttggatgattaatgttatgctgttctttcatgtgaatgtcaagacatggagggtgtttgtaattttatggtaaaattaatccttcttacacataatggtgtcttaaaattgacaaaaaatgagcacttacaattgtatgtctcctcaaatgaaaattctttatctgaaattttaaaagacattgattccacatgtaaggatttttcatctgaagtacaataatgcacaatcagtgttgctcaaactgctttatacttataaacagccatcttaaataagcaacgtattgtgagtactgatatgtatataataaaaattatcaaagaaaattaactgccagtcatttgtaaatgctgtctactcctgaaagccttccttcatctctatttagttaataatgtgctctctcctcctgttttgaaaccccatagctctctacacctcttattgtacatcactctactttgcattggagttctgtttctatatgtacttattcacctgttgcctaaacatgcactgttcctaaaaggtacagtttttgctcataatatatgaaaggaaagataatcagttcttaaagtttgggatgctaaataagcacccagggaacttacctgcttcacctcaccccataaattgattattcaggtctggaatatggctcacgattctt

SEQ ID NO: 91592 - DNA, 1528 bp, Homo sapiens; identical to SEQ ID NO: 59431

SEQ ID NO: 91593 - DNA, 2544 bp, Homo sapiens
aaggattttagttgagggactcatttttagttgtttaaatgtatagttcaccaattgattagatgattggcaaatttcaagtgaactccctaggctagaacctcatgcctaaggataagaataaacataataactttaagtattttcagtaagaatggcgttctctttgtgaaaccaacttcttccctgctctggaagaaggaatatttttgtagctgtgaattcggcaacttgtcctatgtggtagggtgttttattgtgtctactgactaggaaaaagaaaagttgggacagcgcggagagaaaaaataaaaggctgtggaatttttatcagtgtttaaatcccttcacttttcacccagcacttagagcaagagaaacatgaattgagaagacgatttgagaaccgagaaggggagtgggaaggccgagtgtcagagctggagagtgatgtgaagcagctacaggatgagttggagaggcagcagattcatctgcgggaagcagatcgagaaaaatcacgggctgtccaggaactgtcggaacagaaccaaaggctattggatcagctcagcaggaaaattaagacttggatttactattctacctcagcccttcttgtatattgaaaataaaactaccaactcttcagttaccggaggaaaaagaacttctctgatatcatccctcagcactgatgttctcatgggagcagtgccgtgtctgcatggtctcctctgtttcaggcatcagaagttgagagacaactctccatgcaggtccacgccctcagagaagactttcgggagaaaaactcatcaaccaaccagcacattatccggctggagagccttcaggccgagatcaagatgctgtcagatcggaaacgggagctggagcatcgtctcagcgctactttagaggaaaatgacctgctccaagggaccgtggaggagctacaggaccgggtgctaatcctggagaggcagggccatgacaaggacctacagctgcaccaaagccagctggagcttcaggaggtgcgtctctcctgccgacagctgcaggtgaaggtggaagaactcactgaggagaggagtctgcagagctctgccgccaccagcacatccctcctgtcagagatcgagcagagcatggaggctgaggagctggagcaggagcgagagcagctgacactgctgagtgtggagatgactgccctaaaagaggagagagaccgactcagagtcacttctgaggacaaggagccaaaggagcagcttcagaaggccatcagggaccgcgacgaggccattgcaaagaagaatgctgtggagctggaacttgccaagtgcaggatggatatgatgtctctgaacagccagttgctggatgccattcagcagaaactgaacctctcgcagcagctggaagcttggcaggatgacatgcacagggtcattgaccggcagctgatggacacgcacctgaaagaacggagccagccggctgctgccctctgcaggggccacagcgctgggcggggggatgagcccagcatcgctgaaggcaaacgactcttctcattcttcaggaaaatttaagttgggaggagtcaggccaccaaagatgggtggactggaggcagctggaaaggcggtgcaggcaaggcctcccctgcagcttgcacctcagcagctgccctgcccctcatgctagggccccatgggtccgggagggcctgctccctttcgtcggtggggatggagacctagaggtgggggcctgccttggccactgaaggcttcccttggcccaccgcctggagaagcccaggcgtgggcttctccaggaccacgtgcttgagcagggttaggccacctcccagaggggccccttggtgttgggctttgcagctcacacccaacagatcgcagcccacccccaggcactgctgcctccttgattttagcaaatggggaacagaaggaatggaggcccttctctgcatgcctcaggaggcctgagccccaggggcctagacctgtgggggcagcgggccaggcctgagcctccattccttccccagcccctggcccagggtcaaaggagagatggcagcccctcccccgcatgcatgcacctcagctggcaggaggccaagcctctggccgcagggtctaagagccggggcttacccaagctcagctgaggccacccgagccccagggaggaagaaggccctgtccccctgtcgccactgctctccctcccagccttcagtctctgccccttagcagggcctggccaggcagagtgttatcaccagtcatctgcaggctttagccattccagccctttcccctgctcagggctggggttggacggggtctcctcctcccacagcgcccacctccacccctcacatacatacataatttcttggcctagcaaacaagtccaggccactgaatggcaccagaggggtctgtggtcagccaccccaccttgagggcagcacaggcaccacggggtggaggagag

SEQ ID NO: 91594 - DNA, 4794 bp, Homo sapiens; identical to SEQ ID NO: 77242

SEQ ID NO: 91595 - DNA, 1576 bp, Homo sapiens
atggcccgccggcgccgcgctcgaattttcgctgggcctcagccacctccccgcggggcaagggggcagggctcgggacctgcagcctgccatgctggagccctcaccctcctccccgcccccgtcccctgccccccgccccccgccccccaaccgcaggctcccgcgcgccaccccgaggggacgggcgccacctcctgctacgcggcacccggtcccgtcaaccgcccaacggctgaggagtgcggcagcgcgccagagactggcgggcagctccgcccgcggccgggatgcactaggcaaagccagctgggctcctgagtccggtgggtacttggagaacttactacgtctagctggaggattgtaaatgcaccaatcagcatgctgtgtctagctcaagaactcaagctccatgaggagatgtttcattgtcgagagcagtcatgatggcctgcactccacacaatgcaacagagtgaaagagcaggttctgcttctttggtgtagtcctgaagcttcctaagaaacttcacatcaggtgatggataggagcaaccctgtaaaaccagccttagactatttttcaaacaggctggtgaattaccagatctccgtcaagtgcagtaaccagttcaagttggaagtgtgtcttttgaatgcagaaaacaaagtcgtggacaaccaggctgggacccagggccagctgaaggtgctgggtgccaacctctggtggccgtacctgatgcacgaacaccccgcctacctgtactcgtgggaggatggtgattgctcacaccaaagccttggacccctcccagcctgtgacctttgtgaccaactccacctacgcagcagacaagggggctctgtatgtggatgtgatccgtgtgaacagctactactcttggtatcgcaactacgggcacctggagttgattcagctgcagctggccgcccagtttgagaattggtgtaagacatcacaatcccattattcagagcgcgtatggagtggaaacgcttgtagggcttcaccagtctttcccagggaactccgatgaagtgttccaacaaaatgagcgagtgaaccaagaagaggatgacattagatccaggagatacaacagaggagataatctccaggatgcctgtgaagaaagatccctggatcccaggatgattataggacaagttgttcataatccagcaggccagaagacttccagggaaactcattcaaggaggtgaaaatgatggatgactcctccaagatgaaaatggaccagccgcagtggctcacgcctgtaataccagcactttgggaggctgaggcaggcggatcacttgaggtcaggagtttgaaactagcctggccaacgtggcaaaactccatctctattaaaaatacaaaaattagccaggcatagtggtgcatgcctgtagtcccagctacttgggatgctgaggcaggaagaattgcttgaacctgggaggcagagtctgcagtgagccgagatcatgccactgcactccagcctgggtgacagagccagactccgtctcaaaaaaaaaa

SEQ ID NO: 91596 - DNA, 1143 bp, Homo sapiens
tttcgtgtggcaggcactattctatccattagggcacaatagtgaacgaaaaacttgctgccatcagagaacttgtgttctgggctttcatgcacctgccttgcaggcgtcaggaatctgaatcacactcattccctccatcacttggctcaccagtgggaccagacaggagtcctgcagtttcagcaatgaaccccagggcttggtgcctgctctggaggtggggaatggggttcacagtttagtggaagattgcctttagggagcactcttggtttctagaacctgatatagatgagggatgtaatgaattcgagtctgaatgtttatttgccatggacttctatctcacgactttgctataagggctacacgtcggaaatgggatctaagtaaacgtagagtccacaagtttcaggacttatatagatgagtgaatctcagattttcacgtgcatacagattacctgaggatcttgtaaaaaatgtagtttctgatttcaagtctctgggatagggcctaggactcagcatttataaccgacatctaagaaatgctctgaggaccatacttttgatagcaagaaatgagaacagtccaggagcctttagaaccctacaattgaggctaaagcatggtacatgaatgggttcttaaacctaaaagtcagggcttgggcataaactaaaactgggacaccctcgggagatttgaggttttgactggtcggaaacccccccccaaaagcctaacgtttccttctaccccagtgcccaggttttcactttttttcaactaccttccatttttcctcaatttcgagctttttggggctccagcccgattacaaacggtgtcctggtagaaccatcccataaaaccccttagaggggccgacccatttctttgggcgcggcaccgggtccatagcatctatcccacactttggggggcgcggcgggcgagaaattaggcgagcgaggagcgatccaccgcccaagtgttgagcctcgctttttcataactaaatagcgagcgcagtggggatgccaccctgctacctcacaatagaagcactggtgcgtaagatcctatgcccgggagctacgctcggtagtgactgcagcgtatctccgcacccg

SEQ ID NO: 91597 - DNA, 1608 bp, Homo sapiens; identical to SEQ ID NO: 59385

SEQ ID NO: 91598 - DNA, 3632 bp, Homo sapiens
tttcgtgctcttaatgtgtagattacaacaaattcgctgcatccacaccgacctgacacgcttgactctgggagtgcgctgctgcagctgcaggacagcgggacgggggagtcactttgttcctgaaggggcgagtcctcggcagacgctgcgccgcctccctctttgctagggaggtctgtgtttctacctcctcttcacgccccgcttgcttcctgcactgtgcccgcgctcgtggggagcagatgcaccagatggcgtccggggtggggtcaatgaagcgcagcccgaggaagatgtggcgccctggagaaaagaaggagccccagggcgttgtctatgaggatgtgcgggacgacacggaggatttcaaggaaccgcttaaggtggtttttgaaggaagtgcatatggattacaaaactttaataagcaaaagaaattaaaaacatgtgacgatatggacaccttcttcttgcattatgctgcagcagaaggccaaattgagctaatggagaagatcaccagagattcctctttggaagtgctgcatgaaatggatgattatggaaatacccctctgcattgtgctgtagaaaaaaaccaaattgaaagcgttaagtttcttctcagcagaggagcaaacccaaacctccgaaacttcaacatgatggctcctctccacatagctgtgcagggcatgaataatgaggtgatgaaggtcttgcttgagcatagaactattgatgttaatttggaaggagaaaatggaaacacagctgtgatcattgcgtgcaccacaaataatagcgaagcattgcagattttgcttaacaaaggagctaagccatgtaaatcaaataaatggggatgtttccctattcaccaagctgcattttcaggttccaaagaatgcatggaaataatactaaggtttggtgaagagcatgggtacagtagacagttgcacattaactttatgaataatgggaaagccacccctctccacctggctgtgcaaaatggtgacttggaaatgatcaaaatgtgcctggacaatggtgcacaaatagacccagtggagaagggaaggtgcacagccattcattttgctgccacccagggagccactgagattgttaaactgatgatatcgtcctattctggtagcgtggatattgttaacacaaccgatggatgtcatgagaccatgcttcacagagcttcattgtttgatcaccatgagctagcagactatttaatttcagtgggagcagatattaataagatcgattctgaaggacgctctccacttatattagcaactgcttctgcatcttggaatattgtaaatttgctactctctaaaggtgcccaagtagacataaaagataattttggacgtaattttctgcatttaactgtacagcaaccttatggattaaaaaatctgcgacctgaatttatgcagatgcaacagatcaaagagctggtaatggatgaagacaacgatgggtgtactcctctacattatgcatgtagacaggggggccctggttctgtaaataacctacttggctttaatgtgtccattcattccaaaagcaaagataagaaatcacctctgcattttgcagccagttatgggcgtatcaatacctgtcagaggctcctacaagacataagtgatacgaggcttctgaatgaaggtgaccttcatggaatgactcctctccatctggcagcaaagaatggacatgataaagtagttcagcttcttctgaaaaaaggtgcattgtttctcagtgaccacaatggctggacagctttgcatcatgcgtccatgggcgggtacactcagaccatgaaggtcattcttgatactaatttgaagtgcacagatcgcttggatgaagacgggaacactgcacttcactttgctgcaagggaaggccacgccaaagccgttgcgcttcttctgagccacaatgctgacatagtcctgaacaagcagcaggcctcctttttgcaccttgcacttcacaataagaggaaggaggttgttcttacgatcatcaggagcaaaagatgggatgaatgtcttaagattttcagtcataattctccaggcaataaatgtccaattacagaaatgatagaatacctccctgaatgcatgaaggtacttttagatttctgcatgttgcattccacagaagacaagtcctgccgagactattatatcgagtataatttcaaatatcttcaatgtccattagaattcaccaaaaaaacacctacacaggatgttatatatgaaccgcttacagccctcaacgcaatggtacaaaataaccgcatagagcttctcaatcatcctgtgtgtaaagaatatttactcatgaaatggttggcttatggatttagagctcatatgatgaatttaggatcttactgtcttggtctcatacctatgaccattctcgttgtcaatataaaaccaggaatggctttcaactcaactggcatcatcaatgaaactagtgatcattcagaaatactagataccacgaattcatatctaataaaaacttgtatgattttagtgtttttatcaagtatatttgggtattgcaaagaagcggggcaaattttccaacagaaaaggaattattttatggatataagcaatgttcttgaatggattatctacacgacgggcatcatttttgtgctgcccttgtttgttgaaataccagctcatctgcagtggcaatgtggagcaattgctgtttacttctattggatgaatttcttattgtatcttcaaagatttgaaaattgtggaatttttattgttatgttggaggtaattttgaaaactttgttgaggtctacagttgtatttatcttccttcttctggcttttggactcagcttttacatcctcctgaatttacaggatcccttcagctctccattgctttctataatccagaccttcagcatgatgctaggagatatcaattatcgagagtccttcctagaaccatatctgagaaatgaattggcacatccagttctgtcctttgcacaacttgtttccttcacaatatttgtcccaattgtcctcatgaatttacttattggtttggcagttggcgacattgctgaggtccagaaacatgcatcattgaagaggatagctatgcaggtggaacttcataccagcttagagaagaagctgccactttggtttctacgcaaagtggatcagaaatccaccatcgtgtatcccaacaaacccagatctggtgggatgttattccatatattctgttttttattttgcactggggaaataagacaagaaataccaaatgctgataaatctttagaaatggaaatattaaagcagaaataccggctgaaggatcttacttttctcctggaaaaacagcatgagctcattaaactgatcattcagaagatggagatcatctctgagacagaggatgatgatagccattgttcttttcaagacaggtttaagaaagagcagatggaacaaaggaatagcagatggaatactgtgttgagagcagtcaaggcaaaaacacaccatcttgagcct

SEQ ID NO: 91599 - DNA, 774 bp, Homo sapiens
tttcgtgggcactaggcggccggcgggccctgtaagttctccgagggccacttgcacagcaggaggggcgagggccgtgtacgtggcgctggccgtcgggcggggtagaggggaccctcagagcacccgggagatgggggtagaagcggcagagaccgcatattccggaggggctggctccaggccacgcgagccggagctggagacatttccagagccttgaggatggcaccggccctcgcacgctcaactcctgctcctcctcttcgcaatgagtaaacgacgcagtaggtcctacccagcctattttgctttaccaaagggctttgctttcttagggatgctgtctttggatcttttttttccctgttgagttgcgttggttttaagtgcctgctggtgtcgacttccaggggatggggaaatagtttcttataagatgatcacttgggtttaatgttgaggacgacgctgttagtttgcagtaatgaccctacacctctaaggtattaaacaaatgccttttatttaaattttgttaaaggggcagagttttccctctttttaaccacctgatactggctctaaaggttttcccctgagaactgtgtacagggcaggagtgaggggttggtgaaagaggtgatgaatttcggtgttggtaccactgacgtattaaatgtggaatgtattctatgaaaatttatgaacaaactgtgactggtttccagtttagtttaacacacttttcaaagaagtacccctttgcaaaaa

SEQ ID NO: 91600 - DNA, 2005 bp, Homo sapiens
tttcgtcggggactggctgggaagcggtcggtcgagtgtggcctgtgtggactcgcatcttgcccgaagccgggcggaggagagctcaagctaagggtgatcagcccatgacctaaacctccagacaaaataaaacagggaaaatttgctagaatcaagaatgatggatccatgttcagttggagtccagcttcgtactacaaatgagtgccataaaacctactatactcgtcacacaggttttaagactttgcaagaattgtcatcaaatgatatgcttttacttcaacttagaactggaatgacactttctgggaacaatacaatttgctttcatcatgtaaaaatttacattgacagatttgaggatttacagaagtcatgttgtgacccatttaacatacacaagaaattagccaaaaaaaatttgcatgtaattgacttagatgatgccacttttctgagtgctaaatttggaagacagcttgtacctggttggaagctttgtccaaaatgcacacagataatcaatggaagtgtggatgttgatactgaagaccgccagaaaaggaaacctgagtcagatggaagaactgctaaagctttgaggtcattacaatttacgaatccaggaaggcaaactgaatttgctccagaaactggtaaaagagaaaaaagaaggcttacaaaaaatgcaaccgctggttcagacagacaagtgataccagcaaagagtaaggtctatgatagccagggtctcctgatttttagtgggatggacctctgtgactgcctggatgaagactgcttaggatgtttctatgcttgtcctgcctgtggttctaccaagtgtggagctgaatgccgctgtgaccgcaagtggctgtatgagcaaattgaaattgaaggaggagaaataattcataataaacatgctggataatctgcggtaccaaactatggagcctttaaaggtctttatttctaaaaatctgttactctaagatacattttaagcttgattatcatatgacaaagattttaaaaccatctcagtgtgccctaatttttcatcttgggtgctttaagattcactatttgatataaattcagataggctatttttcagtagtcagcgttaagcctgtctggatcaatataaacaagtagggtgtaggcagtcctctatttgcatgtttcccatgggcacaaatttcagtgacctagatttagtttaaataccagtttccttaccaggaaggaaagaaaactggtaaggaaactgttgttgttaaaatctaggttaaaattttagttagcacattgtaactgagtaattacatgaagtacaaacctctctgctagctcttcagtctacaaatcgctatgtaaataacagatatgcttcatgattgtgaccagtcatgttatttctttcaaattcttccagtggtttgtccctgtgcatctgttaattcagttcacgtacagcagagcatgtagttatgctgtctctctgtcatctacttgacattctatagaagtgaacactcgaaagaactggtcaacaaagatgaaagtgcagcaaagcaatgaaaaatgataacactggaagtgaaattttaatcaaacataaatgaatttgtagaagaagtcactgaccatgggaatgttgttcttgctgctgtgtattcataggagcttagtgaaggcaaacttaccaacacaaataagcaaagtggttgcaataaagacagatacgtcccagaggaagtgatggttaaaaaaaaaaaactttacattaaaagatatttaatgtgaatatagaaatgttttcacaacattgaaagcacaagcaataaagggtggaagctgacccaaacttaaaaggagtatgggcagtttgccgtgaacataaaagatgcttactcagtatggtaagttacttgccagaaaaaaaggcaagccctattcaaactactttgtttttacaatgaaataaaac

SEQ ID NO: 91601 - DNA, 435 bp, Homo sapiens
  misc_feature (1)...(435): n = a,t,c or g
taccggtccggaattnnncgtcgacgatttcgtttgaacattttgaacaaatatttagtaagactggatcttatttaaattttggagtatattgatactattgttttagcaagcaatcaccctggtgagatgaagacaatctgtgggatctggttccaatgtcagttccattctgaaagcctttgtagtgctattcagacatgtgcatcaaccaggggtgaaattgggaactgtgcaatgctctactcattagttcaggtcttagcatctttagtgtgccaattagaaccatatctaggcatgcataagttgaggggcaggtgaatccaggagtttataaataatgttcatgggtctctttctaaagtttcttcctcttcaccatctgacccgtactttcaggttcccaggggcttctcctttccatcctccagc

SEQ ID NO: 91602 - DNA, 3766 bp, Homo sapiens
tttcgtgctgtgggcaccgcgcagcggccttttgtcagcgcgcagggccaggagagctctcatttcctcccagcctcgtgcgggaaatggctttaattctgacggcagggctgtgagggactagcgggaacccgagccttttgtcaaggaactgcggtgtcggtggccagtcatccccgccgccgcggagccgctgcactgctgggggatctcccagcagctctgacgagcgcgggctgcagcatgggcagaaaacgctgccctgcagattagctgggtggattttttaagcgcaccccaccccccaaacccataaaataacaaaaccaacccgcagtggccgaccggagatagctaagatgccgcgcaggagtttccacctggatgtttgaggttgtgtagatgtggccggcacccttgagagtggagctagggggtgcagactgagcagtgaacagaaggagccttggacagggctgggccagcctcccgagttccaggagcgaattgcaaacccaccgggaaaatgagcgaagagacggtccccgaggctgcctcgccgccgcccccgcaggggcagccttactttgaccgcttctcagaggacgaccccgagtacatgcgccttcgcaaccgggcggcggacctgcggcaggacttcaacctgatggagcagaagaagcgcgtcaccatgatcctgcagagtccctctttcagggaggagctggaaggcctcatccaggagcagatgaagaaggggaacaactcctccaacatctgggccctgcgacagatcgcggacttcatggccagcacctcccacgcagtcttcccgacatcttccatgaatgtctccatgatgacgcctatcaatgacctccacacagctgactccctgaacctggccaaaggggagcggctcatgcggtgcaagatcagcagtgtctaccgactcctggacctctatggctgggcccagctgagtgacacctatgtcacgttgagagtcagcaaggagcaggaccacttcctgatcagccctaagggagtttcttgcagtgaagtcacagcgtccagcctgatcaaggtgaacattctgggagaggtggtggagaagggcagcagctgcttcccagtggacaccacaggcttctgtctgcactcggccatctatgcagcgaggcccgacgtgcgctgcatcatccacctgcacacaccggccacagcagcggtgtcggccatgaagtggggcctcctgcctgtctcccacaatgccctgctggtgggggacatggcctattatgacttcaatggggaaatggagcaggaagccgatcggatcaacctgcagaagtgccttggacccacctgcaagatcctggtgctaagaaaccatggagtggttgctctgggtgacacggtagaggaggcattttacaagatcttccacctgcgggctgcatgtgagatacaggtgtcggctctgtccagtgccgggggagtggagaacctcatcctcctggagcaggagaagcaccggccccatgaggtgggctccgtgcagtgggccgggagcacctttgggcctatgcagaagagtcggctgggggagcatgagtttgaggccctcatgaggatgctggacaacctgggctacagaacaggttacacgtatcgccacccctttgttcaagagaaaaccaaacacaaaagtgaggtggagattccagccacggtcacagccttcgtgtttgaggaggacggtgccccggtgcccgccctgcgacagcatgcccagaagcagcagaaggagaagacccgctggctcaatacgcccaacacctacctgcgggtcaatgtggccgatgaggtccagaggagcatgggcagcccccgacccaagaccacgtggatgaaggctgacgaggtggagaaatccagcagtggcatgccgattcgcatcgaaaacccaaaccaatttgtgcctctctatactgacccccaggaagtactggagatgaggaacaagattcgagaacaaaaccgacaagatgtgaagtcagcggggcctcagtcccagctcctggcgagcgtcattgccgagaagagccgaagcccgtctacagagagccagctgatgtccaagggagacgaggataccaaagacgattcagaggagacggtgcccaaccccttcagccaactcactgaccaggagttggaggagtacaagaaagaggtggagaggaagaaactagaacttgatggagagaaagaaactgccccagaagagcctggctcacctgcaaagtctgcacctgcttctccagtgcagagcccagcgaaggaggcagagacaaagagccctttagtctctccttccaagtctttagaggaaggtactaagaagacagaaacaagcaaagccgccaccacagagcccgaaacaacccagccggaaggggtggtggtcaacgggagggaggaggagcagacggcagaggaaatcctcagcaaaggcctgagccagatgaccaccagtgctgacacggatgttgatacctctaaggacaaaaccgagtcggtcaccagcggccccatgtccccagagggctcaccttccaagtctccctcaaagaagaaaaagaaattccgaaccccctccttcctgaaaaagagcaaaaagaaggagaaagtggagtcctgattcatgacacccttgggctccctcctgcctcctctctctcctccccttcccttctcccatctctgtccctgcaagcacagggctaaggagggatagagtaggaccctggaccacattcggaaggggaacttagagatcacccgaccaacccttcgttttacagttgcccaagagaaatcaggtgacttgcccaaggtcacacagctagttagcgggcagagcctgcactcgaattcaggtctcctgacttccagtccagtgctccttctactacacaacactgcctagttgtgggctgcctttgtttggatgctgtccaccaatctgagcctagggcaagaaggccagaaatgggccgtgagctctcacaggctcagactaaatcagaggtcaaggcttcccctgagtaaggtccatttcttcccaggaatccaatctcctgtggatggagctatctctacatttaaaaatctcttctcttttccactttgggtccctgccctgctgctcaaagtgactagccaaattgacccctccaacagaaagtaatctttgttcccaagggctgatggcttagcttgtactaccccaaacattaaccctgagctttcttcatggaacctcttgaatgatgggatgggaagagctataagaggtgggtagggcatagggggcaagccatgtaagctgagggattggggatgggttttcatcaacataaggaggccaggggaactttgacccctttggaattgtgcatctcaggcacttcaaaactaaaaccaaatttagcataggaaaaagttgtttaatgctcagggcagaaatttggggaagttgaaatcctctgttggctttgggttgtataaggaggatcaaaacaacagaggaaatgctgactttctagctttgcatgacacctggagcaatgcacctgtacctgcctcactcctgtccagtggtcaggtttcccctgaccttccctcacccccagaaacacttgcttacagaccgaaactggcatcttactcttggcaccttgacttgcaccctctgagg

SEQ ID NO: 91603 - DNA, 2522 bp, Homo sapiens; identical to SEQ ID NO: 58975

SEQ ID NO: 91604 - DNA, 2927 bp, Homo sapiens
aagagcttctcggctctaggctctggagtcccgggagcagtgaggggccacccggggcacaggaaagggccgctaggggagggccgggtgcactcggggtgtctgggccgcgggtctgagggatgaggaggggccatggccagcgacggggccaggaagcaattctggaagcgcagcaacagcaagctcccgggcagcatccagcacgtgtatggtgcccagcaccccccctttgatccactgttacatggcactttgctcaggtccacggccaagatgccgaccacaccagtgaaggccaagagggtcagcaccttccaggagtttgagagcaataccagcgatgcctgggacgctggggaggacgacgatgagctcctggccatggcggcggagagcctgaactccgaggtggtcatggagacggccaaccgtgtgctgcgtaaccacagccagcggcaggggcggcccacgctgcaggaggggccagggcttcagcagaagcccaggcccgaggcagagccgccctcaccccccagcggcgacctccggctggtgaagtcggtcagtgagagccacacgtcctgtcctgcagaaagtgccagcgatgccgcccctctgcagaggtcccagtctctcccacactcggccaccgtcacgctgggtggcacatctgaccccagcactctcagcagctcagcgctgagcgaaagagaggcctcccggctcgacaagttcaagcagctgcttgccggccccaacacggaccttgaggaattacggaggttgagctggtccggaatccctaagccagtgcgtccaatgacgtggaagctcctctcaggttaccttcccgccaatgtagaccggagaccagccactctccagagaaaacaaaaagaatattttgcatttattgagcactattacgattctaggaacgacgaagttcaccaggacacatacaggcagatccacatagacatccctcgcatgagccctgaagcgttgatcctgcagcccaaggtgacggagatttttgaaaggatcttgttcatatgggcgatccgccacccagccagtggatacgttcagggtataaatgatctcgtcactcctttctttgtggtcttcatttgtgaatacatagaggcagaggaggtggacacggtggacgtctccggcgtgcccgcagaggtgctgtgcaacatcgaggccgacacctactggtgcatgagcaagctgctggatggcattcaggacaactacacctttgcccaacctgggattcaaatgaaagtgaaaatgttagaagaactcgtgagccggattgatgagcaagtgcaccggcacctggaccaacacgaagtgagatacctgcagtttgccttccgctggatgaacaacctgctgatgagggaggtgcccctgcgttgtaccatccgcctgtgggacacctaccagtctgaaccggacggcttttctcatttccacttgtacgtgtgcgctgcttttctcgtgagatggaggaaggaaatactagaagaaaaagattttcaagagctgctgctcttcctccagaacctgcccacagcccactgggatgatgaggacatcagcctgttgctggccgaggcctaccgcctcaagtttgcttttgccgacgcccccaatcactacaagaaatgagcccaggcccacccgcagctggcctcactgtcccgggtggcgcgccccacctgcctggctggtggtaggcccctgtgagctggtcccgggctgctaaaaggccttgtgaggtggccccaccctccaggggagctggtgaagatgggccacagacctggtctagggctgacaaagacagggacagcctttgttttctgagataccaaagagagccaggggagggccccgggttcggcggccagaggcaggtcaggggtcccctctccctctccctgcaatgtccttgccaaatgactgcctcgtgctgcccctagtccggggcagcctaggaggccgaccctctttggagtcctgctgtctgggtgccagggccggaacgaggtagtggccatctcatacctactctgaaatgcaaaacttctattctgttgagtgaaagaataaaatgtagacaaaatctagaccgagacgttgcgctgacccggggtctctgtgccgcgaggtcccctcacagctgtatttcactgctgctggccctttccctccgtgtgttttcctgcttgcttggtttaaacgtggctgggaagctgaaggctggagtccaagccgtgagcccgccgagtgcctgggaggccgtgggaccaaaggctgggagcagagggaggcctcgccatcgccttactttccaccttgaacctcttttacaagagagaaacccccacctccctgaggtccagggccaagtggccccgccacgcaggtaggcgccggcctcagccagagcccctggaggcccacccaggctgtcgggccatgttgggctggcagacgggcagggggtcgcgtccctgtcatcaaagccctgaaccacagtgctcttctcaccgcagcctggaagcggaatgagcttttggagacttcctgggacttgctgtccttgtccaggtctgccaggtgtaggggaggtgtgactggttccatcatggaccggttcctccatggaccggttcctccgtggaccggttccgccatggaccggttccgccatggaccactcctgccctggaccactcctgccctggaccggttctgccgtggactggttcccgccgtggaccagttcccgctgtatactggttctgccctggactggttcccgctgtggactggttccttggggctctaagtgcggaagggcccagagctggtccctgcccagcgccctgctagggctgtgt

SEQ ID NO: 91605 - DNA, 3707 bp, Homo sapiens; identical to SEQ ID NO: 59782

SEQ ID NO: 91606 - DNA, 1612 bp, Homo sapiens; identical to SEQ ID NO: 59040

SEQ ID NO: 91607 - DNA, 1122 bp, Homo sapiens
cgggtcgacgatttcgtccgggctcgagcggaggcggcgcaagcgctgagcgggcgttgggccgcgggtgcggaaagcgctaggtccagccctgctgggagttttctgccacacagatttgcggaagaacctgaccgtggacgagggcaccatgaaggtagaggtgctgcctgccctgaccgacaactacatgtacctggtcattgatgatgagaccaaggaggctgccattgtggatccggtgcagccccagaaggtcgtggacgcggcgagaaagcacggggtgaaactgaccacagtgctcaccacccaccaccactgggaccatgctggcgggaatgagaaactggtcaagctggagtcgggactgaaggtgtacgggggtgacgaccgtatcggggccctgactcacaagatcactcacctgtccacactgcaggtggggtctctgaacgtcaagtgcctggcgaccccgtgccacacttcaggacacatttgttacttcgtgagcaagcccggaggctcggagccccctgccgtgttcacaggtgacaccttgtttgtggctggctgcgggaagttctatgaagggactgcggatgagatgtgtaaagctctgctggaggtcttgggccggctccccccggacacaagagtctactgtggccacgagtacaccatcaacaacctcaagtttgcacgccacgtggagcccggcaatgccgccatccgggagaagctggcctgggccaaggagaagtacagcatcggggagcccacagtgccatccaccctggcagaggagtttacctacaaccccttcatgagagtgagggagaagacggtgcagcagcacgcaggtgagacggacccggtgaccaccatgcgggccgtgcgcagggagaaggaccagttcaagatgccccgggactgaggccgccctgcaccttcagcggatttggggattaggctcttttaggtaactggctttcctgctggtccgtgcgggaaattcagtcttgatttaaccttaattttacagcccttggcttgtgttatcggacgttttaatgcatatttataagagaagtttaacaagtatttattcccataaaaaaaaaa

SEQ ID NO: 91608 - DNA, 3866 bp, Homo sapiens
cgacgatttcgtcgagaggcgccgctggacccggacgacctgtctagtccgttcgccgccccacgtcccggtctgtggccacgcctgcagctggaatggaggctctctggaccctttaaaaggcacccctgccctcctgaggtcagctgagcggttaatgcggaaggttaagaaactgcgcctggacaaggagaacaccggaagttggagaagcttctcgctgaattccgagggggctgagaggatggccaccaccgggaccccaacggccgaccgaggcgacgcagccgccacagatgacccggccgcccgcttccaggtgcagaagcactcgtgggacgggctccggagcatcatccacggcagccgcaagtactcgggcctcattgtcaacaaggcgccccacgacttccagtttgtgcagaagacggatgagtctgggccccactcccaccgcctctactacctgggtatgccatatggcagccgagagaactccctcctctactctgagattcccaagaaggtccggaaagaggctctgctgctcctgtcctggaagcagatgctggatcatttccaggccacgccccaccatggggtctactctcgggaggaggagctgctgagggagcggaaacgcctgggggtcttcggcatcacctcctacgacttccacagcgagagtggcctcttcctcttccaggccagcaacagcctcttccactgccgcgacggcggcaagaacggcttcatggtgagccctggccctggctgtgtgtcccctatgaaaccgctggaaatcaagacccagtgctcagggccccggatggaccccaaaatctgccctgccgaccctgccttcttctccttcatcaataacagcgacctgtgggtggccaacatcgagacaggcgaggagcggcggctgaccttctgccaccaaggtttatccaatgtcctggatgaccccaagtctgcgggtgtggccaccttcgtcatacaggaagagttcgaccgcttcactgggtactggtggtgccccacagcctcctgggaaggttcagagggcctcaagacgctgcgaatcctgtatgaggaagtcgatgagtccgaggtggaggtcattcacgtcccctctcctgcgctagaagaaaggaagacggactcgtatcggtaccccaggacaggcagcaagaatcccaagattgccttgaaactggctgagttccagactgacagccagggcaagatcgtctcgacccaggagaaggagctggtgcagcccttcagctcgctgttcccgaaggtggagtacatcgccagggccgggtggacccgggatggcaaatacgcctgggccatgttcctggaccggccccagcagtggctccagctcgtcctcctccccccggccctgttcatcccgagcacagagaatgaggagcagcggctagcctctgccagagctgtccccaggaatgtccagccgtatgtggtgtacgaggaggtcaccaacgtctggatcaatgttcatgacatcttctatcccttcccccaatcagagggagaggacgagctctgctttctccgcgccaatgaatgcaagaccggcttctgccatttgtacaaagtcaccgccgttttaaaatcccagggctacgattggagtgagcccttcagccccggggaaggtgagcagagcctgacgaatgctatctgggtcaatgaggagaccaagctggtgtacttccagggcaccaaggacacgccgctggagcaccacctctacgtggtcagctatgaggcggccggcgagatcgtacgcctcaccacgcccggcttctcccatagctgctccatgagccagaacttcgacatgttcgtcagccactacagcagcgtgagcacgccgccctgcgtgcacgtctacaagctgagcggccccgacgacgaccccctgcacaagcagccccgcttctgggctagcatgatggaggcagccagctgccccccggattatgttcctccagagatcttccatttccacacgcgctcggatgtgcggctctacggcatgatctacaagccccacgccttgcagccagggaagaagcaccccaccgtcctctttgtatatggaggcccccaggtgcagctggtgaataactccttcaaaggcatcaagtacttgcggctcaacacactggcctccctgggctacgccgtggttgtgattgacggcaggggctcctgtcagcgagggcttcggttcgaaggggccctgaaaaaccaaatgggccaggtggagatcgaggaccaggtggagggcctgcagttcgtggccgagaagtatggcttcatcgacctgagccgagttgccatccatggctggtcctacgggggcttcctctcgctcatggggctaatccacaagccccaggtgttcaaggtggccatcgcgggtgccccggtcaccgtctggatggcctacgacacagggtacactgagcgctacatggacgtccctgagaacaaccagcacggctatgaggcgggttccgtggccctgcacgtggagaagctgcccaatgagcccaaccgcttgcttatcctccacggcttcctggacgaaaacgtgcactttttccacacaaacttcctcgtctcccaactgatccgagcagggaaaccttaccagctccaggtggccctgcctcctgtctccccgcagatctaccccaacgagagacacagtattcgctgccccgagtcgggcgagcactatgaagtcacgttgctgcactttctacaggaatacctctgagcctgcccaccgggagccgccacatcacagcacaagtggctgcagcctccgcggggaaccaggcgggagggactgagtggcccgcgggccccagtgaggcactttgtcccgcccagcgctggccagccccgaggagccgctgccttcaccgccccgacgccttttatccttttttaaacgctcttgggttttatgtccgctgcttcttggttgccgagacagagagatggtggtctcgggccagcccctcctctccccgccttctgggaggaggaggtcacacgctgatgggcactggagaggccagaagagactcagaggagcgggctgccttccgcctggggctccctgtgacctctcagtcccctggcccggccagccaccgtccccagcacccaagcatgcaattgcctgtcccccccggccagcctcccccacttgatgtttgtgttttgtttggggggatatttttcataattatttaaaagacaggccgggcgcggtggctcacgcctgtaatcccagcactttgggaggctgaggcgggcggatcacctgaggttgggagttcaagaccagcctggccaacatggggaaaccccgtctctactaaaaatacaaaaaattagccgggtgtggtggcgcgtgcctataatcccagctactcgggaggctgaggcaggagaatcgcttgaacccgggaggtggaggttgcggtgagccaagatcgcaccattgcactccagcctgggcaacaagagcgaaactctgtctcaaaataaataaaaaataaaagacagaaagcaaggggtgcctaaatctagacttggggtccacaccgggcagcggggttgcaacccagcacctggtaggctccatttcttcccaagccccgagcagagggtcatgcgggccccacaggagaagcggccagggccccggaggggcaccaccttgttggacagccctcctgtccccaagcttttcagggcagggacttaaacgcaccgaacttccacgctctgctggtcagtggctt

SEQ ID NO: 91609 - DNA, 3036 bp, Homo sapiens
aattcccgggtcgacgatttcgtggcagggtggggggtgtggaaaaataaaaggaaaagtccttgcaccatgtagatcagcgtcccccactttggcatcccggccggccggggacctcccagtctgcggccatgaacgcgagcagcgagggcgagagcttcgcgggctcggtgcaaattccaggtggcacaacggtgctggtggagctgactcccgacatccatatctgcggcatctgcaagcagcagtttaacaacctggatgcctttgtagctcacaagcaaagtggctgccagctgacaggcacatccgcagcagcccccagcacggtccagtttgtatcggaggaaacagtgcctgccacccagactcagaccaccaccagaaccatcacctcggagacccagacaatcacagtttcagctccagaatttgtttttgaacatggctatcaaacttacctgcccacggaaagtaatgaaaaccagacagccactgtcatctctctccctgccaagtcacgcaccaaaaagcccacaacaccacctgctcagaaaaggcttaactgttgctatccaggttgccaattcaagactgcttatggcatgaaggacatggagcggcatttaaaaattcacacgggagacaaaccccataagtgtgaagtctgtggcaagtgctttagccggaaagacaagctgaaaactcacatgcggtgccacacgggcgtgaagccctacaagtgtaagacgtgtgactacgccgctgccgacagcagcagcctcaacaagcacctgaggatccactcggacgagcggcccttcaaatgccagatctgcccctacgccagccgcaactccagccagctcactgtccacctgcgatcccacacgggggacgcccccttccagtgctggctctgtagcgccaagttcaaaatcagctcggacttgaaaaggcacatgcgggtgcactcgggggagaagcctttcaagtgcgagttctgcaatgtccgctgcaccatgaaggggaacctcaagtcgcacatccgtatcaagcacagcgggaataacttcaagtgtcctcattgcgccttcctgggtgacagcaaagccaccctccggaagcacagccgcgtgcaccagtcggagcatcgtgagaagtgctcggaatgcagctactcctgctccagcaaggccgccttgcgcatccacgagcgtatccactgcaccgtccgccctttcaagtgcaactactgcagcttcgactccaaacagcccagcaacctgagcaagcacatgaagaagttccacggggacatggttaagactgaggctctagagaggaaggacaccggcaggcagagcagccggcaggtggccaagctggatgccaagaagagtttccactgcgatatatgcgatgcctccttcatgcgggaggactcgctccgcagccacaagagacagcacagtgagtacaatgagagtaagaactcggacgtgaccgttctccagtttcagatcgaccccagcaagcagcccgccacgcccctcactgtgggacacctccaggtgcccctccagcccagccaagtgccccagttcagcgagggaagagtcaaaatcatcgttgggcatcaggtgccccaggcgaacaccatcgtccaggctgccgccgctgcagtgaacatcgtcccgcctgccttggtggcccagaacccagaggaactcccagggaacagccggctgcagatcctgcgccaggtcagtctgatcgccccccctcagtcctcgcggtgtccgagcgaggcgggcgcaatgacccagccggctgtcctgctgaccacccacgagcagacggacggagccactctgcaccagactctcatccccacggcctcaggtggcccccaggaaggctctggcaatcaaactttcattaccagttcgggtattacttgcactgactttgaaggcctaaacgccttgattcaggaggggacagcagaagtgacagtggtgagcgatggaggccagaacatcgcagtggccaccacagcgccaccggtcttctcctcctcttcccagcaagaactacccaagcagacctactccatcattcaaggggcagcccatccagctttgctctgtcccgccgactccattccagattagtgcttaaaaaaacaaaaggagtgggggaaaggaattgagaaaaagaaatcttaagtagaattctctaaaaggtttgctcttaatgttttctttgttttgttttgtttttgagacggagtctcgctctgtttcccaggctggagtgcagtggcgctatcttggctcactgcaacgtccgcctcccaggttcaagcgattctcatgcctcagccctccgagtagctgggaccacaggtgtacgacatcatgactggctaatttttgtatatttagtagagacggggtttcatcatgttgaactcctgacctcaagtgatctgcccacctcagcctcccaaagtgctgggattacaggtgtgagccaccatgcctggccgtggtttgctcttaatgtttttaaggatggttgtgaatccccctggccccataataaattgtaattttatactgcttactataatttttttaacactgtaacaactttgagaccacctctgaatcgtcgcattataactgttgtagaatcttaaatgttaccaagatgattccaatgaggggttggaattaaatgcattaagtagtgaattcatgtgtttgtttccaacttgattttccaactctaataaaggtttctgtccatcttattacatttttgtagtaaatggtacttcccagcctctcttttgccccattctggaatactccccagagtttgggggtgttcatgttttatacatgtaagtctgttggcatgaaggaccattttctacataatatgacatggatacttgacccaaaaaaaaatgtttagtgctaatgagcagaaaatgaatggttccataataaattgatatctgat

SEQ ID NO: 91610 - DNA, 423 bp, Homo sapiens
gggggacgaagccgggggtggctgtttgctccggtccgactcccctcggagctgccctttggtaccggggctgggcttggactctgggctcgcagcggaggcaacgcccccgtcgagggctgcccgcggagatttcactttcttttccgccgaggcgttatcgctggccgcgtttggcgccacctcgtcgtcgaacaccgcgtcgtccctggcagcgctctcagggagctcggcgtccgcgccgggggagtcggtggatttctgcgaccccctccgcctccccgacctacggccgctggacctcttctccatgtcgtcccagtcaccgcaatcttccgctctgggagtaatcacgaccggctcgtccacttgtgccccctcagtcttactcaagtagatgtccaaagttagcaccttagcagg

SEQ ID NO: 91611 - DNA, 908 bp, Homo sapiens
ttttttttttttcagtttctacattttatttcattaacttaaaaggtggacaaaatgtttattttaaatctaattgaaatttatctgaaacaacttatttcaagtaacttattgtacagtccattgtccatttaaaaatattttcttccaaaaaactgcattgaaagacaaaaaaattcttttatacggcatatacgcgagatgcaaacttctgatgtaaatttgtttcactgtcaactccgatgataaagatgagaggcacaagggttcacagttcagttaaatgatgcaaacaaaaagcttctgtttccctccgataaaattagaagtctccattcatgtctcttacagtagtaccacatacttgatgctgatactaggttacttctttttctttcctttcccttttttacttccctctccttgttgaagactttggtcagcacctcctgttttttgtgtccttgtttttagtttaggtatcatttctgctgcatacaacattactgacttacgtgatgggaactgtacaaggcagaggctcccatcttcctgtttgagctggacccggactctgcctctgtattggacatcacgattccattctctagagtacattttatttttctcaagaaatacgttaagtccaactgctgaacatacatcttgaatctctgtagctgtaggattttcaacagccttacttatggggattcgccttccctctgcgatggtcttcttattatttaaataagcaggatagatacaaataaacctgtcctggtcggccggggaccgcgcggcagcgcaagccatcttcacaagagtctcaacaacccaggagccgcagggagaaacccggcagaaacccgggaggaacccggctctgagtttccgagacagcccgc

SEQ ID NO: 91612 - DNA, 2108 bp, Homo sapiens
ttttttttttttggggtctcagttcactctttccttgtttattaaatatcaacttttcctgcctaatgggctgaggttcattttcccattcctcaaggtaagggtagactacctaggaacttattgcatctttaggccagctggcttagtgctacccatctgaacccccagattactacccaagtcttccttttgccccttcctgccctaacagcaagtaccaggccagtcccttccccagcaaatgccaggggcttcatgtgaagaggaactggccacaaggctgaggggaggaggagaaactgtttctgcaggaaggacagcagtgcctccaggctcttgggcatcttcacatgtttctagataaggacaagctcaactcttggagcctcttggtaaggcagaagaaaggaggcagggagtatggcctgggcttcagataccgctgttctggatggatccacagatgacgaaggcaaggttcctgggacctggagtcacacagggccatagccaagccttttcactagaagggcaggcagtgcccattcatcttgtcagaggcaacctcagctgtggacccgaatggagtgagcaaagggagtccaggcctccactctgctctagagatggcagtgtccaggctcctgattcccaggaagcagggaagctaaaggaaacctggaaaggcactctggagcagcaggatggtcacaataataagcccgacacacagcaggagcaggagccacacaggaacactccgccgtgagggcaacagatgcagctggcaacgactgtccacagccacagagaacagggcagtttcatgggacccaaggagctctggaccacgacccttctcaggtagaaaggccacatccgtcaccacaatgccatgggcctccctcacgtagtagaggcactggagagagaaagctatgtagatggcaacagagccagtgactgtgcccaggcctaggaaggtgccggattcactgacatcgaggcaggagacgacttcatggccacaggacttggtccgaaggggcaagaagttggagccatcccaggctgtgaggtagcagggagggggctggcgcaggcgcttgtggggaatttgcactgtgaagagtcgcaggccagcaggctggtctggaacctgcccaaacctgcaggcctggtagcggtaaggtgtgctggaaaaggtgggtccattttcttgccagtgcagctgtgtcaccagctgatccttctgccacacagaggccttaaggtcccggcccacggttaccaacttgccatcaggccctaaagccaggtcttcaatctccccttcgtgggctttgaactccagaaccttctccaggctgggcaccttccagacacggacgtagccatctgttcctccagtggcaagcagggtattatcgtggttgaagcacacaactttctgcagtggatcggagctaaagtctgtctgcaccgcctgcaaattctctaccctgagttctagcccctcgtgctgggtttccgctccacatttcttctctgctggggctgctcccttcctttgtcgaggcccctgctccttggaaccggccttctctgccttgttgccctgctgttgatgtgcctggaagcgcaggagctgacagtgggcatcctgccctgcagcaaggatgtcaccagccagtgccaagttcatggtggcccgtgtctctgtgtcatgggagtgcagcaaggaggcactcaagcgcccattaatcagctctagctgcagaaagtgcacgccattctttatgcctgtcttggcggcgcctcctccgcccgcagcgatgagcagcccagtgctggggtcgacctgaagcgcgtacaacgggaacggagcccggtacagctctggcgcccggcgccggcccatcccgcccggcgcgcgttcactgcccgcaccgcggcacccaggacatgccgcgccgggccttcgactactgccccggcggctggtgaactcggccccgtcgccgccgggagcactccctacccctctcacaccggggagttgccaaaaccctgaccatcagcaggaagccgagcctcagctcggc

SEQ ID NO: 91613 - DNA, 1216 bp, Homo sapiens; identical to SEQ ID NO: 58655

SEQ ID NO: 91614 - DNA, 517 bp, Homo sapiens
tttaaggcccttaacctgtagggttccccctcaggttttttttttttttttttttttttttttgcataggcattactagggacataaatgggagactggcatagaaagtggtgaggagccgaagccaaggaattgctgaccgccgccgcgccgccatcatggacaccagccgtgtgcagcctatcaagctggccagggtcaccaaggtcctgggcaggaccggttctcagggacagtgcacgcaggtgcgcgtggaattcatggacgacacgagccgatccatcatccgcaatgtaaaaggccccgtgcgcgagggcgacgtgctcacccttttggagtcagagcgagaagcccggaggttgcgctgagcttggctgctcgctgggtcttggatgtcgggttcgaccacttggccgatgggaatggtctgtcacaatctgctccttttttttgtccgccacacgtaactgagatgctcctttaaataaagcgtttgtgtttcaagttaaaaaaaaaa

SEQ ID NO: 91615 - DNA, 1897 bp, Homo sapiens; identical to SEQ ID NO: 82185

SEQ ID NO: 91616 - DNA, 1425 bp, Homo sapiens
ggggctgctggagcttgggggctggtggcaggaacaagccctttccgaccccatggagctgtatgagacatccccctacttctaccaggaaccccgcttctatgatggggaaaactacctgcctgtccacctccagggcttcgaaccaccaggctacgagcggacggagctcaccctgagccccgaggccccagggccccttgaggacaaggggctggggacccccgagcactgtccaggccagtgcctgccgtgggcgtgtaaggtgtgtaagaggaagtcggtgtccgtggaccggcggcgggcggccacactgagggagaagcgcaggctcaagaaggtgaatgaggccttcgaggccctgaagagaagcaccctgctcaaccccaaccagcggctgcccaaggtggagatcctgcgcagtgccatccagtacatcgagcgcctccaggccctgctcagctccctcaaccaggaggagcgtgacctccgctaccggggcggtggcgggccccagccaggggtgcccagcgaatgcagctctcacagcgcctcctgcagtccagagtggggcagtgcactggagttcagcgccaacccaggggatcatctgctcacggctgaccctacagatgcccacaacctgcactccctcacctccatcgtggacagcatcacagtggaagatgtgtctgtggccttcccagatgaaaccatgcccaactgagattgtcttccaagccgggcatccttgcgagccccccaagctggccacagatgccactacttctgtagcaggggcctcctaagccaggctgccctgatgctaggaagccagctctggggtgccataggccagactatccccttcctcatccatgtaaggttaacccaccccccagcaagggactggacgccctcattcagctgcctccttagaggagagggcatcccctttccagggaggtaaagcaggggaccagagcgccccctcgtgtatgccccagctcagggggcaaactcaggagcttcctttttatcataacgcggcctctaattccaccccccaagtgaaacggtttgagagacgcagtgccctgacctggacaagctgtgcacgtctcctgttctggtctcttcccgatgccagtggctgggctgggcctgccctgaattgagagagaagaagggggagaggaacagccctctgttcccaagtccctggggggccaaacttttgcagtgaatattgggaaccttccagtggttttatgttttgttttgtttcgtgtgttgtttgtaaagctgccatccgaccaaggtctcctgtgctgaagttgccggggacaggcagggaaaaggggttggggcctcttgggggtgatttcttttgttaacaaagcatcgtgtggttttgccggaatt

SEQ ID NO: 91617 - DNA, 402 bp, Homo sapiens
tctccgggttcttttgcacaaaatacatgttcctcctaccctggctttaatcatcacaaccttgaatcctcatcaaactctctgcctatctcaaaccagtgcttaaaggacactcttacccttagaagaaatggtataattttcataaacatgggtcatttcccccttgcataaatggcagatacaaaaccgccacttaacaagatgtgccacaaatacagaatgtctgaacaaaggctgttgacaatagcatcttttttccttttttgtagttctgcgaaattgctctcccaaaatattcctaatgctttatttacttcagtgctgggtttattttgggataaactttcctgaagctgaatcttaggatgtgattcttatcctcggcacatcctggggagt

SEQ ID NO: 91618 - DNA, 671 bp, Homo sapiens
acccagctattgatacaatactaatggcttcagcgttttataatggtaattgatttcccagatttgatagaaactgaatctcatgaataaataagttgatccattagttagattttcatttttaaagccaaccaaacaaccaattttggttaacaaagctgtggttataagaaccttctcagcattcatttgatatgtaagaataaagtataactaacctttggatactgtggatgcagtttaggaagttctcattttttaagattcaggtgtatctttcttttaaggtaagggggcattagggagaaagttcaagcactggcttctttccttagtataaaatacagcatgtaaactacagccttctagtcatgctctgtgctttggagaagaaggggcttagtgctaagtgggccagaaacgtgaaggacttgagcacaagcaaccttttccagaatacctcagttctcaggcatgggcatggattaaaccagttagtttgttatcttgtaaattatagtaaagccctaaaaagaatggattgtaagaataaatcaagggtttggggcaagataatagcagtgttaccaacagaggctctttaggaggcctttttagcattaagtttttaatgaaaacggaaagaactagctacaatgtgattagtggct

SEQ ID NO: 91619 - DNA, 1670 bp, Homo sapiens
cccacgcgtccgggctttcacaaatacagctctgcaacgcgtttgccctgataccatgtctcttcgactttccagtgcatccaggaggtcctgtcctcgtcccaccactggatcactcagactctatggtgggggaaccagctttggtactggaaattcttgtggcatttcagggattggaagtggcttctctagtgccttcggaggcagctcatcgggaggaaacacagggggaggtaatccctgtgctgccttcactgtgaatgagcgggggctcctttctggcaatgagaaggtgaccatgcagaacctcaatgaccgcctggcatcctacctggacagtgtgcatgctctggaggaggccaacgctgacctggagcagaagatcaagggctggtatgagaaatttgggcctggctcttgccgtggtcttgatcatgactatagcagatatttcccaataattgatgaccttaaaaatcagatcatcgcatccaccaccagcaatgctaatgctgttctgcagatcgataatgccaggcttacagctgatgatttcagactcaagtatgaaaatgagctggctcttcaccagagtgtagaggctgatgtcaatgggttacgaagagttttggatgaaataaccctgtgcagaacagatctggagattcagtatgaaaccctgagtgaggagatgacttacctcaaaaagaaccataaagaggaaatgcaagttctgcagtgcgcagctggaggcaacgtgaacgtggagatgaacgcagcccccggggtggacctcacagttctgctgaacaacatgcgagctgagtacgaagcccttgcagagcagaaccgcagggacgcggaggcctggttcaacgagaagagcgcctccctgcagcagcagatctctgaggatgtcggagccacaacctcagcccggaatgagctgactgaaatgaagcgcactcttcaaaccctggaaattgaacttcagtctctcctagccacgaaacactccctggagtgctccttgacagagaccgagagcaactactgtgcgcagctggcgcagatccaggctcagatcggggccctggaggagcagctgcaccaggtcagaaccgagaccgagggccagaagctggagtatgagcagctcctggacatcaagctccacctggaaaaagaaattgagacctactgtctccttataggaggagatgatggagcctgtaagtctgggggttacaagtctaaagattatggatctggaaatgtgggaagtcaagtcaaagacccagccaaagccatagtggttaagaaagttcttgaggaggtagaccaacgcagcaaaatacttaccaccaggctccactccctggaagagaaatctcaaagcaattaatttgagatgcaacagagaacgtatgccacatagcccctgcgaagaaaaggcattatgtatctgtccagaaaaatgtgcatgtcctaagaaaaatgtctaacctgttgtctttctgttactttctttctgggcaatcaatgacagcatctcccccattccatcttagaagaatgccacacacaaatatgactccatttggattatccctacagaaatctgttgtcaattctttgtattcaataaacctcttctttagcaagtt

SEQ ID NO: 91620 - DNA, 1534 bp, Homo sapiens
gggaaggcaagatggcggcgcccatggatgtggccgtgtgtacggactcggcggccccgatgtggagctgcatcgtgtgggaacttcactcgggcgccaacctgctcacctaccgcggcggccaggcgggaccccgcggcctggcgctgctcaatggcgagtatctgctggcggcgcagctgggcaagaattacatcagcgcctgggagctccagcggaaggaccagctccagcagaagatcatgtgccccgggcctgtcacctgtctgactgcatcacccaatggtctctacgtcctggcaggagttgcagaaagcatccacctgtgggaggtctccaccgggaaccttctggtcatcctgagtcgacactaccaggacgtctcctgccttcagttcacaggggacagcagccacttcatctcagggggcaaggactgcctggtgctggtttggagcctctgcagcgtgctgcaggccgacccctccaggattccggcgcccaggcacgtctggtctcaccacgcgctccccatcacggacctgcactgcggctttgggggccccctggcccgggtggccacctcctcactggaccagacggtgaagctatgggaggtctcctcgggggagctgctgctctccgtcctctttgacgtgtccatcatggcagtgaccatggacctggctgagcaccatatgttctgcgggggcagtgagggctccatcttccaggtcgacctcttcacctggcccggacagagggagaggagcttccacccagagcaggacgccgggaaggtcttcaaagggcacaggaaccaggtgacttgcctgtcagtgtccactgacggcagcgtgctgctctcaggctcccacgacgagaccgtgcgcctctgggacgtgcagagcaagcagtgcatccggacggtggccctcaaaggcccagtcaccaatgccgccatcctgctggcgcccgtcagcatgctgagctcagacttcaggcccagcctgccgctgccccacttcaacaagcacctgctgggcgccgagcacggggacgagccgcgccacgggggcctcactctgcgcctgggcctccaccagcagggctcggagcccagctacctggaccgcacggagcagctgcaggccgtcctgtgcagcaccatggagaagagcgtgctcggcggccaggaccagctgcgcgtccgtgtgacggagctggaggacgaggtgcgcaacctgcgcaagatcaatcgggacctgttcgacttctccacgcgcttcatcacgcggccggccaagtgaggcccggagaccccggcccgaggcgcccaggcctgagccccatgcctcccagcaaccagggcccgcgggtgtggcccccaccagcccaggcctggactctcctcagttctgtgtcgtgttcgggtttttcctctgtgactgggccgtcttggtgtctcgtggcacgcgtcacagtggtgctagtctgtttttaacaaaagaggatgaaaagcccaaaaaaaaaa

SEQ ID NO: 91621 - DNA, 391 bp, Homo sapiens
ttcttttcaacagcccaacctataccattttaaaacaccaccatgaccggttctggctggggttccaccttttcctccctgagctacgggggaggttgttgccacccttgttgttgccgcaacccttgttgttgccgccccgtgacctgccaaaccaccgggtgccgccccgtgacctgcgtgccccgttgcaccccccccatttgcaacccctgccgccgcccggggggctgcaacccctgttccttgcaggaaggttgttgccgcccaataacctgttgcccttcgtcgggcacggttgtggggtgcaggccctgttgttgggccaccacctgctgccagcctgtgtttgtgcagtccccctgttgccggcccccctgcggccagccgg

SEQ ID NO: 91622 - DNA, 1462 bp, Homo sapiens
cagctcctctccacagtttcaacccacattaccatgaccggctcctgctgcgggtccaccttgtcctccctgagctacgggggaggctgctgccaacgctgctgctgccgcgacccctgctgctgccgccccgtgacctgccagaccaccgtgtgccgccccgtgacctgcgtgccccgctgcacgcgccccatctgcgagccctgccgccgcccggggtgctgcgacccctgctccctgcaggaaggctgctgccgccccatcacctgctgcccctcgtcgtgcacggctgtggtgtgcaggccctgctgctgggccaccacctgctgccagcctgtgtctgtgcagtccccctgctgccggcccccctgcggccagccgaccccttgcagcaccacctgcaggacctcctcctgctgagccaccacctgctgccagcctgtgtctgtgcagtccccctgcggccagccgaccccttgcagcaccacctgcaggacctcctcctgctgagcagtgcactgactgcccggaacgcgtaactcaccttctgaaaaaaccagcttctgtggatttcccagctgctccaccagtgggacctgcggctccagctgctgccagccaagctgctgtgagaccagctcctgccagccacgctgctgtgagaccagctgctgccagccaagctgctgccagaccagcttctgtggatttcctagcttctcaaccggtgggacttgtgactctagctgctgccagccaagctgctgtgaaactagctgctgccagccaagctgctaccagaccagctcctgcggaactggctgtggcattggtggtggcattggctatggccaggagggcagcagtggagctaccagcttctgtggatatcccagctgctccaccagtgggacatgcggctccagctgctgccagccaagctgctgtgagaccagctgctgccagccaagctgctgccagaccagcttctgcggatttcctagcttctcaactagtgggacctgcagctccagttgctgccagccaagctgctgtgagaccagctgctgccagccaagctgctgccagaccagctcctgcggaactggctgtggcattggtggtggcattggctatggccaggagggcagcagtggagcttcctgctgccgcccagtctgctgctgctactcctgtgagcccacctgctaaaagccagtttgctgattttcaacttgaaatttccactttcagttccattcatgaacgaattatttcttcaagcacttatggacaacgaacaaattcttcaacctttctttgtctttcttatgggggttaccaaatattttggcctcagaattatctgattcctttcaattccagaaagaccttactcttctctctgaggacgccaaaatacaaatttgacccaagaaatgaaaaagccgatttaccttga

SEQ ID NO: 91623 - DNA, 1851 bp, Homo sapiens
atgtctctggtgggtggtgggtctgcagcaagtggattagcagcaggaaggctggcagcagctggagacacagcaaggactgcagcaacagctggggcggcaacaggtggtcctgtagcaggtggtctggcagcaggtgggacggcagcaaggcagacaatagctggactcattgcaggtttggctacagcagctggacccaccacaggttggctggcaacagggtgtgctgcagcatctggtcacacaggatggttggcagcaggtggatctacaaatggtttgacagcatgttgggtggcagcaaggctggcagcagctggacccacagcaggtgggctggcaagaggtgttcctgcagcaggtgggctggcagcaggtaggctggcagcaggtggtcctgaagcagatagtttgatagcaagtcgggtgacagcaaggctgacagcaactggacccacaaataggctgacagcagctggacccacagctggtttggccacagcagctggacccacagcaggtgggctggcagcagggtgtgctgcagcaggaaggctggcagcagctggccacacaagtgggctggcagcaggtggtcctgcagcaggtgttttgacagcaagttgggtggcagcaaggctggcagcagctgggcacacagcaggagggctggcaacagggtgtgctgctgcaggtggtcacagtggtgggcttccagcaggttgtcctgcagcaggtggtcctgcagcatgtaggctgacagcaaggggaacagcagtgggtcatggtgtcaggggtgaagggtgggctcctgttcagagaggtgtggttaagacctctgccaagagatctgctgccatcccagctgctgccagaccacctgctgcaagaccgcttgctgctgccgcagcttctaacctccaccctctgacaccatggttaactcttgttgtggctctgtctgctctgaccagggctgtgatcaaggcctctgccaagagacctgctgccgccccagctgctgccagaccacctgttgctgccccagctgtgttgtatccagctgctgccgcccatcctgctctcagactacctgctgccagaccacttgctgtcgccccagctgctgccacccagtctgttgtcagaccacctgccgccccagctgtggtgtgtccagctgctgccgcccactctgctgtcagaccacctgccaccccagctgtggtatgtccagctgctgccgtccactctgttgtcagaccacctgccgccccagctgtggtgtgtccagctgctgccgtccactctgctgtcagaccacctgctgccgtgcaacttgctgccgccccagctgctgtggatcctcttgttgaacctcatattggactatcaaccatgagccagtcaccatcccatgatatgaaaagaactgctgccgtcccagctgctgccagaccacctgctgcaggaccacctgctgccgccccagctgctgtgtgtccagctgctgcagaccgcagtgctgccagtctgtgtgctgccagcccacctgctgcagccccagctgctgccagaccacttgctgcaggaccacctgctgccgtcccagctgctgtgtgtccagctgcttcagaccccagtgctgccagtctgtgtactgccagcccacctgctgccgccccagctgtggccagaccacctgctgcaggaccacctgctaccgccccagctgctgtgtgtccacctgctgccgcccaacctgctctagtggctcttgctgctgatgccctcacctatactcacctgcctttattaaccagcattcttgatatgatccacctgtga

SEQ ID NO: 91624 - DNA, 2182 bp, Homo sapiens; identical to SEQ ID NO: 60207
  misc_feature (1)...(2182): n = a,t,c or g

SEQ ID NO: 91625 - DNA, 3039 bp, Homo sapiens; identical to SEQ ID NO: 60183

SEQ ID NO: 91626 - DNA, 3596 bp, Homo sapiens
tgggagagccccatgagggcaggagagtgatggagagtacgcccagcttcctgaagggcaccccaaccttggagaagacggccccagagaacggcatcgtgagacaggagcccggcagcccgcctcgagatggactgcaccatgggccgctgtgcctgggagagcctgctcccttttggaggggcgtcctgagcaccccagactcctggcttccccctggcttcccccagggccccaaggacatgctcccacttgtggagggcgagggcccccagaatggggagaggaaggtcaactggctgggcagcaaagagggactgcgctggaaggaggccatgcttacccatccgctggcattctgcgggccagcgtgcccacctcgctgtggccccctgatgcctgagcatagtggtggccatctcaagagtgaccctgtggccttccggccctggcactgccctttccttctggagaccaagatcctggagcgagctcccttctgggtgcccacctgcttgccaccctacctagtgtctggcctgcccccagagcatccatgtgactggcccctgaccccgcacccctgggtatactccgggggccagcccaaagtgccctctgccttcagcttaggcagcaagggcttttactacaaggatccgagcattcccaggttggcaaaggagcccttggcagctgcggaacctgggttgtttggcttaaactctggtgggcacctgcagagagccggggaggccgaacgcccttcactgcaccagagggatggagagatgggagctggccggcagcagaatccttgcccgctcttcctggggcagccagacactgtgccctggacctcctggcccgcttgtcccccaggccttgttcatactcttggcaacgtctgggctgggccaggcgatgggaaccttgggtaccagctggggccaccagcaacaccaaggtgcccctctcctgagccgcctgtcacccagcggggctgctgttcatcctacccacccactaaaggtggggatcttggcccttgtgggaagtgccaggagggcctggaggggggtgccagtggagccagcgaacccagcgaggaagtgaacaaggcctctggccccagggcctgtccccccagccaccacaccaagctgaagaagacatggctcacacggcactcggagcagtttgaatgtccacgcggctgccctgaggtcgaggagaggccggttgctcggctccgggccctcaaaagggcaggcagccccgaggtccagggagcaatgggcagtccagcccccaagcggccaccggaccctttcccaggcactgcagaacagggggctgggggtttgcaggaggtgcgggacacatcgatagggaacaaggatgtggactcgggacagcatgatgagcagaaaggaccccaagatggccaggccagtctccaggacccgggacttcaggacataccatgcctggctctccctgcaaaactggctcaatgccaaagttgtgcccaggcagctggagagggaggagggcacgcctgccactctcagcaagtgcggagatcgcctctgggaggggagctgcagcaggaggaagacacagccaccaactccagctctgaggaaggcccagggtccggccctgacagccggctcagcacaggcctcgccaagcacctgctcagtggtttgggggaccgactgtgccgcctgctgcggagggagcgggaggccctggcttgggcccaacgggaaagccaagggccagccgtgacagaggacagcccaggcattccacgctgctgcagccgttgccaccatggactcttcaacacccactggcgatgtccccgctgcagccaccggctgtgtgtggcctgtggtcgtgtggcaggcactgggcgggccagggagaaagcaggctttcaggagcagtccgcggaggagtgcacgcaggaggccgggcacgctgcctgttccctgatgctgacccagtttgtctccagccaggctttggcagagctgagcactgcaatgcaccaggtctgggtcaagtttgatatccgggggcactgcccctgccaagctgatgcccgggtatgggcccccggggatgcaggccagcagaaggaatcaacacagaaaacgcccccaactccacaaccttcctgcaatggcgacacccacaggaccaagagcatcaaagaggagacccccgattccgctgagaccccagcagaggaccgtgctggccgagggcccctgccttgtccttctctctgcgaactgctggcttctaccgcggtcaaactctgcttggggcatgagcggatacacatggccttcgcccccgtcactccggccctgcccagtgatgaccgcatcaccaacatcctggacagcattatcgcacaggtggtggaacggaagatccaggagaaagccctggggccggggcttcgagctggcccgggtctgcgcaagggcctgggcctgcccctctctccagtgcggccccggctgcctcccccaggggctttgctgtggctgcaggagccccagccttgccctcggcgtggcttccacctcttccaggagcactggaggcagggccagcctgtgttggtgtcagggatccaaaggacattgcagggcaacctgtgggggacagaagctcttggggcacttggaggccaggtgcaggcgctgagccccctcggacctccccagcccagcagcctgggcagcacaacattctgggagggcttctcctggcctgagcttcgcccaaagtcagacgagggctctgtcctcctgctgcaccgagctttgggggatgaggacaccagcagggtggagaacctagctgccagtctgccacttccggagtactgcgccctccatggaaaactcaacctggcttcctacctcccaccgggccttgccctgcgtccactggagccccagctctgggcagcctatggtgtgagcccgcaccggggacacctggggaccaagaacctctgtgtggaggtggccgacctggtcagcatcctggtgcatgccgacacaccactgcctgcctggcaccgggcacagaaagacttcctttcaggcctggacggggaggggctctggtctccgggcagccaggtcagcactgtgtggcacgtgttccgggcacaggacgcccagcgcatccgccgctttctccagatggtgtgcccggccggggcaggcgccctggagcctggcgccccaggcagctgctacctggatgcagggctgcggcggcgcctgcgggaggagtggggcgtgagctgctggaccctgctccaggcccccggagaggccgtgctggtgcctgcaggggctccccaccaggtgcagggcctggtgagcacagtcagcgtcactcagcacttcctctcccctgagacctctgccctctctgctcagctctgccaccagggacccagccttccccctgactgccacctgctttatgcccagatggactgggctgtgttccaagcagtgaaggtggccgtggggacattacaggaggccaaa

SEQ ID NO: 91627 - DNA, 2787 bp, Homo sapiens
agagtgaaataacaaagcttccacagcatggaaggtgatccgagtgggttgccactgctggctaggggcgccagctgttattcccttatttgtccctgcccacgtcctgctgattggtccattttacagggtactgattggtccattttacagagtgctgattggtgcatttacaatcctttagctagacacagagcgctgactggtgtgtttttacagagtgctgattggtgcacttataatcctttagctagacagaaaagttctccaagtccccactcgacccaggaagtccagctggcttcacctctcaccaggaggccaaacaaaaaggacagtgctgagaggaaccatcgtcctgctagggaagggagtgtggcacaaaggcagcccaaccctgctgccctggagaaagccgagcctgcagcgcggaagaggaatgagagagaaggtggaggttcacaggagccaggcagggagcacagcctggagaaaggatactgggctccaggcctgggcccagatccctctatgtgctcgaagcaggtggacccctcggagggcgcgagttcccacctcaagcaccgtggcggctcccgcgctgcgcacctggaagtgcgcaggctgctccgccgcctcgtcggcgcgctggtagctgaagcaggcttctgctatgtccaggtggccgaggggcagcgggtcgtgggggttcttgaagtagcagaggcagcagcggcgcccgtccaacacgaaccgacggctgcggtagccacgcagtcgcgctggttcccgcgcggtacccgccccgggctctgcagcctccccatcgccgtcgctgccctcctctgcccgggttccggccccggcgctcaaagtggcctggaatttgtagaacgcccccctccaagcccgttggcagttgtcctagcccgctggcccttgcccccgcccgctggccgttgcccccgcgacgccccggaagccagagtaccggaaaaagctcgagcagaggggtcggaaagggaaaacaactacggctgcggtgtggttggtggtgagatgacgaccttagtgctggataatggagcttacaacgccaaaatcggttacagccatgaaaatgtgtcggttattcctaattgtcagttccggtcaaaaacagcacgtcttaaaacttttactgccaaccagatagatgaaataaaagacccttctggactcttttacatcctcccttttcaaaagggctacttggtgaattgggatgttcagagacaagtttgggattacctttttggaaaagaaatgtatcaggttgattttttagatactaatattattatcactgaaccatactttaacttcacttcaattcaagaatcaatgaatgaaattctatttgaagaataccagtttcaagcagtattaagagtaaatgctggggctctcagtgcacataggtatttccgagataatccttccgaattatgctgtatcattgttgatagtggatattcctttacacatatagttccttattgtagaagtaaaaagaaaaaagaagcaattattcggataaatgtgggaggaaaactcttaaccaatcatctaaaggagatcatatcttacaggcagctacatgttatggatgaaacacatgtgattaatcaagtgaaagaagatgtatgctatgtgtctcaggatttttatagagacatggatattgcaaagttgaaaggagaagaaaatacagtaatgatagactatgtcttgcctgacttcagtacaattaaaaagggcttttgtaagccaagggaagagatggtgttgagtggaaaatacaaatctggggaacaaattcttcgtttggccaatgagagatttgctgttccggaaatactctttaatccttctgatataggcattcaagaaatgggaattccagaagctattgtctattcaattcaaaatctacctgaagaaatgcagccgcatttttttaagaacattgtcttgacaggaggaaattcccttttcccaggatttagggatcgggtttactcagaagttcgatgtcttactccaacagattatgatgtttctgttgtgctgcctgaaaaccctattacttatgcctgggaaggtggaaaattgatatcagagaatgatgattttgaagatatggtggtaacaagagaagattacgaagaaaatggacatagcgtctgtgaagagaaatttgatatttaaggcaacatttttggaatgaaagttgtgaccataaggtttaatttcaaagttccttttaaaagaggttaagggaactgtgttaccttttgtcctaaggaaaaagggcttgaatttatgttaaatactttgatccgattgctaattttcaaaggcttcttaggtaggttactacagtaaactgtaactcagtccacattttcatttaggagctagactaccataacaatgcttatgctgtttccaagggtaggttatttttcattaaaagaagaactgaatgccttttaaagtttaaattcttcatagcctgaaagccacaaactttaacggctctcacctggacacgtttctccttagaaggctagttcttgtgtgactgtgactaaactattttctattttaaaactgtcattctctattatatacattcctaaagtctggaaacgactgtattcttatcatgtgtatcaatgttatattttgtacctagagtacatttaaaagggtggagcactcagctaataaagtttttttggc

SEQ ID NO: 91628 - DNA, 378 bp, Homo sapiens
  misc_feature (1)...(378): n = a,t,c or g
agaaagggtggggcgagtccagctacaggatgagtagcgctactatggcaaccctgacaggtttgtgagcagcccccggtcccctgccgctccgtgagaaatcaaacttcaggcactgacgaagcatgaagccagcatcttaggaagaggtagtgacataattacaagggcgaccggattacaatcacagccagcatgaacatggggcggcgcacagtcctgaagaggaaagccgggctgtgttgacctcgctgtgcatgctgggagttgtagtctcttcactgctcccgcccgttgtttcaggcactttgggactacaatcccagcatgacccgggctcggggacggngcgcagttctcgtgggaggagcggggcgg

SEQ ID NO: 91629 - DNA, 394 bp, Homo sapiens
cgacactgactttccctacgcacagaggagagacagacacactgcagcccccaaaaggaaatacagataattgctttggggtttttttctcctctgagaggttttggcagtaggtagggaactgcaggaggaggagaaagaggagacaggatggcggaaggcgcaggcagcagtagaggggggtgtggggacctggtggctgacagccagcattagctgccaacgtgtttactgtcaggaaaaaatggggactttacacatatgtcttacaaatcctttcttttttacttcaagcctgtctggaagttacttgtggacatggtgagtagcattgttaatgttacaattgtttctgtaaatgaaatggatatcattgatgacatgccttttgatg

SEQ ID NO: 91630 - DNA, 1551 bp, Homo sapiens
ttttttttttttcaatgttcagtttcctttaatgacccccatctccctgaagggcaggtgcaggcagctaggtgatggcaagagatgttcacttgaagatcttgccctgattgaaggctttgcccacatgctggaaggccccctcccaggaaaagtactctcgaaccagcgtctgggtctcctcgctgccaggatccagtttccgccatgtgtatgactcgtagtccacctgccaatctggactcagcggaaaggcaagctcctggcctcggaagacccagactccagaaatggagctgctattgttggttccaaaaaggatgacactggcgaaggcattcttcctcagcttgtccagtcgctggaacattccagtgatgagattgcagctcatgaaggtctgagtgagttcttcagggaagcgatactctgagtaccacagggaccagccgtccttatcaaagtgctcccagaaatatggcagtgccacagagagtgtgtcctcattggagtacttgcgcttaaattcatccaacacaaaggtactcttgggcaggtgagcgaaggggtccttggccttgggctcagcagccagcgcctgctcacattcatccatctcctcctcaggagcaggggcagccgcctttttctcctccttccgctcagcctggggcttctgcttctcttcccgtgaacccttctctttccgtggtgtgtcctttttaggttgggtctctgcaaactttttagcatcaaactgggccatcttctcacacagtttcacttcccccaagacagcccggaactggggctggttaatgcaggtgaggaaccagcggttggtattgggaaaggcctggcggaaagaaggctctagaacctgcttatagagccacaacagggtgcagacaactgtgatgtcagccaatgtcactcgttcgcccaccagaaaagtcctcgtcttcaagtaagcatccagcagccccagaattcgcctcacttcctcctttgcattctcagtggcctgtttgttgtggtgcatgatgcccaaggtggggaacacccaggtactggctgggggcactatatcggaatcagcaaagctcacccactgcaccacctgggctgctgcctctggagtacttccccgcagctcctcattgctcacatagtaggcaatggcgttgctctcaaacacacagaatccatcatcaccctcaaatgctgggaccttgccggcaggaaatttgcggagaaattcaggggtgcggttggtttggccaaaatggaagtggggtggtgcggagagcacgcggacctgagccccgctgtactgagcagcgatgagagccttgaaggccctccagttttcaggatacgtgtacagggtcccagccgccatggtgattccgcaaagaaagggggtggggttctcggcgctgccgcaaagtaagcccgcccgggagagaagggagggggaaagaggagagccgtggagaaacagcagccgaaaaacgaggacgaaacagaagacatacgtacgacagttcg

SEQ ID NO: 91631 - DNA, 480 bp, Homo sapiens
ggggacccaccctggagggagttgtaggccactttgaggtctgtgtttcctttgccacccagcccccatgtccgcagacctcctccaagatgctccagggggtcctagtggaccctacaaacctcccttcagttgcccggaagttggtcttccatggacaacacaaaggaggccgtgaggtcctggcctcacctggccagggtcaaggtcatttgccacccttggcttcagggagggaaactgtgtctcccacagccccagtgacttcaagcgggcctgggctccaggaagctggccacctctgagcagggcccatcctgtccggatttgcaaattttagggtcctgagccaagtatggatggttcagaatttgtttctttcctgggaggagaagagagctccctttgttttctttctccccatttccattttatttcttcttgggaagacccttattaaatgaattctgtagaggcccg

SEQ ID NO: 91632 - DNA, 879 bp, Homo sapiens
cagaaaccctcctcccctcccagcctcaggtgcctgcttcagaaaatgaagtagtaagtctgctggcctccgccatcttagtaaagtaacagtcccatgaaacaaagatgcagtcgggcactcactggagagttctgggcctctgcctcttatcagttggtgtttgggggcaagatggtaatgaagaaatgggtggtattacacagacaccatataaagtctccatctctggaaccacagtaatattgacatgccctcagtatcctggatctgaaatactatggcaacacaatgataaaaacataggcggtgatgaggatgataaaaacataggcagtgatgaggatcacctgtcactgaaggaattttcagaattggagcaaagtggttattatgtctgctaccccagaggaagcaaaccagaagatgcgaacttttatctctacctgagggcaagaggtaatccaggtctccagaacaggtaccaccggctctttagggaggaccattcaaaagggcattctcagtgattttccctaacccagctcacagtgcccaggcgtctttgcgcttcctcccacactcaatcctgggactctctggtaccacacggcatcagtgttttctggaatatagattaaacaccaatatgaggcttctgggtaaccccagtctgtgcgagatctaaaatagcaactccctaagagacaggactgggtcatttgcaccgcatcacacccaggttcatagcacaccaacatgagtttatctaatgcttcctccagagataaatttttcagaaaggtttgcaaaaaaacactcaaggccactatagtaaaatggcataagctaaggtataataataaaataataacaata

SEQ ID NO: 91633 - DNA, 406 bp, Homo sapiens
aagcttcacttcaacttcactacttctgtagtctcatcttgagtaaaagagaacccagccaactatgaagttccttgtctttgccttcatcttggctctcatggtttccatgattggagctgattcatctgaagaggtgagtcattttcattcactggaaaacttgttttcagttttgtcctccctacatttgtattgaattattaaacttttcttcatttttcacagaaatttttgcgtagaattggaagattcggtgtaagtgttctctgataatgctgtgtagtccaaataaattgtgttctctgattacttattcttctagaagaaccaatacttatttctcaaatatatgtagtagttgcaaaagtgtgctttgttttcctctatttatgatacacaggta

SEQ ID NO: 91634 - DNA, 1010 bp, Homo sapiens; identical to SEQ ID NO: 76901

SEQ ID NO: 91635 - DNA, 857 bp, Homo sapiens; identical to SEQ ID NO: 82048

SEQ ID NO: 91636 - DNA, 578 bp, Homo sapiens
atgggttgaactggaaggagtaagattcgatgggagggcaataggtaatacggggaaagaaaggttggccaggatggctgtaacccagagatggggtcataggcagagatatttaatatattggggccttttgggcaacagatccatggggacaaatggttgctgtggaggtgtgcgccctcatcctttacatcttgaaccctaggttactaggagaaatgttctctatgctgattatgccctgttgtatgctctgcacaaaggtgttcttgtgagtggaaggagtttatcaatatattgcagcctactgagggagttgaatgcaagagagggagtagaaaggaggaggccagagttgggtttgttggtggaagggagggaattgagggtctgggggagtgtagacagcctccatctgtaaagggaaagattcagtcaacacacactggtagggaggaggcctgcaggagtggtcaatgaagctgctgtttacactcttcatctgtccagtttaattgctccaagatcattgtgctttgtttattgtcaaccatctctctaaattagattatttatat

SEQ ID NO: 91637 - DNA, 1319 bp, Homo sapiens
aggctgtacagagaattcgtcacgagatgaacattttccggctgactggggacctgtcccacctggcggccatcgtcatcctgctgctgaagatctggaagacgcgctcctgcgccggtatttctgggaaaagccagcttctgtttgcactggtcttcacaactcgttacctggatctttttacttcatttatttcattgtataacacatctatgaaggtatggtatgccatccacaggaatgtatttcatctacagtgcacaggtctatggacacttaatttatgtcagctgtgtatttttaattaaaatgctccaaaaataatgtcttaatatgctgttcttgactttaaaactttcagaccaccttgtatatataactgggactaaacgagctatcagtaagcatacatttttggtttcaaaacagtagttaattaaaatactttgaagttagaacttttttattttaggttccttaagtatgataaatctaaagctcttgataactctgtaagtaagagcggtaactattatattttcaagccgtggggaaattacagagtccccagaggaaatccagccaagttgggtacataacaagggaacggaaagccagggactcctagttgcagtgtctcatttcgctgctgtgttgaggaactgtctataggctttctatcttttttctttgccactgagtcagttttacttaaactgttgtgtgtgtgtcatttttattacatttgccatgcttaaatgagtctctataccatcatttacttactaacgtatttttttaaacctttcaacttggcctaattattagtatctataacacctttgttggctttcttatattttttctaattcacattaaaacaagtgtataactattaaaatacaaaatgtttgcacaccacctaacactttgtgtagcactggttggcacacaccccacactggggggaagttgtggactacgtgagcttcagttctttcgcacagtgttgaattcatgcttgtgaacacctacagagctgggaactgaggatgcggcagaaaataagcagaagtctctaggctggtgtgggagagtacacagatcatggcagtacaaatgactgcgatttatgatgggtgccacaaaggaaaagtataagagttgcgaacctatggatataaaaaacatgaaacaggcccagtagctcccgcctgtaatcccagcactttgggaggccaaggtgggtggattgcttgagccaaggaatccgagaccagcctgagcaacatagttagacccctgtctcaaaaaaaaaa

SEQ ID NO: 91638 - DNA, 1333 bp, Homo sapiens; identical to SEQ ID NO: 60028

SEQ ID NO: 91639 - DNA, 565 bp, Homo sapiens
ggaggaggaggagaggtcggagccgtctccaggagcccttagagaccgagtcccggcggcgacggcggggcagcgcaccggcaggcggattcattccacttaaaacctgaaaacattggaccacacaaagtcttactgatttcaggtaaaaacaataattgaagatgtccagcaaaacagcaagcaccaacaatatagcccaggcaaggagaactgtgcagcagttaagattagaagcctccattgaaagaataaaggtttcgaaggcatcagcggacctcatgtcctactgtgaggaacatgccaggagtgaccctttgctgataggaataccaacttcagaaaaccctttcaaggataaaaaaacttgcatcatcttatagtggaatagagaaacagctcctcgcctctttccaacaacgcaaattatgagcagctccttgaagagatttaccttcagcttatttggtaaccactgctaataactaaaatgttctcagcttggaataatggactctgaagtctctattttccaagttgtcctttctccttaaaataccctttt

SEQ ID NO: 91640 - DNA, 589 bp, Homo sapiens
attcggcacgaggggaggggccagcgaggcaagatggagttagtgcaggtcctgaaacgcgggctgcagcagatcaccggccacggcggtctccgaggctatctacgggtttttttcaggacaaatgatgcgaaggttggtacattagtgggggaagacaaatatggaaacaaatactatgaagacaacaagcaattttttggccgtcaccgatgggttgtatatactactgaaatgaatggcaaaaacacattctgggatgtggatggaagcatggtgcctcctgaatggcatcgttggcttcacagtatgactgatgatcctccaacaacaaaaccacttactgctcgtaaattcatttggacgaaccataaattcaacgtgactggcaccccagaacaatatgtaccttattctaccactagaaagaagattcaggagtggatcccaccttcaacaccttacaagtaaagacaatgaagaacagttgaaacatgcaaaatatggagcttttcatgtaattactcttttactgtttaccattcactataattcacaattaaaattgtgtgactaaacaaaaaaaaaa

SEQ ID NO: 91641 - DNA, 485 bp, Homo sapiens
  misc_feature (1)...(485): n = a,t,c or g
gcgccgaacggacccgcaannntggnnnnnnccacgcgtccgaacagcttggcagcacagaggcaaaccacagagtacattttaggcccagatctgcttatttcgagggtggggccgcgtttttctcctgccacagtgagctaattaaagaaaacaagcttcgggagttgggagagaactgtccacaggacacttggggaggcttgctttggttgtggaggcctccacagcccccggaaggcaggtggaagtgggcatggagggtcctacgcatccccagcgggggtctgagggcccactgttgctcagctgggggatttggggacggtgggagggcatacatggatgggagggtggactccgttcctgagggggccagtgtggaggagggtcaggcagcccatggagatgggacagtgttctgaaatgcttcacaaatgtggacttttgccccaaactgtggacagagcgtatgtcctgagcgn

SEQ ID NO: 91642 - DNA, 1086 bp, Homo sapiens
cgtcgactttttttttttttaatttttaaatggttaactttatttgatgtctcgccaaataacatatatatgctgtaatgttcattgaaattaaagattccatgagacaagtttaaattaaatgttcacactaaatattttgtaatgacattttaatcttagaatactatatttttgcttgttgaaaacatagttgagtaaaattatttcagtgtcagacatttttagtagcacgtacagtcgcttagctttcagaacagaaagttccttttcaccctactctgctactattattctagtatacatagtcttaagaacatacagtatctattgttcagtgtgttacaatttttctcttctattagtatctaatactaaaattagagtattcaagcttagagatggttttttcattagaaaagtttgtgcggtcaatgcgagaactagggcttccaaccttgctcagccaggacttcatggaattgactttgtcttctggcccctgcacttggcctgtcacggtgcctttgctggtattcttcacccagccaaccactcctattttcctagcttcatcttctgtatacattctgaagcaaacaccctgcactcttccgaacacctcgtagtccacggatttgagtgactgggcggtagacatggcggcggcgagccctctgttgaggagccggagaggggctcggggcgcagcgactgcggcggctgcgagagggaggggacacatgggactgcttggcgcaccccgcgcctgtcaccggtcccggacgctagcgcgccggggtcacgcgtcggaagcggcaaatgagactgcggggcctgggagcgagggcagccggggacgccaggagggaagaggccgctgggccccaggcatcctaggcctctcttcccggactggggaggatgctgtctccacagcgctccctaccatttaattgatcaaggtactctgttctcaaagttagtaaataaaagccggatgctgtgcccaaaaaaagagtggcttcccccagctttattaaagtgtaattgacaaataaaagttgggtatatttgtggtgtaaa

SEQ ID NO: 91643 - DNA, 780 bp, Homo sapiens
gggctttaaaaattcttttaaaagttttattagattcaaagactatgtataaaatatatgcaaattataaacgaaacatatcttttgatgggcaccatgggggcaagtttccagttttgcccattaaaaaaaaaatccttcccaatttttgaggcttgtgccattgaacactgctgcccgcggctcttcttcccacttggctcgacaaacgcgtcttttattatgactcagcccagcccgttccttgccaagcggctgacgctcgcggcggaggcgccggggccgccgctcgggggcgagggttcgcgccgcggctcgcgcccgcttctcccgctttacggctgctgaaaatccggcctggcccggcagccgtaccgcagacgagcccgcgcccgcgccgctcagttttctgaaagaaaagatcagtaagatcagttatgggctatgatgaaaccattttaagtctctgttctttgccaagctccaaggtccatgaaatctgatggtgtaggaaatgctcatccagtatctgcagtgctgtttaaagagaaaaggcccagtgtaatttcggcttattttacatcaaaaatcacctccatcaaagcagagatcaatgatggttaacatgaatattctgaagtttgtatctacatctcttacacaaatgcatttcgtttaagctttcctgtaataaagatctcccagctggacgttcaaaatagcttttgatgtcttagggcgtcttttattcaaccctagctatgcagatttccagggact

SEQ ID NO: 91644 - DNA, 1106 bp, Homo sapiens; identical to SEQ ID NO: 59486

SEQ ID NO: 91645 - DNA, 997 bp, Homo sapiens
aggtgtcacgcgtcgacccacgcgtgcgatttgaaaaaccactgggttccgagttcattactacaggaaattctgttctcttctgcggcacagagaaccctgcttcaaagcagaagtagcagttccggagtccagctggctaaaactcatcccagaggataatggcaacccatgccttagaaatcgctgggctgtttcttggtggtgttggaatggtgggcacagtggctgtcactgtcatgcctcagtggagagtgtcggccttcattgaaaacaacatcgtggtttttgaaaacttctgggaaggactgtggatgaattgcgtgaggcaggctaacatcaggatgcagtgcaaaatctatgattccctgctggctctttctccggacctacaggcagccagaggactgatgtgtgctgcttccgtgatgtccttcttggctttcatgatggccatccttggcatgaaatgcaccaggtgcacgggggacaatgagaaggtgaaggctcacattctgctgacggctggaatcatcttcatcatcacgggcatggtggtgctcatccctgtgagctgggttgccaatgccatcatcagagatttctataactcaatagtgaatgttgcccaaaaacgtgagcttggagaagctctctacttaggatggaccacggcactggtgctgattgttggaggagctctgttctgctgcgttttttgttgcaacgaaaagagcagtagctacagatactcgataccttcccatcgcacaacccaaaaaagttatcacaccggaaagaagtcaccgagcgtctactccagaagtcagtatgtgtagttgtgtatgtttttttaactttactataaagccatgcaaatgacaaaaatctatattactttctcaaaatggaccccatataaactttgatttactgttcttaactgcctaatcttaattacaggaactgtgcatcagctatttatgattctataacc

SEQ ID NO: 91646 - DNA, 1230 bp, Homo sapiens
caaaacttttcttttctttttttggcatgcaggctctttttactgttctgggcagtgttttgcaatgtgtgacccctccgcactgttggtgaacatacagacctcctatatgggcacccaagcccaggccagtgtgagaaccttggcgggggggtggggaggatgagaaggggaggcccctagcctgactcagaggtgaagactgctaggccctgctgtccttggggtacgactgtcagggcctctacctccccgcccccgcgggtgggcttctggaagtggatctccaggacgtcatgcagctccgggccatccaagatatcaggaatgttgagcaccagtaccgagcggggaactggctgcgacctgatctcagccttctggatctccccattcacatacggagagactctcagagggacttgctgcccacccagtggcactgtgaactggccgatttggcacagacgctgagccactccatccctagcaaaccccagcatgacactccctggcagtagctcccgaacgtccacatcgccacctccgttcctagtcttgccaaagaagatctctagcttgtccagcagctcctcctcactcagcctgaggctggcaggaaatccagtgaccaacaccctccggccactcaactggctggacaccatcacctggatggtggtgaccatgggcagctccaagggctggacctgcacccgcagccggcactcctccatgttgatcgtgtgctccttttgttgcagcacctgctcagccactttggggtcatcaaaggtgatcagagcagagcccgcaagcagagggcagtggatccgcaaattggaaactaaagacttaggcacttccgggtcctgctgggtgtgtcctcggaataccagggggatcttgggcactgaaaatgggaccttgtctttgggggagtccccgagctcctttctcagctgctgcaggtcccacagcctcatcttgagtctggcctgctcctcctgaagggcgtggagggcggcatccagtggggctgacatgggtctcgggtctgtttggcaagagctgaggcttcagagctgggcacagtggcagaattcacagcaactgaactcttgtttgtaccccccaaagggctgtggtctctctcagccccagcaagacccgaaatacacctcaggaggctctgctcgcaggctgtttgcttccactttcatttccgtg

SEQ ID NO: 91647 - DNA, 1402 bp, Homo sapiens
caaatatcgttaccggaggccttatccagtcatgaggaagatctgtcaagtggggccagcaggtctggcttttatcctaaacatcagccctgtggcacaccgtgtggcgctctgtcacctggctggctgccaggagcaagcagcctggtaccacaccctccagatcctcttcttcctggttagcgcttatttcttctcctgccccgtgcctgagaagtacttcccgggttcctgtgacatcgtgggccatgggcatcaaatcttccatgcatttctgtccatctgtacgctctcccagctggaggccatcctcctggactaccaggggcggcaggagatcttcctgcagcgccatggacccctatctgtccacatggcctgcctctccttcttcttcctggctgcctgcagtgctgccaccgcagcccttctgaggcacaaagtcaaggccagactgaccaagaaagattcctgaggctggcaagtggggcaacgtgtggaggaagcccctcataatttggagaaaacttgatacaatagaagctgactcttaaggcattggcttttaaattaatacatatatccaaggatatgttatagctgcagtgtttgaaagccaaaggatttaagagttttgttgttgttaataaaaggaatactccttttccttttggatcatagcttaacaaggcacaggaagggaagggatcttgactaagattcatgagacattgaattaaggagaatcatcttcatgcctgaaaatttagcaaaattccgactatggcctccaggggcaattcctaaaagctgaatggataataaaattggactggaaagtaagtaggtggctggtcctcaccctgttggaatggctatcctactatgctgttctttggtaatggaataaattgacccaaggaccgaatttcatttggatttcaaattgtccagagtggaaaagccttcaagatgacatgatgaattactcagttcatctgatttctggtccctcctttctcgacaactataatactaacccttttctcaggataactgtctacacctggcagttttctctgacgtgctgttcactcacatccctaccttgcatggtaatataaaggactaggaagcagtcatacttccaggaaatgcttggattcatgtggacattcaggaagcttattctcatataatactaatctaaacagtactagaaattacagtgccaagagccaccaggaggcccagccaataagcatagatactatatggtatcatgggacccatctattttttaccagtggactacaggattacttgagagttatcagggctgcctaacagaccaggagatctgggggttgcaccagggaatcgccatatttgaccagcatgt

SEQ ID NO: 91648 - DNA, 414 bp, Homo sapiens
tactatagaccgtgcggtggaagtaaagagagcttaactgtcttgagaaaaaaaatagaatgtcccaaaacctttttatttatgaaatatttgacaggcatatttttttaaatatcaaacggggctattcataacataaactgactggatgtcaagatgccctaccttaaacgaggagttttataaatcatggacaacattccatgtacatatttgagctttacaaagatagatccaagtgtgcgatctgtgcactgcacatttgatagcattattcactggttttccttcatacttgtcaaggtcatattagaagcagagacaaaaaccactccaatggccttgacacatagtcacaccaaaatagatcatcagactaagtattatataacaacgtgatccagacagtgagtt

SEQ ID NO: 91649 - DNA, 590 bp, Homo sapiens
ttttgcccctgcgctgcaggaattcggcacgaggggaagatggcggacattcagactgagcgtgcctaccaaaagcagccgaccatctttcaaaacaagaagagggtcctgctgggagaaactggcaaggagaagctcccgcggtactacaagaacatcggtctgggcttcaagacacccaaggaggctattgagggcacctacattgacaagaaatgccccttcactggtaatgtgtccattcgagggcggatcctctctggcgtggtgaccaagatgaagatgcagaggaccattgtcatccgccgagactatctgcactacatccgcaagtacaaccgcttcgagaagcgccacaagaacatgtctgtacacctgtccccctgcttcagggacgtccagatcggtgacatcgtcacagtgggcgagtgccggccttgccggcctctgagcaagacagtgcgcttcaacgtgctcaaggtcaccaaggctgccggcaccaagaagcagttccagaagttctgaggctggacatcggcccgctccccacaatgaaataaagttattttctcattcccagaaaaaaaaaa

SEQ ID NO: 91650 - DNA, 473 bp, Homo sapiens
acatgaaggctccgtttctgaccagtgccctctccaaaaggcacgcctggcagcactgttctctgttttcagtcttcctccaggtaacggccacctgtaaatacttgccacagcccctccgcaatctgccacatgtccacacgctccacggtcctggcacttctacctgccacacaaccccccggctttctcttgccttcgagttcttcacatctgtgcatctctcttcctgggaaattcttcccaatgcttgcactccaagccccaattccctcatcttaaaaaagcaagaaacagcacttgagtagcaaacggctcacttgctgtcagaggtggcgtgaactccaggggaagacgcctgaagcttactcctttccccagcatgaatgagctgaaggacttggggcaagtcatctaccctctgtgcctcatccataaacagaagaaaaagcagcccgtcttgcagaatcccc

SEQ ID NO: 91651 - DNA, 1827 bp, Homo sapiens; identical to SEQ ID NO: 59184

SEQ ID NO: 91652 - DNA, 442 bp, Homo sapiens
ctcccagtcttctctgggagctaagctagacatctggtgagagggttataggagaacattagatgttgagaatcactggtgagaggaatgagcaaaaggagagagaatggggatgcaggtaaaagagtgggtttataccatgaaagacccagctctgaacctcagtgggtaccctctcaacggaataaaaccccttctgtgtggccttcgggacctgatgcctcctggcctgtctccctttctagctttctccaccatcattctgctcacccctgacaccctgacactcaactgcagaagaatggggcacgtgctgcatatgcgggcccaagcatccttccctggattccccggccttcccccgccattcttggctctacagctacctcctctgtgagtctaattccaccaagtggtattaacttcttctatgtgtccattt

SEQ ID NO: 91653 - DNA, 574 bp, Homo sapiens
agagttagatgcaggtggagtctgatcagggcagagtgggcctatcacatctcttattcaggacattacattgctgttagcacagtctaacatgtatcctccttttttggagtaactttcgttatgaggagacttactaaaaaactctttcaaatagttcaaattccctttcagatatgttgttattaaaacacatacccttctggctcttgtgcagttaatattttgaaccaaagaataaatgcttacttctattaaatcatttagttttgtttgttttagcccatgatatgttcctgtaccctttgtttgttaactgtgaaatccagaacaagtccaatccctttttcctcatccataaaaaaagggattggatcctattttcattttagctacttattctcttatctgatatattagttatctttcctaactctaatatctgatacattagctatctttcctaactccatggagtttgtacatttgatgaatatctcatctagttttcatctaagtcattgaccaaaagttttggtcaggatagtgtcctatggcctgtcatgcctctata

SEQ ID NO: 91654 - DNA, 5476 bp, Homo sapiens
  misc_feature (1)...(5476): n = a,t,c or g
tttcgtgcccgccaccccggaccccggtgtctggcttcccccgagccgggaccccgcgatggccaagcgcagctcgctgtacatccgcatcgtggaggggaagaaccttcccgccaaggacatcactggcagcagcgacccctactgcatcgtgaaggtggacaatgagcccatcatcaggacagccacagtgtggaagaccctgtgccccttctggggtgaggagtaccaagtgcacctgccgcccaccttccacgctgtggctttctatgtcatggatgaggatgccctcagccgggacgacgttatcggaaaggtctgccttacaagggacaccatagcctctcaccctaagggtttcagcgggtgggcccacctgacggaggtcgaccccgatgaggaggtgcagggcgagatccacctgcggctggaagtgtggccaggggcccgggcctgccggctacgctgctctgtgctggaggccagggatctggccccaaaggaccgcaatggcacatctgaccccttcgtccgagtgcgctacaagggccggacacgggagacctcgatcgtgaagaagtcatgctacccacgctggaatgagacgtttgaatttgagctgcaggagggggccatggaggcgctgtgcgtggaggcctgggactgggacctcgtcagccgaaacgacttcctgggcaaagtggtgatcgatgtccagagactgcgggtggcgcagcaggaggagggctggttccggctgcagcccgaccagtccaagagccggcagcatgacgagggcaacctgggctccttgcagctggaggtgcggctgcgggacgagacggtgctgccctccagctactaccagccactggtgcacctgctgtgccacgaggtcaagctgggcatgcagggcccagggcagctgatcccactcatcgaggagacaaccagcaccgagtgtcgccaggacgtggccacgaacctgctcaagctcttcctggggcaggggctggccaaggacttcctggacctgctcttccagctggagctgagtcgcaccagtgagaccaacaccctgttccggagcaactctctggcctcaaagtccatggagtcttttctgaaggtggccgggatgcagtacctgcacggcgtcctgggccccatcatcaacaaggtgtttgaggagaagaagtacgtggagctggaccccagcaaagtggaagttaaggatgtagggtgctccgggctgcaccgcccgcagaccgaggccgaggtgctggagcagagcgcgcagacgctgcgcgcccacctgggggccctgctgagcgcgctcagccgctcggttcgcgcgtgccccgccgtggtgcgcgccaccttccgccagctcttccggcgcgtgcgcgagcgcttccccggcgcccagcacgagaatgtaccgttcatcgccgtcaccagcttcctgtgcctgcgcttcttctctcccgccatcatgtcgcccaagctcttccacctgcgggagcgccacgcggacgcccgcaccagccgcaccctgctcctgttggccaaggcagtccagaacgtgggcaacatggacacgccggcttccagggccaaggaggcttggatggagccgctgcagcccaccgtgcgccagggcgtggcgcagctgaaggacttcatcaccaagctcgtggacatcgaggagaaggacgagctggacctgcagcggacgctgagtttgcaggcgccacctgtgaaggaggggccactcttcatccacaggaccaagggcaagggccccctcatgtcctcctccttcaagaagctctacttctcccccactaccgaggccctcagcttcgcgaaagacgcccagctccaagaaaagcgccctcatcaagttagccaacatccgggcagcggaaaaggttgaggaaaagagctttggcggctcgcacgtcatgcaggtcatctacacggacgacgccggcaggccccagactgcctacctgcagtgcaaggagttcccttttgtgtcagggtccagagccactgggaaaagtagtgatatcagggccaccaaatatatttggcgggttctggaatacctacgagcgtggccaaggggccagcggcggctgaaatccagcccacaccagcctcctgggctcctaccatcccggtgccttccgtggggacaagtggagctgctgccaccaaaaagacgagacagtgtgtgaatgagcttaaccagtggctgtctgcgctgcggaaggtgagcatcaacaacaccggactgctgggctcctaccaccctggcgtcttccgtggggacaagtggagctgctgccaccaaaaagagaagacagacacagactttcgctctgtcccccagactggagtgcaatggcgcgatctcggctcgctgcaatctccgcctcccagggtcaagcagttctcctgcctcaacctccccagtagctgggatgaccggcactcgccaccaagcctggctaatttttttgtattttgactagagatggggtttcaccatgttagtcaagctgctcttgttttgttgttgttgttgttgttgttgttgtttgatactgagtctcgctctatcatccaggctggagtgcagtggtgcaatctcggctcactgcaatctccgtttcccaggctcgggtgattctcctgcctcagcctcccaagtactacaggcgcaagccactgcacccagctaagtcagggcctgcgataagacccgggtcacggggtgaccctgcagggagtggaatgacctcttggaccgtgaccttgagggcncagctcatctaccggcacctgctgggcgtggaggccatgctgtgggagaggcaccgggagctgagcgggggcacagaggcagggcccggtgcccacgagccctggcaaagtccccgaggactcattggcccggctgctccgggtgctgcaggcccttcccgggaggccctagctccagcccggccggctccccccaccctccaaagcccaactgcccttctgagctgcagacgttaaagcccgccctacgctttcccctgctgagtcccctgccaagcgctcggagcccccccaggacacttttgcacccccctcaccccggtcctcctcaattagggtgcagggcctaaggtctcttccaaggtgggggaggggggagagtcaggaataaggggatcccccagaagttgcagagctgatgcaggcttgggccatgtcatggctggccggaagtgtccccagctccctacagacgctgtagccatcactgcctctcccagggaccctcctctcctgcccaggaaagacccaagccagaaccactggctaggatgggccgtcacccagggggtctggcctccaggaccctagagaatgggagggagaacgggaccccaggagacccggccgccaccccacccgctacccttgggtgccacagggctgtgctgcttgccaacagtaaacctgctcttactgtccaggctctggggtcttgtgatgagggtctggggagaaagtgggcccggggggaccccggaggctgtcggtggatgtgccgatgatggggctgacagtatgggctctgggcatccctgttcccccccctttcttccccccactcttctggggtcgggggttcctttcccttcccagttgctgtccctgggtcccctctttcatgtcccacaggccacagagcccagtgtgtccaaccagctgttctctcctcaaagcagcccccaagcaagtcccttctctagggtgtccctgaggacagcacagaggcgggactcagagaccccattcctcttcacgcagcccttaccccaagccctctagctgtgtggctggcagtgttggccacgtaggggctcccatccccccaccattgtgtcacatgggctgccaggctcagctcccagctgcgtccacagtgacctggatcagggtggggacaaggactggaccctccttctccagaaggccttcagctcttgccttgccatgcagtcacctccttccccctctgaccccagatcccaaaggtgcaccgttgccccagcccctttctggccccatggggtttctctgatgccttcatcatagaggcccggggctggtccgatggttggcaaaacttgactccggcccagtccccactcttggggacttagaacccctgctgtcctgggatctggcctgcctttctttggtcagtccctgtggtcccccaccagctccccctcccatagggctgcccaccaagccctgcccccagcccaagaggagcccccactgcctgcggggcagtgatgtctggccaccggctcacaccaatgacttggtcctggggtggcagaagcagcaggtgacaggagcagggcccctgtccctctcttctggccctgtggtacccaggccacacgttgtgcccgctcttggggctgaccggctgcagggaccaccagccgctgctactgtgggccgccccggggcagggtgggcagggcttttgtgggttatgaggacacagaagtccctgaggcccccagacctggcacagccaacctccttcctcccccggttgccccccactctaaagcctcctccctcccagcgtccactggctccaggctcctcacaacagcagctcatagacacgggggcgtcttccaggtggtcccagccctccagatgtttctagctctccagatgggcgctgttttcacgtctgcctgcatccattcattccttcattcctcacctttatcctgttatctctatttttttaagctaccaggaaggaaagggaagaagagatcacgaaactgggacccccagaagggaggagtgggctttgaacttagacatctacctcagagctcaaataggttgtttaaaatcacattcaattttcagatgaaggggaactttatagtttttttttgttttttttttttttttggggcggagtctcacatgtgttgcctaggctggcagtgcaaatgggcttgactcttggttcactggcaatcttctgcctcccgggtttcgggcatttctcttgcctcagcctcccgattagtggggactaaaggcgtgtgccaccacgcccagctaattcttgtatttttagtagagacggagtttctccatgttggccagactggtctcgaactcctgacctcaggtgatctgaccgccttggcttccgaaagtgctgagattacagttgcgagccactgtgcatggccagaactttataataattaaaagagacttgaagctgggtgtgacggtgcacgcctctagtcccagctactcgggaggccaaggcggaaggatcaccttgaggccaggagtttaaggccagcctgggcaacatagcaaaacctagtccctaaaattaaaaaaaaaa

SEQ ID NO: 91655 - DNA, 559 bp, Homo sapiens
gccagcgcgggggccgggcggtgcgctgcaggccatctgccggcgccctgagacccaggagcctccgcgctcccgcgtgggcctcacagggccggtccacagctccaacatagtagctgaactcccttcgttgcgttcctctttttctggaggggaatgttagaagagagagagagcttccttttataaccttcctcattctgctgcacgtctagagtgggtgtgggggctggcaggtgggaggggcggtggacaaatggctgatggtggacgggacactttaccccaacgacacctcctcccctttccaactggctgtgtagttgcttatgagaaccttcaagtccttccctagagagacacatgcaaatctgagcctcatcccaggccaggggtcctgttcctcatcaccctacttccctgaggctgctgaggtcgttaaattgttgtttactattaggtttcacgtcgaccctgggcttgtagagagaaacagccaaacggagaccaagaattgatgcagtcttgtgtacgagaaataaagaagaaaaaactacaa

SEQ ID NO: 91656 - DNA, 1972 bp, Homo sapiens
  misc_feature (1)...(1972): n = a,t,c or g
tttttttctgcggggaatcaggtaggggcctttattggccagcacacatctacctcctggcatctgtcacaagcatttgcaggagtaggcggccccttcctctccatgtccccatccccaacctgagatgcgggagggcctgggggctcagagggaagaactgaggcaagaagcccccggtgatccagtcagaggattgggcagcctgacctcggggtggggaacccagcactggacaacaaggagggaggggcacaggaagggctccccgaggtttggtcggggagggggaaggaagactgccccctgccctgtcatctctgcatgtgccgagccccagctcctgactccctcagtgcctttgggcctggatgctcagacagcagatgagacgaagccttgtacctctatccctccttgaaggcctgcctccccccacttcacagagggaaactgaggcccaagcctctcctctcagcccttgctcagcctcagacatgtgcatggtgccaggactgagacctgcttacccctaaggcctagatggcagaagggaccctgaggacattaataaatatggacgggcggtccctggaggcagctggccgagtccaggtaggaggggaagcctggcctggtctgcctcaggggccgccaccaccctcagcctctctcgtcccggctcctgggggccacgatccggtagttggttgcatgtccgcccctcttgccccgaaggaggctgggggtgcctgtgccggcagggcccgccccagaccccagctctggttcatagagcccaatcattgtttccaagattaaaaccctctcagctaaaatcttcaaagcctcgcgtagctggtgcaacccctccccccagtggctcttctcaccagggtctcccttagggccaggttccccccgctgcccagcagagccttgggggccaggctccccacgcagtcctctctcgcccttctctcctgggtggccagagattcctttgggtccagtggggcctgggggtcctatgtgaccaggactcccagggacacctgtggggccaggaggcccagggggacccatgggccctggagggcctggaggcccagtgggtccctggggccagtggttgttggtctcagtgaaggtgttggacagcaatgggtctcctggtgggcctctcatccccattgggccccgactgccggcatctcccttggggccggtgggcccgggaagcccccaagcaccgacttggtcctggaggcctccatctccggggctgccctgggcaggagggggaccccagagcggggcagggtcctcaggggtagctggtgttggaggtactggctgctctatgacagtcagcatggtcatcttggcctccagcaccttcagccgctctgtcagctctgacactttgctgcagttgagacaacctgagaaggctgtgggccgaagcgccatccgccgcatggtactgcccgaccacatgggctccaaggaggcagaggaacctgcaacttcctcgcagctcactcttgagtgcccagggcagcacctccactcacgggcggtcactatcttgtacatcaccttgtatgtgggtctcaccacagttctgtagctgctccccggacagctcatgggccaggggcagttctgcagcactcgctgaaggtaggtgccattctgcacatggcatgagatggtgcgggtcaccacataggagcaccagttcctccaagcagctgggaggattctggagctgatgaatgcaggtaacggagccgactcaggctaactgttgtctgcacacaataggtggtggctgtaacatctgccacacgtccccccctgtctcagacaactgctattctggcctttgatgcttcagccacctccgtcctccccnnnnnnnnnnnnnnnnnnnnnnnnnnnnttcggagatccacctagggtcgag

SEQ ID NO: 91657 - DNA, 510 bp, Homo sapiens
gtgaacggagctttcgcagctggagaaggctcatccacctgcagacatggggcgcagaaagtcaaaacgaaagccgcctcccaagaagaagatgacaggcaccctcgagacccagttcacctgccccttctgcaaccacgagaaatcctgtgatgtgaaaatggaccgtgcccgcaacaccggagtcatctcttgtaccgtgtgcctagaggaattccagacgcccataacgtgtatccttggaaacctgggctttttccagagggtggggagggggctggagtccggaccctgctcatctggcccactgtgtgccctggtgcagggccaaagccgtccagaggaacaggtgccacctagtgatttctgtggggtgagaagatgcagggcagggttccaatgccaatgatcgcccttgacctatgtgggccagatctgtcagaacctcgggatgtgtacagtgattgcatagactcctgccatgcggccaatcagtaacgacacagagga

SEQ ID NO: 91658 - DNA, 2173 bp, Homo sapiens
cttacagttaacaagtacaaaaaccttaagtttcatttgtagggccacagatcatagaatttcaaatgacatattacatagtttgtaaatgtatatatttggttgactgaaacttaatcataatttagttcttaaaactatgtggcttgaagtggcaagtagcaagtactgattttaccagattcaagttgatttttaaaagtaaccattggagaaatcgttatacatttttgtttgcaggatttttacctcctataactccaccagaaaagttttttctttcccagctgatgctggcacccccacgggaactcttcaaaaagacgcctcgccagattgcactgatggacgttggaaacatgggccagtctgtggacattagtgggcttcagttagccttggccgaacgccaatctgaattgccaacgcaaagcaaagcgagcttccccagtattctcagtgacccagacccggattcttctaattctggatttgacagctcagttgcctctcagatcacagaagctttagtcagcggaccaaagccacctattgaaagccattttcgaccagagtttattcgtccaccgcctccactccacatttgtgaggatgaacttgcttggctaaaccccacggagcctgaccacgcgatccagtgggataaatcgatgtgtgttaagaatagcactggtgtggagatcaaacgaataatggccaaagccttcaaaagccccttatcctctccccaacaaacacagctacttggtgagttggaaaaagaccccaaacttgtctaccatattggcctcaccccagccaaacttcctgaccttgtggaaaacaaccctttagtcgctatagaaatgttgctgaaattaatgcagtcaagccagatcactgagtatttctctgtcctggtcaatatggacatgtctttacattcaatggaagttgtaaatcgactaactacagctgttgatctacctcctgaatttattcacctttatatatcaaattgcatctctacttgtgaacagattaaggataaatatatgcagaatcggttggtgcgtcttgtgtgtgtgtttctccaatccttgatccgtaacaaaattattaatgtacaggatttgtttatagaagtgcaggcattctgtattgaattcagtaggatacgagaagctgctggtcttttccggttgttgaagacattggatactggggaaacaccttctgagaccaaaatgtcaaaataatacctcatcagaaccatcccatccattcactgttcagctgtactgtgatttagtttttacaccgttaaaaccctgagtggattgcttggtttaatgcatataaacagtactttatctacttaaagcaaagttttgctttcttgaatgactttttctgtgagatgaatttttgataagaactagggaaaacatgtcttttaggtgtcttgctgatgactatccataggaggaatggctatcccaaaaaaagttccgcaaaaaagtagatgagtttcttttttttttaagcactaaagaacaaaatgcatttttcattaatacaggcttctgatgaaccaggaatcctgttttcgtaaagttccaatgttgatgagagtaaattcttaagcatttgtcctagaggtgaaagcagctgaatgtttctgaaccatcaagaggcaaacaaacaggagtttgtttcttgaacctgcttatgcacacagctcttaactcctcatgaggcacacagctcttaactcctgatgaaccaaggatttactcataactttctccttgtcatggaggcttaatagacaacagaataaatgcatttcttgggcctcttataaacttgggaattcttagaaagctgcttctattaccaggctgtaatagctggtatagttttttttttttctcttaagatgttctgttattagtctgagacagccatttttttgttttaaggaaaaatatcagtcagtgctccgggaggtaatttcctgtggggtctgcaccctcctgtctgggtggtggatgtgggtttgagaagtaggagagcagggtggtaccgtgtgggctcttaccctttatgtgattttggacaacagtgccttccattaaagttctttttatcaactgttaaaaaaaaaaaa

SEQ ID NO: 91659 - DNA, 666 bp, Homo sapiens
  misc_feature (1)...(666): n = a,t,c or g
gttgttggcatagctttaataaaattaacataaactttgactttgtataggctaggaggaaggagagactgaggagtactatgtttggaaggaaagttgaaggtagggcagccggatggttagctttgcagataccaggccagtgagaagaaaacagctagttcaatattttgcttaggattgagccctgatggttggatactagccatctggggggtggtgggtggggaatccttttgngagaacggacggagtgtgggaatgaggccctggccaggcagatgtgtgccaatctgacactgttcatttcttctgttgtttatgccagttcaggcaacacggaagctgtgtctgtttctcctgtcattgtaaatgcagccctggtctttcaaaaagctgtggttgtgtgggtctttaaggtattccttcagtaattgtggtggccactatttcatttaaggagttagcatcttataaagaaaaatctgttttctcaaggctctatagtaatgatattttgtttaagtttgtccaatatggtatttagttcttcctattaaggaggagtctctaaacttcagtctgtgggccaaatctccctcctgtttctgtttaattattttattgggggggggtgatatttatcccctcaagcatttattcttt

SEQ ID NO: 91660 - DNA, 2857 bp, Homo sapiens
  misc_feature (1)...(2857): n = a,t,c or g
ttttttttttttaaagaattaccataagttttatttttgcttagttttattaaaaaaataaatatgtcataaagctttctttttccttagggagaaaaaaaggaacaagtctcataaaaccaaataagcaatggtaaggtgtcttaacttgaaaaagattaggagtcactggtttacaagttataattgaatgaaagaactgtaacagccacagttggccatttcatgccaatggcagcaaacaacaggattaactagggcaaaataaataagtgtgtggaagccctgataagtgcttaataaacagactgattcactgagacatcagtacagatacatcttgcttaaacaacacagaagttcctgaaaagttttgtgtaaatgatataaccacaaacattaccaggagagcttggtaactgaaagaattccatggcgaattcttttgtgaacaactactttcacttttgtaaatccaggtatttgctttttataaggagtttacctagttgctacctctctgaactgaggaaacagcatattcaccaaacgttgtgctccagctggaccactggcacaatttccaagtttgtgtttctattaagtaagtagtgtaagtaaggtacagagtcagccagggaacccagctgtatctgacaaagcaggtgtaggagtgggactgccatctaccaataattccagcaaatacttttgctaatatactttgtgcaaaacacagtaataaccttatcaattcggctatagatgtacttcctttttctaaaactttcagtcacaagctaggtctggaacccgaaaaggaagtaatacttctaaccctcaagactgcctttaaccaaattagctgcccaactccttcaaattggaatggatgataatgaaagagactgagttttccaaagctgaagtttaacaacacaaaaatcacatttcatatcactaattagtgaaaagttttgctggtgacaaaaatttttcaaatggttgttttttgttgttgttttaacttcctctaaatagaactctgaattctggggcaaactctgcagaagttaaagtcactgatgttctctggttggctgatacattttagtactgctgatagaaataaaaatttctttctacccaccagaatttcatgaacttatactataccaaagcagtgatgctttggacagggaatacgcatggtagtactagttccagtaagttttatcaaacgtaaataaataaatagaatcctcacattgctcacagcctccattccatttggtcaaacttctaccaggcccaagccacatttaaattaggctgttcagttttttaatttaatgctcctaataacattgctgtctatatgtacaagtgtgaatgaaaagagtgtgtaatctgtagtcttttcccccctgagtcccctagcaattagtaaataattaaagagtaagtggtcattttaaaacttgtattttttttttaaaaaaagcattttctagcactttaaaaaatgggtctgaaaagtgccctattaatgtccaatgctgttccccacccagtcccacccattcaaaacctgctacaaatgctggattgagttcatatcaaataatttagcagtaccaagatttttcaaatggaaacagtgttactgacttcttcatattggataacaaaataagggtaactctggtcatcattaaaaatgacaaaaatctgaggctcaaagaaattatccacacaagagtcataaaggtcactggtgacactgccaggattgactggcgggggccttctcatgccatgactgcccattgtgtatctgcccgtcagcactttggccagaaacatgaagtggactcctttggaggacttcttagaaaagttatgagagtagcttgccttctttgcaaaataactgccttgtccaaacattgtagcatgctttccacagactcgagggtcaaagttgtgtttgcagattccatctaccacatcctgggatgttccatgaaataaatgtctctcatttattatcctgtcacggccaaacattttcctgttcatatattcctttttccttttatatttctcccaaagaaactggttttggactctcaatatctgcaaaattctgtatttaaactcaggcacagtcttatgaaaaagattgtaaatgatccgataacttttatcctctgcagaaacagggacttggatgaagtcctgagatggatgcatataaacccaagtttcagggtaaaagtttgctgaagtgaccccatctgggcagataatttgtgatgatgaagttgcttcaagaggtggaggagcttgtgtgggaaccccaccaagtgtctgtaaatatggaagcagtataaaacaggagcggaagaggggtctcctttttatctctctcctgaagaatgaattgtggaggatgtagtggttattccacatcataaatcgaacctctttcagaccccgagagttggcttcttcaatcaatcgaatgacagactcgggatactctctccatccaaagtggtccctacagaagaatttccagactgtgtggtaaatagagttgacattgctagagggtggtgtggacagccttcgtagttggtcaaattcagttgtttcatacacgttcatggcattcaaatctgcccaaaattcttgtcctccatacttcattctcattctatcattttctgggttacagtaaaatctttccaagtgctcctgagaatcattgaatacactctgccacttttgagtagaagtccttngnntctgccaaagatatcagttcccgccnctnccaaggtctccagtg

SEQ ID NO: 91661 - DNA, 909 bp, Homo sapiens
cccacgcgtccgattgaggtcagggagtgggggcttctggaagggttgagaaaagtatttacttttgacccctaatttgtatcattggtttcgttaagggatatatttaaatgaaaaccagaaatgttaggcctagatctatcatctaaataatatttattttatggtaaatgaattggagtttacagccaagcctagtgacctttgggtctgcaacatgggaaaacagcccgttgctccccaggctagtctttttattttcctcactctgggaagcagtccccttaaagaggtttttactggtgactcctcccaagtactgcaaaagtagaaatgaaaatttctccccaataaaatcctgttaggtgttggaactaaaatatgaatctaaaatataaaaatagcctgtataacagacgaactgcagctcctttccaacaatgcctcctgctagggcaacacatatattggaaatgagattatgagatataattaacttgtctgcctatactgttactctttgaatgtttccaagtttattttaggaagattgacagtcataattatattgtcaagcatttgtcatttttgctgtagcaataacactgaaactcagacaaaaagctcccacctgactttgattggatggggcaacaaaacagatttcggttgcatgcattttccttaagggccttaacatttgtgacaatttgcagctagcagcacgaattaatttttcttccggttcaggagtttagcttaggaggaaatccctgttcggttcccaaaagggttccgtacgctttctgggttaaacactcgttcgccgacttcctccccttggcgaagttcgcctcgaataaggccttcatttgctttcactttttgggggaactctccccttctcac

SEQ ID NO: 91662 - DNA, 772 bp, Homo sapiens
tccatggccgcctgcacagccagcggagacacacgggagctccccgcagccgcaagctgttgccgcgcggtctcactaccccttggcgcaggctagagcgccctatagcagaaaccatagataagcggccggctagagaggacctgctcgaggaaacgtttggaatccggagcgcttggatctcagggagaagcaaggaggatgggctttggactagaaatagcccaggctcctcccagcatccagaaagtcccaggctgcccaaccctctctgggacagaggaaaaattggcaaggttgaaggtcaccagcacattcaggatttctctcaaaagtcccatctgccgtctattgtggtggaatccagtgaggtgaatgaagagagtggggatctccatttgccccatgaggagctgctgctgctcactgatggtgaggaagaggatgctgaggccttcttccaagaccaaagtgaagagccaggctgggcttggagcccacaggaccctagaagtcctttaagaacatttaacgctggactcagctgggggcaggaccaggatgaagaagatgcttgttggattcttgaggacacagcatgtctggaagccaccaaccactgtcccttctgggactcaacaggctcccgtgtttgtagaagtggctttgtggaatattcccatctcctgcctcctaataactttgagggagctgaagaaaaagctggttcaaacgccgggcggtgggtgaatcgggagcggcggttgaggca

SEQ ID NO: 91663 - DNA, 489 bp, Homo sapiens
attttacagagtttgactctttcatcaatatgttcttacttggagtcagggtggatgtcagcctaaatcctgtactatttttctccatcccatgttctattgaatagtacactctataatggcttacaatggcaacttacaatgtatatatatattttgggtggggagataaagcagggaatggggttaaaagagtttctcttatacttttagtcttcaaaatggaaatatctgcattttgttaagacttgaggtcatacagaaaagtttaaagaacaagatgtcaatcaaaggtaacagccattgattagcactttgatgcacattctatacataaaaacacttacacttacaaaaatgggatcatgttacatatagtgttttgttacctgatttcatcacttaaaattgtgtcatgaacatatctctcaggatagactaggttacgctgtggtatccggcaatccccaattctcaatgtcttaaaca

SEQ ID NO: 91664 - DNA, 876 bp, Homo sapiens
tgacaaaaatatttcaacatggtcttgtactctgtcattttctgtgtgtttttctggcttgagaaggtacagagctcatttctctggttcccaagcaggcatcagagtttaaaaagggcatccagactctcctgaggtgactttacaacaatgagaagaaagttgaatgtgcctagttacctgcaaaaccagttttaaacacctactttaaacaaagagaaatatctcttccaaattcaagctaagctgttccacctgggtattgtctgatatttagaaaaatacaatttatctgttttctgaaggacatgctgggaacattgaaaaaaactggttcattgactacgtcaataaaatattacttgctgcattgtttaccaaaaagctggaacagttgtataattcttaaagttttaaggatgcttggtgttttgatgggcaaagagttataaagcgtcctcaaaactaatttgatttgttttacagtttgcttaacagtgatattcttcagtgcccttccagaacatgtagatgaaaagataagcacaatgcattttaaaagttagaggtatattttggaagtagaaatgtatattgagatctcttaattttactaaaggggatagattttttctgaccaaaaaaatgaataatgcttttgaaacccacaagaaagaggaaaaaatggatatgccttttcgaagaaaaataacaggttccccccaagagcttgggggaaatgggcattgaataaaaaggattttattccttgcgaccgcaacggccggaacgaccccgacgccgcacatccgtccggccgcgttccgttggatcggaccgcattccacggcacggaccgcttcggtccctcacccc

SEQ ID NO: 91665 - DNA, 1545 bp, Homo sapiens
atggggtcgcggagggcccccagccggggctggggcgcgggtgggcggtcgggggcggggggcgacggtgaggacgacggccccgtgtggatccccagcccagccagccggagctacctgctcagcgtgcggcccgagaccagcttatcaagcaaccggttgtctcaccccagctctggaaggagcaccttctgctccatcattgctcagctcacagaggagacccagccgctatttgagaccacgctcaagtcccggtctgtgtccgaggacagcgacgtcaggttcacctgcatcgtcacaggatacccagagccagaggtgacctggtacaaggatgatacggagctggaccgctactgtggcttgccaaaatatgagatcactcatcagggcaaccgccacacactgcagctgtacaggtgtcgagaagaagatgccgccatctaccaggcctctgcccagaacagcaagggcattgtgtcctgctcaggggtcctggaggtgggcaccatgactgagtacaagatccaccagcgctggttcgccaagttgaagcgcaaggctgcggcaaagctgcgcgagatcgagcagagctggaagcacgagaaggcggtgcctggggaggtcgacactctgcgcaagctcagccccgaccgcttccagcgaaagcggcgattgagcggggctcaagcgccgggcccctcggtccctaccagggagcctgagggtgggaccctggcggcttggcaggagggagagactgagactgctcagcactcaggtttgggcctgatcaacagttttgcttctggagaagtgaccaccaacggggaggctgcccccgagaatggagaggacggagagcatggcttgctgacatacatctgtgacgccatggagctggggcctcagagagccctcaaagaggagagtggggccaagaagaaaaagaaagatgaggaatccaagcaaggcctgcggaagccagagttagagaaggcagcccaaagccgccgttcttcagaaaactgcatccccagctcagacgagcctgactcctgtgggactcaggggcccgtgggcgtggagcaggttcagacccagcccagaggcagggctgcacgggggcctgggtcctctggcacagatagtaccaggaagccagcctctgctgtgggcactccagacaaggcccagaaggcccctggcccaggcccaggccaggaagtgtatttctccttgaaggacatgtacctggagaacacccaggcagtcaggcctcttggggaagagggaccccagaccctgagtgtccgggcgcctggggagagtcccaaggggaaggcacccctcagggctagaagcgagggggtgcctggcgctcctggccagcccacacactccttgaccccccagccgactaggcctttcaacagaaagagatttgcccctccaaagcccaaaggagaggccaccactgacagcaagcccatttcttctctgagtcaagctccaaaatgcggggcggcagagcttaagtaa

SEQ ID NO: 91666 - DNA, 743 bp, Homo sapiens
aatacaggctgtattcaacaatgcatagagctgagcgagagacacagcacattcctgattctgttcttgtaccttctaccagagtcctatcatgctgaaatattgccagctagataggaacaggaacacaccaccacttggagaatccttagagcagagctctgcaaaactcagatcctaaaggggaaaaattctcagcctgaagttgcttcttatccccaatggccactcagccactcccttgagatgagccccaggcatgcggtttctgatctgtgagatcggtcacatcacttcttgcagaagagccaagtaaagcccccgtgccccaaaaattcactgtatgaggcagagctacagaagtggctccataaacttagactggaagatgggaaggatattgtgcccatgaaccctcaggcaactgctgtgacctcatcccccacacatgcactcatgcatcttcatgctcattgtgtttggtggaagtctgtgcatgaagttattaattttatttgcttccagattcaatgattcaaaagccctggaaatgctcaagctgtcactccaagtttcaaatctattttagagacgtgggctatgagaagctgatggctcagaaaggttctgagcctttgcttccaagctcagcacctggaatgccctacagacagagctggctttgggtctctgagaaacctgccctcgtgccaagctaggcgtaaacgtggtcacgagtgtca

SEQ ID NO: 91667 - DNA, 582 bp, Homo sapiens
cattgaaaactgtaggacacgcttacgccaagcttggcacgaggtttgcgggaacaagatggcagcccccatacctcaagggttctcttgtttatcgaggtttttgggctggtggtttcggcagccagttctggtgactcagtccgcagctatagttccagtaagaactaaaaaacgtttcacacctcctatttatcaacctaaatttaaaacagaaaaggagtttatgcaacatgcccggaaagcaggattggttattcctccagaaaaatcggaccgttccatacatctggcctgtacagctggtatatttgatgcctatgttcctcctgagggtgatgcacgcatatcatctctttcaaaggagggactgatagagagaactgaacgaatgaagaagactatggcatcacaagtgtcaatccggaggataaaagactatgatgccaactttaaaataaaggactttcctgaaaaagctaaggatatctttattgaaggctcacctttgtactaaataacttcaggaccatggaccgactttcattaccttgggtaactggaacactgttttttccagga

SEQ ID NO: 91668 - DNA, 614 bp, Homo sapiens
caggggttccatgtcctgcaggagggtggccacctcccatcccagggggggccgctgagtggggtttgagcccaggctttgcttctgcaagatgtcctgtggaggcttgcctggcctgctggctatgcggcagagcctgcacacctgcaccttcctagcccctccctccaccactggcctctccttggagtctcaaccctgcactcactctgctgttccagaacagtctctttacatgcttgtgtgcccctctgagatgagagggcaggaaccaggccctattcttgttggcatccccacctcataaaccctgagcaacccatcgaggtgatggagaggggactggtgcaggacaggaaggctctttttcctcctaaagcagaggagactggtgcttaaagtttcaccccaaaggcagcctccatgccctgccctcgaagagtcacttctcccatgcaacactgtaccacagacatttccctatgtgcctaggagttccgcaccatcgtgtgtgtggccccacggcgggcttctgaatggatgtgcattcacttgaaccagccccctaatgggggggcccagggggggttcccagagcttggggaaaggggtgg

SEQ ID NO: 91669 - DNA, 511 bp, Homo sapiens
ctggttcaaaagcagctaaaccaaaagaagcctccagacagccctgagatcacctaaaaagctgctaccaagacagccacgaagatcctaccaaaatgaagcgcttcctcttcctcctactcaccatcagcctcctggttatggtacagatacaaactggactctcaggacaaaacgacaccagccaaaccagcagcccctcagcatccagcagcatgagcggaggcattttccttttcttcgtggccaatgccataatccacctcttctgcttcagttgaggtgacacgtctcagccttagccctgtgccccctgaaacagctgccaccatcactcgcaagagaatcccctccatctttgggaggggttgatgccagacatcaccaggttgtagaagttgacaggcagtgccatgggggcaacagccaaaataggggggtaatgatgtaggggccaagcagtgcccagctgggggtcaataaagttacccttgtacttgtaaaaaaaaaa

SEQ ID NO: 91670 - DNA, 6850 bp, Homo sapiens
actttcaggagtaatggtgtgtgatgtgagatttgaaatttatttcctttttgttaaaatattaataaaacagttaatatgtttgccttttctgaataaatttgaactttaagaaaacatttaaaactctacagatccatttgaacatctactaaaatgtcactattttaatatttgaagttgctatctcattctacctttccttctatttaaagatggccttcgccggattttatgtcaagttggtttacaagaagggccagatggtgaaaactcttctctagtggacagactgatgcttagtggattccaaattatggaaaggtgctaggagtgtatatcatcagttgttcatgagcagtctgcttatggatttgaaatacaagaaactatttgctgttcgatttgcaaaaaactatgagcgtttgcagagtgattatgtgacagatgaccacgacagagagttttcagtcgcagacctctcggttcagatattcacggttccttcacttgctcgaatgctcatcacagaagaaaacttgatgagcattatcattaagacttttatggatcatttgagacatcgagatgcccagggcagatttcagtttgaacgatacactgctttacaagccttcaaatttaggagagtacagagccttattttagatctcaagtatgtgttaattagcaaaccaactgaatggtcagatgagctgaggcagaagttcctagaagggtttgatgcctttttggaattactaaaatgtatgcagggaatggatccaattacacgtcaagtaggacaacatattgaaatggaaccagagtgggaagcagccttcacactacaaatgaaattaacacatgtcatttcaatgatgcaggactggtgtgcttcagatgaaaaagtgttaatcgaagcttacaagaaatgtctcgctgtactgatgcagtgtcatggtggttatactgatggtgaacagccaatcacactaagcatttgtggacattcagtggaaactatcagatactgtgtttcccaagaaaaagttagcattcacctcccagtttctcgcttacttgcaggtttacatgtattattaagcaaaagtgaagtggcatataaatttccagagctcctacctctaagtgaacttagcccacccatgttgatagaacaccctcttagatgtcttgttctgtgtgcccaagtacatgccggaatgtggagaagaaatgggttctctctagtaaaccagatttattactaccataatgtgaaatgcagacgtgagatgtttgacaaggatgtagtaatgcttcagacaggtgtctccatgatggatccaaatcatttcctgatgatcatgctcagccgctttgaactttatcagattttcagtactccagactatggaaaaagatttagttctgagattacccataaggatgttgttcagcagaacaatactctaatagaagaaatgctatacctcattataatgcttgttggagagagatttagtcctggagttggacaggtaaatgctacagatgaaatcaagcgagagattatccatcagttgagtatcaagcctatggctcatagtgaattggtaaagtctttacctgaagatgagaacaaggagactggcatggagagtgtaatcgaagcagttgcccatttcaagaaacctggattaacaggacgaggcatgtatgaactgaaaccagaatgtgccaaagagttcaacttgtatttctatcacttttcaagggcagaacagtccaaggcagaagaagcgcaacggaaattgaaaagacaaaatagagaagatacagcactcccacctccggtgttgcctccattctgccctctgtttgcaagcctggttaacattttgcagtcagatgtcatgttgtgcatcatgggaacaattctgcaatgggctgtggaacataatggatatgcctggtcagagtccatgctgcaaagggtgttacatttaattggcatggcactacaagaagaaaaacaacatttagagaatgtcacggaagagcatgtagtaacatttaccttcactcagaagatatcaaaacctggtgaagcgccaaaaaattctcctagcatactagctatgctggaaacactacaaaatgctccctacctagaagtccacaaagacatgattcggtggatattgaagacttttaatgctgttaaaaagatgagggagagttcacctaccagtcccgtggcagagacagaaggaaccataatggaagagagttcaagggacaaagacaaagctgagaggaagagaaaagcagagattgccagactgcgcagagaaaagatcatggctcagatgtctgaaatgcagcggcattttattgatgaaaacaaagaactctttcagcagacattagaactggatgcctcaacctctgctgttcttgatcatagccctgtggcttcagatatgacacttacagcactgggccccgcacaaactcaggttcctgaacaaagacaattcgttacatgtatattgtgtcaagaggagcaagaagttaaagtggaaagcagggcaatggtcttggcagcatttgttcagagatcaactgtattatcaaaaaacagaagtaaatttattcaagatccagaaaaatatgatccattattcatgcaccctgatctgtcttgtggaacacacactagtagctgtgggcacattatgcatgcccattgttggcaaaggtattttgattccgttcaagctaaagaacagcgaaggcaacagagattacgcttacatacgagctatgatgtagaaaacggagaattcctttgccccctttgtgaatgcttgagtaatactgttattcctctgctgcttcctccaagaaatatttttaacaacaggttaaatttttcagaccaaccaaatctgactcagtggattagaacaatatctcagcaaataaaagcattacagtttcttaggaaagaagaaagtactcctaataatgcctctacaaagaattcagaaaatgtggatgaattacagctccctgaagggttcaggcctgattttcgtcctaagatcccttattctgagagcataaaagaaatgctaacgacatttggaactgctacctacaaggtgggactaaaggttcatcccaatgaagaggatcctcgtgttcccataatgtgttggggtagctgcgcgtacaccatccaaagcatagaaagaattttgagtgatgaagataaaccattgtttggtcctttaccttgcagactggatgactgtcttaggtcattgacgagatttgccgcagcacactggacagtggcatcagtttcagtggtgcaaggacatttttgtaaaccttttgcatcactggtgcctaatgacagccatgaggaacttccatgcatattagatattgacatgtttcatttattggtgggcttggtgcttgcatttcctgcgttgcagtgtcaggatttttcagggatcagccttggcactggagaccttcacattttccatctggttactatggcacacatcatacagatcttacttacctcatgtacagaagagaatggcatggatcaagaaaatcccccttgtgaagaagaatcagcagttcttgctttgtataaaacacttcaccagtatacgggaagtgccttgaaagaaataccatccggctggcatctgtggaggagtgtcagagctggaatcatgcctttcctgaagtgttctgctttattttttcattacttaaatggagttccttccccacccgacattcaagttcctggaacaagccattttgaacatttatgtagctatctttccctaccaaacaacctcatttgcctttttcaagaaaatagtgagataatgaattcactgattgaaagttggtgccgtaacagtgaagttaaaagatatctagaaggtgaaagagatgctataagatatccaagagaatctaacaaattaataaaccttccagaggattacagcagcctcattaatcaagcatccaatttctcgtgcccgaaatcaggtggtgataagagcagagccccaactctgtgccttgtgtgcggatctctgctgtgctcccagagttactgctgccagactgaactggaaggggaggatgtaggagcctgcacagctcacacctactcctgtggctctggagtgggcatcttcctgagagtacgggaatgtcaggtgctatttttagctggcaaaaccaaaggctgtttttattctcctccttaccttgatgactatggggagaccgaccagggactcagacggggaaatcctttacatttatgcaaagagcgattcaagaagattcagaagctctggcaccaacacagtgtcacagaggaaattggacatgcacaggaagccaatcagacactggttggcattgactggcaacatttataattattgcaccaccaaaaaacacaaacttggatttttttaacccagttggctttttaagaaagaaagaagttctgctgaatttggaaataaattctttatttacaactttccttcccagttttatagtttctggttctgaggactgatgaaaatcatcttccatcagcagattttcttgcactgtttgctgtgccccttcaaatataatgtcttgggttttaagatcgagcaaggagcttctcttcctagattggatcccagcccctttgtgggggtctgactgcatagtcccagccattatgtgatatttcacgttattgatgatagtgaaccgtgggtccgaagctgactcaacggaggcagggaacaaagtctctgtggtctgttgggtcatacttcctggttccactgagtggcccaacactgggactgggttggtgtcccctctgctgacaggaccctactcctaggagcaaagtggttgattttgaaggcagtgttcccttctctccattgactatgagagagttgggggacacacatgcagaagaagcccgtggggagaaggtggattcctggtgtgctgggttggtttttcagggctgttagaggttttttttttcttttttttttttatggcaagacttttggctttgagaaaactcacttagagggctttccaaaaacttaggatggtctaaaaaattaggatattcttttagaattaggaagaaaaattaggatattctaaaagaatatggattaaaaatttaggatattcttttagatatcctaatatctagatgagaggccttccttcataagatctggttgtttgggctgtggttggcataagtgatatttattttggcctctgtcacatccagtttcttgagcttttaaggtaagcttcttttggctttttttcagatgttcaccaagcttaagtttaaaataataggtattctaaaagagtatcctaattttcttatctgtattcttttacaataccctaatgtttcagacagtgatattctcttgttatttctaaggctaaattggcagagtatatcatctaaagccaaacactgaagaaggtgagaacccgctcccacccagccagcatttcctggaacagacaagctgctgcttccttgctggctcacttagtgcattcctgggatggtctggcacccaggctttttattctttttgatcattgttcttactgaggtgccttcctagaacaagagccacttacaaaatagcttataattattatgtaccacacaactactattgtttgatgtatgactgctgagagcttgaatacatgcagagagtgactgaagacttagtagaggaataaattctgagcctgtctaaggtggggctaaggaacagatgagtaataagaggctcttggatttttttaaccaatgcaactgaccctttcaatcagttttctttgaattacatctacaagttttgttccactcagctaccagtcaactaggcatgctccacagtatcacaggaagaaggtcagaaatctggaactgaagctaaaagaagtgaggatgtagaagccacattcctctccaaggtagtgtgtgaaagaaccgccccctcttgacaggaggatgaccgtcgccattcttgcgtgggactgactcacccagctgagaggaggaccaatagaaagaaaattcacatttgagtccacctctctccccctttttctgaccttcattcataagatctggttgtttgggctgtaggtggcataattcatgtttattttggcctctgtcacatccagtttctttagcttttaaggtaagcttcttttggctttttttcatatgttcaccaagctaaaatttaaaataataagaccaggtttctctctctacaagtggattataaacattttcaccaaatcataacaatactccagctttccggtccgacttcctaggagcctggagttagcaaaggttgtctctggatttcattctctgagaatatcacagagcctgggagaagatgaatttaccatgaaattggcaacatacacaccctttttattttctggtgttaagcctagttgtcctttccctaccttacaaatccatgttagttttatgatttgttcccgcatgttttatgtttattgtaggaaatgtttatataacatacgctttccatatcaggggaaaatccatatctgtttaattaaattggccataactttaatatctgtggacaacttgtaaaatttggaatgtatcatatgtaaaaagtttaaagatatcccaaataaatgcttttaggtgttggcattaaaa

SEQ ID NO: 91671 - DNA, 923 bp, Homo sapiens
ttcccgtgtcgacccacgcgtccgcccacgcgttacgggacgcgtgggaaatgaggaataaatgagatgctcttacatttaaattgaaagtggtaggaataaaaatttaataagaataatgtagtgcccttttgttccaagtaccagaagaggcctacaagttttatgccatgtgtttttctgttatgaagagcttgttatgctgctcttgctatgctgctgaaagcaacctaaagggaagtttgacactttttagattttttttattttatattattattaccatgttcaaaatgtgacatatccccaaagatattttgggggtaattcatccaacatactgtaaatgttaaagtgcttcctatatcattcatcccctaaatggaaacagatggccctaggagcttttgttaaactttaattatttatgaagcttgcttttcttcttaatattttatgaaatgctttggatatgtaactgaagcacatgttgtcataggtattttctttaggatagtaactctgaagggtagctctactggcctttataatttggctgtgggcgcctgctttttgtcaccccagggacctttcctttcaattaaaaacacggcttcctttgtaatctcaaccggcagcgtcctcatgagaatttccttcacacaaaagacgaaggcgcggtccttctctcgtatatttcgagccgcccgctgcgtccgcttcctctcctctcgcccctgcccccaacggaaccttatctctgctgccgccccctgaagagccaccgctctgtgagggggctttaggtcactcctccttttcctctctgcggatcttccgccactattcattaaaccgggcatatagcgtctctaatttctctacaatcagtgcccccgcatccttccgctactcccgccccc

SEQ ID NO: 91672 - DNA, 920 bp, Homo sapiens
ttttttttttcaaccaaaaaaagggaacaatttaattaagtataaaagcactaatttcattagagaaagaatatcaaaaagctgtgtgaatgcgtcaaataaatattcatatatacctgtctcactaattgctctccttctagatgaggtagatggtctagaaaccaaatgtgaagatgaaggtttctcttcctgaagctcttgtacaaggtccttttgatcactcccaccttcaaggtgacacctgttctcactcacagatgtacctgagtccgatgattctgagagaaaagaaaaaggatcagaaacttggtggtgggcggggggcggcggggcgctactcagtagatatgctatcagtctaacacaaacccttatgcaatttaacctttcaataaacattaaacatgtattttccaggtggcatcctcatactaaatgttgcagatgtaaataaaataattcacctttaatgtagaagagtaaagtataatcaagacattaaaagactgttagataaattagcagagagacaggagagtcattattttggtagggacagggagtgtctgagaaacaaagaatcaggaaatattttgtaggacaatatgaaaatagggctaggaaaggccattccagaccaagaaaacgccatgtgaaaaagtatccaaaagcaaactaacaacagttcctgttgcaggacaccacaagcagttcattattactggaatgtaggcaggttcagactgtaaaggatcctgtggtctagccaaagcaggactcatgctgtcattcccttatcactgcattcttccccgcagatacttcagaatcttccttaatgcgatgttgcagccactcaccattaaaaaggatttttgtccaagaaatgaaactgatttctagctcacaggaaatat

SEQ ID NO: 91673 - DNA, 425 bp, Homo sapiens
ccgcggacgcgtggggtcaaggtgatttacttcctgacaacttactaagacatccatacataatgctgtactttagataagagctatcccattttctttcaagtgagacatgaaaaaaaagaacagcttcttccaaaaatattcccaggacactttctgtagataaattcttgagggaggcataaatggagatgtttcatcataaccgaagtgaactctgcctaacatacaccttgaatcttttgccacaatcaggctttctatatctcaatagagtttttatgataggaacatttcttgttataatttcctgttactattaggatatagatagatgaagtacctttaaatgtattaatattctggccagtttaaaaatatatattcaagctgcacttgaaaatgtgctaactgtaaaaaaaaaa

SEQ ID NO: 91674 - DNA, 2884 bp, Homo sapiens
ttttttttttttcactgtttaaggaatttttattaaagcaagaattttataatccaaattacgtttccttgctcagttatcaattctgttacttaaaacagaactgacattctgagctattccacagtaaagaattacaaaattaaagaaaggaatgctttaaatttttgtactttgctgaaaattctttttcccagggtctataaaacattaatttgtttttatattttactatttttttgtgtttttttgtttttaaatcaataagtaatctaggactagcattatgtttgctagacctggcatttgctcggtacataaggttcaaagtttcctttcctttttttatttattttatatttgcaatgtttattttatattttgcaatgttttttttccataatatttaagtttttcgatgtttagatatttttcttcggtgaagcacaagtttcttttcatggtccctgatcaattttaaacagttggaacaccggtggcactgttaactgctttctgggcagcctctttagcttggtgggcttgtagtacagctacagcttcatcaaccttagaacggagtgactctggagactcgagcatatgaagaagttctgaattatcaatctccaacaacatgccagtgattttaccagcaagagtagggtgcatggcttgaataagaggaaacagccgttcacccaacatttgcttttgctcttgaggaggggcagatgccaacatggaagcagtcaaaggttcctgaccttgtacatgaacagcaggctgttgcattgtaacttgtggctgtgcattaagatgttgctgaggattgcgaactcctgcagcatatttatactgtggaacggtgcggacagcaggagtagctgcagcggctgcagctgcaggacgtggacccattgtctgtgttgatgtgttagcaacacgctgtgttgacatgactcgtggaacctgtgaagaagctggtctcatagtactaaatggtggtctaggagcagctgggcggatagcaccgggcatattttggaatggatgaggtctggcaccctgagcagtccagcgaggacttggtcttagttgagcaatttggctaggaggatagtatgcagcacggttctgagtctgtgggatagctgccatgaagtaacctgaaggaggtgctggctggtaggggttgattacagggttgggaacagctcgtacacttgccattctctgcatatactggttagtgaggtgagcctggcgctcttctttgcgctgagctaaagctacatacaatggctttgtggccacaattctaccgttcatttctgtaactgctttagtggcttcttctggggaggagaaacatacaaaaccaaaccctttgctgcgaccaccctccatcataacctttgcactagtgattgtaccaaatggagaaaactctttccggagacgttcatcatcaataccatcatcaagatttttcacataaagattaacaccctggtatctggtgatcctatcttgtttcatctgttcaaatttgcgcttaagttccgtctgccgttccacctttttctgagctcgaccaacataaatttgttttccattgagctcctttccgttcatctcatccacagctttctgtgcatcttcatgcctttcaaagcttacaaatccaaatcctttggattttccactttcatcagtcattactttcacacttaaggcaggcccaaacttgccaaagagatccttaaggcgctcatcatccatgtcttctccaaaattcttgatgtaaacattggtgaattcttttgccctagctccaagttcagcttctcgttctttacgagacttaaatcgtccaacaaatactttgcgatcatttaggagcattccattcattttttcaatagctctttcagctgcttcctgcgtctcaaagtgtacaaatccatagcccttggaaccattttcatcacaaaccaccttacatgaaaggatgttaccaaaagcagaaaatgtatcatacagtgctttattatcaatggatttgtccagatttttaatgaatatgttgcctactccacttttgcgaagtgatggatcacgctgagaccacatgatgcgtactggcttgccctttataacatcaaaattcatggtgtccaaagcacgctccgcgtccgccggctgctggaagttcacatacgcgtagcccaaggagcggcgggtgatcatgtccctgcagacccggatggagaggatgggcccggccgggctgaacttctcgtagagcatcgcctcggtcacgtcggggtggaggtcccccacgtagagcgaggccatggggtagctgggggcactggggttcatctcggcacggctgcccgcagggccacaggccgcgacctttccgtgagaggaggagagcgagtgccggggctgggggccggagccggggggaggggagcggggagcaagcgcagagggacaaaaatcacccggaattgaaaactactcaacggccgcagaacggggtcgatccactgccgctggctgccggctgccggcggggagcgagggtggcggtgtcgggtccgggcagcgggaaggcctcggtctcttggttccttcttggagctgctgcggggccgcgggcgggcgggtcggtctcggctgcttcaccgggttattttataaaagaggaagaaaaaaaataaaagtctccggcgggggagacgcggattttttgtaaatttttttggggttttttaaaagatttttttagattttttttggattttttaataataaatgtgtgttccgagcccggagcacacactccgcactctcagcgtcgacgcggccg

SEQ ID NO: 91675 - DNA, 623 bp, Homo sapiens
cgaggaaagcggtgttgggaggttgtagtgatggcggagcagtgttgctgaagtccctcagggagtttggatttgattgcagtgagtctggctacatctgaagcctataatagtttacagtacaagatgctatgtataagatgtcaaacatttgcttggtagaatgctatgattgtcaggagtttacttttgcactgaaaatagtcttgttggtttggtgtaagtagagtcacattgcagcacacacacaggcattcatgcttttatgtttgttaattgtaaggaaatgttttctcaaggcaagagtcaaaggttagcagagtgccaaagaccttctcaaagaggaaagtctcattttagaaacttcattttgtacgccaaaacttgcctttcagtagtctcatgtaatgtttttgctgacatgagttgaaaagtgcattctgttgtaaaggaggaaaaaaactgaagaggaaccgtaagcgtgattatgaagaagagaaaagagcaggaagaaagtaggacatcaatccccagaattaaattttcataattgtaaaaatcattttggttggcaagccaggaagaaaatttttttattaacttaacttaggattaaaccaagg

SEQ ID NO: 91676 - DNA, 392 bp, Homo sapiens
cttttgctgaaatgtgatgagtcttgttgaatttattttttcctttcttggctccccaagtgtcattatgtgtatcctcagaggtagaagttttctgactggggcttggttaggacagaaatttcatgctttgattttgctttgtgtttgaggttagcagtgaagaattcaggagaagaattgttggatgctctagggaaaagtgtaaacgtcaccttagttctgttatctgtaaaattgaaaatgacaaagtacagcagtgctaataagtggggctgtatttagttgagctaaaaaaaataataataattcactacttctgaggaaatcggagcctttgatgaaaacagctttttgacaaatgaaaaattttaagactaaaattttattgg

SEQ ID NO: 91677 - DNA, 582 bp, Homo sapiens
ctacatgctgatagtacatctgaaacaagaacgagagtaattaccacattccagattgttcactaagccagcatttacctgctccaggaaaaaattacaagcaccttatgaagttgataaaatattttgtttggctatgttggcactccacaatttgctttcagagaaacaaagtaaaccaaggaggacttctgtttttcaagtctgccctcgggttctattctacgttaattagatagttcccaggaggactaggttagcctacctattgtctgagaaacttggaactgtgagaaatggccagatagtgatatgaacttcaccttccagtcttccctgatgttgaagattgagaaagtgttgtgaactttctggtactgtaaacagttcactgtccttgaagtggtcctgggcagctcctgttgtggaaagtggacggtttaggatcctgcttctctttgggctgggagaaaataaacagcatggttacaagtattgagagccaaggtggagaaggtgggttacaccttgaatcccagaactttggggaggggggggcaaggggggttcccaaaaaaaaaa

SEQ ID NO: 91678 - DNA, 916 bp, Homo sapiens
cggacgcgtgggattcagtaacttcagttttagctcaaaacatttcatagatatgaaagtgctagcataattatttcctagtttgaagtatcaatgaggtgctacattggctaacaaatatgctgaaagtctccctgtaaagtaaggacatgtatgtgtacagttaaacctgcaacctgtgtggtgtttttgtttgtaaaacacataaagaaaattttcatgtacttaagacccagaaaatctggattaaaatgccttaaaatatccagaatctcttgctgttattgttttcagatttttttttctgaaggacttttatttttaatgtgattttaattaattactcattttgtttaggaaatatttgaaagcctacagtgtgcaaggttctgtagtattgctgcatattacagaatgataatttatagaaataaagcacagagatgaaaaactactttataaatgacacaaagaactttcctatttgattttgttttacttctaaaattgtatatctactaattctactggttacctgcttgcttatgattgaataagatacctgcaaaagtttaagttaatgaaaacaaaagcattgtttatgtcttttaaattaagacattttgggggagtcagtttgcctttttttaactgacattcagaggagaattcttgtcctcccctcatccacaaatttatcttgctccttcttaaagccgtctttaaatacctagcatgtatatgatctcatagggctgagttcctttttttgttttgttttgtttataagggcatctagggaaactgacttcctttttgaaacccgtggttccaaaactgtttggaactgtttggtgctgtttttcaagtttgagtagtgaaggctcttttcttggttgtaccctgaatcctaaag

SEQ ID NO: 91679 - DNA, 483 bp, Homo sapiens
  misc_feature (1)...(483): n = a,t,c or g
cgggtcgacccacgcgtccgctcagatggcagatctcaatattgatcacccacatcactgtggggagtggtgaccttgtcagcaatggtctcatggaagagggaagctttatttacaccatcaagggcccatggatgacccacagtctgtgtgactgctgtgtgattggttttcagacattagctttaataggaatcataggagaagggacatggtggctactgcaaggggtttttttgtttagggagaacgcactgtggaactcaaattccgggtatgcactcaacctcggcaaaggcacctcgctgttggtcacaccccgcgagtttttgtgagttactaattggcctctctggaaagaaatccaatgggacctgttgaaacacagctgaatttaattgctatgcttagcatgcagntgttaactatgtctgatgtgtgagcaagatatgaatacatgtttccctggaggctggatttggt

SEQ ID NO: 91680 - DNA, 362 bp, Homo sapiens
cccacgcgtccgcttattcgtccgacatatagctgtgcgtatagaatacatatgtatacataagctgtgcgtatagaatacatatgtatacataatctgtgcgtatagaatacatatgtatacataatctgtgcgtatagaatacatatgtatacataatctgtgcgtatataatacatatgtatacataagctgtgcgtatagaatacatatgtatacataagctgtgcgtatataatacatatgtatacataagctgtgcgtatagaatacatatgtatacataagctgtgcgtatataatatgtatacataagctgtgcgtatataatacatatgtatacataacctgtgcgtatatag

SEQ ID NO: 91681 - DNA, 680 bp, Homo sapiens
atgacaaaggtggaatatggacagtaggttaaagtatcagtgataactgattaattccaattcttaggtaatacacactgaagtattgagaagtagaggaccaggatagatgcaacttctcaaatggttcagaacaaaaacatactctgcacacatagagagcaaatggagcaaaatattaacaggtgaatctgagtaaagagagtgtgtacgaatatccttatactattttttattcttgcaatttgtgtaagtttgaagctatttccacacgaagtttcttgacaatcaaatatgtagatattgcccatagctctgaagagcttcatccatcagcgtaatcccagctggcacatcagcaaggcaaattgagatgatctgtttgccctgaattcctcggtcagtcacctgacgacgtgtatcacacacctgctctctgccaggctctgtcgctgagccaggagtaaagtctggccgggaggaggacagacgcagaagaccaggggctccagcgcacagagccagtttcgccagcgatcaggtctgaggcctggattccacgaggccggtgcaagccaggagccagcacctctccctcgcccagctccatacggcttggccctatgcagaagcatgatgcccacacagctgtctcgccatggtaccccaggcggtgaggg

SEQ ID NO: 91682 - DNA, 3639 bp, Homo sapiens
tcagagtggtggaattcgctgactgtggcggcggcggcctcgaggtgacaactgtctccgtcgcaggctccggcgggggcgcaggaggtcgcccggcgcgtcactgtcgggtcggcgagccacgggggccgccgcagcaccatggcgaccaccgtcagcactcagcgcgggccggtgtacatcggtgagctcccgcaggacttcctccgcatcacgcccacacagcagcagcggcaggtccagctggacgcccaggcggcccagcagctgcagtacggaggcgcagtgggcaccgtgggccgactgaacatcacggtggtacaggcaaagttggccaagaattacggcatgacccgcatggacccctactgccgactgcgcctgggctacgcggtgtacgagacgcccacggcacacaatggcgccaagaatccccgctggaataaggtcatccactgcacggtgcccccaggcgtggactctttctatctcgagatcttcgatgagagagccttctccatggacgaccgcattgcctggacccacatcaccatcccggagtccctgaggcagggcaaggtggaggacaagtggtacagcctgagcgggaggcagggggacgacaaggagggcatgatcaacctcgtcatgtcctacgcgctgcttccagctgccatggtgatgccaccccagcccgtggtcctgatgccaacagtgtaccagcagggcgttggctatgtgcccatcacagggatgcccgctgtctgtagccccggcatggtgcccgtggccctgcccccggccgccgtgaacgcccagccccgctgtagcgaggaggacctgaaagccatccaggacatgttccccaacatggaccaggaggtgatccgctccgtgctggaagcccagcgagggaacaaggatgccgccatcaactccctgctgcagatgggggaggagccatagagcctctgcctcgatgccgttttgcccccgctctttggacacgccgacccggcgctccccaaggaatgctgtcccaacaagattcccgtgaaagagcacccgtgtcgccccctcccgtggacttctgtgccgccccgtccacacctgttcttgggtgcatgtgggttttcggttcctggcggtccaggacggggcgggggctcccctcccatctcgtgctgggaggtctcagcgcgctctcctgtccctgggacgtgcgtctctccttctcatgccgttctggaaaatgctcttgctgtagagagcagctgcttctgccagggtgttggaggtggtggagcgccttccgattccattcatggcattttgtgatgtgatgtaattggaatagagctgttgatttaaggcacacacaatccctcacactgtgggttttttttagaacttcccagacgaaaactcacgcccttgccctaacgcgctttgctgtgagcctggcccctgcccagggcttgggtctggtgagctgagcagcttcctgtggatggtgtggggccggcctctggcctggctcacctggccactgtccagccagccttgtgacagactccggcctgaaggcagaatgaacccacacctggagtgaggaagggggcctggcacggttggccaggctctgcctgattgccagccagcgggcatctgaagccgggtccttcgcccgccggaggctgccgtccgtctctcctgctgcgctcgtgccagctccgtgggtgtcctcccagggagcttctcttctcaacaggccttgcgaggctggggtgagaggtgatagaggcagcactgtgcatgattccgagagggtgtggtggcactgccagccgactgctgacagcttgggagctgctgtgcccaggacgtgggttcagcgtgggcgaggaaagcctggcgagcgtggccctgtaaaagctttctgaggcgggaggcgctcacttacctctgactgcctgggcgctgcgtgtagcatcttggcctacaggacagattttaggtgacacctggttatgacagtcagaaatttgagaagcttctcacaagtgatgcactttaaataatctgcatgccattgagacacctgcatgtctggtgtttgtggttcaagtgtcttgccgccggccttcggatgtaaacccactgataacggacagaaagagaatgcccacaagtgggtcttctgtggaagatgcagaaggaggaagttagtgcttacattttagtctttttctccctcaaaaaaataggttaagtttcagtgccagctagaaaatactgctttctgccatcgattgggggtggtttttgtcaaatatactgttgataaatatttatttttgtaaacttgaagtgtgtggtggccgtgggggagggacatgctggcagcaggcgccttcttcagctgtgggtcctaaaggcctttgatcctttgaagaagaaagacatggtatttgttcagcagacgccgaccactcagacggaggggcccctgggattccctgtctcagatggcctggtcttacgcctgtgtagatttcttctccattgggaatgaaggtgtcaggcgggactggaacgttctagatggtatgttccgtgatattaacaactctaacccaggacagaccacaagccacactcagaggcctcactgtgctgggggcttcggtgtccaggcgcccaggtgtggccaccagcaccggtttctgccttcgcgttgctggggtgcagtgagactgccacacgcgtgcacatgtggctctgtgggtgtctcctagagaggacgtggcccctgctgccagcccttgagcagcccgtgtgggggcccgagggacccacacagtgggggccagcctcgctggagggagagcaaccctttgccgatgaccacgcttgccgccatctcttagttttctttttcacaagcgctttatttttttaatagacaaatcacattttgcaaggcctttaattaaataagattcttctttccttcattttatgctttatttcctgtttgaaggcttactgtagaagtggcttactgtagaagcagcttgctgagcccctccgagcggtccccagaattagctggttcacaacccccaccctcccccgcccccgcctgtgtcaggtgtggatgaggtcgtcacactcagaaggacaggcttgtctgccagctcacaaggggaggctgcagtgggtttgggagctgggtttaggcccctggtgtctgagggcccaggccttgccagcctctgctgctcctgctcctgggtttgaagatgcaggccgatcgccagctccgtggcagcggtcactaaggacagcctgactgtgccatcttggagcctcaggcggggctccggagatagaagacaggtcgccggaggctccccctcctctcctctcccctctgcagatgctccctgggcgctaccctgcagggtgccaggcaggagtggtctcagaacgtgcgcttctgattattttactggggtccattgtccagatttttctttgattgtaaaatatatttttactttttagtcttctaatttaataaatgatccatataaaaatagagaaataaagtcctttaagggaaggttaaaaaaa

SEQ ID NO: 91683 - DNA, 2323 bp, Homo sapiens
ggaattcgtccgagcacttctcgcaggccccgcagaggctgtccttctacagctggtacggcagtgccaggctcttccgcttccgcgtgcccccagatgctgtgcttctacgctggctcctgcaggtctcccgggagagcggcgctgcctgcaccgacgcggagatcaccgtgcacttccgttccggcgcccctccggtcatcaacccgctgggcaccagcttcccggacgacaccgcggtacagccctccttccaggtcggggtgccgctgagcaccacaccgagaagcaatgcctccgtcaacgtttcccacccggcccccggggactggttcgtggccgcccacctgcccccctcatcccagaagatcgagttgaagggcttggctcccacctgtgcctacgtcttccagcctgaactgctggtcacgcgggtggtcgagatttccatcatggagccggacgtgccccttcctcagaccctcctctcccatcccagctacctcaaggtctttgtccccgattacacgcgggagcttctgctggagctgcgggactgcgtgtccaatgggagcctgggctgccccgtgcgtctcaccgtgggcccggtcaccctgcctagcaacttccagaaggtgctcacctgcaccggtgccccctggccctgccgcctgctgctgccctcaccgccctgggaccggtggctgcaagtgacagctgagagcctggtggggcccctcgggacagtggctttcagtgctgtagctgccctcacagcttgcaggccacggagcgtgaccatccagccccttctgcagagcagccaaaaccagagcttcaatgcctcctctggtctgctgtccccgagccccgaccaccaggacctgggcaggagtggcagggtggaccgcagccccttctgcctcacaaactacccagtcacgcgggaggacatggacgtggtgtcggtgcacttccagcccctggacagggtctcggtgagggtgtgttcggacacgccctccgtgatgcggctgcgcctgaacaccggcatggacagcgggggttccctcaccatctccctgcgggccaacaagacagagatgcggaacgagaccgtcgtagtggcctgcgtgaatgctgcctcgcccttccttggcttcaatacttcgctcaactgcaccacagccttcttccagggctaccctttgtctctgagcgcctggtctcgcagggccaacctcatcatcccctacccagagacagacaactggtacctctccctgcagctcatgtgccctgagaatgctgaggactgtgagcaggctgtggtccacgtggagaccaccttgtacctggtgccctgtttgaacgattgtggaccctatggccagtgcctcctgctccgcagacacagctacctgtatgccagctgcagctgcaaggcaggctggcgtgggtggagctgcacggacaacagcacagcccagacggtggcccagcagagggcggccacactgctgctcacgctcagcaacctcatgttcctggcccccatcgccgtctcagtgcggcgattcttcctggtggaggcctccgtctacgcctacaccatgttcttctccacgttctaccacgcctgcgaccagcccggggaggcggtgctgtgcatcctcagctacgacacgctgcagtactgcgacttcttgggctccggggcggccatctgggtcaccatcctgtgcatggcacggctcaagacagtcctgaaatacgtgctgtttcttctgggtacactggtcatcgccatgtccttgcagctggaccgcaggggcatgtggaacatgctggggccctgcctctttgccttcgtgatcatggcctccatgtgggcttaccgctgcgggcaccggcgccagtgctaccccacctcgtggcagcgctgggccttctacctcctgcccggcgtctctatggcctctgtgggcatcgccatctacacctccatgatgactagcgacaactactactacacccacagcatctggcacatcctgctggccgggagcgcagccttgctgctgccgccacctgaccagcccgccgagccctgggcctgctcgcagaaattcccctgccactatcagatctgcaagaacgatcgggaggaactgtacgcagtgacgtgacactggcctggggacagctgctgctctgatgacctcttcagccaggagctgtatcgagggggaggcgcctggtccagccctggacagattgatttccagctgaataaattggcctagataccctaaaaaaaaaa

SEQ ID NO: 91684 - DNA, 1248 bp, Homo sapiens
gcacgagcgggctcggtggttgggtccgcggcggctcggggtccgcccgcgggctgccggtgcgagcgggcggcccggctcccctcctcccccgcccgccgccgccgctgtgattgggtggaagatggcgctggccggatggaaatcctaatgacagtctccaaattcgcctccatctgtaccatgggcgccaatgcttcggcattagagaaagagattggtccagaacagtttccggtcaatgagcactattttggattagtcaattttgggaatacctgctactgcaattcagttcttcaagcactttatttttgtcgtccatttcgggaaaaaggtcttgcgtataagagtcaacctaggaaaaaggagagccttcttacatgcttagcagatctcttccatagcatagccactcagaagaaaaaggttggagtaataccccctaagaagttcatcacaagattacggaaagaaaatgagctttttgacaactacatgcaacaagatgcccatgaattcttaaattacctactaaatacaattgctgatattttacaagaagagagaaagcaggaaaaacaaaatggtcgtttacctaatggtaatattgataatgaaaataataacagcacaccagacccaacgtgggttcatgagatttttcagggaacattaactaatgaaaccagatgtcttacttgtgaaactataagcagcaaagatgaagattttttagacctttctgttgacgtggaacaaaatacatcaattactcactgcttaaggggtttcagcaacacagaaactctgtgcagtgaatacaagtattactgtgaagagtgtcgcagcaaacaggaagcacacaaacggatgaaagttaaaaaactgcccatgattctagctctacacctgaagagatttaaatatatggatcaacttcatcgatatacaaaactctcttaccgggtagtttttcctttagaacttcgtctgtttaacacttcaggtgatgccaccaatccagacagaatgtacgaccttgttgctgttgtggttcactgtggaagtggtcccaatcgaggccattatattgcaatagttaagagtcatgatttttggttgttgtttgatgacgacattgtagaaaaaatagatgcacaagctattgaagaattctacgggttgacatcagatatctcaaagaactctgagtctggttacatccttttctatcagtctcgggac

SEQ ID NO: 91685 - DNA, 2165 bp, Homo sapiens
  misc_feature (1)...(2165): n = a,t,c or g
ctcagtggagagcggggagttgtgtccaccttgccgacgtcgctagccgtggggctgtcctgggaaggcggacggcgagcgcccggtgtccgcactcggccgcctgccgtgcccgtctgcgcccgtgtcatcctcactcgggacgcagggaccgtttttaaatcacaggggcgtgtgtcagcctgccctaggacttcatgtctatatatttccccattcactgccccgactatctgagatcggccaagatgactgaggtgatgatgaacacccagcccatggaggagatcggcctcagcccccgcaaggatggcctttcctaccagatcttcccagacccgtcagattttgaccgctgctgcaaactgaaggaccgtctgccctccatagtggtggaacccacagaaggggaggtggagagcggggagctccggtggccccctgaggagttcctggtccaggaggatgagcaagataactgcgaagagacagcgaaagaaaataaagagcagtagagtccctgtggactcccatgggtcataccagccagcatctgttcctgaactgtgtatttaccatcatgacggaagaagagagtgagccgcaattgttctgaaaatgtcaaacgaggcttctgttttgcacctgcagatcaccgagttggttttcttttcttttcttgcctttttttttttttgaaatttgccgagcagtggagccctctgacaatttgcaaggccctctgagaaaggaagctgcttagagccagggggttagtgggtgaggggagcgagtgctgtttttgagatcattatctgaactcaggcagcctagtagaggcagtggtgggattccaatgggtcttggtgggtgggaggtggggcatgtgcaaagcaagcaaggaacatttggggtaagaaaacaaacatgaggcaaaagaaaaaatacatgtttttaagaaaacattgagcagagaactgcagccaggatgcgctcagcagacattcactctggctgctgggacatcagaaaacaaagtcttcatctctctctccagtttcacccaccccaccctttgctttcatttcaggtgtgttggtctatatgacagggaggagagtaaaggagagcaggagcaattggctgcctgcaaagccagctggaggtgaagtgcaggaaaggaaaggtcaccccattctactccatggcctctctgctcccagctgtggtaggctcacatagccagtgtgatcggtttttaagaggcagtgcttttcagcttttctccctgatatatccattttgcttcccagcactttttaggagtagtgagagcacttcctgcccttgttggaagccccagggtggacactcagcacgaaggtctctcccttaactgctgcccttccaagacttgctcccgagatggagtgggcgtggtcttccaggctggcccttccttctcctcaccgccaccttccctgccccagccccagcagccatgggtacatgggtccccagctcacctatggattcccgccagtctgcccagctgcagtactcacgccccatgggggatcttggtctgtttttcttgtgggagcctagtggagagcagacgtggctttttatgtgtcttgttggggaggtgacttgcatggtggggacaaggctgtcgtggcaaccttgggatcgagtttgagactaaaggatgtcatgagatccctggcttctccccatgttgttcccggacaagggcagaagggaggcatggcaagggacctctgctgtccttactcaacagtggtcctcatccctccccacctcccactgcttcctgcaagggcaccagttgtatgagaaagttggcctttggacttaggatttcttattgtagctaagagccatctgaagcagcaggttgcaggacaaatgcttcagtccgccgagagcagtaccgtgtggccaagaggtggactcagagccttccttgagctaaactcggccaaccaaggcacgcagcatgtcccctcaggtctccagtcagtccaggttgaccctcagttctggacgtgtgtatatagctgtatttaatacctcaaggtcattgtggctctggggatgccnggggagnagtgacgatggtgcgctgtggaacanagcag

SEQ ID NO: 91686 - DNA, 1192 bp, Homo sapiens; identical to SEQ ID NO: 58730

SEQ ID NO: 91687 - DNA, 758 bp, Homo sapiens
cccacgcgtccgagggacagcagccttccctcctggactccagggcaacctccatgttgttgggcggctttgagcacagggctcaagggcagaggctgagttggaaaatttcttgcctctgcagaagggaagagctgggggaggttggggcctttttccccaaacgaggtcttattcttctgtggggttttctgggtttgttaggtggcttcctttctacttaaaaataagctgggagtggttaaaaaatgggaagaaatcaatgtttctggcgtacatagaactgagcagatgtgttatctagaataaggaggagaggttgttgtgactctagctcctggtacgagcccttcagttcaccctcctgccctgctcagaaccccctggacctgacatcgtggctttaacacccttgggtcatgtgagaaggaagagtgcccacccaggactttccgaggctcacagattctttgaaatggacgtgagcacaaacgcccagccccgacagccagggatcagatcgggtttcacttcctaggagggaggatgccctgcaggggaggcccccgggggtgccccaggcctgggccagccctctgtgacccaacacgactgaccggctttacggcatgggcccccgggcccccctcgcgcctccatcctgggcgcgcacctctggccgcttcccttgctgtgaacacgactctctatcgccccctctggccatggggccgcgctcggattctcgcctccccccc

SEQ ID NO: 91688 - DNA, 665 bp, Homo sapiens
tgtagccatcctccttctttgaagtctcatatgtggaaacatgcaagtgaccaaaattacaactacgaacaagtaaacaaggctattaacgacgcgatttcacaaagtcggcagagttctgcgggaaatcccctggaaagactcaattaaagagcagtgaagagagtgcagatcccgtcactggaagttcagaaaatgcagtgtcatcttcagaactgatgtcccagactcccagtgaagttctgggtaccaacgagaatgagaaactgagccctacaagtaatacctcatatagtttagaaaaaatctccagtctggcccctcctagcatggagtactgcgttttactcttctgctgttgtatttgtggttttgaatcaaccagcaaagaaaacctcttggatcatatgaaagagcacgagggtgaaattgtaaacatcatcctgaataaggaccacaatacagctctaaacacaaattaggtggaataatgactcgagcaggaaagcagtagaagaggattccttcaccacagtttcacctttacgctgtcagacaacttcctgccacagaagaagtcgttgatgtgatttttgaggaaatgacaaatgtgcccttggaaccaaacttgtaataaaaggaaatccaaatggaaaaaaaaaaaa

SEQ ID NO: 91689 - DNA, 1922 bp, Homo sapiens
atttttcaatgctgaaaggaacttttaatatcttaacttgacccaaattatattattatttataaaagttatataaatgcaggctgattgttttaaaagagtcaaaaagccaaatataagtaaagcactagaaataaattcagttgtaaaaaattgacatcattattctaaatgttatgtggaatcacaggaagaaacatcattgcaatcattattcaaagtaatattaaagataacataagagatgtttggtcttaaatgtcaatttgaatgtatagtgtctacaataatagatcaaagagaaagtaagtctatctgtaataaaaacaagaaaaaatgagttgcaaatactgttttctacaatgaaagaagaatgcagattaaggataaaacagtcttaccaactaggccacctttaaggatcatttttcagggtagctaaaaggagtaacaataaagctctacacatataactaaaatgtttgcaattaatctaggtcccagcactttttattttgttagaggttcttcaaaaaaatttccaaagaggtaaccaaattaattatacatcagggattgttaggaataccaattattttacaactgccactacggtgtttcttcttctctgacacaagtggcacagatccaggcttgctgtgtttaatacgattcacttcctttcgtcgacgagcttctttcatgatgcgctgttcctgaatctggctattagatagattttggtagatgtcgatgacggagctatacgttttatatgaggataatgctgaaatttctccttcaatttctggttataatccttggctgctttttctcgtgatgtaagcacacccaatttttcagaagcattagctttccacaggcgaatgttcatttcatcagatccacacataatatacttgctgtcagaagtccattttacacagataacatgttgcattctctttgtatgatatacctccctgcttcgacttttgtctacaggaaagattcgaatagatttatcgaaactagcagacacaaactccttcccagtgggagagtaatccacatcaagcactgcagatacatgatccatatggaccattacaggagtgtccagtgcacgcatatcaaaagtatataagttataatcttcatttgctgctgtaaaaatgaaagcttccatagggttccaacagattgtatttgttctcatatctaagataacctttttcaaaggagtagcttgcctcatatcgtacagtactatattcctgtcagatgcacaacttcccaagagaaatgtctcaattgggttaaatttaacactacttatactgtcaaatccccaggtcattgaacatataggattagttctttgttcatcccaaatgtctacttgctgtccacatgtggcaaaaacagcttctttccagtgatgatcaatcccagtatacactgtctttcctaatattgtatgtaatggctcttcctcgtctccatagcctggcccatccattttccactgcttcacagttttgtcatcaccaacagtgaaaaaagaagtcccacaaaagtgagcacgtattccctgtacaaaaccttcatgtgcttgtattatacggatacatttcagctgagtcaggttccaaattctaactgctccatcacatccctccatctcgtgaccatccagccaagccaggcatggttttgcaaatactccttccagtttggtagcatttaaaactcttacacattcttgcaggacctcaaaaggatgtaaggtaggatcacagtttcttggaataatctgtaagtccaacttggttttgcggacatagttgtccggattccagctcaatgtcttcaccttcaccttcgttgctcttcctgccagactccacaagctctttgct

SEQ ID NO: 91690 - DNA, 507 bp, Homo sapiens
aagtggtacccctcaggtcccgtccggattcccggtcgattctactacaaattgccggccggtcaccgacgctgcagaatggctcccgcaaagaagggtggcgagaagaaaaagggccgttctgccatcaacgaagtggtaacccgagaatacaccatcaacattcacaagcgcatccatggagtgggcttcaagaagcgtgcacctcgggcactcaaagagattcggaaatttgccatgaaggagatgggaactccagatgtgcgcattgacaccaggctcaacaaagctgtctgggccaaaggaataaggaatgtgccataccgaatccgtgtgcggctgtccagaaaacgtaatgaggatgaagattcaccaaataagctatatactttggttacctatgtacctgttaccactttcaaaaatctacagacagtcaatgtggatgagaactaatcgctgatcgtcagatcaaataaagttataaaattgccttcaaaaaaaaaa

SEQ ID NO: 91691 - DNA, 3619 bp, Homo sapiens
gcggccgcccacgaagctgtcggtgcgcagcagcgccgcagagaggcccgccaggcgcccagcgtagcagcggagctgggccgggccgggcgcaggcccggaggcagggaccaggccgccggcgcgggggcggaggcggcagcctggaaacgtcgacccgaggcgccgggccccacagctccgcagccaaatgcaggtcgccatggcccgggcaacgacggcgacaggaaacaggttgtggcctggcctgctgatcatgttgggttctctctgccatagaggttcaccgtgtggcctttcaacacacatagaaataggacacagagctctggagtttcttcagcttcacaatgggcgtgttaactacagagagctgttactagaacaccaggatgcgtatcaggctggaatcgtgtttcctgattgtttttaccctagcatctgcaaaggaggaaaattccatgatgtgtctgagagcactcactggactccgtttcttaatgcaagcgttcattatatccgagagaactatccccttccctgggagaaggacacagagaaactggtagctttcttgtttggaattacttctcacatggcggcagatgtcagctggcatagtctgggccttgaacaaggattccttaggaccatgggagctattgattttcacggctcctattcagaggctcattcggctggtgattttggaggagatgtgttgagccagtttgaatttaattttaattaccttgcacgacgctggtatgtgccagtcaaagatctactgggaatttatgagaaactgtatggtcgaaaagtcatcaccgaaaatgtaatcgttgattgttcacatatccagttcttagaaatgtatggtgagatgctagctgtttccaagttatatcccacttactctacaaagtccccgtttttggtggaacaattccaagagtattttcttggaggactggatgatatggcattttggtccactaatatttaccatctaacaatcttcatgttggagaatgggaccagtgactgcaacctgcctgagaaccctctgttcattgcatgtggcggccagcaaaaccacacccagggctcaaaaatgcagaaaaatgattttcacagaaatttgactacatccctaactgaaagtgttgacaggaatataaactatactgaaagaggagtgttctttagtgtaaattcctggaccccggattccatgtcctttatctacaaggctttggaaaggaacataaggacaatgttcataggtggctctcagttgtcacaaaagcacgtctccagccccttagcatcttacttcttgtcatttccttatgcgaggcttggctgggcaatgacctcagctgacctcaaccaggatgggcacggtgacctcgtggtgggcgcaccaggctacagccgccccggccacatccacatcgggcgcgtgtacctcatctacggcaatgacctgggcctgccacctgttgacctggacctggacaaggaggcccacaggatccttgaaggcttccagccctcaggtcggtttggctcggccttggctgtgttggactttaacgtggacggcgtgcctgacctggccgtgggagctccctcggtgggctccgagcagctcacctacaaaggtgccgtgtatgtctactttggttccaaacaaggaggaatgtcttcttcccctaacatcaccatttcttgccaggacatctactgtaacttgggctggactctcttggctgcagatgtgaatggagacagtgaacccgatctggtcatcggctccccttttgcaccaggtggagggaagcagaagggaattgtggctgcgttttattctggccccagcctgagcgacaaagaaaaactgaacgtggaggcagccaactggacggtgagaggcgaggaagacttctcctggtttggatattcccttcacggtgtcactgtggacaacagaaccttgctgttggttgggagcccgacctggaagaatgccagcaggctgggccatttgttacacatccgagatgagaaaaagagccttgggagggtgtatggctacttcccaccaaacggccaaagctggtttaccatttctggagacaaggcaatggggaaactgggtacttccctttccagtggccacgtactgatgaatgggactctgaaacaagtgctgctggttggagcccctacgtacgatgacgtgtctaaggtggcattcctgaccgtgaccctacaccaaggcggagccactcgcatgtacgcactcacatctgacgcacagcctctgctgctcagcaccttcagcggagaccgccgcttctcccgatttggtggcgttctgcacttgagtgacctggatgatgatggcttagatgaaatcatcatggcagcccccctgaggatagcagatgtaacctctggactgattgggggagaagacggccgagtatatgtatataatggcaaagagaccacccttggtgacatgactggcaaatgcaaatcatggataactccatgtccagaagaaaaggcccaatatgtattgatttctcctgaagccagctcaaggtttgggagctccctcatcaccgtgaggtccaaggcaaagaaccaagtcgtcattgctgctggaaggagttctttgggagcccgactctccggggcacttcacgtctatagccttggctcagattgaagatttcactgcatttccccactctgcccacctctctcatgctgaatcacatccatggtgagcattttgatggacaaagtggcacatccagtggagcggtggtagatcctgatagacatggggctcctgggagtagagagacacactaacagccacaccctctggaaatctgatacagtaaatatatgactgcaccagaaatatgtgaaatagcagacattctgcttactcatgtctccttccacagtttacttcctcgctccctttgcatctaaacctttcttctttcccaacttattgcctgtagtcagacctgctgtacaacctatttcctcttcctcttgaatgtttttccagtggctggaaaggtccctctgtggttatctgttagaacagtcccctgtacaccaattccctcccctaaaaacatcccttttttaaaaaaagaattggttccagcccataaagaaagaacaagatccatgccctttgcagggacatgggatgggagctggaggcccattatcccttcataaactattgcaggaacagaaaacccaaacactcccatattcctcacttgtaagtgggagctagatgagaacacgtggacacatagagggaaacaacacacactggggcctatgagagggcggaaggtgggaggagggagagatcaggaaaaataactaatggatacttagggtgatgaaataatctgtgtaacaaacccccatgacacacctttatgtatgtaacaaaccagcacttcctgcgcatgtacccctgaacttaaaagttaaaaaaaagttgaacttaaaaataacaggattggcccatgccaatcaaagtataatagaaagcatagtatacaga

SEQ ID NO: 91692 - DNA, 1605 bp, Homo sapiens; identical to SEQ ID NO: 59914

SEQ ID NO: 91693 - DNA, 1999 bp, Homo sapiens
tttcgtaggtgattgtggccacactgtcacactccattgtcttttcagggcagctgtcatagtagaactttgctggtgactggcatgtgccctttcagcctgagccaaggtggtttccttgaaagagttttcatgtttctggagaagagagaaacctgtttcctctctgtcttctctccaggtgaaagcagaagcctcctgggactccgcggtgcatggctgccctcagctcagcaggggcacgcccgtggacgagcggttgttcctgatcgtgcgcgtgacggtccagctcagccaccctgctgacatgcaactggtgttacgcaagagaatctgtgtcaatgttcacggccgccagggttttgcacagagtctcctaaaaaagatgtctcatcgaagttctattcctggctgtggagtgacttttgaaattgtctccaatattccagaggatgcccagggagtggaagaacgggaagcattagcaagaatggcagccaatgttgaaaacccagcttctgctgactcggaggcttatattgaaaagtacctcaggagcgtgctggctgtagaaaacctcctgactttagatcgtctgcgccaggaagttgcagtgaaggaacagttaacaggaaaaggaaagttgagcaggaggagtatcagttctccaaatgtgaacagattgtctggaagccgacaagatctcattccatcatacagtctaggcagcaacaagggccggtgggaaagtcagcaggatgtatcccaaaccacagtttccagaggaatagctcctgcccccgccctctctgtttctccccaaaataaccattctccagatccaggactcagtaaccttgcagcatcctacttgaatcctgtcaaatccttcgtgccgcaaatgccaaagctcctcaagtctctctttcccgtccgcgatgagaagaggggcaagcggccgtctcccctcgcacaccagcccgtgccccgcatcatggtgcagtcagccagcccggacatcagggtgaccaggatggaggaggctcagccggagatgggccctgacgtgctggtgcagacgatgggggccccggccttgaagatctgcgacaaacctgccaaagtgccttccccaccgcctgtcatagctgtcacagcggtcaccccggctccggaggcacaggacgggccccccagccccctgagtgaagcctctagcgggtacttctcccacagcgtctccaccgcgaccctgtcggacgccctgggccccggcctggacgctgcggccccgccggggtccatgcccaccgcccctgaggccgagcccgaggcgcccatcagccaccccccaccgcccacggccgtccccgccgaggagccccctggcccccagcagctcgtgagccccggtcgggagcgccccgacctcgaggccccggcgcccggctccccgttccgcgtccggagggtgcgggcctcggagttgcgctccttctcgcgcatgctggctggggaccccggctgctccccgggggccgaggggaatgcgccggccccgggcgccgggggacaggccctggcctctgattccgaggaagctgacgaggtcccggagtggctccgagagggcgagttcgtcaccgtgggcgcccacaaaacgggcgtggtgagatacgtggggcctgccgacttccaagagggcacgtgggtcggcgtggagctcgacctgccctcaggtaagaatgacggttccatcggcgggaagcagtacttcaggtgtaaccctggctacgggctgctggtcaggcccagccgggtccgcagggccacgggccctgtgcggcggcgcagcacaggactccggctgggtgcccccgaggcccgccggagcgccaccctctcgggctccgccaccaacctggcctcgctgacagctgccctggccaaggccgacaggagccacaagaaccctgagaaccggaaatcctgggccagc

SEQ ID NO: 91694 - DNA, 1875 bp, Homo sapiens
gttaacgtgtcccgcgagcgaggcgcgtcgcaaaaggtcgcggcggaacttccctgcgcttttcagaccatactctttacggtactaggcactgctgagctgggagatgtcggcggcgtgttgggaggaaccgtggggtcttcccggcggctttgcgaagcgggtcctggtgaccggcggtgctggtttcattgcatcacatatgattgtctctttagtggaagattatccaaactatatgatcataaatctagacaagctggattactgtgcaagcttgaagaatcttgaaaccatttctaacaaacagaactacaaatttatacagggtgacatatgtgattctcactttgtgaaactgctttttgaaacagagaaaatagatatagtactacattttgccgcacaaacacatgtagatctttcattcgtacgtgcctttgagtttacctatgttaatgtttatggcactcacgttttggtaagtgctgctcatgaagccagagtggagaagtttatttatgtcagcacagatgaagtatatggtggcagtcttgataaggaatttgatgaatcttcacccaaacaacctacaaatccttatgcatcatctaaagcagctgctgaatgttttgtacagtcttactgggaacaatataagtttccagttgtcatcacaagaagcagtaatgtttatggaccacatcaatatccagaaaaggttattccaaaatttatatctttgctacagcacaacaggaaatgttgcattcatgggtcagggcttcaaacaagaaacttcctttatgctactgatgttgtagaagcatttctcactgtcctcaaaaaagggaaaccaggtgaaatttataacatcggaaccaattttgaaatgtcagttgtccagcttgccaaagaactaatacaactgatcaaagagaccaattcagagtctgaaatggaaaattgggttgattatgttaatgatagacccaccaatgacatgagatacccaatgaagtcagaaaaaatacatggcttaggatggagacctaaagtgccttggaaagaaggaataaagaaaacaattgaatggtacagagagaattttcacaactggaagaatgtggaaaaggcattagaaccctttccggtataatcaccatttatatagtcgagacagttgtcaaagaagaaagttatcctacctcgccaagtggtatgaaattaagtgaccaaatgaagtgcactcttttcttttggaattagattcatgactttctgtataaaattcaaatgcagaatgcctcaatctttgggagagtttcagtactggcatagaatttaaatgtcaaaattctttctgaaaccctttctcctagaaactaggaaataataggtgtagaagactctccctaagggtagccaggaagaagtctcctgattcggacaaccatgaggggtagtggtgctagggagaaggcaaccttcactggttttgaactcagtgcctaagaaagtctctgaaatgttcgtttttaggcaatatagggatgtcttaggccctaattcaccatttcttttttaagatctgatatgctatcattgccttaataatggaacaaaatagaagcatatctaacactttttaaattgataattttgtaaaattgattacgttgaatgctttttaagagaagtgtgtaaagtttttatattttcacaatttatcatgtttactgtttaaaatgattgtatttataaaattgtcaatatcttaatgtatttaatgtagaatattgcttttttaaaataatgtttttattttgctgtagaaaaataaaaaaaaatttgattatatatttttaatccttc

SEQ ID NO: 91695 - DNA, 429 bp, Homo sapiens
tttcgttgctggcccggggtggcaggagccgcagaggcttgggctgctgaaaaaggatcctgtttgctgtgtaatcctgagaatggactgcaagagaggaaaaactgggcgtctgcttgggaatctattgtggaaacccagggtgtttcccgaccagtccctgggcgccaactagagtatggactgaccaggtacctggatggagacctgagctggagaaggagatgcgcttgggaggaaattgcagaggccgtcaacatggaaaagcagccccagaacagcaggagaggcctcgccccccgagaggtgccgccagctgttgggctgctgctgatcatggccctgatgaatactctgctctacctctgcctcgaccacttcttcatcgctcctcgacaatccactgtggaccccacacactgtccctat

SEQ ID NO: 91696 - DNA, 840 bp, Homo sapiens; identical to SEQ ID NO: 58713

SEQ ID NO: 91697 - DNA, 1094 bp, Homo sapiens
ggaattcacagagattccccgcccgggtccccgccaacggcgctagccgcgatgccccgcctcactccccgcccccgggatgcacggcgcgtgctggtaatccgcggctcaagccccgcccccactgtccccattctccgctcacctctctccaaggacactgcgcacgcgccacgacgtcccgcctttctccccgccctgccgcggccccggggcgcagcgcgcacgcaatcgcgtttccggagagacctggctgctgtgtcccgcggcttgcgctccgtagtggactccgcgggccttcggcagatgcaggcctggggtagtctcctttctggactgagaagagaagaatggagaagcccctcttcccattagtgcctttgcattggtttggctttggctacacagcactggttgtttctggtgggatcgttggctatgtaaaaacaggcagcgtgccgtccctggctgcagggctgctcttcggcagtctagccggcctgggtgcttaccagctgtatcaggatccaaggaacgtttggggtttcctagccgctacatctgttacttttgttggtgttatgggaatgagatcctactactatggaaaattcatgcctgtaggtttaattgcaggtgccagtttgctgatggccgccaaagttggagttcgtatgttgatgacatctgattagcagaagtcatgttccagcttggactcatgaaggattaaaaatctgcatcttccactattttcaatgtattaagagaaataagtgcagcatttttgcatctgacattttacctaaaaaaaaaaagacaccaaatttggcggagggggggaaaatcagttgttaccattataaccctacaaagggggggagcatgtaacatgagcttattgagaccatcataaagaccgattcttgatattgattttatctctttctgtatctatagggaaacctcaagggtaaaatgttaggggttgacattgaaaaccctgaaaccccattccctgctcaaaggaacagtgtgaaaaaaaatctcttgagagattaaaaatatctttttttttgctcatcttaaaccac

SEQ ID NO: 91698 - DNA, 505 bp, Homo sapiens
gctggtaccgctccggaattaccgggtcgacgatttcgtagcatggattaagtgtgattgctaatgaaagctaatttgttcttgagtgctggagggaggagtagcctgtttgcgaagagatgtgctggtccctgctatgcattggttaacacttagttggggcattgttttctggtcttttatgaaggacattgacaagctggagtatgttcagaaggataaacaaggtattgagtcgtatgacgaattacaaggaggagaaggccagaaaagagaaatcttggtgtaagccagttttaaatgtttgaaaggactatgcaaggaaagggcatgaaggccttgttttttgtgattctggaaggcagtagtgagaagtcttcactcaagtccagagagaactgtctcagttgttcagaacagatatgtgtgcctcaggaatgtaatgagatcactgtcactggaggtgtgtaagcagcagtttgacagagactaagatgttaggaac

SEQ ID NO: 91699 - DNA, 790 bp, Homo sapiens
cgggtcgacgatttcgtgaacggggggaagccatcttcaccccccaccccaatgcacgcacaattaagccaggaagcagcttgcaaccactagcctggggagggtccgcatgtgtcaagggtgagggcaacagatgctggacccagggagctctctgccacaggatgatggtggcccttcgaggagcttctgcattgctggttctgttccttgcagcttttctgcccccgccgcagtgtacccaggacccagccatggtgcattacatctaccagcgctttcgagtcttggagcaagggctggaaaaatgtacccaagcaacgagggcatacattcaagaattccaagagttctcaaaaaatatatctgtcatgctgggaagatgtcagacctacacaagtgagtacaagagtgcagtgggtaacttggcactgagagttgaacgtgcccaacgggagattgactacatacaataccttcgagaggctgacgagtgcatcgaatcagaggacaagacactggcagaaatgttgctccaagaagctgaagaagagaaaaagatccggactctgctgaatgcaagtaagaaaactgcatcttttcctagcccttctagggactattatgctcagaaacacacagactcagagcagtcagggagcatcatagagtaatgagagtaagaattggaggtgtgcttttgtgtgcattgctgagagagaaagctatacagagaacaggtgtccaaagaggaatccatttctcgcaagccattctttttttcacacac

SEQ ID NO: 91700 - DNA, 465 bp, Homo sapiens
  misc_feature (1)...(465): n = a,t,c or g
cctcggaaccggcccggngnnnnttgtcgacgatttcttgtgcggtgtggagctgcgcgccccccgccgaggctggcccaggtgccttctccaagagaggcagcagggagggagaaatggcaaggaggttgctgccagcccatgtacaggagtccgtgacgttcagggatgtggccgtgttcttcagccaggacgagtggttgcacctggactctgcccagagagccttgtaccgggaggtgatgctggagaactacagcatcctggtctcactggggattctcttttccaagccaaaggtcatctcccagttagagcaaggagaagacccctggatggtggagagtggagttccccaaggcgcacatctcggatgggaaagcttgtttggaaccatagtttctaaagaagaaaatcaggaagtcatgaaaaaactcataattgatggcacatttgacttcaagt

SEQ ID NO: 91701 - DNA, 3967 bp, Homo sapiens; identical to SEQ ID NO: 59906

SEQ ID NO: 91702 - DNA, 1649 bp, Homo sapiens
cccgttgtgaccggccggaattcccgtttcgacgatttcgtccgaccgcagggcctctacggaccttactagaaaaatgaaacctgatgaaactcctatgtttgacccaaatctactcaaagaagtggactggagtcagaatacagctacattttctccagccatttccccaacacatcctggagaaggcttggttttgaggcctctttgtactgctgacttaaatagaggtttttttaaggtattgggtcagctaacagagactggagttgtcagccctgaacaatttatgaaatcttttgagcatatgaagaaatctggggattattatgttacagttgtagaagatgtgactctaggacagattgttgctacggcaactctgattatagaacataaattcatccattcctgtgctaagagaggaagagtagaagatgttgttgttagcgatgaatgcagaggaaagcagcttggcaacttgttattatcaacccttactttgctaagcaagaaactgaactgttacaagattacccttgaatgtctaccacaaaatgttggtttctataaaaagtttggatatactgtatctgaagaaaactacatgtgtcggaggtttctaaagtaaaaatcttgtaagaaaattgtcaaaggggctaatgctacaaggctacactcttcctagagttgaaatattttgttgctgcagccgagtgacctccataaatactggactgaaaaaacattgtaatactacaagtataatgacatttagaagattactttgggctggtgggacatgctgtgaatttagattacaaatgaatattataaaggggatgatttttaaccaaaggaatatatttttaacttgaatcttttcttgcattgtatttttctaaaagtttggcttcctttcttggtagtcaagagtatgggtaataaggagttatatgtctgctatctgtgttgctcatttaaaaaaagtatacattgaataaggctgtttatcacatgcataaaattaaatatttttgtttcaaagaaacatctcaatacacttaggggtgtattgtttcccacatattaagtcagggtggataaattagttattataactaaacatagtatagtccaacattcgttgatcccaatacaggcaaacaacctggtcaaccttttgaagtagaagaaatgaaaattacttgacaagattaaaagtaaaacaatttaaatgttttactgaaagtttatatagtatagtctatgtagataaaaagtaccacttgtcttttctgtgaattatgactattcatttgttaaaaatacctaagagcaattatagtgggacatctaaggtcctctgtaaacagtgaattagcaaacctcagcctatgtgtttctaccctgatttttttcttttcatgggtatctgaagcctgtaagttttttcaaaaatggagtatcacaaaattgagtgaaacacaatacttaatgtattgtactagattgccaaattcataaaatgttaatggaagctttttgatgtgattataatggcactattctggtcattatcctattttgattttatttaattttttaaagttgaagaattaaatattttaatggttctgaaaaaaaaa

SEQ ID NO: 91703 - DNA, 3170 bp, Homo sapiens
ctctttgttgctggcttaattgtcctacttttggatgaactcctgcaaaaaggatatggccttggctctggtatttctctcttcattgcaactaacatctgtgaaaccatcgtatggaaggcattcagccccactactgtcaacactggccgagaatctatcaaggctcggcacaaaggtactctcccaggaggccttcctgaattcttctgtgaggcagactacttcccgagctgccccggcccttctccggccaagtctctccagaaactcatcccattcgttctcagatggaaggggacccacacccacgacaagcctccgggtttgcttaatgactcagacagcgagggtgctcgcactgacgtgtctctcggcggagctgctgtgcagtggaacgcgctgggccgcgggcagcgtcgcctcacgcggagcagagctgagctgaagcgggacccggagcccgagcagccgccgccatggcaatcaaatttctggaagtcatcaagcccttctgtgtcatcctgccggaaattcagaagccagagaggaagattcagtttaaggagaaagtgctgtggaccgctatcaccctctttatcttcttagtgtgctgccagattcccctgtttgggatcatgtcttcagattcagctgaccctttctattggatgagagtgattctagcctctaacagaggcacattgatggagctagggatctctcctattgtcacgtctggccttataatgcaactcttggctggcgccaagataattgaagttggtgacaccccaaaagaccgagctctcttcaacggagcccaaaagttatttggcatgatcattactatcggccagtctatcgtgtatgtgatgaccgggatgtatggggacccttctgaaatgggtgctggaatttgcctgctaatcaccattcagctctttgttgctggcttaattgtcctacttttggatgaactcctgcaaaaaggatatggccttggctctggtatttctctcttcattgcaactaacatctgtgaaaccatcgtatggaaggcattcagccccactactgtcaacactggccgaggaatggaatttgaaggtgctatcatcgcacttttccatctgctggccacacgcacagacaaggtccgagcccttcgggaggcgttctaccgccagaatcttcccaacctcatgaatctcatcgccaccatctttgtctttgcagtggtcatctatttccagggcttccgagtggacctgccaatcaagtcggcccgctaccgtggccagtacaacacctatcccatcaagctcttctatacgtccaacatccccatcatcctgcagtctgccctggtgtccaacctttatgtcatctcccaaatgctctcagctcgcttcagtggcaacttgctggtcagcctgctgggcacctggtcggacacgtcttctgggggcccagcacgtgcttatccagttggtggcctttgctattacctgtcccctccagaatcttttggctccgtgttagaagacccggtccatgcagttgtatacatagtgttcatgctgggctcctgtgcattcttctccaaaacgtggattgaggtctcaggttcctctgccaaagatgttgcaaagcagctgaaggagcagcagatggtgatgagaggccaccgagagacctccatggtccatgaactcaaccggtacatccccacagccgcggcctttggtgggctgtgcatcggggccctctcggtcctggctgacttcctaggcgccattgggtctggaaccgggatcctgctcgcagtcacaatcatctaccagtactttgagatcttcgttaaggagcaaagcgaggttggcagcatgggggccctgctcttctgagcccgtctcccggacaggttgaggaagctgctccagaagcgcctcggaaggggagctctcatcatggcgcgtgctgctgcggcatatggacttttaataatgtttttgaatttcgtattctttcattccactgtgtaaagtgctagacattttccaatttaaaattttgctttttatcctggcactggcaaaaagaactgtgaaagtgaaattttattcagccgactgccagagaagtgggaatggtataggattgtccccaagtgtccatgtaacttttgttttaacctttgcaccttctcagtgctgtatgcggctgcagccgtctcacctgtttccccacaaagggaatttctcactctggttggaagcacaaacactgaaatgtctacgtttcattttggcagtagggtgtgaagctgggagcagatcatgtatttcccggagacgtgggaccttgctggcatgtctccttcacaatcaggcgtgggaatatctggcttaggactgtttctctctaagacaccattgttttcccttattttaaaagtgatttttttaaggacagaacttcttccaaaagagagggatggctttcccagaagacactcctggccatctgtggatttgtctgtgcacctattggctcttctagctgactcttctggttgggcttagagtctgcctgtttctgctagctccgtgtttagtccacttgggtcatcagctctgccaagctgagcctggccaagctaggtggacagacccttgcagtgatgtccgtttgtccagattctgccagtcatcactggacacgtctcctcgcagctgccctagcaaggggagacattgtggtagctatcagacatggacagaaactgacttagtgctcacaagcccctacaccttctgggctgaagatcacccagctgtgttcagaattttcttactgtgcttaggactgcacgcaagtgagcagacaccaccgacttcctttctgcgtcaccagtgtcgtcagcagagagaggacagcacaggctcaaggttggtagtgaagtcaggttcggggtgcatgggctgtggtggtgttgatcagttgctccagtgtttgaaataagaagactcatgtttatgtctggaataagttctgtttgtgctgacaggtggcctaggtcctggagatgagcaccctctctctggcctttagggagtcccctcttaggacaggcactgcccagcagcaagggcagcagagttggg

SEQ ID NO: 91704 - DNA, 1166 bp, Homo sapiens
cggacgcgtgggttcctctgcccgccatgccgttcctggagctggacacgaatttgcccgccaaccgagtgcccgcggggctggagaaacgactctgcgccgccgctgcctccatcctgggcaaacctgcggaccgcgtgaacgtgacggtacggccgggcctggccatggcgctgagcgggtccaccgagccctgcgcgcagctgtccatctcctccatcggcgtagtgggcaccgccgaggacaaccgcagccacagcgcccacttctttgagtttctcaccaaggagctagccctgggccaggaccggttccctacggtcttatccaccagccctgctgcccatggtggccccagatgcccaggagagataatagaaggtaagaagtcatgtttgaatgaggaagctctcttcatttatttcatatgaggatgaagaagaggattatgtgatcacaggaatgttgcatgcgggataatccaaagctggttatctccaggccctcactctgccaagagatctctctggaagaagcagccagttcacagatgccctggatccctccgtgcccaatcataaaaaagtcatgaccgtccctatcttgccaatctgccaggactccaaggggaaaaagcggataagtatccggtcctggcccagggctagctccttggtgagaaactcaaagaagtgggcgctgtggctgcggttgtcctcggcggtgcccactacgccgatggaggagatggacagctgcgcgcagggctcggtggacccgctcagcgccatggccaggcccggccgtaccgtcacgttcacgcggtccgcaggtttgcccaggatggaggcagcggcggcgcagagtcgtttctccagccccgcgggcactcggttggcgggcaaattcgtgtccagctccaggaacggcatggcgggcagaggaacggaaacagctcctcagatgtccgtgcgctggggcctttccaggacggcggcgcccagtcgtttctgggtcagggcgacgcctggaactgggcagggtccctggcaccgggatcccgaaaagcagacatgcttctccctgtccagaaggttccccttcaccttgcagtcggccccctgcatccgtgtcctcacgaaatcgtcgacccgggaagtccggtc

SEQ ID NO: 91705 - DNA, 2617 bp, Homo sapiens
agtctccgccgccgccgtgaacatggagcccccggacgcaccggcccaggcgcgcggggccccgcggctgctgttgctcgcagtcctgctggcggcgcacccagatgcccaggcggaggtgcgcttgtctgtacccccgctggtggaggtgatgcgaggaaagtctgtcattctggactgcacccctacgggaacccacgaccattatatgctggaatggttccttaccgaccgctcgggagctcgcccccgcctagcctcggctgagatgcagggctctgagctccaggtcacaatgcacgacacccggggccgcagtcccccataccagctggactcccaggggcgcctggtgctggctgaggcccaggtgggcgacgagcgagactacgtgtgcgtggtgagggcaggggcggcaggcactgctgaggccgctgcgcggctcaacgtgtttgcaaagccagaggccactgaggtctcccccaacaaagggacactgtctgtgatggaggactctgcccaggagatcgccaccagcaacagccggaacgggaacccggcccccaagatcacgtggtatcgcaacgggcagcgcctggaggtgcccgtagagatgaacccagagggctacatgaccagccgcacggtccgggaggcctcgggcctgctctccctcaccagcaccctctacctgcggctccgcaaggatgaccgagacgccagcttccactgcgccgcccactacagcctgcccgagggccgccacggccgcctggacagccccaccttccacctcaccctgcactatcccacggagcacgtgcagttctgggtgggcagcccgtccaccccagcaggctgggtacgcgagggtgacactgtccagctgctctgccggggggacggcagccccagcccggagtatacgcttttccgccttcaggatgagcaggaggaagtgctgaatgtgaatctcgaggggaacttgaccctggagggagtgacccggggccagagcgggacctatggctgcagagtggaggattacgacgcggcagatgacgtgcagctctccaagacgctggagctgcgcgtggcctatctggaccccctggagctcagcgaggggaaggtgctttccttacctctaaacagcagggcagtcgtgaactgctccgtgcacggcctgcccacccctgccctacgctggaccaaggactccactcccctgggcgatggccccatgctgtcgctcagttctatcaccttcgattccaatggcacctacgtatgtgaggcctccctgcccacagtcccggtcctcagccgcacccagaacttcacgctgctggtccaaggctcgccagagctaaagacagcggaaatagagcccaaggcagatggcagctggagggaaggagacgaagtcacactcatctgctctgcccgcggccatccagaccccaaactcagctggagccaattggggggcagccccgcagagccaatccccggacggcagggttgggtgagcagctctctgaccctgaaagtgaccagcgccctgagccgcgatggcatctcctgtgaagcctccaacccccacgggaacaagcgccatgtcttccacttcggcaccgtgagcccccagacctcccaggctggagtggccgtcatggccgtggccgtcagcgtgggcctcctgctcctcgtcgttgctgtcttctactgcgtgagacgcaaagggggcccctgctgccgccagcggcgggagaagggggctccgtgagtggcctgctatctgcaatgaccaccatagcttaaccccatccccaccctcaaccccaagctcaacccataacctcaaccacatcttatcctccaccccacatcccaccacatccacctccatccccaacccatcctcatccccaactacagccccaaacccagccccagactaatccacagccatccccaactcatcctcatccccaactgcagccccaaacccaacccagggccatccccaaacccatccccaagccaaactcaacaccatccccttccctaatcacctctcctgcccctagctcagcctcatccccaactccatgcctgtctccaatcccaaccctgcccccaatctcccctcaactccaatccataacscccttcaaaccatcctcaactaagctcctctccagccctggccacatccccatcctcccccaacctccagccccaacacccatcatccccctgagctcacccttaactccaatttatcctccaagcctatctctcaccatccagccctcacctagccatttcccaaccctagtcctccaccgtcccgaagccaacttcacccatgtccccatccccaatcttgtccccattcctgactccaaatccaacccctaagcctccccaagctcctcctcatctaaccttgtctccagccccaaccacatggccgtcctcacctccaatccgtaaccatcccagaccgatcccaaagccaactccagctacattcccacctccaaccccaatagcatctgcatccccatgcccaaccctaaccccagtgccattgtcgacggtttttatt

SEQ ID NO: 91706 - DNA, 3722 bp, Homo sapiens; identical to SEQ ID NO: 59779

SEQ ID NO: 91707 - DNA, 1794 bp, Homo sapiens
tacattatacatatccctcactttgtcagaatttaaaatgtgtaaaaatttacaggctgggcattgtggctcacacggtgtaatcccgatttcccgacaaacggggttgaataaatgctgataaatcaatataaaaaggctttcaccgtgaacacgttggtttcaaagccgtgttaaacaccagaagaggaattatctgttttcgtttttccaataaatatttatttccaataaatactacatgactatcttacatgtagtcactattcaaaggactggggtaaagacaacaaaattcctagtctcagagcttccactctagtgaaagaatgtgaaagttatcagtattcagatggagtttaaagccaataggcagtattttgagtgatgctataaagggcaaatttgccaaaatagcatggaaccccatggttttatttatttttttgagacagggtctcactctgttgcctaggcaggagtgcagtggcatgctcacagcaacctccgcctcccgggttgaagcgattctcctgcctccgcctcctgagtagcagggattacaggtgcactctaccacgcctggctaatttttgttattttaggtttcgtcatgttgcaggctggtctcaaactcgtgaacttaggcgatctgcccgcctcagcctcccacagtgctgggattacaggcatgagccaccgcgccaggctgaagtccatgattttaaaaactatttagtaaattttcattttgtagctcagttttgttagctatggttttataaataccctgataattacatttggtagcaaattagacacagtgtattaaagattgatgagacaaatatgttaaagataaaaattaattcaagagcacagatatgctatgcatactactaaaataaatacagtgatttataaatgagaaaaagttaacaatgaacagtgtttcagaagttgaaaaggtgacactaacagtgctaaatacacaggcttttatttgttttcttcagattgctttttcgtgaatataaagatgaggagtccattctgcaacctaaaaatatttacttattaaaactatattaatactttaataaactatacaaaaaggtaatgagacaaacatctgcatttatggaactgcatgtcagtcaggccagttccctgcagagggaattcccagcatgacctcattcatctgtgaggacacagagcagtccttgtttagacatacacattcatctactgctcatcatggtcagccttccacttcttgatggtttccttctgctatgaatgcgcatgtccggttgtctgcttcttagagcagacatttaccttcctcatccaccagccattggagggggactagggccacgcagatgattgattctacccattcttcggggagggtttcctggtggccctcttccatcatcatatctggaatcagatgagtttccatagcttcttctttttttcacatcttgctgaagcagagttttgaaaaacaaaaccacaaactcagctattccccagaagaaatctgttatcaaagataatctccatggagactgactccggctgtccaacacttgtccgttcgagatgtaaaccatcttgtcccacttccccgcttcggagccaccgggcgcctggcccctgtcggtttctgtatctccctctgctccccgcccttcgagcgtcacaggccgcgattagacaaaatgctgacgaggacgaaggtgggcagagcccattggctgctgaaagagacgcgcccccgac

SEQ ID NO: 91708 - DNA, 454 bp, Homo sapiens
ggaactcccgggtcgacgatttcgtggaaaaaaatatatatgtatctgcagtacagggagaagatttagagaagcggccagggctggagatggtgaaggcaggaagacttctgcaaactgaaagaagcaaccaaacaggacatcacctctttgtttttcttgtctgtctcttaattattcaaaaatgggattgctgtatggcagacatccaaatgttgtctacagtagaattcacagatagaagcaaacacctaaatcagtcattggctgccttggagttttcataagaaattgtccctggaggtgttggatgatcacagcttccttggagcattgcagttgctggaatccagtttcaggattaagggagggctgcctccttgcaaagggctgccaagaaaacggctgtgcttgttcttaacctcacgctctgtctgtgatcagtctgagagtc

SEQ ID NO: 91709 - DNA, 1253 bp, Homo sapiens; identical to SEQ ID NO: 59926

SEQ ID NO: 91710 - DNA, 441 bp, Homo sapiens
  misc_feature (1)...(441): n = a,t,c or g
tttcgtgacttacatgccnnnnntgagtctactagaccagtttgtaactgggtgtgttagtaactgaatcaggcaactacattacgatgaagcgtatttgtatgtagatatgaatgtcacctaaggatatttttatagcatcagttgttaggggctggcctatgaatcgcttaatttttttttcagttatacatacctgtctttgggattataaaattttccttttcatgcctctttccttctagttactcttatatagcaggtcatatttaaagtgaagcaacgtaaaaagttgtcctattaaaataaatttatcatttcttctctggcagctgtggaagttaataaacttgaaatacaaaaaagaaatacgtatgatgaattttgagtattcagtanaagagaactttaacttcccattagacaattgaattacttatt

SEQ ID NO: 91711 - DNA, 639 bp, Homo sapiens
ctgagcttttgctcgccgtccaccactgctgtttgccgccgttgcagacccacgactgacttccatccctccagatctggcagggcacctcctgatccagcgaggtgcccattgccactcccaatcgggctaaaggcttgccattgttcctgcacggctgagtgcctgtgttcatcctaatcaagctaaacactagtcactgggttccacggttctcttccatgacccatggcttctaatagagctataacactcaccgcatggcccaagattccattccttggaatctgtgaggccaagaaccccaggtcagagaacatgaggcttgccaccattttggaagtggcccgtcgccatcttggaagtggcctgccaccatcttgggagctctgggagcaaggaccccctggtaacagtagtagatacatagaatttttaaataaacatacttatattaagggtactcttagggtctatactaagaaattttgcatgcttgtcattaaaagctttgagtccaagtcctgtgtgtgtgtatatgactttgactctaagtcaagtgtaaatgtaactgtatagatatgccatgtatataatgtaaataaaatatatacatatatttataaaaaaaaaaaaagg

SEQ ID NO: 91712 - DNA, 1007 bp, Homo sapiens
ttttttttttttaaatattttaaaattttctttatttcagaactgcctttatgtacagacatcatttaaaaaatgcacatacaatggagattttccaaggaacaggagctggaaataaaatttaaggacattattagaactgaaattgtcccagagaagttctgaggatcaggattccttaaatgtccttgataacctcttcaagttcttcctttgtgaacatgtggaaattctggccaggctgcactgtggctagctcaatgtttgttgcattcagcttctcctccattacttgtttgaggatgatgagtgaagacttgatggcttctttcaaagtcatagacttgtggtaaacttcttgcaaggagctctgggcaccctctgaagcagagccaattgctcgagcatcacactgtacaaaggtcccagatgggtccatatgaaacagctggggtcctttctcatcaactcctccaaataataatgctactccaaagggacgagacatggcacctggatctgcatcttcttctccaaactgcaaagccagattggacacagcttgggtcacactctccactgtcattgtctcattgtaggtgaaccagtggttctgtgtctccactctggctttatcaattaaagtcttagcatcagcaattagcccactcatggcacaacctatgtgagcatcaatctctacaattttctcaatgctgctgggctccatcagtggggaagtaattctcttctccacagctaggcacacaccctctgatgtctggatcccaatggctgtagaaccaagcttgatagcctcaatggcatattccacttgaaataatcttccttcgggagaaaaagtattcacgcccctgtcgtactcagaccgggtaagaaacatggcgagggtaggaggaggcagcggctacgcggggattctgaggaccaacacgactccaccggcacccaactcaccggcagccaactcacccacacggccgcag

SEQ ID NO: 91713 - DNA, 2165 bp, Homo sapiens
gcccactggccagggagggcgccgcgcggaggcgcgttcgtgtctcctgtcaaaagccatgctcgggaggtctgggtaccgggcgctgcccctgggtgattttgaccgcttccagcagtcgagcttcggctttctgggctcgcagaagggctgcttgtccccggagcggggcggcgtggggacaggggccgatgtaccccagagctggccctcctgcctctgtcatggcctcatcagtttcctggggttcttgctgctgttggtcaccttccccatttctggctggtttgccctgaagattgtgcccacctacgagcggatgattgtgttccgcctgggccggatccgcaccccccagggacctggcatggttctgctcttgcccttcattgactcctttcagagggtggatctgaggacacgagccttcaacgtccctccctgcaagctggcctctaaggacggggctgtgctgtccgtgggagccgatgtccagtttcgcatctgggacccggtgctgtcggtgatgactgtgaaagacctgaacacagccacacgcatgacagcccagaacgccatgaccaaggccctgctcaagaggccgctgcgggagatccagatggagaagctcaagatcagcgaccagcttctgctggagatcaacgatgtgaccagggcctgggggctggaggtagaccgcgtggagctggcggtggaggccgtgctccagccgccccaggacagcccagctgggcccaacctggacagcaccctccagcagctggccctgcacttcctgggaggaagcatgaactcaatggcaggaggtgccccgtccccggggccagcagacaccgtggagatggtgagtgaagttgagccacctgcccctcaagttggtgccaggtccagtccgaagcagcctctggcggaggggctactgactgctctacagcccttcctgtctgaggccctggtcagccaagtcggggcctgctaccagttcaatgtcgtcctgcccagcggcacccaaagcgcctacttcctggacctcactacaggacgaggaagagtgggacacggggtgcctgatggcatccctgatgtggtggtggagatggccgaggcagacctgcgggccctgctatgcagagagctgcggcccctgggggcctacatgagtggacggctgaaggtgaagggcgacctggctatggccatgaagctggaggctgtcctcagggccttgaagtagcagccttggctgactttccagagcccagtcccaagcctggcaccaagcctgaggggcctcttggaggaggaggtgttcatctgcaccacagagagttgaggccctaacaaatttcaggcccagccaagagcccatgaatggaggctgcaggaggctgagtccggctgccatgcacgtctcccctacagtggttctctggacaaggctttgtccatcccggtccccagctgagtgcccagcgctgagctgggtgcacggtgtgattccaggaggagagccaggcctgccctgccctgctggcttcctgactggagagacaggacccacagaaacagcctgacagcagctggtttggtccttgtgtgagggaccaagcatgtggcccaggctctaagctctgcggggattggagagggatggggagggaagggaaggcagctccaagaagaggtccctgtggcgaagttacctggggatcctggctggcccaccttcctggctgcagtccaggcccgtgctggcgggattgggcatgggaaggagcagggcctgctgcttccctggcgctgctcccaaagatttctgactcatctgccagctccgtcctgcatgcctggcgagctggggcccagggcagcatgaaggagagccctgcgttctgtgcttcttaccagaggtttgcaagcctcagacaaataaatgtggtgtttacaatgtaaaaaaaaaaaaaagggggggccgttttaaaggatccaattttacgtccgcgggcttgcaaggtaatattttttttttggggcccccaaaattaaattccccgggccggggtttaacaacgggggggggggaaaacccggggggttccccaatttaatcgctttggagaaaatccccttttccccgggggggg

SEQ ID NO: 91714 - DNA, 2410 bp, Homo sapiens; identical to SEQ ID NO: 59750

SEQ ID NO: 91715 - DNA, 930 bp, Homo sapiens
cggcgtggtgaaatagatatggcgaccgagggggatgtggagctggagttggagactgagaccagtggaccagagcggcctccggagaagccacggaaacatgacagcggtgcggcggacttggagcgggtcaccgactatgcagaggagaaggagatccagagttccaatctggagacggccatgtctgtgattggagacagaaggtcccgggagcagaaagccaaacaggagcgttagtctttcaggggcagccaactttaccagttctttcctccccgggtccccagacaaaaataaaaaccattattaagcctttataccgttcttcaaatttatcaccaattcctgcagatctaggcgccacaactttactcttgttagcagaaggcctcctggcaacacctgctgccaagactccaggggaaaggagtattagtgggagtttttattttcaatcaagggtttatcaagatttatttacagggcacttctgggaatgacccttcctgggagtttatggtgttggttgagaatgaggactaatatatttaaatatttttgcagggagaaagaactggcaaaagtcactatcaagaaggaagatctggagctaatagtgagtggtagtgcctaactagtgtatgcggaggggaggctattctgcttaatttgggttgtttcctgaaacaagcggagtcagtatatttggtggcacattaatgcctgggaacctatgtaacatgatttttttctgcagatgactgagatggagatatctcgagcagcagcagaacgcagtttgcgggaacacatgggcaacgtggtagaggcgcttattgccctaaccaactgatgcgtgctttctcaaatatacctactggattaatttatggcaataaaatttttttttgtcttacaaaaaaaaaa

SEQ ID NO: 91716 - DNA, 1612 bp, Homo sapiens; identical to SEQ ID NO: 59504

SEQ ID NO: 91717 - DNA, 651 bp, Homo sapiens
tttcgtacttgaaataagctgtggaacgttggtctgctggtttaagtggatgtgcgttaccttccttttgatcataatgtcagcatctgcccattttacaagtagaggtacctactgttctttggcagtaatgcctgacttgtttgaactctctgtcactgattcatggtttgcctagtggtaaaatacctgggattgtttcttgtgcctctacctgggcctggcattatctataaaaccagcttttattctgcttgagtgcctatgcgcacagtctccacatttacccttgggatgaggaggatgtactccaccccttgttttggtacagacagtcctggggccagcacccctactaggagctgcatctgatgaaacatctgatttgtaggataggggaggggtgagtgtgtggtttttgcaggcccagcgctgagtccttacttggctgcttactagctatgagaggcttaaggcaatcacataacctgactgaaggagaatgataccatccggcacaacatgttgaaaccatggctctggtaacaaagcccaaatataggcaggggaagcttctagaagatggcttcttgactttccttcctgacatcatttgtcaggtgcctgccttgtgcagcaagaacttgggaa

SEQ ID NO: 91718 - DNA, 652 bp, Homo sapiens
tttcgtagctatttaatatgctttatctcacctcagcttggtggggtgagtactgttgtcaacattcctgttttggaagtgagtcttggattgcccaaacaggagctggtgagctggagtctgaatccagtgtttaagttgctcacccaatcccaagccaagatgctgtccttactgaaaaacgccagccaatggatttagtcaagagtgaaagagaactcactggacattctgatcaacaactctgtaactttgttttgttttttagagtttaaaacacagatatttttagagggttactgctgtcactcagctccaaagggcttcacttatgccaccttctgtatgaatggcacccccaagatgtgggcagggtacagctttcacagttgtacatgggaccttttttggggctttcagattgataaattcaaacctaaattacaataggatcttgatttgtatgaggaatttgtcctgagaccttcatgaatcttcacatctacaaataccagaaaaatgacaaatgctataccttcagagttataaagacagatagacataaagtcacattgagacttggaggctagagaggcagctccgttgattcactgacttgatgtctctgcttcacagcccacagtttgggtgc

SEQ ID NO: 91719 - DNA, 460 bp, Homo sapiens
aattcaaaacacacttgataactgaaggatgatgaagtgtccacaggctttactagctatcttttggcttctactgagctgggtgagcagtgaagacaaggtggtacaaagccctctatctctggttgtccacgagggagacaccgtaactctcaattgcagttatgaagtgactaactttcgaagcctactatggtacaagcaggaaaagaaagctcccacatttctatttatgctaacttcaagtggaattgaaaagaagtcaggaagactaagtagcatattagataagaaagaactttccagcatcctgaacatcacagccacccagaccggagactcggccatctacctctgtgctgtggaggcacagtgctccctagtcacctgcagcctgtactcaaattctacagctgaggctctgcaactgtaagatggggaacttgctacattgagcaag

SEQ ID NO: 91720 - DNA, 412 bp, Homo sapiens
tttcgtaaaatgtatgtttttaaatcactcacatatcaagctgcaggtctgtagtgtaagaatgctgtgttgctgcttccctgtgggtaatggcattccccatcagggtagcagtctgacagagagcagagattctctttctgcgccctacagaggactgtgagaagcctccagattgaatacaataatggaaaaagtgactgaaagatttcacatctcctgagtgtggttaccaacatagcagtggggacctatctagacaggcacagcctatgcctgttcagagagcctctaggtcattgagagtcctgaaaatggcttataggagaaaatgacaccagagtcctgggggccaagagaccccctcatttccctccacccccttctgtaattttatctcaagggggacaac

SEQ ID NO: 91721 - DNA, 2797 bp, Homo sapiens
ccggtccggaattcctggggcgacgatttcgtagatgctgcggctcgccgcgcggctccagctgtggcgcggtggtcccgacggtcacccgaatcgcagggagtcgccgctggagaggggctcggcgcccggcggggactgcaggcgatgacccaggatgcagccaggggccacgacatgcacggaggaccgcatccagcatgccctggaacgctgcctgcatggactcagcctcagccgccgctccacctcctggtcagctgggctgtgtctgaactgctggagcctgcaggagctggtcagcagggacccgggccacttccttatcctccttgagcagatcctgcagaagacccgagaggtccaggagaagggcacctacgacctgctcaccccgctggccctgctcttctattccactgttctttgtacaccacacttcccaccagactcggatctccttctgaaggcagccagcacctaccaccggttcctgacctggcctgttccttactgcagcatctgccaggagctgctcaccttcattgatgctgaactcaaggccccagggatctcctaccagagactggtgagggctgagcagggcctgcccatcaggagtcaccgcagctccaccgtcaccgtgctgctgctgaacccagtggaagtgcaggccgagttccttgctgtagccaataagctgagtacgcccggacactcgcctcacagtgcctacaccaccctgctcctgcacgccttccaggccacctttggggcccactgtgacgtcccgggcctgcactgcaggctacaggccaagaccctggcagagcttgaggacatcttcacggagaccgcagaggcacaggagctggcatctggcatcggggatgctgcagaggcccggcggtggctcaggaccaagctgcaggcggtgggagaaaaagctggcttccctggggtgttagacactgcaaaaccagggaagctccacaccatccccatccctgtcgccaggtgctacacctacagctggagccaggacagctttgacatcctgcaggaaatcctgctcaaggaacaggagctactccagccagggatcctgggagatgatgaagaggaggaagaggaggaggaggaggtggaggaggacttggaaactgacgggcactgtgccgagagagattccctgctctccaccagctctttggcgtcccatgactccaccttgtcccttgcatcctcccaggcctcggggccggccctctcgcgccatctgctgacttcctttgtctcaggcctctctgatggcatggacagcggctacgtggaggacagcgaggagagctcctccgagtggccttggaggcgtggcagccaggaacgccgaggccaccgcaggcctgggcagaagttcatcaggatctataaactcttcaagagcaccagccagctggtactgcggagggactctcggagcctggagggcagctcggacacggccctgcccctgaggcgggcagggagcctctgcagccccctggacgaaccagtatcaccccctttccgggcccagcgctcccgctccctgccccagcccaaactcggtacccagctgcccagctggcttctggcccctgcttcacgcccccagcgccgccgccccttcctgagtggagatgaggatcccaaggcttccacgctacgtgttgtggtctttggctccgatcggatttcagggaaggtggctcgggcgtacagcaaccttcggcggctggagaacaatcgcccactcctcacacggttcttcaaacttcagttcttctacgtgcctgtgaagcgaagtcatgggaccagccctggtgcctgtccaccccctcggagccagacgccctcacccccgacagactcccctaggcacgccagccctggagagctgggcaccaccccatgggaggagagcaccaatgacatctcccactacctcggcatgctggacccctggtatgagcgcaatgtactgggcctcatgcacctgccccctgaagtcctgtgccagcagtccctgaaggctgaagcccaggccctggagggctccccaacccagctgcccatcctggctgacatgctactctactactgccgctttgccgccagaccggtgctgctgcaactctatcagaccgagctgaccttcatcactggggagaagacgacagagatcttcatccactccttggagctgggtcactccgctgccacacgtgccatcaaggcgtcaggtcctggcagcaagcggctgggcatcgatggcgaccgggaggctgttcctctaacactacagattatttacagcaagggggccatcagtggacgaagtcgctggagcaacctggagaaggtctgtacctccgtgaacctcaacaaggcctgccggaagcaggaggagctggattccagcatggaggccctgacgctaaacctgacagaagtggtgaaaaggcagaactccaaatccaagaagggctttaaccagattagcacatcgcagatcaaagtggacaaggtgcagatcatcggctccaacagctgcccctttgctgtgtgcctggaccaggatgagagaaagatcctgcagagtgtagtcagatgtgaggtctcaccgtgctacaagccagagaagagcgacctctcctcaccaccccagacgcctcctgacctgccggcccaggccgcacctgatctctgctcccttctctgcctgcccatcatgactttcagtggagctctgccc

SEQ ID NO: 91722 - DNA, 2981 bp, Homo sapiens; identical to SEQ ID NO: 60048

SEQ ID NO: 91723 - DNA, 1730 bp, Homo sapiens; identical to SEQ ID NO: 76295

SEQ ID NO: 91724 - DNA, 556 bp, Homo sapiens
gggtcgacccacgcgtccgggttccgggtaggagctaggtgaccctcggctgctgcagggatctgcagcgactgcagccatgggggcccacctggtccggcgctacctgggcgatgcctcggtggagcccgaccccctgcagatgccaaccttcccgccagactacggcttccccgaacgcaaggagcgcgagatggtggccacacagcaggagatgatggacgcgcagctgaggctccagctgcgggactactgcgcccaccacctcatccggctgctcaagtgcaagcgtgacagcttccccaacttcctggcctgcaagcaggagcggcacgactgggactactgcgagcaccgcgactatgtgatgcgcatgaaggagtttgagcgggagcggaggctgctccagcggaagaagcggcgggagaagaaggcggcagagttggccaaaggccagggacccggggaagtggaccccaaggtggccctgtagggggtgcaccccccaccctatggaccagtcaaataaaagccttcaggcccctcaaaaaaaaaa

SEQ ID NO: 91725 - DNA, 2249 bp, Homo sapiens; identical to SEQ ID NO: 77179
  misc_feature (1)...(2249): n = a,t,c or g

SEQ ID NO: 91726 - DNA, 1166 bp, Homo sapiens; identical to SEQ ID NO: 59849

SEQ ID NO: 91727 - DNA, 410 bp, Homo sapiens
tttcgtcagaaaatagagaattagaaaatgaaagcattttgtctaccagaataaaaaatcaaaaattagcatctgctatgggagaagataacatcttattcagggtcacaggttgagcattgcacttgatttcttcagggaaattgttaataggagtgccacccaaacgtgaacgtaattctaagtgtagtgtgtttccatgtaatcagctgcccaccaggatgattcaggttagctttgtaattgcagaagcagcctagtttttttaaatctttagtagcaattaataggcaaggagactgataattatgtttcacagtagacttttatacctcattttaccaagaaaaaaagtttctgtgttatttcttagatgggtaagaagagtttttatttattttttattttat

SEQ ID NO: 91728 - DNA, 3003 bp, Homo sapiens
tttcgttgcggcctggcaccaaaggggcggccccggcggagagcggacccagtggcctcggcgattatggacccggccgaggcggtgctgcaagagaaggcactcaagtttatgatggagtttcgctcttggtgcccaggctggaatacaatggcgcgatctcggctcaccgcaacctccacctcccgggttcaatgctctatgcccaggtctctgtggctgggctgctccagcctggcggacagcatgccttcgctgcgatgcctgtataacccagggactggcgcactcacagctttccagaattcctcagagagagaagactgtaataatggcgaaccccctaggaagataataccagagaagaattcacttagacagacatacaacagctgtgccagactctgcttaaaccaagaaacagtatgtttagcaagcactgctatgaagactgagaattgtgtggccaaaacaaaacttgccaatggcacttccagtatgattgtgcccaagcaacggaaactctcagcaagctatgaaaaggaaaaggaactgtgtgtcaaatactttgagcagtggtcagagtcagatcaagtggaatttgtggaacatcttatatcccaaatgtgtcattaccaacatgggcacataaactcgtatcttaaacctatgttgcagagagatttcataactgctctgccagctcggggattggatcatattgctgagaacattctgtcatacctggatgccaaatcactatgtgctgctgaacttgtgtgcaaggaatggtaccgagtgacctctgatggcatgctgtggaagaagcttatcgagagaatggtcaggacagattctctgtggagaggcctggcagaacgaagaggatggggacagtatttattcaaaaacaaacctcctgacgggaatgctcctcccaactctttttatagagcactttatcctaaaattatacaagacattgagacaatagaatctaattggagatgtggaagacatagtttacagagaattcactgccgaagtgaaacaagcaaaggagtttactgtttacagtatgatgatcagaaaatagtaagcggccttcgagacaacacaatcaagatctgggataaaaacacattggaatgcaagcgaattctcacaggccatacaggttcagtcctctgtctccagtatgatgagagagtgatcataacaggatcatcggattccacggtcagagtgtgggatgtaaatacaggtgaaatgctaaacacgttgattcaccattgtgaagcagttctgcacttgcgtttcaataatggcatgatggtgacctgctccaaagatcgttccattgctgtatgggatatggcctccccaactgacattaccctccggagggtgctggtcggacaccgagctgctgtcaatgttgtagactttgatgacaagtacattgtttctgcatctggggatagaactataaaggtatggaacacaagtacttgtgaatttgtaaggaccttaaatggacacaaacgaggcattgcctgtttgcagtacagggacaggctggtagtgagtggctcatctgacaacactatcagattatgggacatagaatgtggtgcatgtttacgagtgttagaaggccatgaggaattggtgcgttgtattcgatttgataacaagaggatagtcagtggggcctatgatggaaaaattaaagtgtgggatcttgtggctgctttggacccccgtgctcctgcagggacactctgtctacggacccttgtggagcattccggaagagtttttcgactacagtttgatgaattccagattgtcagtagttcacatgatgacacaatcctcatctgggacttcctaaatgatccagctgcccaatctgaacccccccgttccccttctcgaacatacacctacatctccagataaataaccatacactgacctcatacttgcccaggacccattaaagtttgcggtatttaacgtatctgccaataccaggatgagcaacaacagtaacaatcaaactactgcccagtttccctggactagccgaggagcagggctttgagactcctgttgggacacagttggtctgcagtcggcccaggacggtctactcagcacaactgactgcttcagtgctgctatcaaaagatgtcttctatcttttgtgaatgattggaacttttaaacctcccctcctctcctcctttcacctctgcacctagttttttcccattggttccagacaaaggtgacttataaatatatttagtgttttgccagaatctctcttgctttgccattaagcagaagaactagtttccctgtatagcctgctgggagagacccacttctagggtatgggggatgcagcttcaagcccagtgcccagtgtctccctgttaactgcaggaatgccaagcacctggccagagcagcccagccccaatatgcttaggaggagacagagttccctctgtatagcctctgggacaagaaaaagaaaacacaagaatgtatacactggaagatttgggcctcctgcctgccttctctttgtttctgttcctcttcccatctactcccctacgccccttcaaccttttttctctgtctgcttcacctgagaagaaagtgtatgaagagagtgtcctcctctcgcatgagccagatcagccagaaaatgcaacacttggaagagttaaatgctgttcagtgaagatttcagccccaggcctttgctgcaagtgaccctgtggcaacagtggattctcagacatgatactctcatcatatttgcaactcttctctctctttcttccccacacccaagaggaggattggtggtagggggcaggcagagggggtggggagaagtttcctgggctccatcaatggctgcatcttttctggactcagcagtctccttgattccatgtagagtgttggaaaggagtt

SEQ ID NO: 91729 - DNA, 2176 bp, Homo sapiens
ggaggcgaggcttgtcggctgtcaaaggggcggcccggcccggcccggaagctacagcagcggcgcggagactgcggggcgggccatggcggcgaacctgagccggaacgggccagcgctgcaagaggcctacgtgcgggtggtcaccgagaagtccccgaccgactgggctctctttacctatgaaggcaacagcaatgacatccgcgtggctggcacaggggagggtggcctggaggagatggtggaggagctcaacagcgggaaggtgatgtacgccttctgcagagtgaaggaccccaactctggactgcccaaatttgtcctcatcaactggacaggcgagggcgtgaacgatgtgcggaagggagcctgtgccagccacgtcagcaccatggccagcttcctgaagggggcccatgtgaccatcaacgcacgggccgaggaggatgtggagcctgagtgcatcatggagaaggtggccaaggcttcaggtgccaactacagctttcacaaggagagtggccgcttccaggacgtgggaccccaggccccagtgggctctgtgtaccagaagaccaatgccgtgtctgagattaaaagggttggtaaagacagcttctgggccaaagcagagaaggaggaggagaaccgtcggctggaggaaaagcggcgggccgaggaggcacagcggcagctggagcaggagcgccgggagcgtgagctgcgtgaggctgcacgccgggagcagcgctatcaggagcagggtggcgaggccagcccccagaggacgtgggagcagcagcaagaagtggtttcaaggaaccgaaatgagcaggagtctgccgtgcacccgagggagattttcaagcagaaggagagggccatgtccaccacctccatctccagtcctcagcctggcaagctgaggagccccttcctgcagaagcagctcacccaaccagagacccactttggcagagagccagctgctgccatctcaaggcccagggcagatctccctgctgaggagccggcgcccagcactcctccatgtctggtgcaggcagaagaggaggctgtgtatgaggaacctccagagcaggagaccttctacgagcagcccccactggtgcagcagcaaggtgctggctctgagcacattgaccaccacattcagggccaggggctcagtgggcaagggctctgtgcccgtgccctgtacgactaccaggcagccgacgacacagagatctcctttgaccccgagaacctcatcacgggcatcgaggtgatcgacgaaggctggtggcgtggctatgggccggatggccattttggcatgttccctgccaactacgtggagctcattgagtgaggctgagggcacatcttgcccttcccctctcagacatggcttccttattgctggaagaggaggcctgggagttgacattcagcactcttccaggaataggacccccagtgaggatgaggcctcagggctccctccggcttggcagactcagcctgtcaccccaaatgcagcaatggcctggtgattcccacacatccttcctgcatcccccgaccctcccagacagcttggctcttgcccctgacaggatactgagccaagccctgcctgtggccaagccctgagtggccactgccaagctgcggggaagggtcctgagcaggggcatctgggaggctctggctgccttctgcatttatttgccttttttctttttctcttgcttctaaggggtggtggccaccactgtttagaatgacccttgggaacagtgaacgtagagaattgtttttagcagagtttgtgaccaaagtcagagtggatcatggtggtttggcagcagggaatttgtcttgttggagcctgctctgtgctccccactccatttctctgtccctctgcctgggctatgggaagtggggatgcagatggccaagctcccaccctgggtattcaaaaacggcagacacaacatgttcctccacgcggctcactcgatgcctgcaggccccagtgtgtgcctcaactgattctgacttcaggaaaagtaacacagagtggccttggcctgttgtcttcccctattttctgtcccagctcatccgtgtctctgaagaacaaatatgcttttggaccacg

SEQ ID NO: 91730 - DNA, 678 bp, Homo sapiens
tttcgtggcgggtaattcacgtgtccgcgtcatcagtggtacgtgcctacagccatgtcgaaattgtgtctggagaagcacatgacgcagactctccctgatttacaaggctcttcatcatcaggtccctacttaactctaatttcatctcttgtcttatctattatttagtctgatatcatgcattaattatatatactgtacattgatacacagcatttatttgaaagataaacctcttggatgtgactctggagacaagaccagcagctcgagaccattcaatccaaggtataaaatgggagaaaatcagctccatcatggtctgaattgaggatgaggcagaagagcagagaatagcggatgcccaggtggcagcaacttaactcttttcctgtggacttgcggggtctccccacctccactgcgtcgggacatgccgtgtgccgtctttttatccatagctgcctccggcatcagcagagaaattcatgggcagatggagccgcggattaattcttttttccagtcttcctttactttatctggataagattgggcagattgaatttgatcttctatactggggccagggagcagggtggatctagaccatgcagcttttccccactgtcaccaagtttggagcaaggattggctggcattgtcctgtctaac

SEQ ID NO: 91731 - DNA, 1309 bp, Homo sapiens
ttttttttttttgctgctttgacctgacgaatttattgaagagagctctgtccttctcccttctaccgagaagaggcggcttgcagggctggcacctgtccacacctgtcactgggcctttccctgggctaggctgagtgggagcagatgccctcatcctatgtgcagggcctgtgcaggagccatcacaccaccttgttgatgatgacacctagttcttcaatctcacactggacttcatcccccttcttgagaaagacaggaggtttcctgaatacaccgacacctgggggggtcccagttaggatgacatcccctgggtaaaaggtaacaaactgggagacccaggctatcaggtcctctgtcttgaataccatctggttggtgttgccgctctggaccacttccccattcactcggcagcagatctttaagttgtgtggatctgctacactgtccttggtcaccaaggcagggcccagagggcagaaggtgtcgaaggtttttcccagcagccattgtttcccattacgtctcatttgccagtcacgagcactcacgtcatgagccacagtgaagccggccacgtgggccatagcatctgtggccttgatgtgcttgcctttctttccaatgaccacggccagctccacttcccaatctacctcctggctctgtggtgggaggaccacctcatcatagggccccacgatggagctggcaaacttgctgaagatgatgggctccttgggcacgggcacgttctgttctttgcagtggtccacataattcatgcccacacacaccaccttatctggtcgtgtgactggagccaggaaggttacctccgaccgtggtaggactggcaactgggcagccagggctcttcttgccactgagagggtggcctctccctgctctaggaactgcgtcatcgtcttcgggagtgtggggtcaaaggcattgaggttgataacccctccaccattccctgtctccaggcccaagtgaggccccaccaggtggggtgcccggaactgcactagtctcatgtctctggagggttgaaagggccacttctgagcctgcagcagaactgtgagtaaccttcttctaccagacaccagcatcagagcctggccgcggcggccgatcttcctgcgctgtagggttagagctcgcggggccgaaggtcaagggcggcgggcgcctgagcactgccaccagtgaccgcagccagccggggaaatgcagcagctgctaacccagggccactcggccggatcacccgagagaaaagcgggcgcga

SEQ ID NO: 91732 - DNA, 1948 bp, Homo sapiens
tatctttggtcttcagggctttgaccgccctcctcccaggctcggagaggcggtggcagccggcactgcacccagatggactgagagcgcggcggcgggaaggcggcggcggcggcggcagcagcagcagctgcaagagccctcgcagcctcggggcaggacccacgtccacacccgagagcccctccctgggatgactctggggacgacgacgaggctaccaccccagccgacaagagcgagctgcaccacaccctgaagaatctttccctgaagttagatgacctcagcacgtgcaatgacctcatcgccaagcacggcgccgcactccagcgctccctgacagagctggacggcctcaagatcccatctgagagtggggagaagctgaaggtggtgaatgagcgggccaccctcttccgcatcacatccaatgctatgatcaacgcctgcagggacttcttggaactagcagagatacacagtcggaaatggcagcgggcactgcagtatgagcaggagcagcgcgtgcacttggaggaaaccattgagcagctggcgaagcagcacaacagcctcgagcgggccttccacagtgcccctggccggccggccaacccctccaagagcttcattgagggtagcctcttgactcccaaaggagaggacagtgaggaagatgaagataccgagtactttgatgccatggaagactccacatccttcatcaccgtgatcaccgaggccaaggaagacagcagaaaagctgaaggtagcaccgggacaagttccgcggactggagctcagcagacaatgtactagatggtgcctcgctcgtgcccaagggttcatccaaagtcaagaggcgagtccgcattcccaacaagcccaactacagccttaacctctggagcatcatgaagaactgcatcggccgggagctctccaggatccccatgccggtgaacttcaatgagcccctgtccatgctccagcggctgacagaggacctggagtaccaccacctgctggacaaggcagtgcactgcaccagctcagtggagcagatgtgcctggtggccgccttctctgtgtcctcctactccaccacagtgcaccgcatcgccaagcccttcaaccccatgctgggggagaccttcgagctggaccgcctcgacgacatgggcctgcgctccctctgtgagcaggtgagccaccaccccccctcagctgcgcactacgtgttctccaagcatggctggagcctctggcaggagatcaccatctccagcaagttccggggaaaatacatctccatcatgccgctaggtgccatccacttagaattccaggccagtgggaatcactacgtgtggaggaagagcacctcaactgttcacaacatcatcgtgggcaagctctggatcgaccagtcaggggacatcgagattgtgaaccataagaccaatgaccggtgccagctgaagttcctgccctacagctacttctccaaagaggcagcccggaaggtgacaggggtggtgagtgacagccagggcaaggcccattacgtgctgtccggctcgtgggatgaacaaatggagtgctccaaggtcatgcatagcagtcccagcagccccagctctgacgggaagcagaagacagtgtaccagaccctgtcagccaagctgctgtggaagaagtacccgctgccggagaacgcggagaacatgtactacttctcagagctggccctgaccctcaacgagcacgaggagggcgtagcgccaaccgacagccgcctgcggcccgaccagcggctgatggagaagggccgttgggacgaggccaataccgagaagcagcggctggaggagaagcagcgcctgtcgcggcgccggcggctggaggcctgcgggccgggcagcagctgcagctcggaggaag

SEQ ID NO: 91733 - DNA, 1088 bp, Homo sapiens; identical to SEQ ID NO: 59391

SEQ ID NO: 91734 - DNA, 928 bp, Homo sapiens
tttcgtgtgcctagaatgggcattgtctctgctgcccccacccttggaatatctcgcctctccccagtcacctgggggtgggttctgtttgagttaggtgtctgcgcccaccccggagacctctctcgtggaagaggcaagagtgggtgtactggcttcggtcctgacccagggggttggggtgggggcctgactcaccctcccatcactccttccccatttcctttctctcaccctcctgggctccttccttttcccaatccccctctacccccgtccagactatctggctttccctgctcttgctccttcctctcctgtcttctctctccctgctaccttccctccctgcttcccccatttctgtctgccctccttccactttcccatatattcgcctgtgtccttgctgactcctgggcgaggctgagtggcacagtcacttggttccatgtcacctcctcggttccatttcacttcccccatcccatcatgtcctgcggatggtttcctgccctggagtcaaagcgggaccacgtgtcccatcgagttgctggtttttggccatgatgcttgaatccgcgacttccctgggtttttttggcccctcggttttcggggggccctaggccccttcgcccaggaacattttttgtgggttttgtctgcccccggcgagggggataggggacccccaaaaagggactttaatatttaaaaccaacgcacttttactcccgggttttttccattcttttaaaaaccacctttttaccctcttttttattaaggaaaaagaagttttcgggggaaaaaccccagggtcaactcctgtgtgaaatattctgggagacgcttctaaaagccccgctgtccttcgtctttcgttctcctctcttctggtaacgcgttgtaccctggacgagcc

SEQ ID NO: 91735 - DNA, 5007 bp, Homo sapiens
tcagcccaggtggagctgtggagaaggaatctctgggaaagctgacccactggagatgcttgtgtctctaccagctgtgaactagccagtgctctgtcccatctggatgccagccacctcacagagaacctgcccaaagctgcatcagagctggggcaacaacccatgactgaactggacagctcctcagacctcatctcttccccagggaagaagggggccgctcatcctgaccccagcaagacctctgtagacacagggcaagtcagtcggccagagaatcccagccagcctgcatcgcccagggtcaccaagtgcaaggccaggtctccagtcaggctcccccatgagggcagcccctccccgggggagaaagcagcggctccccctgactacagcaagactcgatcagcatcggaaaccagcacaccccacaataccaggagggtggctgccctcaggggagcgggacctggagcagagggaatgacaccagctggtgctgtcctgccaggagaccccctcacatcccaggagcagagacagggagctccaggtaaccacagtaaggctctggaaatgacaggaatccatgcacctgaaagctcccaggagccttccctgctggagggagcagattctgtgtcctcaagggcaccgcaggccagcctctccatgctgccatccactgacaacaccaaagaagcatgtggccatgtctcggggcactgctgcccgggggggagtagagagagccctgtgacggacattgacagcttcatcaaggagctggatgcttctgcagcaaggtctccgtcttcccagacgggggacagtggctctcaggagggcagtgctcagggccacccaccagccggggctggaggtgggagctcctgccgtgccgaaccagtcccggggggccagacctcctccccgaggagggcctgggctgctggtgcccccgcctacccacaatgggcctcccagccttcggttttagattcaattaatcccgacaaacattttactgtgaacaaaaactttctgagcaactactctagaaattttagcagttttcatgaagacagcacctccctatcaggcctgggtgacagcacggagccgtctctgtcatccatgtatggcgatgctgaggattcttcttctgaccctgagtcactcactgaagccccacgagcttctgccagggacggctggtcccctcctcgttcccgtgtgtctttgcacaaggaagatccttcggagtcagaagaggaacagattgagatttgttccacacgtggctgccccaatccaccctcgagtcctgctcatcttcccacccaggctgccatctgtcctgcctcagccaaagttctgtcattaaaatacagcactccgagagagtcggtggccagtccccgtgagaaggtcgcctgcttgccaggctcatacacttcaggcccagactcttcccagccatcatcactcttggagatgagctctcaggagcatgaaactcatgcggacataagcacttcacagaaccacaggccctcgtgtgcagaagaaaccacagaagtcaccagcgctagctcagccatggaaaacagtccgctgtctaaagtagccaggcattttcacagtccgcccatcattctcagctcccccaacatggtaaatggcttggaacatgacctgctagatgacgaaaccctgaatcaatacgaaacaagcattaatgcagctgccagtctgtcctccttcagtgtggatgtccctaagaatggagaatctgttttggaaaacctccacatctctgaaagtcaagacctggatgacttgctacagaaaccaaaaatgatcgctaggaggcccatcatggcctggtttaaagaaataaataaacataaccaaggcacacatttgaggagcaaaaccgagaaggaacaacctctaatgcctgccagaagtcccgactccaagattcagatggtgagttcaagccaaaaaaagggcgttactgtgcctcatagccctcctcagccgaaaacaaacctggaaaataaggacctgtctaagaagagtccggcagaaatgcttctgactaatggtcagaaggcaaagtgtggtccgaagctgaagaggctcagcctcaagggcaaggccaaagtcaactctgaggcccctgctgcgaatgctgtgaaggctggggggacggaccacaggaaacccttgatctcaccccagacctcccacaaaacactttctaaggcagtgtcacagcggctccatgtagccgaccacgaggaccctgacagaaacaccacagctgcccccaggtccccccagtgtgtgctggaaagcaagccacctcttgccacctctgggccactgaaaccctcagtgtctgacacgagcatcaggacatttgtctcgcccctgacctctcccaagcctgttcctgagcaaggcatgtggagcaggttccacatggctgtcctctctgaacccgacagaggttgcccaaccacccctaaatctcctaagtgtagagcagagggcagggcgccccgtgctgactccgggccggtgagtccggcagcgtctaggaacggcatgtccgtggcagggaacagacagagtgagccgcgcctggccagccatgtggcagcagacacagcccaacccaggccgactggcgaaaaaggaggcaacataatggccagcgatcgcctcgaaagaacaaaccagctgaaaatcgtggagatttctgctgaagcagtgtcagagactgtatgtggtaacaagccagctgaaagcgacagacggggagggtgcttggcccagggcaactgtcaggagaagagtgaaatcaggctctatcgccaggtcgcagaatcatccacaagtcatccatcctcactcccatctcatgcctcccaggcagagcaggaaatgtcacgatcattcagcatggcaaaactggcgtcctcctcctcctcccttcaaacagccattagaaaggcagaatactcccagggaaaatcaagcctgatgtcagactcccgaggggtgcccagaaacagcattccagggggcccctcgggggaggaccatctctacttcaccccaaggccagcgaccaggacctactccatgccagcccagttctcaagccattttggacgggagggtcaccccccacacagcctgggtcgctctcgggacagccaggtccctgtgacaagcagtgttgtccccgaggcaaaggcatccagaggtggtcttcccagcctggctaatggacagggcatatatagtgtaaagccgctgctggacacatcgaggaatcttccagccacagatgaaggggatatcatttcagtccaggagacgagctgcctagtcacagacaaaatcaaagtcaccagacgacactactgctatgagcagaactggccccatgaatctacctcatttttctctgtgaagcagcggatcaagtcttttgagaacctggccaatgctgaccggcctgtagccaagtccggggcttccccatttttgtcggtgagctccaagcctcccattgggaggcggtcttccggcagcattgtttccgggagcctgggccacccaggtgacgcagcagcaaggttgttgagacgcagcttgagttcctgcagcgaaaaccaaagcgaagccggcaccctcctgccccagatggccaagtctccctcaatcatgacactgaccatctctcggcagaacccaccagagaccagtagcaagggctctgattcggaactaaagaaatcacttggtcctttgggaattcccaccccaacgatgaccctggcttctcctgttaagaggaacaagtcctcggtacgccacacgcagccctcgcccgtgtcccgctccaagctccaggagctgagagccttgagcatgcctgaccttgacaagctctgcagcgaggattactcagcagggccgagcgccgtgctcttcaaaactgagctggagatcacccccaggaggtcacctggccctcctgctggaggcgtttcgtgtcccgagaagggcgggaacagggcctgtccaggaggaagtggccctaaaaccagtgctgctgagacacccagttcagccagtgatacgggtgaagctgcccaggatctgccttttagaagaagctggtcagttaatttggatcaacttctagtctcagcgggggaccagcaaagattacagtctgttttatcgtcagtgggatcgaaatctaccatcctaactctcattcaggaagcgaaagcacaatcagagaatgaagaagatgtttgcttcatagtcttgaatagaaaagaaggctcaggtctgggattcagtgtggcaggagggacagatgtggagccaaaatcaatcacggtccacagggtgttttctcagggggcggcttctcaggaagggactatgaaccgaggggatttccttctgtcagtcaacggcgcctcactggctggcttagcccacgggaatgtcctgaaggttctgcaccaggcacagctgcacaaagatgccctcgtggtcatcaagaaagggatggatcagcccaggccctctgcccggcaggagcctcccacagccaatgggaagggtttgctgtccagaaagaccatccccctggagcctggcattgggagaagtgtggctgtacacgatgctctgtgtgttgaagtgctgaagacctcggctgggctgggactgagtctggatgggggaaaatcatcggtgacgggagatgggcccttggtcattaaaagagtgtacaaaggtggtgcggctgaacaagctggaataatagaagctggagatgaaattcttgctattaatgggaaacctctggttgggctcatgcactttgatgcctggaatattatgaagtctgtcccagaaggacctgtgcagttattaattagaaagcataggaattcttca

SEQ ID NO: 91736 - DNA, 478 bp, Homo sapiens
gattttctcggccctgccagcccccaggaggaaggtgggtctgaatctagcaccatgacggaactagagacagccatgggcatgatcatagacgtcttttcccgatattcgggcagcgagggcagcacgcagaccctgaccaagggggagctcaaggtgctgatggagaaggagctaccaggcttcctgcagagtggaaaagacaaggatgccgtggataaattgctcaaggacctggacgccaatggagatgcccaggtggacttcagtgagttcatcgtgttcgtggctgcaatcacgtctgcctgtcacaagtactttgagaaggcaggactcaaatgatgccctggagatgtcacagattcctggcagagccatggtcccaggcttcccaaaagtgtttgttggcaattattcccctaggctgagcctgctcatgtacctctgattaataaatgcttatgaaatgaaaaaaaaa

SEQ ID NO: 91737 - DNA, 1729 bp, Homo sapiens; identical to SEQ ID NO: 59279

SEQ ID NO: 91738 - DNA, 4179 bp, Homo sapiens; identical to SEQ ID NO: 82026

SEQ ID NO: 91739 - DNA, 2357 bp, Homo sapiens
cgtgacttcagtaaagggaacccggggctctcgcagccagccctcctgcccatggaggacagtttccttcaatcttttgggaggctgagcctccagccccagcagcagcagcagcggcagcggccgccccggccgcccccgcgggggtacacctcctcgccgccacagctttaggaaacacctctacctcctgcgaggcctcccgggctccgggaaaactacactggccagacaattgcagcatgactttcccagggccctgattttcagcacggatgattttttcttcagggaagatggtgcctatgagttcaatcctgacttcctggaggaagctcatgaatggaaccaaaaaagagcaagaaaagcaatgaggaatggcatatcccccattattattgataataccaacctccacgcctgggaaatgaagccctatgcagtcatggcacttgaaaataactatgaagttatattccgagaacctgacactcgctggaaattcaacgttcaagagttagcaagaagaaacattcatggtgtctcaagagaaaaaatccaccgaatgaaagaacggtatgaacacgatgttacttttcacagtgtgcttcatgcagaaaagccaagcagaatgaacagaaaccaggacaggaataatgcattgccttccaacaatgccagatactggaattcctacacagagtttccaaaccggagggcccacggtggatttacaaatgagagctcctatcacagaaggggcggttgtcaccatggatattagaggcctatcttacagccaggcagaattttcctaagtcagtttctacttcaggttttgttattttttgttgcattttagtcagagctccaattccagtgtaaatagctgaactcaaaagtttctgagcaaagtcattatgttcactttcttcaccaaaatttgttaaagtgcttctatatgcatggtctgatgctgggaattctgcagatttgagtaaacagtctctttctctagggtaagaatttgaaaccaaaacttgagaacacacccaagaatatatttacataggttcatagatgaaataaagtgtttatattatatataagcttcagtaccatttgctctgaagtgatctatttattttttcaggaaattcatctccatcggtaaagttgggaaggtggagagaagtggtgggggggcattgctacttatcaaagtgccattgctactttgataatctatgtatctaaaaatgtgagatgtgcgactcttatgatactgattttcctttaatgttaatatgccagaaagcatacatctaagggaacattgtccttcaaagtagacactttgggaagttatttctttattttaatgatgtatcattgttaaaaatgctgtcaaatccttaatagctacaggagctactgagggaaatcagtgtcattatttaaagtcacgccttgtgtttttactactttattcagcaggattaaacctgaataacttttggctgttgtgctaatagtgtaaataaaataagcctgccttcataaaacactaacttttaaaaggaataaacgacttctaaaattatgcctattaacatgtgtaattagtcggcagctcaaatgtttgggagtgcaagaaattaggcaccccaggatataggtcatacagggatatataaaagccatgctcattacaaaatgagcagttgatgttttatgtggcattaagacaatcaagtcctcacaactctggaatgtcttcttatactgatgctgaatttatgaatcccaaattaatttcccaacaggttggaatccagatttaatgtgagatccatgatagacaagacccacagaggaccgtatgcctcctatttccttgttggccaacagcttctttctaatgttctgtgaaaaattattttaagtgtcttatataatggtgcttttatggttattaaaaattgtaaatggtatcacatttatatggatttgtcattggatctttttttggttcaacaataaaaaaatttaattacctaaatgccaagaaactcaacaatataccagtttttctgtatcacaggcttatttaccagtcttttttttaataaataggaatcgtaaaggtaatgacaaaagcagccttataatttagttgcttatatatttgatctgtgtacatgagactgttttaacgttatctgacactactgaaacctgctcgacatctccatgactaccaacaccatgtgtaatgttttcttcactaacattttaaaaactggtatctcctttgagtaagtttggctgacaatagtaaatcccaatgaatctaa

SEQ ID NO: 91740 - DNA, 2140 bp, Homo sapiens
  misc_feature (1)...(2140): n = a,t,c or g
cgttagcccagtcaagcccagccaagcccagccaagccccgccgatcgcgggcaccggagccagccccgcagcgggagcctaacccagaggaagtggagactcctttactgcacatctgtctgctccaggccaggcactgttctaggagccaggatacagaggtggagacagaaacaaacaaaccgataactgtatacaatactctaacgtcagagggaccacagagcaccagcctgcatggaacttccttcctcactcagcttcccacgttgccagctgggacaggggagatggagtaattttgctgtggaaagacttcacgtcttgccgaatgaaagtcccgcctgtctgtcacgctgatgcccgtgcagctgtctgagcacccggaatggaatgagtctatgcactccctccggatcagtgtggggggccttcctgtgctggcgtccatgaccaaggccgcggacccccgcttccgcccccgctggaaggtggtcctgacgttctttgtgggtgctgccatcctctggctgctctgctcccaccgcccggcccccggcaggccccccacccacaatgcacacaactggaggctcggccaggcgcccgccaactggtacaatgacacctaccccctgtctcccccacaaaggacaccggctgggattcggtatcgaatcgcagttatcgcagacctggacacagagtcaagggcccaagaggaaaacacctggttcanttacctgaaaaagggctacctgaccctntcagacagtggggacaaggtggccgtggaatgggacaaagaccatggggtcctggagtcccacctggcggagaaggggagaggcatggagctatccgacctgattgttttcaatgggaaactctactccgtggatgaccggacgggggtcgtctaccagatcgaaggcagcaaagccgtgccctgggtgattctgtccgacggcgacggcaccgtggagaaaggcttcaaggccgaatggctggcagtgaaggacgagcgtctgtacgtgggcggcctgggcaaggagtggacgaccactacgggtgatgtggtgaacgagaacccggagtgggtgaaggtggtgggctacaagggcagcgtggaccacgagaactgggtgtccaactacaacgccctgcgggctgctgccggcatccagccgccaggctacctcatccatgagtctgcctgctggagtgacacgctgcagcgctggttcttcctgccgcgccgcgccagccaggagcgctacagcgagaaggacgacgagcgcaagggcgccaacctgctgctgagcgcctcccctgacttcggcgacatcgctgtgagccacgtcggggcggtggtccccactcacggcttctcgtccttcaagttcatccccaacaccgacgaccagatcattgtggccctcaaatccgaggaggacagcggcagagtcgcctcctacatcatggccttcacgctggacgggcgcttcctgttgccggagaccaagatcggaagcgtgaaatacgaaggcatcgagttcatttaactcaaaacggaaacactgagcaaggccatcaggactcagcttttataaaaacaagaggagtgcacttttgttttgttttgttctttttggaactgtgcctgggttggaggtctggacagggagcccagtcccgggccccatagtggtgcgggcactggacccccgggccccacggaggccgcggtctgaactgctttccatgctgccatctggtggtgatttcggtcacttcaggcattgactcaaggcctgcctaactggctgggtcgtttcttccatccgacctcgtttcttttctttcctatgttcttttgttcagtgaatatccctagagctcctaccatatgtcaggccctatgcctcacccttgagaacgcagtagagcatgaggtggacctggtttgctgggaaccccaggtcacccccgttttcttcctactctgtgcctggagcatcatgtccacccctgcagatccttggaaaagaaaatgtttatgttgcagggtattgcatggtcacgagtgagggcaggcccctgggggacacatctgcccacagcttgcacaggccaggg

SEQ ID NO: 91741 - DNA, 2227 bp, Homo sapiens
cccacgcgtccgggaagcggaagtgccggtggagcgcgagtaggaagtggtgagttcggagtagagatggccgcgcttgcaccgctgcccccgctccccgcacagttcaagagcatacagcatcatctgaggacggctcaggagcatgacaagcgagaccctgtggtggcttattactgtcgtttatacgcaatgcagactggaatgaagatcgatagtaaaactcctgaatgtcgcaaatttttatcaaagttaatggatcagttagaagctctaaagaagcagttgggtgataatgaagctattactcaagaaatagtgggctgtgcccatttggagaattatgctttgaaaatgtttttgtatgcagacaatgaagatcgtgctggacgatttcacaaaaacatgatcaagtccttctatactgcaagtcttttgatagatgtcataacagtatttggagaactcactgatgaaaatgtgaaacacaggaagtatgccagatggaaggcaacatacatccataattgtttaaagaatggggagactcctcaagcaggccctgttggaattgaagaagataatgatattgaagaaaatgaagatgctggagcagcctctctgcccactcagccaactcagccatcatcatcttcaacttatgacccaagcaacatgccatcaggcaactatactggaatacagattcctccgggtgcacacgctccagctaatacaccagcagaagtgcctcacagcacaggtgtagcaaagtaatactatccaaccctactccacaagactatacctgccattgatcccgcacttttcaatacaatttcccagggggatgttcgtctaaccccagaagactttgctagagctcagaagtactgcaaatatgctggcagtgctttgcagtatgaagatgtaagcactgctgtccagaatctacaaaaggctctcaagttactgacgacaggcagagaatgaagcctttgtatgacagacccatgtatttttggcatgaggaactaacagtccattactctatcttcagcctatcaggatcacagttttaaggaagacttggttttgttgaatatgacaatgaaatctgtgtgtatcagatttttattgaagcattcatcagcagcctcaaccagttttcattgtccatttactagattcaatcgtctctgagtatatagggctgatgttagcaagaccctaaaaatgtccattgaaccctgcttcaaaaaatgaaaacacacctctataaaatgtgtactgggaataagctttgtatttacatacattaggggaattttttaaaatctgtaatgtttggacaaacagatgatattactttgctataaaattataaatgtaacttttaataaagatagccagaatattctaaattagaaattacgtttttgtttccctcaagacataaaacaaatataaacattctaaactgctggatgaatctgaaaagacattaagttcaaattttaatttattctcatattaaatataactccattaaaagtttaaaatttcatgggagaaaatataataaggtaaagaggtagaatcactttcagacttaagaataatgttgatttcccaagtgctttaccttatctgttaaagcgtaagatgaattggtatttgcttcataggcagtttgactgcatgtattagagaatgaaaagaagatatttgtagtaatgcctggaaacttggtgctttaaattaaggtactcctctgctgctgtagaatggattccacacagtggatagctatgggtgattcagaatattatgtttagattcccatttgttaagtttataagttttgtggggaattatgaacttactgtgtactacctgcatttgtgctgtgtgaaaaataaatacaaggattcgtttagctaattcaacttactacaaagacaaatgtctgtttttatttgcctgctaggattgtcttttttaaaagtcatttttatttataggaatatgggtgtttctataggaagaaacaggttttttgttttttgttttttaagataaatttgacaaagttaactgaaatttatctggtccattttattcatgctactaagatgggaatctttaaacacaagggtcagcaagctttggcccatggattggccacctgttacgtaaataaagtttctttgaaacaaaaaaaaaa

SEQ ID NO: 91742 - DNA, 583 bp, Homo sapiens
ggcacgagccaaaaggcctttatttttcctcgcgggaaaagggattgcaattactataggttttacaggtatcgcgagatttcgtcaaatctcattacggatcccggctgaaagccattttgtttttcagctcacttcaagggtacctgaagcgaattggcaccaaagcagcagctgtattgccgcagttctagcttcaccttcacgatgtttcccttggtcaaaagcgcactaaatcgtctccaagttcgaagcattcagcaaacaatggcaaggcagagccaccagaaacgtacacctgattttcatgacaaatacggtaatgctgtattagctagtggagccactttctgtattgttacatggacatatgtagcaacacaagtcggaatagaatggaacctgtcccctgttggcagagttaccccaaaggaatggaggaatcagtaatcatcccagctggtgtaataatgaattgtttaaaaaacagctcataattgatgccaaattaaagcactgtgtacccattaagatatggcattattgaagaaataaagtacatttgaaaccttcaaaaaaaaaa

SEQ ID NO: 91743 - DNA, 4866 bp, Homo sapiens
tttcgtgctgtggctgcggaggttgaggggcgtccgaggcgcggaggggctggctgggcaggaggggttggcggggcagcagggccgcggccatggggagcttgaaggaggagctgctcaaagccatctggcacgccttcaccgcactcgaccaggaccacagcggcaaggtctccaagtcccagctcaaggtcctttcccataacctgtgcacggtgctgaaggttcctcatgacccagttgcccttgaagagcacttcagggatgatgatgagggtccagtgtccaaccagggctacatgccttatttaaacaggttcattttggaaaaggtccaagacaactttgacaagattgaattcaataggatgtgttggaccctctgtgtcaaaaaaaacctcacaaagaatcccctgctcattacagaagaagatgcatttaaaatatgggttattttcaactttttatctgaggacaagtatccattaattattgtgtcagaagagattgaatacctgcttaagaagcttacagaagctatgggaggaggttggcagcaagaacaatttgaacattataaaatcaactttgatgacagtaaaaatggcctttctgcatgggaacttattgagcttattggaaatggacagtttagcaaaggcatggaccggcagactgtgtctatggcaattaatgaagtctttaatgaacttatattagatgtgttaaagcagggttacatgatgaaaaagggccacagacggaaaaactggactgaaagatggtttgtactaaaacccaacataatttcttactatgtgagtgaggatctgaaggataagaaaggagacattctcttggatgaaaattgctgtgtagagtccttgcctgacaaagatggaaagaaatgcctttttctcgtaaaatgttttgataagacttttgaaatcagtgcttcagataagaagaagaaacaggagtggattcaagccattcattctactattcatctgttgaagctgggcagccctccaccacacaaagaagcccgccagcgtcggaaagaactccggaagaagcagctggctgaacaagaggaactggagcgacaaatgaaggaactccaggccgccaatgaaagcaagcagcaggagctggaggccgtgcggaagaaactggaggaagcagcatctcgtgcagcagaagaggaaaagaaacgccttcagactcaagtggaacttcaggccaggttcagcacagagctggaaagagagaagcttatcagacagcagatggaagaacaggttgctcaaaagtcctctgaactggaacagtatttacagcgagtacgggagctggaagacatgtacctaaagctgcaggaggctcttgaagatgagagacaggcccggcaagatgaagagacagtgcggaagcttcaggccaggttgttggaggaagagtcttccaagagggctgaactagaaaagtggcacttggagcagcagcaggccattcagacaaccgaggcggagaagcaggagttggagaatcagcgtgtcctgaaggaacaggccctgcaggaggccatggagcagctggaggagcttgagttagaacggaagcaagcacttgagcagtacgaggaagttaaaaagaagctggagatggcaactaataagaccaagagctggaaggacaaagtggcccatcatgaaggattaattcgactgatagaaccaggttcaaagaaccctcacctgatcactaactggggacctgcagctttcactgaggcagaacttgaagagagagagaagaactggaaagagaaaaagaccacggagtgactgagcttgctggcagtcacgtcagttatgtagatactgcatggcaggagagctttacgctaaagacaaaagaaacagctttgggggccgggcgtggtggctcacgcctgtaatcccagcacttttgggaaggccgaggcgggtggatcacctgaggtcaggagttcaagaccagcctggccaaccttggttgaaaccctgttctctactaaaaatacaaaaaaaattagctgagcgtggtggcgggcgcctgtaatcccagctacttgggaggctgaggcaggagaatcacttgaacgtgggaggcggaggttgcagcgagctgagatcatgccgttgtactccagcttgggcaacagagtgagactccatctcaaaacaaaacaaaacaaaacaaaacaaaaaaacccggctttgctgcttttaactcttcttccttctgtgcctctctaagtgggtcagtatcctaaggaagccttcttatttatcttcctgcaaacaagggttacctgaaaagaaaaaaaaagtcaacattgtcaagctgtttgtttactctttctttgaaaacatcaccttctgaaatttgtcttttagctctctcagattcttccccaaatgaggcagggtgcagacagcacagtcagctctgcagagtttggaggggctcactgccactgggtactcagaacctctgtggactggatgtcagctctttcctttggcagcgtgtttccttttccgagtatgtgctgttaaactagattggccggttcgctttccatttcctgacacttgacatggaatgcctttgaccattggtgctctgacagagaagtcatggagtcattgccatttcctggttgcccttttggaatgtgatcctgttagtagaggttttctagcttctactaagatatttctttccctaaccatcatacacttggcatgtttcattcccatctcctttcccctcaccttaaaggagactacccctttgccccatattgtcaacctaattttctctcgtactctctctagtgaatgatgtgctaccaagtatatgccaggctgtgagaggattatactgagtagtagaaagaagctaatttgaaataaaaattatttgtataattaagaaagcagattagatgcacatggtcaacaggaagttgactgtatgtctgctagttagattcaaaacatcataaagatgatagcatgtcaatatattagcctagccattatgttagcctttgttaggtgggcagcttttctgctttttcccttcctctgtggtgacaacggaggaaatatccaacagaaatacgtctaacagggaaattgggatcatagtttatatgcatctgatttgaaaggagtattgaggaaggttttcatatatgatctatctttggattaaaaagaacatttatgaaatcaagccttctaacactagttataattgagaagcaacagtaactccgtggacagcaatcaagcttaaaattgtaaataaatatggggataattcagttgttgcaaaaaaagggcagaattcagtagaataaagtccttttctcttacaggtattaaatgaggacagagaacctcaggtgttcttatgctagtgcttgctgagtgcatactaagaaagcaattccaaatagatgtatacatctagagagagtggtattagagattcagtgtatgtatttatttacatgagaggaaactggaatataatcccataaattattggaatataatcccataaattatcaccttttatgactggaaaatatttgccaatgaagaaatggtctgtaggtatttgtcttaagatttttggctgtttaataaaaatgtaactttaacggtttcttatagttgcctttataaagtgtattgtctaaaatatttttgtatcatgtgcctttgaaatttgacagctgatttgggtgttggatttctgcccagccatttatcagtattatcattttattcagtagctggcaggtgtattagacaaacgagacttaggtaaggaatggaacctttcctgtggtttgactgcacatcacaccagaagactccagtatccctcattccagaatgaggaaaaagtattctacaaagaacctaatcacctctgtgaaatctatgggatggaaacagtgtggccttaggagtcaaatagtctctgcatggtggggaggatcatgatggaatatgtgaatttctacttctagaagttgtgaaataggtcctgcacttttgcagaatgtccttctttaaacctggcttattccacagctgtagctgataacatgacctggggcttagctgctctagccctgggttcttggagacctcacactgcctggcccctggccatccacctaaggactgcctgctttctggtcacatgtggaccttgatacgactaagcggttacatatgtggttgtgcaaaagctttctgtttaatgcatagtgttaccgatttacatcttggttttcagtggcactatgtctaggaggcaatatccttttaaacagtgctttggctaagatagatacttgtgaatcaaagatagcacagaaatgaactaagtatatcccatttggaattatattttgatactatttaaaatggtttcacctgttaaagggccaacagaactcttggttttacttttgtaattactgtacagaaaatttcaagagtgtttgagtgcttgtcatcaggtgttttccttaataagtagggatatgatcatttacaggaattatatatgaaaaaagtttttgaaatgtatttttgtgatgtgctatgttgaggggaaaccaaatatttatgattttaaaacattcgtatgaaaacattgtacaatgtaatatgctcaactttctcaattttttgctaatttttctaagatacattaaaaatgttttatatttttttttaagtaaaatggacccagtaagaaaattaaaaataccagaacatacacttt

SEQ ID NO: 91744 - DNA, 4881 bp, Homo sapiens
gaattcccgggtcgacgatttcgtcgtcagtcaaaccggttctctgtttgcactcggcagcacgggcaggcaagtggtccctaggttcgggagcagagcagcagcgcctcagtcctggtcccccagtcccaagcctcacctgcctgcccagcgccaggatggccaccatcacctgcacccgcttcacggaagagtaccagctcttcgaggaattgggcaagggagccttctcggtggtgcgaaggtgtgtgaaggtgctggctggccaggagtatgctgccaagatcatcaacacaaagaagctgtcagccagagaccatcagaagctggagcgtgaagcccgcatctgccgcctgctgaagcaccccaacatcgtccgactacatgacagcatctcagaggagggacaccactacctgatcttcgacctggtcactggtggggaactgtttgaagatatcgtggcccgggagtattacagtgaggcggatgccagtcactgtatccagcagatcctggaggctgtgctgcactgccaccagatgggggtggtgcaccgggacctgaagcctgagaatctgttgctggcctccaagctcaagggtgccgcagtgaagctggcagactttggcctggccatagaggtggagggggagcagcaggcatggtttgggtttgcagggactcctggatatctctccccagaagtgctgcggaaggacccgtacgggaagcctgtggacctgtgggcttgtggggtcatcctgtacatcctgctggttgggtaccccccgttctgggatgaggaccagcaccgcctgtaccagcagatcaaagccggcgcctatgatttcccatcgccggaatgggacactgtcaccccggaagccaaggatctgatcaataagatgctgaccattaacccatccaaacgcatcacagctgccgaagcccttaagcacccctggatctcgcaccgctccaccgtggcatcctgcatgcacagacaggagaccgtggactgcctgaagaagttcaatgccaggaggaaactgaagggagccattctcaccacgatgctggccaccaggaacttctccggagggaagagtgggggaaacaagaagagcgatggtgtgaagaaaagaaagtccagttccagcgttcagataatggaatcctcagagagcaccaacaccaccatcgaggatgaagacaccaaagtgcggaaacaggaaattataaaagtgacagagcagctgattgaagccataagcaatggagattttgagtcctacacgaagatgtgcgaccctggcatgacagccttcgaacctgaggccctggggaacctggttgagggcctggacttccatcgattctattttgaaaacctgtggtcccggaacagcaagcccgtgcacaccaccatcctgaatccccacatccacctgatgggcgacgagtcagcctgcatcgcctacatccgcatcacgcagtacctggacgctggcggcatcccacgcaccgcccagtcggaggagacccgtgtctggcaccgccgggacggcaaatggcagatcgtccacttccacagatctggggcgccctccgtcctgccccactgagggaccaggctggggtcgctgcgttgctgtgccgcagagatccactctgtccgtggagtggagctgctggttctcccaggtggattttgctggaattctcccatgtcatcaccccaccaccgtcacttctgtacctgcatcaagaaaacctgcttgttcacaaaagtcatcgcaacttcagagcgaacggccacatctccccacctctcacccccaccctctcccctgccaggctggggcttcctcaggcatgggtgtccacagcactggccccctctccccagcctcagctgctgtccgcctgatctgtcttgggctgtaggctagaatgcccgggctggtgcccaccaggggctggggagaaggaggggtgggatgatgaggaaggcagcatccgtccgtccctctcccagacctctcctcttccagtgtccccggggaagggcagatgacactcccttccccctaagccaaccgcactgaaggagtggggagaagagcatacgccaggagcctcctgcctcaaagtgctcccctaagtcttcttcctcctgtgctgacctcagggtggtctgacccttccctcggtgtgggggatgtggccctctcaggggcccctacttgctttctgcttccttctggggaagtccacctccaacattaacctgcccaccccacccccgtcatccctggagaattccagctttgtcgtatctcagagagggaatctaattgtttttggggggcaaaagaaagcaacgtttaggtatcacttctacttggaccgcatgcctttttatagccaaatttctgtgtatttcgtaaatggatttcgcgttaatggatatttatgtaataactagacttctcagattattgtgagaagggtcaggttggaaggggtgtaggaagaggggtgaggggtagtttttttctgttctagttttttttttttttttttgtcatctctgaggtggaccttgtcacctgtggttattggggccaaggcggactcagctccggggagaagggcctctctgccatttcggtcccaaggtgagctgacacaggcgttccttttgggactgtggaagcatcagatgccagcactgactcaggaacagcaagtcagggcagagaggaggagggaggctgtcaggatggaaatacctggacttttctttgcttccctcgcaaactggggtcttctctaccgaacttcccaggatttcatctcaccatatctgtgtgccgcccccagcaccccccacccacctctggggggcccgtgagcgtgtgtcttcattgcctctctccccttggcgtctgatgaccacagcaaagcactgggaatttctactcttcatgcctcatcctgcagcctcgggttcgcattctctctttcttttcctctttccctctttccctgggattgactctgagtggaataccttggcacatccactaggatctactgtctgcactgttttctttgcatgactttatacgcagtaagtatgttgaaaacaaacaaaaagaagaaaacactcaacaaaaccaatctacatgttttggactaaaaaaaaaaaatagaggttgtattctcagtgtccgactcggaattatgttgctgcctttctgggcttttggcctctggggggccgtgttttgccagcatgagatactgtcccctctggaggattttaggggaggaagagccacgtccccagggattgggaggaggctccggtacccttgaccctcctggggtgttggttggagcagaactgggtgaggatgtttgatccgaaattttctgagctctccccgattcacccagctgtctgctggggttctttttcttcaaagtcctgcttgcccagggcccaggtgagacagggcaacgcagggtctgcaggccaggagagatgctgcccaggcctcctggtttccaagctggtccatcactggcctctgtccttggcagagaccttgctgcccaggcccaggggcaggctcttgggctcaagggcccaagaggttttccccagtaaaggcccagtgatcccattatcccaggggcaaaaccacctgtccccttttgagctgccagttccctacagccatccccagtcaagggtgagggtgtggccttcaccaggggctgctgtaattaccgagcaaggtctgagctcttcttcagcctcagttccctcattggttaaaagggttctttgttcccatccagccgatgaaggagcaaacgtctggctatgtgaagcctaatttacctgcaggaactggcagggatagtcactggctggactcctgtttacttctagacctggtcaggctccatcccctcccccacctgcccctgattcccctcgtcggtgcctgtcaactgcttttcagcagtggactgcaggggaaagagcagtgatttggggtgagtaggcttcaattcccagctctgaccagacttgctgtgtgaccttgggcaagttcctttccctctttggagcttggtttccctgccagaggaaactgagctggaggagcctgaggtcctgcctttcattggctgacacacctcctgtccactgtgtcactctccaagtgccagagaagtggaggcagatcgctaccccaggctgagatggcccccacttgtgaaggccacgcctgtgggtgggcagccacctggtgccaccacagggcaccagggatgatcctgatgcggcaggcaggggagactcacagaaaaatcttgcccagagcctaccctcaccagacaaactctgtggctccctcccaaaacatccctttagatgcaaaataataataaataataataataaataaataaataaaaatccaaacccaagtcaaaaccttggctccagcatgaaaacacgtttacaggaaagtgttctcctgggtttgtgcccaccatggtgcgaatcctgacccaaggcctcctgtctcccttcaaagggagacccttttgggggatgagtttgccagactccccgtgctggtttctttgttactatttgtttggggttttgttttagttctttttttttttttcttttcttttttaaaaatatgtggctgtgaacttgaatgaacactgctcaaactttctgctattgaggggggcgggtgggatgggaagaaggggcgtttgttttattctctggtgttttcagcgcaataaatagctacaaacttctgtgcaaaaaaaaaa

SEQ ID NO: 91745 - DNA, 961 bp, Homo sapiens
tcccgggtcgacgatttcgtaacatggcggtcgcggccgggccggtaacggagaaagtttacgccgacactggcctgtattagcgcgtatggcctcgggccctcgttccccaaggcgtgccgcctccctgttctcagtcgcaggctgaagccttgtctgctctcctcctttttggtttggttttggaactgactccgagggttgggagagcgcgttggtggcgacggccgagtcagatcactataaacaaaatttccacaagagaaaatgttgaaataggagttgcggatacattggatatactggatgaaatacaagcggttaatttttgtaacgtgagggaaaagcccacattgctggttacatgtgtaaatcactgcgttattgctttagtcattgtctctatttagcaatgacaagactggaagaagtaaatagagaagtgaacatgcattcttcagtgcggtatcttggctatttagccagaatcaatttattggttgctatatgcttaggtctatacgtaagatgggaaaaaacagcaaattccttaattttggtaatttttattcttggtctttttgttcttggaatcgccagcatactctattactatttttcaatggaagcagcaagtttaagtctctccaatctttggtttggattcttgcttggcctcctatgttttcttgataattcatcctttaaaaatgatgtaaaagaagaatcaaccaaatatttgcttctaacatccatagtgttaaggatattgtgctctctggtggagagaatttctggttatgtccgtcatcggcccactttactaaccacagttgaatttctggagcttgttggatttgccattgccagcacaactatgttggtggagaagtctctgagtgtcattttgcttgttgtagctctggctatgctgattattgatctgagaatgaaatctttc

SEQ ID NO: 91746 - DNA, 752 bp, Homo sapiens; identical to SEQ ID NO: 59212

SEQ ID NO: 91747 - DNA, 846 bp, Homo sapiens
tttcgtgtcataagctctttgaagagggctagctcattcacttccgagtttccatgtctcagtacctagcacagaacatagaagcggctaatatattggttatatgaacgaatgaatgagccacagaattcatttccttgcaagcatgtcgtgtctccccccaacaagttaaaattagtgaagtgtggatgtggcttcatttcttgggtagtttaatgttccacaccaacttgaatatggtagtctaaccttggatcctttcaaaccacagcaatggtgaactttttagctaagagtttgattcaattcacattagtattcctttttcccaatcactgttttagcaacacagggagtacctgttttcggttaatgcgcttttcatgtttggtataaatccatagtccaatatttcttttggaaaggaagataaatttttcccttgacatcccttttttccattaagttaaaaaaatgttacttagtaaatgtgatttcaaacagctgggttttaatctttccaccttatggaaagagagcgttggctgcagcagcacccccaccacgtgggccagcctcactctgcacacagattttctaacctggatggcgccgatagcgaggcgcttggcgtgtgcatttaggctgtgtcacatggtattctaaactacgtcaccagctccgctggttttttttctatactcttttaggagaatgggaacaaatggaggatataaaccctttttttacagttcacaaatattttgaagactatataccatccgcaaattaatccctgccttatgttgttgttctcaggggaaagaaacacaatttgagtcgttt

SEQ ID NO: 91748 - DNA, 2162 bp, Homo sapiens
cgtctcgacgatttcgtgaaagatggcggcgactctgggaccccttgggtcgtggcagcagtggcggcgatgtttgtcggctcgggatgggtccaggaggttactccttcttcttttgttggggtctgggcaggggccacagcaagtcggggcgggtcaaacgttcgagtacttgaaacgggagcactcgctgtcgaagccctaccagggtgaggcgcccaggccatgtttcctgagagactgggagttgcaggtgcacttcaaaatccatggacaaggaaagaagaatctgcatggggatggcttggcaatctggtacacaaaggatcggatgcagccagggcctgtgtttggaaacatggacaaatttgtggggctgggagtatttgtagacacctaccccaatgaggagaagcagcaagagcgggtattcccctacatctcagccatggtgaacaacggctccctcagctatgatcatgagcgggatgggcggcctacagagctgggaggctgcacagccattgtccgcaatcttcattacgacaccttcctggtgattcgctacgtcaagaggcatttgacgataatgatggatattgatggcaagcatgagtggagggactgcattgaagtgcccggagtccgcctgccccgcggctactacttcggcacctcctccatcactggggatctctcagataatcatgatgtcatttccttgaagttgtttgaactgacagtggagagaaccccagaagaggaaaagctccatcgagatgtgttcttgccctcagtggacaatatgaagctgcctgagatgacagctccactgccgcccctgagtggcctggccctcttcctcatcgtctttttctccctggtgttttctgtatttgccatagtcattggtatcatactctacaacaaatggcaggaacagagccgaaagcgcttctactgagccctcctgctgccaccacttttgtggactgtcacccatgagggtatgggaagggagcagggcattggcctgaggcatgcagcctggagagtgttcttgtctctagcagctggttggggactatattctgtcactggagttttgaatgcagggaccccgcattcccatggttgtgcatggggacatctaactctggtctgggaagccacccaccccagggcaatgctgctgtgatgtgcctttccctgcagtccttccatgtgggagcagaggtgtgaagagaatttacgtggttgtgatgccaaaatcacagaacagaatttcatagcccaggctgccgtgttgtttgactcagaaggcccttctacttcagttttgaatccacaaagaattaaaaactggtaacaccacaggctttctgaccatccattcgttgggttttgcatttgacccaaccctctgcctacctgaggagctttctttggaaaccaggatggaaacttcttccctgccttaccttcctttcactccattcattgtcctctctgtgtgcaacctgagctgggaaaggcatttggatgcctctctgttggggcctggggctgcagaacacacctgcgtttcactggccttcattaggtggccctagggagatggctttctgctttggatcactgttccctagcatgggtcttgggtctattggcatgtccatgggccttcccaatcaagtctcttcaaggccctcaagtgaaagttttggctaaaggttggtgtaaaaaatcaagagaagcctggaagacatcatggatgccatggattagctgtgcaactgaccagctccaggtttgatcaaaccaaaagcaacatttgtcatgtggtctgaccatgtggagatgtttctggacttgctagagcctgcttagctgcatgttttgtagttacgatttttggaatcccactttgagtgctgaaagtgtaaggaagctttcttcttacaccttgggcttggatattgcccagagaagaaatttggctttttttttcttaatggacaagagacagttgctgttctcatgttccaagtctgagagcaacagaccctcatcatctgtgcctggaagagttcactgtcattgagcagcacagcctgagtgctggcctctgtcaacccttattccactgccttatttgacgg

SEQ ID NO: 91749 - DNA, 1613 bp, Homo sapiens
ttccggctgtttgttcgggaagtggatccgccgctgccggagcagcccgaagggagctgcggatcgcgaggccagtaccgaccccgcccgcccgcgcgcaccgcccccgcccgccatggcccgggactacgaccacctcttcaagctgctcatcatcggcgacagcggtgtgggcaagagcagtttactgttgcgttttgcagacaacactttctcaggcagctacatcaccacgatcggagtggatttcaagatccggaccgtggagatcaacggggagaaggtgaagctgcagatctgggacacagcggggcaggagcgcttccgcaccatcacctccacgtattatcgggggacccacggggtcattgtggtttacgacgtcaccagtgccgagtcctttgtcaacgtcaagcggtggcttcacgaaatcaaccagaactgtgatgatgtgtgccgaatattagtgggtaataagaatgacgaccctgagcggaaggtggtggagacggaagatgcctacaaattcgccgggcagatgggcatccagttgttcgagaccagcgccaaggagaatgtcaacgtggaagagatgttcaactgcatcacggagctggtcctccgagcaaagaaagacaacctggcaaaacagcagcagcaacaacagaacgatgtggtgaagctcacgaagaacagtaaacgaaagaaacgctgctgctaatggcacccagtccactgcagagactgcactgcggtccctcccccagcccgaggcccacggaggttcctcgggggacagtctcagcttcgtgccgttatttaaagaattctcttccatgtttttgtattcgggaggtgccatcggaatctccctcccccggcctcctcgagtgccaagaaggtgttggaccagcccgcccttccctactggtgccccctcctccccggccaaggcgcctggacctggcgaggacgctgcccgccgagcggactgattcgcagagtctgtacatagtgtatattgctctacccggccgcacaccacgtcctgctctggcttttgccttcttgatgccagcctgctgcaacagaccctccccgcgcccctccccagcccatcttactgcaagcagcgtcctgaggagacagcggcacgttctagctgcgtctgcggccagcccgtgccagtggagtgggctccgcgttgctcattctctccgacaggttgtcagcctctgtccccgctgcacagggtcttgccccttctccggggcctgtgccagctcccttccctccccgttgtcctgtccccacagccattctgggagctggggaacctggtctcaaggcaggccctgcagttccacagaggtggcaggtcttgccctttggccaacagatttcttgtcctgccttctagatgcctctgagctccaaacccagggcagccatggcttctcatttacaccaacaggtttcagttccaacagaaaggtcggggtaggttcgtgcagagatggggctggcaggggggctatgggaggattattttaacagatcaagaaaatgaagccaaatcaagtgaattaaattcctcacaattaaaaaaaaaa

SEQ ID NO: 91750 - DNA, 2066 bp, Homo sapiens
gagaaagcagggactcttcggcctaggcagccgggacccagccagccctgcgcctcgcgccgtcgcgcatgcgtcctgggtatgtccacgcgcaataaggaggggcgaaaggacattttttttttttcttgctcccgcctctgttcttcccccacctgccacgtacagagcccaagttctcgctaggcttgttgggtcagcgcgattggccggggcccgcgcgagcctgcgagcgaggtgcggcggtcgcgaagggcaaccgagggggccgtgaccaccgcctccccgcgacgccccagtccagtggcctcgcgtccgcccattcagcggagacctgcggagaggcggcggccgcggcctccgcaagccgtctttctctagagttgtatatatagaacatcctggagtccaccatgaacggacagttggatctaagtgggaagctaatcatcaaagctcaacttggggaggatattcggcgaattcctattcataatgaagatattacttatgatgaattagtgctaatgatgcaacgagttttcagaggaaaacttctgagtaatgatgaagtaacaataaagtataaagatgaagatggagatcttataacaatttttgatagttctgacctttcctttgcaattcagtgcagtaggatactgaaactgacattatttgttaatggccagccaagaccccttgaatcaagtcaggtgaaatatctccgtcgagaactgatagaacttcgaaataaagtgaatcgtttattggatagcttggaaccacctggagaaccaggaccttccaccaatattcctgaaaatgatactgtggatggtagggaagaaaagtctgcttctgattcttctggaaaacagtctactcaggttatggcagcaagtatgtctgcttttgatcctttaaaaaaccaagatgaaatcaataaaaatgttatgtcagcgtttggcttaacagatgatcaggtttcagggccacccagtgctcctgcagaagatcgttcaggaacacccgacagcattgcttcctcctcctcagcagctcacccaccaggcgttcagccacagcagccaccatatacaggagctcagactcaagcaggtcatcagattgaaggtcagatgtaccaacagtaccagcaacaggccggctatggtgcacagcagccgcaggctccacctcagcagcctcaacagtatggtattcagtattcagcaagctatagtcagcagactggacctcaacaacctcagcagttccagggatatggccagcaaccaacttcccaggcaccagctcctgccttttctggtcagcctcaacaactgcctgctcagccgccacagcagtaccaggcgagcaattatcctgcacaaacttacactgcccaaacttctcagcctactaattatactgtggctcctgcctctcaacctggaatggctccaagccaacctggggcctatcaaccaagaccaggttttacttcacttcctggaagtaccatgacccctcctccaagtgggcctaatccttatgcgcgtaaccgtcctccctttggtcagggctatacccaacctggacctggttatcgataaggaggctcctctacaccaattaatgtagctgctagctattggcctcccaaaagactccagtactattttaatttgtattgaagaagttcagaaatttaaaagcagagcattttttatgatatcattgttggtgttaattgaaagtataatttgctggaacacaaagaccaaaatgaaagttttttcctccctgcttaaaaatgtagcagcttcttagttactttggaacactactcttacatgtataaagtgattgacttgactttctagcttcccttgtccggaggatattaaaatgctagggtgaggtttagccatcttacttggctttttactattaacatgatgtactaaagtagagccctttgagaatacaagatattatgtataaaatgtaacactgatgataggttaataaagatgattgaatccattaaaaaaaaaaaa

SEQ ID NO: 91751 - DNA, 920 bp, Homo sapiens
gcggccgccgcctcccaccgctcccgcgcccgctcccgcccccggcgcgtctcctccgggcccgcgccgcggcgggctcagtcctcagcggggcgcgtggcgagcggactcgactcggcaccgctgtgcaccatggcccgggccctgtgccgcctcccgcggcgcggcctctggctgctcctggcccatcacctcttcatgaccactgcctgccaggaggctaactacggtgccctcctccgggagctctgcctcacccagttccaggtagacatggaggccgtcggggagacgctgtggtgtgactggggcaggaccatcaggagctacagggagctggccgactgcacctggcacatggcggagaagctgggctgcttctggcccaatgcagaggtggacaggttcttcctggcagtgcatggccgctacttcaggagctgccccatctcaggcagggccgtgcgggacccgcccggcagcatcctctaccccttcatcgtggtccccatcacggtgaccctgctggtgacggcactggtggtctggcagagcaagcgcactgagggcattgtgtaggcggggccccaggctgcccgcgggtgcaccccaggcttgcagggtgaggccaggcaggcctgggtaggggcagcttctggagccttgggacagagcaggcccacaatgccccccttcttccagccaagaagagctcacaggagtccagagtagccgaggctctggtattaacctggaagcccccctggctggaggccaccgccaccctaggaagggggcagggacgtgaccttgacttacctctggaaagggtcccagcctagactgcttaccccatagccacatttgtggatgagtggtttgtgattaaaagggatgttcttgaacttggaaaaaaaaaa

SEQ ID NO: 91752 - DNA, 466 bp, Homo sapiens
attcccgggtcgacgatttcgtaccaggcactgtgtgaggccctggaaatagaaaggtgtgtgagaaccacacttaacacggcttggctggaatgacaaatgcatgcgtggtttgttacttttaaaggttgcaagtcttgcagtacctgaagtttctgcaagacttcactgtgttgaaggtgatctgaaatgggggtacagaaacaagaacaggagtagggtgcactggtcataaatactgtctggagggggatggggagacactccctggtggcggcctcccctgcagccatagtcgggctgtttgcccaggagaatgctgccgcaccacgctctgtactttgacatttcgtaggttgatgcataggaaattcatcatatccaggtctttttctcctacaaaatctacaaggtcacgtggttctgctggacacttgcccctgctcctgttgagtccaggatcctc

SEQ ID NO: 91753 - DNA, 1662 bp, Homo sapiens
  misc_feature (1)...(1662): n = a,t,c or g
ttttttttttttatggtaagcaaaataaattgtatttttccatccttggggaggataaaggaactctttgcactgctataataaacagcccccaaatgccagtggtttaattcagtggagttcagacctcattcctatatcattgcagtgtggatgctcctggatgaaggctcttgtaggtaactctcctccagtcggtgattcagggacccagcctccttctgccttgcggctttgccttttaaaggtcctcagggtgctctccatgtatcttgccaatggggaacgagtgtggaggactcacaagcgggtctcacatcacgtcctccggggctaatacacatcccttctccccacactctgttggtcagaagtcactgcttggcgccctgctacctttccttctcctccaccacaggaggaggaggcacagcagtcccaaaatgacagttttgagcacagcgacagccaatgcaaccctgatggcagtgtccagacttaggtgccatgattctgagtgccctttgctttctgtgaccctgaggccggctatggtggttgtgctgctgggcctccaggtggtggtggttgtgacagcctgggtgatggtgagtttggtccccttgatggactgcaactgctgcctccctgatctccgggtgtccagctcgactcggcagaaatacacagactggtcctccttccgcaggtttgagatcctgaggaagccgctctcctgaccctctgtccagttcagaaagagccggttcacataatccttgtgaatggaaggcggccttgtgctgtagaaggactgcccgtggaagtggccccgtctccaggatattctcacgttgggaactatggctaactcccaggggtaatagaaggagaaggggatttccacagagccacccatggaggctgagaggtgttttggttgagtgaccccataaaggtagcttggaccagatcctgtggagccaccaggctgcagaaatgctggcggctgcagcaggagcagcaggggcagcagcaggggccgacccatggccttgttcttctccaggggacggggagaccagcagagctgtccaggcaggagaggggccctgtggaggggctgcctgagggcctgggtgatggtgaggtgggtccccttgatggactgccacgacagcctccctgatctgtatgtccagctggacttggcagaagtacacagactggtcctccttccgcaggttcgagatcctgaggaagcctcccttgttcttgctttccccttgagatcaggaatgaggcacagatgtctgctctcactgcctcccttcacggtactggagtcctagccagcgcgctatgcctggcttctgcctcccaggggtggagacttcctccccaatctcttcacccccaaagaagcacagccaaggcccatgtcagaggaactgtgttgctgacttagtcacagcaggaaacgactggaatggggtactgttgctcacacactcacacctgtgcccacacacacccacacatgcacacacacagaccacatctgcagcaggtgggcctggccaggcacctgtgggactcttanaattccgcgncnctgcgggactanacttaagggncgctgaaanggcgcctcngccacct

SEQ ID NO: 91754 - DNA, 2089 bp, Homo sapiens; identical to SEQ ID NO: 59815

SEQ ID NO: 91755 - DNA, 1042 bp, Homo sapiens
ttgattacaagtgtttttggcggagtaagaaactgaaacccaaaaacagaatatccagaatgcctagtgtaccatgccacctgcttggtgtatatcttcttcttacactttgggaggaaacaagtggtgtcctttacataccaaatcgcaagggtatgtttggagaggccttggcattgatcttgccactccctcgcctctgcctcattatgcccaagaacacttttgatcacgtctgtctgggcttaggactgtggtcagaggctatggaaaaggtttggggatttttttactttgtgtaactgattaattgttcatttgggtagtgatattatgactatggctaaatttgcattgtcttgcctaatagacctgagcactgatgagcactgtcttccctttagatatcatagaatacagtcatggttacttggtttccaatgtgtagccttgtttggggcttgctttccaaccaggggagtaagaaggcacaggcaagagtgccagggcttgctgtcatagactgagggctctgccaagacagggattgactctggctttggattatctcctaagctttggaggggaaaggggagagaagaggactacagaaggtctagtagttgggaaatgagggggcagcccccttgtgccactgccttgagagtttcaaacctgtggcccccgcaaaaggccaataagcactcttgtgtaagggaaagggccattcaggtgggtgctgggaaagatagctaaatttacccgcctctctattcttgggttttttcctctgtgcctgcagtactttgttttcttctcattgtgaatgacctggcacttaattcctttagggtccacctcacttgggctcaaggcttttcatctttcccttccgagggagctgtgaccggggcttgcacgatctggagctcccacccatcgctaaatacccatacccagcttacgaccccactaattaacccgcagtggggttacgggccacactctttcttaacgcgccgtaacatggcccgagtcggcg

SEQ ID NO: 91756 - DNA, 894 bp, Homo sapiens
ctcacccagcctggtagacttataccaacaattggttttgttttgttttattttattttgacataggttgacttatgtattgaaaataatttttctgatattagagatttgaagttattagtcttaaagtagataaactcagaagccttgtggatgctgatctgaatatatttcctagtttacagtagcatttttttcttttaatttaagctaaaatcttaatggtctgggcagtggtgaatgttcatctattacgcttctgttgtagttaaataccaattagattgtggatttcctaaaaaaataaaaaagaagtcaagatatatgtcttgctttagtggattgttaagaataactttgcacatattttccactttttggaccccttaaatctcctttggtggtcgaagtggctatttaatagattttaaaggtgtccttctggctgtataaatgtgtggttacatattgacagttcactgcccacattaaagtgcattattgtaacttttgctcagggtctttagaaaattagcacagaaagtagcttattttttaaaaaaagatgatggaagataagttaacactgtaacagaagaaaggtgtgattgccattatatatttagcagggatgggtatcatcttatatggagcttaaaacttggcttttaatatttctattaccatttggcgcatttaccactaacccgaccacacaaccttgggaaggctgagaacttattaatacacttttacggggaaaaaattgcccttataaattttgtgtctttgaccaaaccaaacggggcctatatcgatctacttttttgagcgcccatatcttgactccgcctcccactgaccctatcacgacacccggcggggggcgcgggt

SEQ ID NO: 91757 - DNA, 450 bp, Homo sapiens
ccagtgcggtggaattcgctatttcagcttctttaactttcctactatgagcaggtgggttcctttagtttgccctgaaaatcaagaagcattcctaaaaactgttcctaaacaatggtgagttttactatgtaatagcaatatttatggaaaattaaacttcaattcagtttgttctattaggtggttgcaaaagtgaatagaattctttaaatagttattatcatcactagtttaaaataatgcatttaatagaatgtgtatatatcatcacaaatgtacatatttctaatccagatttaccatgtgctatatttttttaaaattcaggttttagttgaggttgatgtattattatttgtgactttatgggaaagctgaaaaattttagttcaataataggattccaacagtttcagaacagttacatcatttagtaaatctggcaag

SEQ ID NO: 91758 - DNA, 446 bp, Homo sapiens
  misc_feature (1)...(446): n = a,t,c or g
gaccgtagtgaagagcggtggaatttctctgcaggaagctgagccgtctcctaagtgcccacccggctccttgtgcactaattaccagacagtggactgaaccttttgcatattttattagtgaggactctaagtttcgagtgattggaaacccagtgggtttaaatcaagaagattaatttatggcccatgtctccaaaaggccggggaggccttggcgttgccaagttggacataagggctcaaatgactcatcagaattaggtcttattctttccatctctgctttcttctggaaacttctattctcaggacctagcatgatgccaaaatcagattacatcctaatatctcaataagcccagatttactttttaacatttctagtagacatctgggaattgagtctccatgcccagtcctaagcctgttgctttgcccagggn

SEQ ID NO: 91759 - DNA, 905 bp, Homo sapiens
ttttttttttttaaagatcaacatatcattttattaattctgattccttttatcatgtgcttttttatacaaagcactttcaaatacattacattatcttaaatttataataggagtttctttcggattcagtttaaaaatgacaaatagcattcgttgtgcccaagttagaattacaccaaaattaccatgtgctggcacataccatcatcccactggtggctggaaaactgggttgcaggagtgtctgtcactgagatgggccaccaccccagtggccatatggtagagatgagggaaggatggactagaagcaagctgggtcttctgggtcgtctctactcctttttcacttcatcaccgttttccccactgagcttgaacacaggaatctgctgaccatccttgagctctaaaaagacctcgtcaaggtgccacctctgaaaggggccacctctggatgagtggacgtagagaaggccctctgatttggatccagagacaggaatcttcaacttggcatcaacaatgtccacgaagttttccctgtcgatgagcttgagataatggatgttgagaggagggcccagagcttcctgtgcctcgggatggctctgcagctgctccactgccaacttgtaatataaagccctggaatgaaacttttgaatgaggtaatacacaatggcaaagcccccggcatagaacacaccgtggaaaaggatccttgctcccagaggcattgaccgcctgcttcctgcatacttttgccacatcatagcacaactctcttgaaaatcatcaaaggcaagttgtcctgtgagcaacagaagcaccacgctacaaagagcatgacgagttcttccaggcttgggaaagcacgggtaaatgcccgcggtcctgcg

SEQ ID NO: 91760 - DNA, 1189 bp, Homo sapiens
ttttttttttctgaaaggtcatctcgtgcgactttaatatttatatccgtagtttcacttggttcctcatttttatgttttttttttaaattaaacacaggttatcaaagtgtaaatgaaaggtaattgtttattactggagaagagaaaaatgtatacaagaaagtctagattctttctccacatgcactacttttggaataaagttccaaatatcaactttgaagatacttacaaggataaatttttcttaacaagtgaccaattactgtgttgtggacattttttcatagaatccatatactgtaaactaaatatattcttatagtttacaggaagcttggagcaattatgtattaacagagaagatggtattatattttactgcaaaatattataaaagtgatacaattttgtggctcttaaatgtttaattacttgatttcaacaggacaatgaaaaaaaaccaaaaatcatcaagacaggcctggctttaaggttttttgtattcgattcgttctactttcacatcatctccaattagctgatacacataggtgaccactgtagaagcctggatatccatcaacacaaatgatggaataatgtttgtttccaaggcattatatgccccagtggcagaacctggattaatgtagaatttattttcatgctcaaatgcttcaaatttgtgtgtgtgtcccgagataagaatgtccacatcaaattgcctctgcaacagggctaagctggccatatctccccatggaataacttgatgtccatggatcagaccaattttgaactgtccaacagtcacaactttctgttctggataattcagattctcatcgaagtctcctctcacaatatgaacatcaccagccagagtcttgagatagtcataactctctttggtgcaaaggtttcctgtgcagagaatgtgctgaatttttcctggcaccaggagttttttgaatttagctggcaaactgttgcaccggtgtgggatgtgcagatctcctaataccaacaccaactggatatagaacaatcttcattttagagggggattccttcttaaaagggtaagaaatccagtcagtaaacagccacccaaccaccactgttagtaggagctaagtgaagaaacttactctgtgcccagccatcctcctcgttccgaatt

SEQ ID NO: 91761 - DNA, 416 bp, Homo sapiens
agattatttctaatatcctttccaactctaaaattgtatgattttctgaggagcaaattttaaagcattggtttagaatttgtaagccaactaatgtcacagtgaaagtgtcctcctttaatgtcttacattacttttgactatcctagaggcttgcatgttcattttttctcttccaagagaaactgtcccatccttctccttttagtgaaaacagttctaggctattccttgtgctgtaatatgaccccaatcctacctctcacaccattagtggtcttttgcccgagtaaggcaaaaagacaatcttttcattaataattcaatggctttatcaagtgtcttggcactaattagaaacaagaataacaccttgcccaaaaatataagggttggctcagtattgggctgctaag

SEQ ID NO: 91762 - DNA, 669 bp, Homo sapiens
cagaaatggagtttttacaataatgtccaacattttcatatttaagaatgtgatcttactttccccctgctcaatttgagtgataaaaaactatttgagaacttagttgcagtgctatataaggtttcactatgttaacttcagattattttgtgactgaatttttccagtaataacccattcaattagcgcttcaagcccagaaagcttatttgtgaactcgaacaacttcaagtcaggagataaattattttatctttgatttgcaggtagagtcaaattgaacagcagaacccttttgtgtatgtaataaaaacgtcatcccaggatgtcctacttcaggcagagccaaagggtggcctatttttgtcctggtgctttgaatgggacttctctttggcagggggcatcctgtaaactgaccgtcctggccttcttccctattgtaaaggaagtgctcttcctgtccctatcaatgttggggttacaatttcacagggctctaaagctgccgggagacacaggagagattctaagaggctgggctggcattaatagaaactgaaggcaggagcctgagggcagtcggtggataggaaaagagaaggagaaaagtgtcatcctagattgtgctttacttctactgattttctgtggattgttcttttt

SEQ ID NO: 91763 - DNA, 1389 bp, Homo sapiens; identical to SEQ ID NO: 59924

SEQ ID NO: 91764 - DNA, 412 bp, Homo sapiens
cacactttttcccacagtccccctctctgcatccttctcctacactggattgtgagtccaagttgggggcgtggggtgcttttcctcctatgatcgccttgaccataggtggctccggatggcttcatcttctaaatgaggcagtgggactagccgctgtctgggggctgcagccctgcattctagaattctgggtgacatcctaaggatctaaatggatctaataggaggaaagaggcagcacttgggagcaatgacccttttcggtaaagcgattctgttgaatgaatggtgaatgcaagaggaagtaagtgaataaggattgaatgcaacaatatcagtataggaataaggctggagtgtcccttaaatcctgtctggaatgtagcggcacagatgaattgatgaatgg

SEQ ID NO: 91765 - DNA, 1960 bp, Homo sapiens; identical to SEQ ID NO: 59092

SEQ ID NO: 91766 - DNA, 1422 bp, Homo sapiens
aggtcctgggcctatgtcaagaagtgcaaaaacaacatgtgtccaaatcggggattgcatgacgggccagagccctgctggctgcaccacgcggctggcacagtcagtgcagtccaggcccgggggctgcagccgtcccagtcccggtccaggccgcgagtcccggggctagcaaccgcccttgcatacggccccgcccataccccgcccctgtcccggattggctgggccatgcagcccccgcccccgggcccgctgggcgactgcctgcgggactgggaggatctacagcaggacttccagaacatccaggttagcgccgctgcggacgccgggtcgcccccgagccgcgtctcgctggctcagggtcaagggtcgggcagccctggatgcaaaccctccctcccagcagaggccgagggggccgcacaggagctggagaaccagatgaaagagcgccaaggcctcttctttgacatggaggcctatttgcctaagaagaatggattgtacctgagcctggttctggggaacgtcaacgtcacgctcctgagcaagcaggctaagtttgcctacaaggacgagtatgagaagttcaagctctacctcaccatcatcctcatcctcatctccttcacttgccgcttcctgctcaactccagggtgacagatgctgccttcaacttcctgctggtctggtactactgcaccctgaccatccgggagagcatcctcatcaacaacggctcccggatcaaaggctggtgggtgttccatcactacgtgtccaccttcctgtcgggagtcatgctgacgtggcccgacggtctcatgtaccagaaattccggaaccaattcctctccttttccatgtaccagagcttcgtgcagtttctccagtactactaccagagcggctgcctctaccgcctgcgggcgctgggcgagcggcacaccatggacctcactgtggagggcttccagtcctggatgtggcgggtcctcaccttcctgctgccttttcttttctttggacacttctggcagctttttaacgcgctgacgttgttcaacctggcccaggaccctcagtgcaaggagtggcaggtgcttatgtgcggctttcccttcctcctccttttcctcggcaatttcttcaccaccctgagggttgtgcaccacaagtttcacagtcagcggcacgggagcaagaaggattgaggctgggccttcccctgccggcccagaggggcttctgtcctgtgtgttgtgggaggggatgggaggcgcccctcgagtgtgcgtgtatcagggggtctcttctattctcccttgggttttatgggcgctgtgggccctgaaaggaagacctgggcccagttgccctcaattaaagagaaggcccagaggtgaaaaaaaaaa

SEQ ID NO: 91767 - DNA, 2856 bp, Homo sapiens; identical to SEQ ID NO: 58993

SEQ ID NO: 91768 - DNA, 471 bp, Homo sapiens
  misc_feature (1)...(471): n = a,t,c or g
cacgcttgtgacgagcgngagcacttccctctccgttgtgccctggacctcgggcacagctgtcagcccattctatagagagggataccggggcttatgcaggaagccaggtccccaaagtcgcacggccaggagtggatggagctgcctttcaaacccatcaccggtcctaccgtccggggcacagcgacaggttctggagagagggtgggtcccgggccaggtgctggtgggcctccaggtggaggcgggctgatgctgggtgtgtcgtcatcgtcagaccgttcctcacgtccccacagaccccaggccctgtgcatgtccccagtggaggcatggccagcatctgctctgtccaacccagtcgcatcgcccaagagctctgagcaaggaggctgtcgcggggccgagaacccgctgggactggcaagcacggctggcccagtgcagcaggagggggccctgaggcat

SEQ ID NO: 91769 - DNA, 453 bp, Homo sapiens
ggaggggctggtgttgcgggagtgagagatggggagtaatttctcatactaacaaagttcagctttaatcaggaggcattcactggaagttattggagggttttaagcagatgacttttgatcagatcactctggccaaggtgtggagaatggctgaagtgagtgaagaagagaaggtgggagactagaatttacaggtagtcctgagataacagctaaggaatacttttaaattgacaagaattttgctaaggattcatacttctccacagtaactacaaactgctcacctacaaaatgtaataataaagacaaaaagtaactatgcatgtatgtattgttcaggaaaaaaatcagctgttattaaaagaattccatttcagaggtgagagggtttgtcatgattactgtttcttccatgtagtcctttgggtgtttattataaataaatgg

SEQ ID NO: 91770 - DNA, 839 bp, Homo sapiens
  misc_feature (1)...(839): n = a,t,c or g
gacagcgcggtggaattccccatttccccactgggccctgcagaacccagctcttgtttagacttccctcccaagagaacgggaacatggtgggggtaagggcggggggtgctttaccactagtttccagccccaagcataagcctggcacatcgcaggaagtccatacatggttgttaaattgctgaataaatacaagaagcttctagactccctccaagtctactcttccaaagctgtgcacatacagcaggaataaataatataaaagtctccaatggccacggaggtgactccgctgagggacattcgtcacggggtccatggggaatggggggcacattccttcttcgacggggcaactcttttggcgtttcataagaagccaggaatctggatttttctgggctatatttcactactgaaaggtggctggctggcagaggcatgcactgtccctggaatgcccgtgtggtcgctcaccaccccggccctctgcagctagctggggctgtgggcctcattctgaccactgagctgcgaacaaaagtgttgtgggtcccttccaggccagcagctttaagagccagtgcacaaccctccagttctcctgtctccaccgtggtgacccagaaagccatgtgtttcaagccatgtgcagctactcgatggncagcctgggtccctgagtgactggggaccagaactgtcttgcaacccacactggatatgggactgagagggagaaataaaacctctgccgtgacaggccactggggtaataaggatttggttactggagcataaccccagaccaagtcttatgcaatacattatcc

SEQ ID NO: 91771 - DNA, 2078 bp, Homo sapiens; identical to SEQ ID NO: 60129

SEQ ID NO: 91772 - DNA, 2558 bp, Homo sapiens; identical to SEQ ID NO: 59540

SEQ ID NO: 91773 - DNA, 660 bp, Homo sapiens; identical to SEQ ID NO: 59005

SEQ ID NO: 91774 - DNA, 1148 bp, Homo sapiens
tctattccagtgtgctggaattcctgttctcgccctcaaatgggaacgctggcctgggactaaagcatagaccaccaggctgagtatcctgacctgagtcatccccagggatcaggagcctccagcagggaaccttccattatattcttcaagcaacttacagctgcaccgacagttgcgatgaaagttctaatctcttccctcctcctgttgctgccactaatgctgatgtccatggtctctagcagcctgaatccaggggtcgccagaggccacagggaccgaggccaggcttctaggagatggctccaggaaggcggccaagaatgtgagtgcaaagattggttcctgagagccccgagaagaaaattcatgacagtgtctgggctgccaaagaagcagtgcccctgtgatcatttcaagggcaatgtgaagaaaacaagacaccaaaggcaccacagaaagccaagcaagcattccagagcctgccagcaatttctcaaacaatgtcagctaagaagctttgctctgcctttgtaggagctctgagcgcccactcttccaattaaacattctcagccaagaagacagtgagcacacctaccagacactcttcttctcccacctcactctcccactgtacccacccctaaatcattccagtgctctcaaaaagcatgtttttcaagatcattttgtttgttgctctctctagtgtcttcttctctcgtcagtcttagcctgtgccctccccttacccaggcttaggcttaattacctgaaagattccaggaaactgtagcttcctagctagtgtcatttaaccttaaatgcaatcaggaaagtagcaaacagaagtcaataaatatttttaaatgtcacagatcaaaattgtttccttcaaatggggtctgccaattcacaaccagatgacccattttaccctattcactgcagactgaatccagattctacacatacttatcccccccaagaccctcactctgtctccattggcctacttgttcatctttcactcattcgacaaatctttttgaggtaagagcgaggtggggcaaaaaaaaaaaagcataccaatgaaccagacccggtcttattaaagataatataggtttaaaaaaaaaaaa

SEQ ID NO: 91775 - DNA, 3454 bp, Homo sapiens
ttcgagagccgcgcggccaggccctctaagccctctgccgtttggggggcacgggtgaacctgccgccccactcccaccccgccccgccccgcccgtacagacaaatcggaagggacgagcctgccctttgaaagggttttttttcttgctcctgcggagggcgccccagccatggccctcaggagctccctagaccccgcagggactgccctccatcccggccgccggggcccgccctctgcatcccgcgggcagcctgtgtgaagcggcctcccgcagcccccggcccctcccccatggaggaggaggagggggcggtggccaaggagtggggcacgacccccgcggggcccgtctggaccgcggtgttcgactacgaggcggcgggcgacgaggagctgaccctgcggaggggcgatcgcgtccaggtgctttcccaagactgtgcggtgtccggcgacgagggctggtggaccgggcagctccccagcggccgcgtgggcgtcttccccagcaactacgtggcccccggcgcccccgctgcacccgcgggcctccagctgccccaggagatccccttccacgagctgcagctagaggagatcatcggtgtggggggctttggcaaggtctatcgggccctgtggcgtggcgacgaggtggcagtcaaggccgcccggctggaccctgagaaggacccggcagtgacagcggagcaggtgtgccaggaagcccggctccttggagccctgcagcaccccaacataattgcccttaggggcgcctgcctcaaccccccacacctctgcctagtgatggagtatgcccggggtggtgcactgagcagggtgctggcaggtcgccgggtgccaccccacgtgctggtcaactgggctgtgcaggtggcccggggcatgaactacctacacaatgatgcccctgtgcccatcatccaccgggacctcaagtccatcaacatcctgatcctggaggccatcgagaaccacaacctcgcagacacggtgctcaagatcacggacttcggcctcgcccgcgagtggcacaagaccaccaagatgagcgctgcggggacctacgcctggatggcgccggaggttatccgtctctccctcttctccaaaagcagtgatgtctggagcttcggggtgctgctgtgggagctgctgacgggggaggtcccctaccgtgagatcgacgccttggccgtggcgtatggcgtggctatgaataagctgacgctgcccattccctccacgtgccccgagccctttgcccgcctcctggaggaatgctgggacccagacccccacgggcggccagatttcggtagcatcttgaagcggcttgaagtcatcgaacagtcagccctgttccagatgccactggagtccttccactcgctgcaggaagactggaagctggagattcagcacatgtttgatgaccttcggaccaaggagaaggagcttcggagccgtgaggaggagctgctgcgggcggcacaggagcagcgcttccaggaggagcagctgcggcggcgggagcaggagctggcagaacgtgagatggacatcgtggaacgggagctgcacctgctcatgtgccagctgagccaggagaagccccgggtccgcaagcgcaagggcaacttcaagcgcagccgcctgctcaagctgcgggaaggcggcagccacatcagcctgccctctggctttgagcataagatcacagtccaggcctctccaactctggataagcggaaaggatccgatggggccagcccccctgcaagccccagcatcatcccccggctgagggccattcgcctgactcccgtggactgtggtggcagcagcagtggcagcagcagtggaggaagtgggacatggagccgcggtgggcccccaaagaaggaagaactggtcgggggcaagaagaagggacgaacgtgggggcccagctccaccctgcagaaggagcgggtgggaggagaggagaggctgaaggggctgggggaaggaagcaaacagtggtcatcaagtgcccccaacctgggcaagtcccccaaacacacacccatcgcccctggcttcgccagcctcaatgagatggaggagttcgcggaggcagaggatggaggcagcagcgtgcccccttccccctactcgaccccgtcctacctctcagtgccactgcctgccgagccctccccgggggcgcgggcgccgtgggagccgacgccgtccgcgccccccgctcggtggggacacggcgcccggcggcgctgcgacctggcgctgctaggctgcgccacgctgctgggggctgtgggcctgggcgccgacgtggccgaggcgcgcgcggccgacggtgaggagcagcggcgctggctcgacggcctcttctttccccgcgccggccgcttcccgcggggcctcagcccacccgcgcgtccccacggccgccgcgaagacgtgggccccggcctgggcctggcgccctcggccaccctcgtgtcgctgtcgtccgtgtccgactgcaactccacgcgttcactgctgcgctctgacagtgacgaggccgcaccggccgcgccctccccaccaccctccccgcccgcgcccacacccacgccctcgcccagcaccaaccccctggtggacctggagctggagagcttcaagaaggaccccggccagtcgctcacgcccacccacgtcacggctgtatgcgctgtgagccgcgggcaccggcggacgccatcggatggggcgctggggcagcgggggccgcccgagcccgcgggccatggccctggccctcgtgaccttctggacttcccccgcctgcccgacccccaggctctgttcccagcccgccgccggccccctgagttcccaggccgccccaccaccctgacctttgccccgagacctcggccggctgccagtcgcccccgcttggacccctggaaactggtctccttcggccggacactcaccatctcgcctcccagcaggccagacactccggagagccctgggccccccagcgtgcagcccacactgctggacatggacatggaggggcagaaccaagacagcacagtgcccctgtgcggggcccacggctcccactaaggcctgcccaccaccgcccgcctgggcagccatgaatgtagcgccccaggccctgccccagcccgccatgccacaaggtgggggaggccctgggcaggatgttcactctatttattggggaaggagggaggggggggacacttaacttattcctttgtaccccagggggtggagccctgtgcccaccctgcactggggggagggtgggcagggatactcagggacagggcatcatgggggatttggcacaaaatggagcattaaaggtaacccctgccccctaaaaaaaaaa

SEQ ID NO: 91776 - DNA, 810 bp, Homo sapiens
tttttttgcaggtcaaaattcttcctttaatgtgattcatgttattttaatgacttttaggtcaaactcagattcccagttacaggtgcccttggctagttttatctgtgtaacatttgaggctgcatatgtgatcatggtcttgggtttcatctgagatgttagaagccatgtctcttgaggtacttggctcgtgcaaggacatcattgcagaagtcacagctcaggtcctggctgcttcggacatagccagcacccccactgtaggcacagagtccacctctcaggtactggtcaggggtccaggttggaaacctcctctggagttctgtgattctagtagtcagaacttcagttgtctggaaaacctgagactcactaatccaggatgtgggagcttgagagccagggtcctgcaccatgctagtcctatcgcccatgttgaccagaattttgtcaccgggagacttcctggacaagacaccagcgatcacggcaggatccatgcagtacttttggccaatggtttgcatcatgggttgatatttcaggaggtatggcatgtctatttcagccagcctttcagaagcacgaactcctaaaccaaacgcaaaaggaatgatgcagcttgttgtgacttatgctgcaacaggagctcaaggggagagagaaagaacaatccaaggatctgagtaatggtcgaggactgacaatcccagattttggtcttaaatctttagtagtggccactccctgacctgaggttagggctctcctcctgtgagcttgagtcagcgaattccaccgcac

SEQ ID NO: 91777 - DNA, 446 bp, Homo sapiens
  misc_feature (1)...(446): n = a,t,c or g
tgtccagtgnnnnaaattccttgtcctcatcaacatacaggactgaccttgtcccgataagcacccagggatgaccttgtccccactaacaagcagagataaccttgtcccaatcaacatccaggatgaccttgtccccactgacatgcagagatcaccttatccccaccaacatccagggataaccttgagtcaatcaacatccaggatgacctcatccccacccacatgcagagatcaccttgttcccaccaacatccggggataaccttgaatcaatcaacaaccttgaaccaatcaacatccaggatgaccttgtccctatcaacatccaggacgaccttgtccccacccacatgcagagatcaccttgtccccaccaacatccagggataacctttgcccaatcaacatccaggatgaccttgtccaccacccacatgcgg

SEQ ID NO: 91778 - DNA, 467 bp, Homo sapiens
  misc_feature (1)...(467): n = a,t,c or g
ggacattccaggaatcgcanatacagtgagacacaaatggtccctttaaacagttacctctaccccaagagaagatgctaagactatgtgcataaccgttcccctgagagaatttactatctattgaattgtgttcttatccaattttaatatttcttcacttctgttctttacttttccatgttaaccgtgctttatcttatatatccatgcctgtcttattgttgatctttgactcttttcagccatcccatgtaacctctcttgcttgatgcatgagtaggctgccttcctatcttgcacctcttggctctaggcctgtcttgtggcacctcttgtcgattaattcaataacagggccctcctgtttgaactggccctgaaacctctctaatcacccatgtactggcctaggaggcaacttctacaaaggtctgaaatgtgtatgtgtatgtatgtataacacn

SEQ ID NO: 91779 - DNA, 2192 bp, Homo sapiens
cgaaggcgttcagactcttagctgaacgcggagctgcggcggctatgctgtggagcggctgccggcgtttcggggcgcgcctcggctgcctgcccggcggtctccgggtcctcgtccagaccggccaccggagcttgacctcctgcatcgacccttccatgggacttaatgaagagcagaaagaatttcaaaaagtggcctttgactttgctgcccgagagatggctccaaatatggcagagtgggaccagaaggagctgttcccagtggatgtgatgcggaaggcagcccagctaggcttcggaggggtctacatacaaacagatgtgggcgggtctgggctgtcacgtcttgatacctctgtcatttttgaagccttggctacaggctgcaccagcaccacagcctatataagcatccacaacatgtgtgcctggatgattgatagcttcggaaatgaggaacagaggcacaaattttgcccaccgctctgtaccatggagaagtttgcttcctactgcctcactgaaccaggaagtgggagtgatgctgcctctcttctgacctccgctaagaaacagggagatcattacatcctcaatggctccaaggccttcatcagtggtgctggtgagtcagacatctatgtggtcatgtgccgaacaggaggaccaggccccaagggcatctcatgcatagttgttgagaaggggacccctggcctcagctttggcaagaaggagaaaaaggtggggtggaactcccagccaacacgagctgtgatcttcgaagactgtgctgtccctgtggccaacagaattgggagcgaggggcagggcttcctcattgccgtgagaggactgaacggagggaggatcaatattgcttcctgctccctgggggctgcccacgcctctgtcatcctcacccgagaccacctcaatgtccggaagcagtttggagagcctctggccagtaaccagtacttgcaattcacactggctgatatggcaacaaggctggtggccgcgcggctgatggtccgcaatgcagcagtggctctgcaggaggagaggaaggatgcagtggccttgtgctccatggccaagctctttgctacagatgaatgctttgccatctgcaaccaggccttgcagatgcacgggggctacggctacctgaaggattacgctgttcagcagtacgtgcgggactccagggtccaccagattctagaaggtagcaatgaagtgatgaggatactgatctctagaagcctgcttcaggagtagaacccacacttgttctggcctggtgttcagtgcgactgcagtcagtgttgagtggtgccatgtgggccgctctattccaaaggaatcatggattagacccaagggctgagctcctctagggcaggacctgcaccctgtgtgttggcaccagcatcgggtcttggactggggcagaatccccagtggaaccggaagagctggactgatgagaaacatcagaagaacacatactaccttgttttcctaatgccagaagggtgaccagtgaagattcaccgtcaaaccatgaaagtcctttcttggatccactttatcttgattagtctgcattttactagttcactggatccctcctctaggggcctggggactttcactgatgctcttcctgattctagagcaaaggtgtgggaaggggaaatggaggaatgccctcctgtctgtgtcgttctctgtgccacagctacagatgcagaaggtttctctggatagcacacctctgaatgtaaatcatgataaaatggatatttggaaacttactcctaagctgtgatttagggtgtatttctacttctggactgcctcaatatcaagggctgagacttttgaattttgaatattcgttgggtttcatgttaagaagcctgtggtctaggagtgctattcagtgtttcttttcctgataaacactttgaatattttttttgtgtttttgtttccttttctgaagctgttcctccttttaaatatttttaatcacattgataaaatctatccttcaccacctctggttctactatagttgatttttattttaaatgtttaattgtatttgattaaacacttaactggattttggaataataaaactctcgtccaatttggcttttaaaaaaaaaa

SEQ ID NO: 91780 - DNA, 447 bp, Homo sapiens
aattccctctgtgggtgagaaagagctttgttctattctgtaaaggaaaatgcagttcactctgaatccctgggcctggtggaacttggtttcaaagccttctgcagcccagggctttctcagggttccagagatgaggcacgatccccaccaggagtcacttgggggagttttcagattcatgagtattatttctacttgtgggaaatgaaactggctctcccttctctggaagcctgccagcttctggcgtacttgctactgccaagaagggagaggcccggtaatccttctctactgaaaaggaaaattatagcacagctctgaaaagaggtggaaggactttcctgatctgttgtaaaatgatttatggtgttgggtccatgatgcccagcccaccttattttagtcacagctccctcctcctaccacttcagaacacttagg

SEQ ID NO: 91781 - DNA, 2811 bp, Homo sapiens; identical to SEQ ID NO: 59155

SEQ ID NO: 91782 - DNA, 1154 bp, Homo sapiens
ccctcttagagccatcgtacatttacaccttggcatttggtgtgtacctcagttttccagggcctgacagtcctggatgaacttatagggtccaaaccagaaaagcaagggctcagaccctggcaccaaggctgctccatgtaaagaatgctaccccgtgtggccagactcgggtaagccaccttttaactgcttcagtgtaatttattttcccacatcccagaaagctctggaaaaacacataaatgaatacatttattctctcacaggatactacactgttacccagtgtgaagggagcagccatgtggctcccaagctcccttagcaaaagggtggttctcagaactgctccattcacgagtcctgcaaccagaggcctgggctcaactcacacaaagttctgagcaatggccagcaccttggaatactcgccttcccgcttgcgcaggctggtggggatgggtgtcttaattcgtgtccccacagggttcccgttgtcctcaatgaggaccacgttgttggagtcaaatctgggggtcattcgggggccaggcatgcagtgccccacaatgagcgcctttttcttctgtcccttgatggccagtagtatctggtcgcccaccttgcccactccattcttcttatagacatggatgcagcgaggagcccgatggtatgggctgttccccagggcactgttgtccaccactcgtacccgcgtcatcttctgaatcgcactcagactcccagtggtgctgaaacagtgatggctcagcactctgcttacacaggtgaaggggccccagagcccagtaaagaaagccatgggatcccaagatagatccgctctcgccgcccgggaaaatcccgccgcgggccccaccagcctgcgcaacggggaaggcgagtattccaaggtgctggccattgctcagaactttgtgtgagttgagcccaggcctctggttgcaggactcgtgaatggagcagttctgagaaccacccttctgctaaggaagcttgggagccacatggctgctcccttcacactgggtaacagtgtagtatcctgtgagagaataaatgtattcatttatgtgtttttccagagctttctgggatgtgggaaaataaattacactgaagcagtt

SEQ ID NO: 91783 - DNA, 2444 bp, Homo sapiens
gggtcgaattcgtggagggcggcgccatggcccacctggagctgctgcttgtggaaaatttcaagtcgtggcggggccgccaggtcattggccccttccggaggttcacctgcatcatcggccccaacggctctggaaaatctaatgtaatggatgcacttagttttgtaatgggagagaaaatagctaatttaagagtgaaaaatattcaagaactcattcatggagcacatattggaaaacctatttcttcttctgcaagtgtaaaaattatatatgtggaggaaagtggcgaagagaaaacatttgcaaggattatccgagggggatgctcagaatttcgctttaatgataatcttgtgagtcgttctgtttacattgcagagttggaaaagataggcataatagtcaaagcacaaaattgtttggtttttcagggaactgtagagtcaatttcagtgaagaaacccaaagaaaggacccagttttttgaggaaatcagcacttcaggagagcttataggagaatatgaagaaaagaaaagaaagttacaaaaagccgaagaggatgcacagtttaactttaataagaaaaaaaatatagcggcagagcgcagacaagcaaaattagagaaggaagaggcagaacgttaccagagtctccttgaagaactgaaaatgaacaagatacaactgcagctttttcaactataccataatgagaaaaagattcatctcctgaacaccaagttagagcatgtgaatagggatttgagtgtcaaaagagagtctttgtctcatcatgaaaacatagttaaagccaggaaaaaggaacatggaatgctaactagacaactacaacaaacagaaaaagaattaaagtcggttgaaacccttttaaatcagaagaggcctcagtacattaaagccaaagaaaacacttctcaccaccttaagaaattagatgtggctaagaaatcaataaaggacagcgaaaaacaatgttctaaacaggaagatgatataaaagccctggagacagagctggctgatttagatgctgcatggagaagttttgaaaagcagattgaggaagaaattttacataaaaagcgagacattgaactggaagccagtcagctggatcgttataaagaacttaaggaacaagtaagaaagaaagtagctacaatgactcaacaactggaaaaactgcagtgggaacagaagacagatgaagaaagactggcatttgaaaagaggaggcatggagaagttcagggaaatctaaaacaaataaaagaacaaatagaagatcataaaaaacgaatagagaagttagaggagtatacaaagacatgcatggattgcttgaaagagaaaaaacagcaagaggaaaccctagtggatgaaattgaaaaaacaaaatcaagaatgtctgaatttaatgaagaattgaatcttattagaagtgaattgcagaatgctgggattgatacccatgagggaaaacgtcagcaaaagagagcagaggttctggaacaccttaaaagactgtacccagattctgtgtttggaagactatttgacctgtgtcatcctattcataagaaataccagctggctgttactaaggtttttggccggttcatcactgccattgttgtagcctctgaaaaggtagcaaaagattgtattcgatttctgaaggaggaaagagctgaacctgagacattcctcgctctagattaccttgatatcaagccaatcaatgaaagactaagggagcttaaaggctgtaaaatggtgattgatgtcataaagactcagtttcctcagctgaagaaagtgattcagtttgtgtgtggaaatggtcttgtttgtgagactatggaagaagcaaggcatattgcactcagtggacctgaaagacagaaaacagtagctcttgatggaacattatttttaaaatctggagtgatctctggagggtcaagtgacttaaaatacaaggctagatgctgggatgagaaagagttaaagaatctaagagacagacgaagccagaaaatccaagagctaaagggtttaatgaagacactccgcaaagaaacagatttgaaacaaatacagaccctgatacagggaactcaaacacgactcaaatattcacaaaatgaactagagatgattaagaagaagcaccttgttgctttttaccaggaacaatctcagttacaaagtgaactactaaatattgagtctcaatgtattatgttgagtgaaggaatcaaggaacgacaacgaagaattaaagaatttcaagaaaagatagataaggtcgaagacgatatcttccaacacttctgtgaagaaattggcgtggaaaatattcgtgaatttgagaacaaacatgttaaacggcaacaagaaattgatcaaaaa

SEQ ID NO: 91784 - DNA, 825 bp, Homo sapiens
  misc_feature (1)...(825): n = a,t,c or g
cccacgcgtccgatttcatgcagttctggctgggattggtcagactcagcttcctgtctagggaagtcagagtgcaggggcctgagtgagtctggcaacatggggattctgtggttgcagacggcaagcttcagtgtggaccagggactggaggttcagcagccgcttagcgtgggattgcaggggcggtgggccctgtatcttttgttgctaagctcaccttggcctgtgtccagcttccagctctctgagagctgcggaagatggctgggggttctccacactgttttctaaactttaacatacttctgcttttagtgtatctggccttcgtagtccaaaccttctatggtttaccctctgcagagaataaatcttcagtctcttgatgaattggggcagtggccccactctgttcagtgaggtagaagcccagacgggtttttccagttgtccgcctgatcctggcctccacctgatcctcccgccacgggtacctggtgctgttggttcatgtgccttgacttcccctgtgctggntttggacttttctggatctggcaccttaattcctgtccttctgttttccagcttctaatgtgggattggtggctctactctcattctgacccactatggttttatgtactttaaaaaacctactgtcatttgagcggccttttaagaggaacaactctaacgtaccgtttttagcctccaacaaaaacccgcaatcatgtctcccccgagcgggaaggctcccacctgtcgtccgccgcccttttataggagcaagggccgggcgtccaccctctccacaaaaac

SEQ ID NO: 91785 - DNA, 1990 bp, Homo sapiens
cccacgcgtgcgcactccttcgacctctgctgcagcccgtgccgccgccgcctcctgggaagagaggaagcgggagaggagcccacgtcgcctgtcacccaatatctccagccgcgcagtcccgaagagtgtaagatgttcgcctgcgccaagctcgcctgcaccccctctctgatccgagctggatccagagttgcatacagaccaatttctgcatcagtgttatctcgaccagaggctagtaggactggagagggctctacggtatttaatggggcccagaatggtgtgtctcagctaatccaaagggagtttcagaccagtgcaatcagcagagacattgatactgctgccaaatttattggtgcaggtgctgcaacagtaggagtggctggttctggtgctggtattggaacagtctttggcagccttatcattggttatgccagaaacccttcgctgaagcagcagctgttctcatatgctatcctgggatttgccttgtctgaagctatgggtctcttttgtttgatggttgctttcttgattttgtttgccatgtaacaaaataaagaatgccaccatcaaactaataataccctccgctgaaacagcaggtgtcctaataggcaatccagagactggactatggctgaaatatgaatgtacgttatttccaaagtcatttcattaaagatgaaaactttaaaaaaatactgcttgacatgttggcattcatattaattacggatgtaattctgtgtatcttactgggactccgaaaactgtagtattggggccatgggaatgtacgttatttccaaagtcatttcattaaagatgaaaactttaatttcttctgtgatttgtacttacactaagtttagattatcacaaagaagaacgtgcattcaggcagatgctgtcccattcagaggaagctacagcagttgctccactgatgaaaaatattccaatgtaatttttatgggaattcttttatatagtgttctgcatattgtaattcatagggcttttgtttattcatataaaggataaatatttgggtgttttgagcttctataaaatatgattaattaaaggtagttaatactcaagatggtcttgagtttttaaggtctaacatcagttagaatacttcaaatcagaatcaccttccaagactgacttgacaggtggttctaaaaataaatcacgtcagctttttaggaaatgaagccttaagctagggggtaatgtgacttttgtttttcagtaagtctcacattaagcaattgtgtgcctctaatgaatcttccatgtcttttcagaacagaaactagcagctagtttcttacttgaacaagactattaaaaaccaaatatcaaaaaactgaattggctagatttttacagccaaaaattgctgtaaggcagtgtgtatcactgttgctaacatgtttatagtgggagtcttggggatgatagctggttcaacagtattttgctgctaatactttatgttgcttcttggtcaaacttttcccattcaaaggaagaagatggtgctactatagacagtttttcccctagcaaatatattgtaccataatatctatcatccaagtttcagggttttttgaaagttgataattaggaaagtgacattttacttttcttagtgccctttgcctgtttgatttccattgagaaagagcagtcaccaaagttcctcaagtgtcggaagaccaccaccatcagaatcagggcttgtttaaaaaataaaaatccctaggttccagacctactgaattggactctttggacatgagactcagcaatctacatctttaaaaaggcttcccaggtggtttttgtgcatactgtttgagaggcactaagttatatatatatcctaccttctgtaaagggaaatgaggccccaaaaagctaaagaggtagagctgctacctcgttttcagttgattca

SEQ ID NO: 91786 - DNA, 1298 bp, Homo sapiens
gtgagtcctccaggcgggggtccagaagtggcgttccgcttcggtgcggtgctagacgcggcgcgcacgcaggaggacgtgttccgggcgtgcggcgtgcggcgcctgggggagctggcgctgcgcggtttctcctgcactgttttcacctttggccagacgggctctgggaagacctacaccctgactggaccccctccccagggggagggggtgcctgtaccccccagcctggctggcatcatgcagaggaccttcgcctggctgttggaccgcgtgcagcacctgggtgcccctgtcacccttcgcgcctcttatctggagatctacaatgagcaggttcgggacttgctgagcctggggtctccccggcccctccctgttcgctggaacaagactcggggcttctatgtggagcagctgcgggtggtggaatttgggagtctggaggccctgatggaacttttgcaaacgggtctcagccgtcgaaggaactcagcccacaccctgaaccaggcctccagccgaagccatgccctgctcaccctttacatcagccgtcaaactgcccagcagatgccttctgtggaccctggggagccccctgttggtgggaagctgtgctttgtggacctggcaggcagtgagaaggtagcagccacgggatcccgtggggagctgatgcttgaggctaacagcatcaaccgaagcctgctggccctgggtcactgcatctccctgctgctggacccacagcggaagcagagccacatccctttccgggacagcaagctcaccaagttgctggcagactcactgggagggcgcggggtcaccctcatggtggcctgcgtgtccccctcagcccagtgccttcctgagactctcagcaccctgcgatatgcaagccgagctcagcgggtcaccacccgaccacaggcccccaagtctcctgtggcaaagcagccccagcgtttggagacagagatgctgcagctccaggaggagaaccgtcgcctgcagttccagctggaccaaatggactgcttgggtctgaactccccttcccccggattctggccacagcacttaaacacatctctgcaaaaaggtgcgtcagaggctccatgacatccctacttgacacccctccaggttgggccgtgagactcccatggcactggggatttgtggccatcaggtaggaacacggtggggataccctaggcccctgctggataatgcgttcctgccaaagagtggacgccgttgtcatagcatgacccagctggctcagg

SEQ ID NO: 91787 - DNA, 3305 bp, Homo sapiens; identical to SEQ ID NO: 59611

SEQ ID NO: 91788 - DNA, 763 bp, Homo sapiens
cgcggtggaattcaccaaaacatccttcaagtgtgggataaagacattatcatgtatcgatataacagaatactatagaataatgaaaagcaaagaattataactatatcccaaaacaaatgaataaaaactacatataatattgagcaaaagaagccagatgcaaaggcataattgcatttaaatacagtgcaaaagtatgaaaatctattcctatgttgtttcggaactcctaatcatatggtaaagttataaaacagaagaaatgtgactataagatggcagggtaatggtcacctctagaggattggaaagaggtctcgaggaaaagcaggagagctgttgggtgtttggaaatgttatatttcttgcactggatcatggtacatgggtgttcatttcacaacaatttaagctgatatttatatactttttaatatatttgttaaactttaccaatgataaaaaatttaaaaattaaacacgtgaccttcttttatagttatagcccagtgagatttcagagagtaggaagattccaaaaatcctgatgcccaggccacaccccaggccaattaaatcagtatctctgggagaaggatctaagttttggtcattttaaatttttcccaggtagttccaatgtgaagccaagattgcgaattacactcacttccattttttttttttttaaggcaaagcaggtgaaacaaattttcaactaattgaggagggcaccggactgttccaggtattaaaaaga

SEQ ID NO: 91789 - DNA, 1163 bp, Homo sapiens
aatagttcgcagggactggcaggaagtgagtgacatccacttggccatggccaactgtaaaatgaccaaaagcatcaggttccctgccctggagcactgctatactggcggggaggtcgtgttgcccaaggatcaggaggagtggaaaagacggacgggccttctgctctacgagaactatgggcagtcggaaacgggactaatttgtgccacctactggggaatgaagatcaagccgggtttcatggggaaggccactccaccctatgacgtccagtttcatatggaggcctcagttgaaaactgcattattgtgagcatgaacaccgctgaccctggcagccagggcatcacacacagcctcttgctacaggtcattgatgacaagggcagcatcctgccacctaacacagaaggaaacattggcatcagaatcaaacctgtcaggcctgtgagcctcttcatgtgctatgagggtgacccagagaagacagctaaagtggaatgtggggacttctacaacactggggacagaggaaagatggatgaagagggctacatttgtttcctggggaggagtgatgacatcattaatgcctctgggtatcgcatcgggcctgcagaggttgaaagcgctttggtggagcacccagcggtggcggagtcagccgtggtgggcagcccagacccgattcgaggggaggtggtgaaggcctttattgtcctgaccccacagttcctgtcccatgacaaggatcagctgaccaaggaactgcagcagcatgtcaagtcagtgacagccccatacaagtacccaaggaaagtggagtttgtctcagagctgccaaaaaccatcactggcaagattgaacggaaggaacttcggaaaaaggagactggtcagatgtaatcggcagtgaactcagaacgcactgcacacctaaggcaaatccctggccactttagtctccccactatggtgaggacgagggtggggcattgagagtgttgatttgggaaagtatcaggagtgccatgattccaatgttttccttcttttaaattaaattcagttgctctgcttcctccaagtcctctgtatctttagaatttccgcaggtgagcactcaataacgcaagtaataaaatactgatatcaacaa

SEQ ID NO: 91790 - DNA, 414 bp, Homo sapiens
  misc_feature (1)...(414): n = a,t,c or g
cccgtgcggtggaattcgcagagctggttgcccggaacccaatagaagcaagccagagggagtgggaatgaggatgcacaaaccacatgctttcacgcctaccgactggaaaaactgaccctttccaaagtacagacatgcgagtgccgagcagcctggtgggcgtgcatcaaggggaggaatgctcagctgtcatcctcaggcccctcagcagtgcccatgctttatgagggtctgtccagccagcacatttcccccgcttccaacagctccacacctcctctggatcacatgggctctggaagtctcagcagctgacaaggggcctcagaattttctgggcacaagaatgaaatggcaacagtctgtggagctttccctgttccctgccttgctgggaattctgcaattctn

SEQ ID NO: 91791 - DNA, 741 bp, Homo sapiens
cccgtgcgctggaattcgcttgacctggagcagctcccttttcccagcgtgcctcagcttcctcatgggaaagctcactaccagctgaaggtgtgttgcatcgttcccctgagaagtgatgttggcttggccgaactgaagggggctgcctatttgatgtcatctcccatggacgcattggtggtgagggagctggtgatgctgatgtataatcaaagactgaatgagagaggcgctgtctcttaggacttggactatcttcactctgccaatgcaacaaaatggatcaactgagttaaatcatatgacaaaggaggaaagacgttcagatgtaatgaagattccaagtaaggtgaattcaagctaaagacagattatcctgggtgagcctgggcatgacttaatcagagaaagcaaaactgagtccttgccaagaaaatcttttgccgattcttcagactaagaacgggggagagggcatgcaaaagggccatggggcccgcactcgaccgccgccgccaggactaaaagcccccccggcgggcggacacgcgcgccggcgcgacctcggccaacgcccggcggccgcggttaccagccgggggggggggaggaaagtagtggcggcggtgggggcactatccccgcggccgggggggcccgacttcccgccgccggacgcaccggcaccggcgccaggatccatcatgccgcgcgccgggagccgacttttgcgcctcg

SEQ ID NO: 91792 - DNA, 4048 bp, Homo sapiens
gtccttcccacccttagtcccaggcatctgactaccgggaacctcagccagagtccgggagccccccaccccgtccaggagccaacagagcccccgtcttgctggcgtgagaatacattgctctcctttggttgaatcagctgtccctcttcgtgggaaaatgaaccagaagacaatcctcgtgctcctcattctggccgtcatcaccatctttgccttggtttgtgtcctgctggtgggcaggggtggagatgggggtgaacccagccagcttccccattgcccctctgtatctcccagtgcccagccttggacacaccctggccagagccagctgtttgcagacctgagccgagaggagctgacggctgtgatgcgctttctgacccagcggctggggccagggctggtggatgcagcccaggcccggccctcggacaactgtgtcttctcagtggagttgcagctgcctcccaaggctgcagccctggctcacttggacagggggagccccccacctgcccgggaggcactggccatcgtcttctttggcaggcaaccccagcccaacgtgagtgagctggtggtggggccactgcctcacccctcctacatgcgggacgtgactgtggagcgtcatggaggccccctgccctatcaccgacgccccgtgctgttccaagagtacctggacatagaccagatgatcttcaacagagagctgccccaggcttctgggcttctccaccactgttgcttctacaagcaccggggacggaacctggtgacaatgaccacggctccccgtggtctgcaatcaggggaccgggccacctggtttggcctctactacaacatctcgggcgctgggttcttcctgcaccacgtgggcttggagctgctagtgaaccacaaggcccttgaccctgcccgctggactatccagaaggtgttctatcaaggccgctactacgacagcctggcccagctggaggcccagtttgaggccggcctggtgaatgtggtgctgatcccagacaatggcacaggtgggtcctggtccctgaagtcccctgtgcccccgggtccagctccccctctacagttctatccccaaggcccccgcttcagtgtccagggaagtcgagtggcctcctcactgtggactttctcctttggcctcggagcattcagtggcccaaggatctttgacgttcgcttccaaggagaaagactagtttatgagataagcctccaagaggccttggccatctatggtggaaattccccagcagcaatgacgacccgctatgtggatggaggctttggcatgggcaagtacaccacgcccctgacccgtggggtggactgcccctacttggccacctacgtggactggcacttccttttggagtcccaggcccccaagacaatacgtgatgccttttgtgtgtttgaacagaaccagggcctccccctgcggcgacaccactcagatctctactcgcactactttgggggtcttgcggaaacggtgctggtcgtcagatctatgtccaccttgctcaactatgactatgtgtgggatacggtcttccaccccagtggggccatagaaatacgattctatgccacgggctacatcagctcggcattcctctttggtgctactgggaagtacgggaaccaagtgtcagagcacaccctgggcacggtccacacccacagcgcccacttcaaggtggatctggatgtagcaggactggagaactgggtctgggccgaggatatggtctttgtccccatggctgtgccctggagccctgagcaccagctgcagaggctgcaggtgacccggaagctgctggagacagaggagcaagccaccttccccatgggaggcgccacccctcgctacctgtacctggccagcaaccacagcaacaagtggggtcacccccggggctaccgcatccaggtgcgcagcttttctggggagccactgccccaaaacagctccatggagagaggcttcagctgggggaggtaccagctggctgtgacccagcggaaggaggaggaacctagtagcaccagcatctacaatttgaatgacccttggacacccactgtggacttcactgacttcatcaacaatgagaccattgctggaaaggacttggtggcctgggtgacagctggttttctgcatatcccacatgcagaggacattcctaacacagtgactgtggggaacagcgtgggcttcttcctccgaccctacaacttctttgacgaagacccctccttctactctgccgactccatctacttccgaggggaccaggatgctggggcctgcgaggtcaaccccctagcttgcctgccccaggctgctgcctgtgcccccgacctccctgccttctcccacgggggcttctctcacaactaggcggtcctgggatggggcatgtggccaagggctccagggccagggtgtgagggatggggagcagctgggcactgggccggcagcctggttccctcttccctgtgccaggactctcttccctccactgccctccttcacatccccctctgagccaggagcctcctgaccctgtgatgcctgacacaggggacactgaaccttgttgatgccagctgtactgagttctcatccacagaggccaggcatggcccagcctggagccgtggccgagggcttccctagatggttccctttgttgctgtctggctttcccgaatctttttaggccacctccaaggactctaaaagggggctattccctggagaccccagagtagggttgccagtcctgcaagtccatagctgagctggaaaggatgcttctgctcacattccctctcatccaggtcctttccttctcgtcttcctctctctcacctacttcctcctcctcctcctgttcctgccttctcttctatcctgcaatttctcccaggaatcctgaggggcatatccctatgtgcccagcccctgggtactcccccagaccctcagttttcagttcaagttccgtctcctctccagccctatggaagtctcaaggtcacgggactcttaatcaagagtggccaatccctgtgtgtcgttcccttgtgtctgttgcttattgggagtaggagttgctcctacccctgtcctggggctgggtgtgtttcaggacagctgcttctgtgcatttgtgtctgcctgcctcatgctctctatagaggaggatggtcatcgtgacagcagcagctcaagttagcatttcaagtgatttgggggtgcaatgataatgaagaatggccattttgtaccagggctctgtattctgcaacagcctgtttgggaggctggagtggaaacaaagggtgggcatcaaagatgagaagccaaagcccctacaactccagccacccagccaggaggggctgtccaatcacattcaggcatgcgaatgagctgggccctgggtgaggtgggggtctggcctagtggggaggggcctggcctgggtggggcagggcctggcctggtccaggcttgggctccattcccatcactgctgtccctcctgaggtctggattggggatggggacaaagaaatagcaagagatgagaaacaacagaaacttttttctctaaaggactggttaaatcaattctgatacagccttacaatacaatagtatgcagctaaaaaataattgtatgtctttatatactaatatgtaataatcttcaggtgaaaaaggcaagccacagaaatgtgtatagcgcacttcccatttgtgtttcagaaaggagtagaatataaacacataattgcttatgtatgcctattcagaataaatgggtaacactgattacttttgggaggggaaccagtaggttgaggacaggagagggaagggtcttaacacttacacccttttgtacattttgaattttgaaccatgtgactgtattacctattcaaaataaacaataaatgggcccaaacaggaaaaaaaaaa

SEQ ID NO: 91793 - DNA, 2852 bp, Homo sapiens
cggacgcgtgggcggacgcgtgggcgcagccgcctccagggcaatttgcatatttctccaaagaaccatccagaacctgagcagcctgtcttcagacagagagaggcccacggctgtttcttgaaatctggcgctgggaatggccatgtggaacaggccatgccagaggctgcctcagcagcctctggtagctgagcccactgcagagggggagccacacctgcccacgggccgggagctgactgaggccaaccgcttcgcctatgctgccctctgtggcatctccctgtcccagttatttcctgaacccgaacacagctccttctgcacagagttcatggcaggcctggtgcagtggctggagttgtctgaagctgtcttgccaaccatgactgcttttgcgagcggcctgggaggtgaaggagcagatgtgtttgttcaaattttactgaaggaccccatcttgaaggacgacccgacggtgatcactcaggaccttctgagcttctcactcaaggatgggcactatgacgcccgggccagagtcctcgtttgccacatgacctccctgctccaagtgcccttggaggagctggatgtccttgaagagatgttcctggagagcctgaaggaaatcaaagaagaggaatctgaaatggccgaggcatcccgaaagaagaaagaaaaccggaggaaatggaagcgttatctcctgataggcctggcgactgtcggaggcggaacggtgatcggtgtgactggaggtctagctgcaccccttgttgccgctggagcagcgacgattattggcagcgccggggcagcggctctgggctcagcagccggcatagccatcatgacctcgctgtttggtgcagctggagctggcctgacaggatacaagatgaagaagcgagtgggagccattgaagagttcacgtttctgcctctgacggagggcaggcagctgcacatcaccatcgccgtcacggggtggctcgcttctggcaaataccgcaccttcagtgccccgtgggctgccctggcccacagccgtgagcagtactgcctggcctgggaagccaagtacctgatggagctcggcaatgccctggagaccattctcagtggtctcgccaacatggtggcccaggaggccctaaagtacacagtgttgtctggcattgtggctgccctgacctggccagcctcactcctcagtgtcgccaatgtcatcgacaacccctggggggtgtgtctccatcgatcagcagaggttggcaagcacctggcccacatcctgctctcccggcagcaggggcgacgacctgtcaccttgattggcttcagcctgggagccagagtcatctacttctgtctgcaggagatggctcaagagaaagattgccaaggaatcatcgaggacgtcatcctgctgggtgcgcctgtggagggagaagccaagcattgggagcctttccggaaggtggtgtccgggaggatcatcaacggctactgcaggggagactggctgctgagtttcgtgtaccgcacatcctcggtgcagctccgtgtcgccggcctacagcccgtgctgctgcaggacaggagggtggagaacgtggacctgacctctgtggtcagcggccacctggactatgccaagcagatggatgccatcctgaaggccgtgggcatccgcaccaagccaggctgggacgagaaggggctcttgctggccccaggctgcctgccctccgaggagcctcgccaggcagcagctgccgcctcatcaggcgagaccccccaccaggttgggcaaacccagggtcccatatccggagacacctccaaattggccatgtccacagaccccagccaagcccaggtgccagtagggctggaccagtctgaaggggcctcccttcctgctgctgccagccctgaaaggccccccatctgcagccatggcatggaccccaacccactgggctgccccgattgtgcctgcaagacccagggccccagcacggggctggactgaccacagcaggggacctgagccgtcttccccagtctccatatgcagctctctcttataccctcgggttcctcccaggagctctggaggtacaggatttccacaggcctctttcctaaatggaaggaattggaactgaaagggaaaggaaatggaaggaaggggaatttggaggagagaacacgcccacccttgggaagctgcctgtccccagaggagccccaccagggagcagctgccccctcatcagagacctgcagagtcaaccaagcacaggttagagtcccaggaccggaaaccaactgtgggctttctgtacttctcatagctttggagtctggctgtccatcaggaggtcccgagggctcttttgggggcctgaggttccccacaccagctctcccctgggcctcaataaaaaccagggtgcatgcctgttcttccatccacactccagggctgcccaccagctgacaggcaccatcaactggcagcaacagagcaggcgcaggtacaaagaaggcagctcactcctgctctttaggagatccaatcagatctgccctgtacagccatgtaggctgtgcgctgcataactccagggacatgagtcacacagacacaatgtgagtgtgctcccccgtcatgcaacatctggacacaactaacagagcatggtgaatacatgctgaattgcattcagtatggctgtgaactaggcctggggacaagaatgaattttacatggaaagaatttcctgtagcaggaacagaggggataacaacagcaataaataataataagaagaaa

SEQ ID NO: 91794 - DNA, 2531 bp, Homo sapiens; identical to SEQ ID NO: 60177
  misc_feature (1)...(2531): n = a,t,c or g

SEQ ID NO: 91795 - DNA, 570 bp, Homo sapiens
ctgtggcggaattcgcgaacccgcgtgcaacctgtcccgactctagccgcctcttcagctcgccatggatcccaactgctcctgcgccgccggtaagaggctggggatgcccagtgtagactgtagcgctagagaagcaatttctgacccctctttctttctctggtcactcaatttcaggacaggagttgctccttcccaaagagttttggggtatctttctctccattctaggttattcggagccccctttttaccgttaaggagatctgagttaatggcttgctcaagttcccaggaatcggttgtggactgaggaactcggccccgggctcttagtacgccgtcccttgttcaggtatccagggacggttctcacctctgtcttttctccttgcaggtgactcctgcacctgcgccggctcctgcaaatgcaaagagtgcaaatgcacctcctgcaagaaaagtaagtgggatcctctctttcctctaccccttccctgtcctccagcctgtcccctctccaccatcctcaggggaattaaagcagtctggggatgccccattgcg

SEQ ID NO: 91796 - DNA, 2816 bp, Homo sapiens
agcggccgcggccgggcctgcgggagctgcggaggccggaggcgggcgctgtgcggtgccaggagaggcggggtcggcgggagccagcgagccacgggagcgagccaggctaaccttgccgcgggccgagccctgcctcgccatggaccaggactatgagcggcgcctgcttcgccagatcgtcatccagaatgagaacacgatgccacgcgtcacagagatgcggcggaccctgacgcctgccagctccccagtgtcctcgcccagcaagcacggagaccgcttcatcccctccagagccggagccaactggagcgtgaacttccacaggattaacgagaatgagaagtctcccagtcagaaccggaaagccaaggacgccacctcagacaacggcaaagacggcctggcctactctgccctgctcaagaatgagctgctgggtgccggcatcgagaaggtgcaggacccgcagactgaggaccgcaggctgcagccctccacgcctgagaagaagggtctgttcacgtattcccttagcaccaagcgctccagccccgatgacggcaacgatgtgtctccctactccctgtctcccgtcagcaacaagagccagaagctgctccggtccccccggaaacccacccgcaagatctccaagatccccttcaaggtgctggacgcgcccgagctgcaggacgacttctacctcaatctggtggactggtcgtccctcaatgtgctcagcgtggggctaggcacctgcgtgtacctgtggagtgcctgtaccagccaggtgacgcggctctgtgacctctcagtggaaggggactcagtgacctccgtgggctggtctgagcgggggaacctggtggcggtgggcacacacaagggcttcgtgcagatctgggacgcagccgcagggaagaagctgtccatgttggagggccacacggcacgcgtcggggcgctggcctggaatgctgagcagctgtcgtccgggagccgcgaccgcatgatcctgcagagggacatccgcaccccgccactgcagtcggagcggcggctgcagggccaccggcaggaggtgtgcgggctcaagtggtccacagaccaccagctcctcgcctcggggggcaacgacaacaagctgctggtctggaatcactcgagcctgagccccgtgcagcagtacacggagcacctggcggccgtgaaggccatcgcctggtccccacatcagcacgggctgctggcctcggggggcggcacagctgaccgctgtatccgcttctggaacacgctgacaggacaaccactgcagtgtatcgacacgggctcccaagtgtgcaatctggcctggtccaagcacgccaacgagctggtgagcacgcacggctactcacagaaccagatccttgtctggaagtacccctccctgacccaggtggccaagctgaccgggcactcctaccgcgtgctgtacctggcaatgtcccctgatggggaggccatcgtcactggtgctggagacgagaccctgaggttctggaacgtctttagcaaaacccgttcgacaaaggagtctgtgtctgtgctcaacctcttcaccaggatccggtaaacctgccgggcaggaccgtgccacaccagctgtccagagtcggaggaccccagctcctcagcttgcatggactctgccttcccagcgcttgtcccccgaggaaggcggctgggcgggcggggagctgggcctggaggatcctggagtctcattaaatgcctgattgtgaaccatgtccaccagtatctggggtgggcacgtggtcggggaccctcagcagcaggggctctgtctcccttcccaaagggcgagaaccacattggacggtcccggctcagaccgtctgtactcagagcgacggatgccccctgggaccctcactgcctccgtctgttcatcacctgcccaccggagccgcatgctcttcctggaactgcccacgtctgcacagaacagaccaccagacgccagggctgattggtgggggcctgagacccccggttgcccattcatggctgcaccccaccatgtcaaacccaagaccagccccaaggccagaccaaggcatgtaggcctgggcaggtggctcggggccactggcggagccagtctgtggatccaagagacagtccccacctgggcttcacggcatccttgcagccacctctgctgtcactgctcgaagcagcagtctctctggaagcatctgtgtcatggccatcgcccggcggtcagtgggcttcagatgggcctgtgcatcctggccaagcgtcaccctcacactggaggaggatgtctgctctggacttatcaccccaggagaactgaacccggacctgctcactgccctggctggagaggagcacaacagatgccacgtcttcgtgcattcgccaacacgtgccctcacagggccagcgtcctccttccctgcgcaagacttgcgtcccccatgcctgctgggtggctgggtcctgtggaggccagcagcggtgtggcccccgcccccaggctgcctgtgtcttcacctgtcctgtccaccagcgccaacagccgtggggaagccaaggagacccaaggggtccaggaggtgggcgccctccatccttcgagaagcttcccaggctcctctgcttctctgtctcatgctcccaggctgcacagcatgcagggagggaggcaaggcaggggagtggggcctgagctgagcactgccccctcaccctcccaccaccccttcccatttcatcgg

SEQ ID NO: 91797 - DNA, 1958 bp, Homo sapiens
acttttcagggtttgtgaagctgtatctgcgtaatggcagatttaacaagcgtttgactctcctgccttcaccagaggctgagtttggtggtggacacagatataacagatgctctgggcaaagtgtctatataaggtgctatgaaaacatgcgccagccagcaggaaggcttcctggaggaggtaatgcccaagagaaaagcacatgtgtggctgctggaaagtgcctatttcagggaagctgcaaacccaacccttacatcaaaagggaacttgaaaaatacttggagcaaaaactgctaactgtgcatccttgctgtatgctggcgctgatattaaatcaggaaatggcactgaacagccgctccgaacacagaaacaggggttgtcaacacagcaaccaaaagcaatctctaacgggcagagagacgcctcctcgctcaccaaccacctgcaaccctcagggaaataacgccgaaggtgaacggcgcaccttcgggctgaatgaggatgccaggaatgccgctctggtttccaggcgaccttccggcccagggagcagccgacgggcacccccgaacgctggggcacggaatttcaacggggcgaccagagcggagctcgcggctcgaggctcgcggctgagtacgaagacgggacccgaggacctgtacatcgctcgaggggaacctgtcctgggctctggtgcacacatagtatgcgttctgggctggcttgggttgggccagctcttctccgctcttcccccccgcgcttggctcggcgcgctccggccggccgcaaagtttcccgggcggcagcggcggctgcgcctcgcttcagcgatggccgcggagctgagcatggggccagagctgcccaccagcccgctggccatggagtatgtcaacgacttcgacctgctcaagttcgacgtgaagaaggagccactggggcgcgcggagcgtccgggcaggccctgcacacgcctgcagccagccggctcggtgtcctccacaccgctcagcactccgtgtagctccgtgccctcgtcgcccagcttcagcccgaccgaacagaagacacacctcgaggatctgtactggatggcgagcaactaccagcagatgaaccccgaggcgctcaacctgacgcccgaggacgcggtggaagcgctcatcggctcgcacccagtgccacagccgctgcaaagcttcgacagctttcgcggcgctcaccaccaccaccatcaccaccaccctcacccgcaccacgcgtacccgggcgccggcgtggcccacgacgagctgggcccgcacgctcacccgcaccatcaccatcatcaccaagcgtcgccgccgccgtccagcgccgctagcccggcgcaacagctgcccactagccaccccgggcccgggccgcacgcgacggcctcggcgacggcggcgggcggcaacggcagcgtggaggaccgcttctccgacgaccagctcgtgtccatgtccgtgcgcgagctgaaccgccacctgcggggcttcaccaaggacgaggtgatccgcctgaagcagaagcggcggaccctgaagaaccggggctacgcccagtcttgcaggtataaacgcgtccagcagaagcaccacctggagaatgagaagacgcagctcattcagcaggtggagcagcttaagcaggaggtgtcccggctggcccgcgagagagacgcctacaaggtcaagtgcgagaaactcgccaactccggcttcagggaggcgggctccaccagcgacagcccctcctctcccgagttctttctgtgagtcgtggccggtcctggcccccgcccttgccccggcccggactccctgtcccacgtccctagtcccagactaccccggaccctgtccctgccgcggccccagccttgacctggttgacttgaacgagaaggaaggaaggcc

SEQ ID NO: 91798 - DNA, 1783 bp, Homo sapiens; identical to SEQ ID NO: 59804

SEQ ID NO: 91799 - DNA, 5705 bp, Homo sapiens; identical to SEQ ID NO: 59758

SEQ ID NO: 91800 - DNA, 2812 bp, Homo sapiens
cacgcagcaggatggcaagggctccgcttggggtcctgctcctcttggggcttctcggcaggggtgtggggaagaacgaggaactgcgtctttatcaccatctcttcaacaactatgacccaggaagccggccagtgcgggagcctgaggatactgtcaccatcagcctcaaggtcaccctgacgaatctcatctcactgaatgaaaaagaggagactctcaccactagcgtctggattggaatcgattggcaggattaccgactcaactacagcaaggacgactttgggggtatagaaaccctgcgagtcccttcagaactcgtgtggctgccagagattgtgctggaaaacaatattgatggccagttcggagtggcctacgacgccaacgtgctcgtctacgagggcggctccgtgacgtggctgcctccggccatctaccgcagcgtctgcgcagtggaggtcacctacttccccttcgattggcagaactgttcgcttattttccgctctcagacgtacaatgccgaagaggtggagttcacttttgccgtagacaacgacggcaagaccatcaacaagatcgacatcgacacagaggcctatactgagaacggcgagtgggccatcgacttctgcccgggggtgatccgccgccaccacggtggcgccaccgacggcccaggggagactgacgtcatctactcgctcatcatccgccggaagccgctcttctacgtcattaacatcatcgtgccctgtgtgctcatctcgggcctggtgctgctcgcctacttcctgccggcgcaggccggcggccagaaatgcacggtctccatcaacgtcctgctcgcccagaccgtcttcttgttcctcattgcccagaaaatcccagagacttctctgagcgtgccgctcctgggcaggttccttattttcgtcatggtggtcgccacgctcattgtcatgaattgcgtcatcgtgctcaacgtgtcccagcggacgcccaccacccacgccatgtccccgcggctgcgccacgttctcctggagctgctgccgcgcctcctgggctccccgccgccgcccgaggccccccgggccgcctcgcccccaaggcgggcgtcgtcggtgggcttattgctccgcgcggaggagctgatactgaaaaagccacggagcgagctcgtgtttgaggggcagaggcaccggcaggggacctggacggctgccttctgccagagcctgggcgccgccgcccccgaggtccgctgctgtgtggatgccgtgaacttcgtggccgagagcacgagagatcaggaggccaccggcgaggaagtgtccgactgggtgcgcatggggaatgcccttgacaacatctgcttctgggccgctctggtgctcttcagcgtgggctccagcctcatcttcctcggggcctacttcaaccgagtgcctgatctcccctacgcgccgtgtatccagccttagctcgcaccgacttcaatttcccacccatctccagtaggaaattgattttgaaaaagtaggctgccgccaccacggcattatgatcccttccccctgctgatcaatctgcagtttgtgaacttcacaagaatggtgtgtgcccgttccctggcgtgtgtaggcctggccgcagtccaggggtcagcaggaggaaagggttcacataggctctcaggtgccagtcttccagaaagcaaggactgcccttcattcagccttgctgacctcccagcctttctaaggctcagccccacgggactctggtggctgccagcttgtgagctatctatctatattcatttcatagccaaacaggagacccctttgcaggacttgcacacagggaggctgtagccaggaaaccctcttcttccctggtctggctctgctggagcgggtgggaaccaaacaccttcagtgctggtggccctcaggcccacaggtttaaggctgaggctgccctgacccttccacagtcatttcttctaggttttcttggcccagcactgcccatcccaccccatgaggctcactcattgcagatcccagcccaccctgcccctttcttccccaccctggaggctctctctgcctagtctacagtactgacagaaagcaaggacatgcggcctgcatggtgggagctggttgaattgtctttattaacaaacaggatatccaaggccactacattgaggaggggggaggggggagggaggagaagggttacttgctgctcacactatatacagatgcaagcaaggggcgtggagagtgagggctccctgctccctccctccgccggggaagggcatgggctagaagaggagaggggggtcgggaatggggggaatgttttggctggcggggtcccccctccattccctggagtttgggggaaggggaatcattaaagtgctttcagaaaatgaagaaatggtccctgcccctggagtggctggtgaccccccaaaaatctagggcccagtgaccccccccagggtctgggtacattcaaggggggagccggctcccctgacgtgcaaataaaggggtccaggggccttgccagttcagcagcagtggggtaaggggttcaagccccaagcactctcctctcaaatggagaaaaggggggaggggctaggcccactcaattcctgggaaggggaagctgtgtccctccccagaagctggggacaggcacagttttgggaagaggacatgttggggaagaggatggtcacgtgatcacgaaagcatcaggggtcagaggtcac

SEQ ID NO: 91801 - DNA, 457 bp, Homo sapiens
cccctctgtgcactcattacctgcttcctgagctccccgagaagtcatccaggacctccccgagaagccgtccaggaaacatgctctcaggggacccccatctgcctcagcctctttgtcactgcctggaccattgtccctgctgtttctcaggtaagaggctggtggcctgagggaagggctaagtttcggccgctttgtctagctgccctgcagaatccccagggctgctcagattctggaagggtccacagagctaggtgatgtctgatttccctcctgttggcaccccctcaaggacacatggcccgtctttgttgcccacagacacagcacaatcctctcacccctcagggccattcacacacactcaccaacagacgcagcattcctcacacaccacacaaaacacatgctcgtcacccacagaatcccttcacaacacacaacagaccct

SEQ ID NO: 91802 - DNA, 448 bp, Homo sapiens
ttcagcgcgctggaattcgaaagagaaaggtggaaacagagcatttgggcttgggaagagagtagttgctatgtctagctcattgtttactgagcatctctataacagatgccttatgggaggtaggagatgagtgaaaacaaaaatagactaggttagacacagagtttttataataattactaagaagtgccagtaaaatttactggtgatccagtttactgtaagcttcgtgtccttaacaccatcataaatgatgaacagattaacagaatgtaaacaaattcttctcagaaaactttttttttctttttttttaaggcacaggggacccaagattcttggacagaattctggccgggagccaactcagcctgatctgctggcatctctcaagtatcagaagtcaacaaaatggtttgccttgaagacttggccagagcagcag

SEQ ID NO: 91803 - DNA, 869 bp, Homo sapiens
  misc_feature (1)...(869): n = a,t,c or g
gatttccaatcatctataggcaggaaacaagcttataaggccactccattgcaaaaattaacccatctcttatgtaaaaagaaggttaattcagaaacttagagggtggagccaagggttgtggagagtcattctcaaggtgtaggacttggctgtaatagaggaactggtgatatgtgtctgattagatttcagaattgttatgggccagtaactgttatgtgtctcctgttacttctccctttttcctcacattttgaatgagagtgtctattgtgcttatcttaagtcagtctcactattgtatgtttgtatgttgggtgtgtgggagcagataatttgtttctttaattcagatcaggaggaactatactgcagtagctgtacctgaggaactgcatctgaggagcctcaaccacatctggacctgatttagatatcgagattctggacatcaagctgatgccataatgaaatgagacttttgaaggtcttagaagagggtgagtgtattttgcatgtgggagggccttgttggggccagagggtggtctgtggtagcttgtatccaaagtggccgccaccaatttcttcccttcttgctattcagtggtggagtctatttcccttgtccccttgaatctgggctggctttagtgacttgcttaaccaatagactgtaactttctgggacttcagaggctaggtcatgaaaagccttgtgtcttctgcctgtgcccgttggaatncttttttttggactgcttgcacatagaacccggtcaccatgctgtgagaatncccagccagatggagaggacacatgtaggcactggttgatagccccattgagctaccagcacagagca

SEQ ID NO: 91804 - DNA, 1566 bp, Homo sapiens
atgctgtgtgccctgctcctcctgcccagcctcctgggggccaccagggccagccccacctcaggcccccaggagtgtgcaaagggctccacggtgtggtgtcaggatctgcagacagctgccaggtgcggggctgtggggtactgccaaggggccgtatggaacaaacccaccgcgaagtctctgccctgcgacgtatgccaggacatagcagccgccgctggcaatgggctgaaccctgacgccacggagtctgacatcctggctttggtgatgaagacctgtgagtggctccccagccaggagtcttcagccggatgcaagtggatggtggatgcccacagttcggccatcctgagcatgctccgtggggccccggacagtgccccggcacaggtgtgcacagcgctcagcctctgtgagccgctgcagaggcacctggccaccctgaggccactctccaaagaggacacctttgaggctgtggctccgttcatggccaatgggccccttaccttccacccccgccaggcgcctgaaggagctctgtgccaagactgtgtacggcaggtctcccgactccaggaggctgtccggtccaacttgaccttggccgacttgaacatccaggagcagtgtgagtccttggggcctggcctggccgtcctctgcaagaactacctcttccagttttttgtccctgctgaccaagcactgaggcttctccccccgcaggagctctgcaggaaggggggattctgtgaggagctaggggcacctgcccgtttgactcaagtagtggccatggacggggtcccctccctggagctggggttgccaaggaaacagagcgagatgcagatgaaggccggtgtgacctgtgaggtgtgcatgaacgtggtgcagaagctggaccactggctcatgtccaacagctctgagctcatgatcacccatgccctggagcgcgtgtgctcggtaatgcctgcctctatcacgaaggagtgcatcatcttggtggacacctacagcccctccttggtgcagcttgtggccaaaatcaccccagagaaggtgtgcaagttcatccgtctgtgtggcaaccggaggcgggcccgggcagtccatgatgcctatgccatcgtgccgtccccagagtgggacgcggagaaccagggcagcttctgcaatgggtgcaagaggctgctcacggtgtcctcccacaacctggagagcaagagcaccaagcgagacatcctggtggccttcaagggtggctgcagcatcctgccgctgccctatatgatccagtgcaagcacttcgtcacccagtacgagcccgtgctcattgagagtctcaaggacatgatggaccccgtggctgtgtgcaagaaggtgggggcctgccacggccccaggaccccactgctgggcaccgaccagtgtgccctgggcccaagcttctggtgcaggagccaggaggccgccaagctgtgcaacgctgtgcaacactgccagaagcatgtatggaaagagatgcacctccacgctggggaacacgcgtga

SEQ ID NO: 91805 - DNA, 522 bp, Homo sapiens
gacacgcgttcgacctatcataatgcccactccctgccaacctacgtgaagagcccagctccctgccagatgacctacatcaaaagtccagctccctgccagacccagacgtgctatgtccagggtgcttctccttgccagagctattatgttcaagctcctgcaagtggctcaacctcccagtactgtgtcactgacccatgctctgctccctgttccaccagctactgctgtctggctccccggaccttcggggtgagtcccctgagacgctggattcagcggccccagaactgcaacacaggatcatctggctgctgtgagaattcgggaagctctggatgctgtggttctgggggctgtggctgcagctgtggatgtggcagctctgggtgctgctgtttgggaattatccccatgaagtcccgaagtcctgcgttgctgtgaccatgaggatgactgctgctgctaaacatacgacagctcaactccagaatgcactgccccgctacccctctggaa

SEQ ID NO: 91806 - DNA, 1535 bp, Homo sapiens
tggcggcggcatctggagtagcactgagatcttccggtggcgggaactgcagtcatggatcatattacggtacccaaggtagaaaacgtgaaattggtggatcgttatgtgagtaagaaaccagctaatgggattctttatcttactgcaacccacctgatctatgtggaggcttcaggtgcagcccggaaagaaacatggattgcactccatcacattgccactgtggagaagttacccatcactagcctgggttgtcccctgaccctccgctgcaagaatttccgggtggcccactttgttttagattctgaccttgtgtgccatgaggtttatatttcactgctcaagctttctcagccagcattacctgaagatctttatgctttttcttataatcccaaatcctcaaaagagatgagggaaagtggatggaaactgattgacccaatatcagactttgggcgtatgggaatacccaacagaaactggaccataacagatgccaacagaaactatgagatatgcagcacctaccctcctgaaatagtggttcctaaatctgttaccttgggaacggtggttggaagttcaaagttcagaagtaaagaacgtgtccctgtgctctcctacctctacaaagagaacaatgctgccatttgccgctgtagccagcctctctctggattttacactcgctgtgtagatgatgagctcttgttggaggccattagccaaacaaacccagggagccagtttatgtatgttgtagacacaagaccaaagttgaatgccatggccaaccgagcagctgggaaggggtatgaaaatgaagacaactatgccaacattcgcttcagattcatgggcattgagaacatccatgtaatgcggagcagtctgcagaaactcttggaagtttgtgaattgaaaactccaacaatgagtgaatttcttagcggcctggagagctcagggtggttaagacacattaaagctattatggatgctggaattttcattacaaaggcagtgaaggtagaaaaggccagtgtcttagtccattgttctgatggatgggaccgcacagcacaagtctgctcagtggctagcatcctcctagatccattttataggacattcaaaggactcatgatcttgatagagaaggaatggatatccatgggccacaagttttcccaaaggtgtggccacctcgatggggactctaaagaagtgtcccctatcttcacccagttcctagactgtatctggcaattaatggaacagtttccctgtgcctttgagtttaatgaaaacttcctgctggagattcatgaccatgttttctcctgccagtttggaaacttccttggtaactgccagaaggatcgggaagatctaagagtctatgagaaaacacattctgtgtggcctttcttggttcagaggaaaccagacttcaggaaccctctctataaaggcttcactatgtatggggtactcaatcctagtactgtgccctacaacattca

SEQ ID NO: 91807 - DNA, 1537 bp, Homo sapiens
agcactggagccaacaccgccccaggatggggtataaaagggttgggaggagaggaggcttcagtctcagtggctcagccttcccagctgatctgaagctcctgtgcagcctcagccctacaccatgacctccttctacagcacctcctcatgccctctgggttgcaccatggctcctggagcaagaaatgtctttgtctctcctatcgatgttgggtgccagcctgtggcagaggccaatgctgcctccatgtgcctcttggccaacgtggcacacgccaacagagtccgtgtggggtcgactcccctgggccgccccagcctctgtctgcccccaaccagtcacactgcttgtcccttgccagggacctgtcacattcccggcaacatcggaatctgtggggcctacggcaaaaacaccctgaatggccatgagaaggagaccatgaagttcctgaatgaccgcctggccaactacctggagaaggtgcgccagctggagcaggagaatgcagagctggagaccacactcctcgagaggagcaagtgccacgagtccaccgtgtgccccgactaccagtcctacttccgtacaatcgaggagctccagcagaagatcctgtgcagcaaggctgagaatgccaggctgattgtacaaattgacaacgcgaagctggctgctgatgactttaggatcaagctggagagtgagcgctcccttcaccagctggtggaggcggacaagtgcgggacgcagaagctcctggatgacgcgaccctggccaaggccgacctggaggcccagcaggagtccctgaaggaggagcagctctccctcaagagcaaccacgagcaggaagtaaagattctgaggagtcagctgggggagaagttccggatcgagctggacattgagcccaccattgacctgaacagggtgttgggggagatgcgggctcagtacgaggccatggtggagaccaaccaccaggatgtggaacagtggttccaagcccagtctgaaggcatcagcctgcaggccatgtcctgctccgaggagctgcagtgctgccagtcggagatcctggagctgagatgcacggtgaatgccctggaggtggagcgccaagcccagcacaccttgaaggactgtctgcagaactccctgtgtgaagcggaggaccgctacggcacagagctggcccagatgcagagcctcattagcaacttggaagagcagttgtctgagatccgggccgacctggagcggcagaaccaggagtaccaggtgctgctggacgtgaaggcccggttggagaacgagattgccacataccggaaccttactcccctgcaatccctgttccacgcctgcctcctgtacttcttgtccaagctgtggccctgtcaccggtgggtctccctctggccatggagccagcatggggagatgattctgaaggcccgagttaggagattgaggctggttgcactggggtcaggagtgccctcaccttgcccagtcttccttcaagac

SEQ ID NO: 91808 - DNA, 422 bp, Homo sapiens
  misc_feature (1)...(422): n = a,t,c or g
tgatctgctgcagtgcctgaaccagctttattcagcttctacagagatgtcctgccagcagagccagcagcagtgccagcctcctcccaaatgtacccctaaatgccctcccaagtgtactcctaagtgtcctcccaagtgtcccccaaaatgccctccccagtattcagccccatgcccacctccagtctcttcctgctgtggttccagctctgggggctgctgcagctctgagggtggtggctgctgcctgagccaccacaggccccgccagtccctccgacgccgacctcagagttccagctgctgtggcagtggcagtggccagcagtctgggggctccagctgctgccacagctctgggggctctggctgctgccacagctctggaggctgctgctgacctgggccatgaggagcan

SEQ ID NO: 91809 - DNA, 952 bp, Homo sapiens
aaatttgtatttcgataaccattagtgcagtgcggtggaagtcaagatggcggcgcggacagcgttcggtgctgtgtgccggcgcctctggcagggattggggaatttttctgtaaacacttctaagggcaatacagccaaaaatggtggcttgcttctcagtaccaatatgaagtgggtacagttttcaaacctacacgttgatgttccaaaggatttgaccaaacctgtggtaacaatctctgatgaaccagacatattatataagcgcctctcggttttggtgaaaggtcacgataaggctgtattggacagttatgaatattttgctgtgcttgctgctaaagaacttggtatctctattaaagtacatgaacctccaaggaaaatagagcgatttactcttctccaatcagtgcatatttacaagaagcacagagttcagtatgaaatgagaacactttacagatgtttagagttagaacatctaactggaagcacagcagatgtctacttggaatatattcagcgaaacttacctgaaggggttgccatggaagtaacaaagttttgtttctttatttttttagacacaattagaacagttaccagaacacatcaaggagccaatctgggaaacactatcagaagaaaaagaagaaagcaagtcataaagcctcagggaggccatttttgcctaaatttgaaatgagggtgggccagatgagtatgtttaagtggagagtgcttccagctgagatgatttgagtctgtcctaactgctccattgagttctcgtgccctcatcagctgagggcagggaatggaactttaatggaagaaccacttttatctattctttttattcattgtttcagttctgatttcagcaaacatgagcaaaccactttgactgaaagcagaaagagtgaaaattctattttgttacgct

SEQ ID NO: 91810 - DNA, 4013 bp, Homo sapiens
cccagctgcaactccgagcgtgagtccaggctaaggggacgccggccggggaagaggcgcggcgggagaagcgaccgcagcgggagcccggccaccgagggctgccggcactaggcgcagagccgccagcgctcggaagcccgcggggtgcgggagcgggaacagacttcttttgtagaattatcctatggaatgatattttcataatgagtcaacaaggttacgtggctacacctccgtattctcagcctcagcctggaataggcctttctccacctcattatgggcactatggggatccgtcgcacacagcatctccaacaggtatgatgaagccagcagggcctttgggggccaccgccactaggggaatgttgcctccgggtcccccacctcctggaccccatcagtttggtcagaatggagctcatgccactggtcaccctccccaaagatttccaggccctccacctgtcaacaatgtggcatcctcacatgcaccataccaaccctctgcacaatcttcttatccaggtcctatatccacttcatctgtcacccagctgggcagccagctcagtgctatgcaaatcaacagctatggttcaggcatggctcctccaagccagggaccccctggccctctgtcagccacatcattgcagactcctccacgacctccacagccttccattttgcagcctggatctcaagttcttccaccaccacccaccacactcaatggtcctggtgcctcacctttgcctctaccaatgtacagaccagatgggctctctgggcctcctcctccaaatgcccagtaccagcccccacctcttccaggccagaccttgggtgctggatatcctccgcagcaggccaactctggtccccagatggcaggcgcacaactgtcttacccaggaggcttccctggaggtcctgcacagatggctggtccgccacagccccagaagaagctggatcctgactctatccctagcccaatccaggtgattgagaatgatagagccagcagaggaggacaagtttatgccaccaacaccagaggccagatccctcccctggtcactacagattgcatgatacaagaccaaggaaatgccagtcctcgattcatccgttgtacaacatactgttttccatgcacgtcagatatggctaagcaagctcagattccattagctgctgtcatcaagccctttgccaccattccttcaaatgagagtcccctttacttggtaaatcacggcgagagtggaccagtcagatgcaacaggtgcaaggcctacatgtgcccatttatgcagttcatcgaaggaggaaggagatatcagtgtggattttgcaactgtgtgaatgatgttccaccattctatttccaacatctggaccacattggaagaagactggaccactatgagaaaccagagttatctctaggatcttatgaatatgttgccactttggattattgcagaaagagtaagcctcccaacccaccagcctttatcttcatgattgatgtttcatatagtaacataaagaatggacttgtcaagctcatatgtgaagaactgaagaccatgctggaaaaaattccaaaggaagagcaagaagagacgtctgcaattcgagtgggttttatcacatataacaaagttctccatttctttaatgtgaagagtaatctggcccagcctcagatgatggtggtgactgatgttggagaagtctttgttcctttgttggatggtttccttgtcaactatcaagaatcccaatctgtgattcataatttgttggaccagattccagacatgtttgcagactctaatgaaaatgagactgtctttgctcctgtcatccaggctggcatggaagcactaaaggcagcagactgtcctgggaagctgttcatcttccattcttccttgccaactgctgaagcaccagggaagctcaaaaacagagatgacaaaaaactggttaatacagacaaagagaagatacttttccagccccaaacaaatgtctatgactcattggccaaggactgcgtggctcacggctgctctgtgacactcttcctctttcctagtcagtatgtggacgtggcctcgctggggctggttcctcagctcactggaggaaccctttacaaatacaacaatttccagatgcacttggatagacaacaatttttgaacgacctcagaaatgatattgaaaagaaaataggctttgatgctattatgagggttcgtaccagcacaggtttcagagccactgatttctttggtggaatcttgatgaacaacaccaccgatgtagaaatggctgccatcgattgtgacaaggcagtgaccgtggagttcaagcacgatgacaaactcagtgaagacagtggagccttaatccagtgtgctgtgctttacacgacaatcagtggtcaaagaagacttcggattcacaatcttggcttaaactgcagctctcagctagctgatctttataagagctgtgagacagatgctcttatcaacttctttgccaagtcagcttttaaagcagttctccaccagcctttgaaggtcatccgggaaattctagttaatcagactgcccatatgttggcatgttaccggaagaattgtgcaagtccttctgcagcaagccagcttattctaccagattccatgaaagtattgccagtgtacatgaattgcttgttgaaaaactgtgtactactcagcagaccagagatctcaactgatgaacgagcataccagagacagctggtcatgaccatgggtgtggctgactctcagcttttcttctacccacaacttctgcccatacacacgttagatgtcaagagtacaatgttacctgctgccgttcgttgctctgagtcccgtctttcagaagaaggaatattcttactggctaatggtctacacatgttcctgtggttgggagtaagcagcccaccagaactgatccaaggaatatttaatgtgccatcttttgcacatatcaacacagatatgacattgctgcctgaagtgggaaacccatactctcaacaactcagaatgataatgggtattatccaacaaaagaggccatattcaatgaagctcacaattgtaaagcagcgagaacaaccagaaatggttttccgacagttcctggtagaagacaaaggactttacggaggctcttcttatgtggatttcctttgttgtgttcacaaggagatctgtcagctgcttaattaattgaaacttctctgtcattgatgttgcatttccaaggagataatctccttcttggtgcctaattttctagatgataataggctagttttgatttcttgctcattttcagaataactttccaggaagagatggcatttagaacttcagctttggtgctcaggtataaagccaattaaggtacaattgtaccataaagggaacaatctgtttctgattgcacagtttctaatttttaaaactgatgtggtttgcatttcataaaaggcaaagtttacagaaccataaacattctcaattttctttatgctagacatataaattatttttcaaactgtatagatttggggtaaaaagttgtctcagttcctctcccaattgcaatgagaaaaaaaagcttaatttttacattatacttaattttctaaaaccatgtaactccattgaacacatttttcaacttaagggtctgcatagcaggacttttaataaccttgggatttatctggtagaacaatatgtgttctacatttttttcataattatatattgtgtatgttaaaactattttccagttgttttgtctgtaaaactgttctttatcaatatgcttaatggttctttgtacaattttgaaagtttctacctgtatataatggatgttaaccagtatcaataaaatcacttcggtataatcttaaaaaaaaaaaa

SEQ ID NO: 91811 - DNA, 414 bp, Homo sapiens
  misc_feature (1)...(414): n = a,t,c or g
ggacgtatctgttgctgcgtctgaacccactgtttatcgaaatcccaccaagatgtcctgccagcagaaccaacagcagtgccagccccctcccaagtgtcctatccccaagtatcccccaaaatgtccctcaaagtgtgcatcctcatgcccacctccaatctcttcctgctgtggctccagctctgggggctgctgtagctctgggggctgtggttgctgcagctctgagggaggtggctgctgcctgagccaccacagacaccataggtcccactgccacagacccaagagctccaattgctatggcagtggcagtggccagcagtctgggggttctggctgctgctctggagggggctgttgctgacctggaccaggagcagcaccaaaggaattagtgggcgaaggacn

SEQ ID NO: 91812 - DNA, 1622 bp, Homo sapiens
ttttttttttttaagagtccaagcatttattttattaccaaaaacaatttgttaataaacacgctcaatgcctccaatcctgtccctgaggataatcatgaaagtccttggggttgtagaggaaaccttaagaggaaaatggctacttggttatcaatgccttggctggtgacaaagaaaggacccttgcagggaccagtcacatgccatccttgggcctaaggagcccgaaagatgggaatggatgtgagctaaggatttaatcactgtcaagcagatcttgagggttatagttaagcctgataacagcctctttaacaagaacacacacatccaggatcccctcaaagaatccagagtcctcaggctccccacaaaatgtagtctggcagaaaagggaagtctttagagtctgcagaatgatgcaaacccaggccagagtggaccacactgctctcggcaccactcctaaaggcatccattggcaacggctgcccactaggggcactgccacttgcctggctcaaacttcaggacctggggaagaaatggtctggctctgcggccttcaaaccatctggatctctggctcctcagctattccttgaagcttttccatgatgccccctgaaggtggctcagggactgggggaggctcccctggggcttcagacagcacatagtagacaatctcttgctggccttgggcattggtctgattcaccacgtggatgacagaactggggttgtcctgagaggctgagagggctgtcccttcgctacccttgccctcctcttcctcttccttacgtcctggctcccctggcactgtttctagaataatgccctgcaggctgctctcgttcagcgacgttcccaggcccgatccctcttgtggttgccgcagcagttgctgtgtcagctctacactctcgtagcgaaccagctgcagccgcatatagccatcttcatgttccttgtaccgaaaacggggatgccctgagggccacttgaactggtgcttcttgcgaaggtgcacggtgaggttgttgccccgtgtgaagcatttgtcacacacatgacatttgtaccttggctcagagtctccttcatgtactttgcggtaatgggacttgatagagcagagggatcgggcactgaaggtgcagttctcaaaatcacacctgtaggctggctcctcgctgtgggtatccaggtgcttctggaggtcaataagattcttgcagctgtagtcacaacagtcacatttaaagggccggtcctcactgtgacgaaagcgcatgtggttgcggagggaggaaggcagcgggcaggtcatgtcacacagagggcacttatagtgattcacatggttgcgcatgtggtcccgcaatagccgctctgtggcaaatctcttggaacagtgagaacactggaagtgctgctgatccaatgaggtctggcgacggatgtgatctaagaacttggtattgttggcaaacatgcccccacaggtggggcaggctaccactttctcctgggtatggctgcggaggtgctctcgaagtttactgcggtccttgaaggtgcaggtacagcctttccagccctcggccgaagta

SEQ ID NO: 91813 - DNA, 2240 bp, Homo sapiens
aattccgggtcgacctacgcgtccgaagctataggctacccattcagctcccctgtcagagactcaagctttgagaaaggctagcaaagagcaaggaaagagagaaaacaacaaagtggcgaggccctcagagtgaaagcgtaaggttcagtcagcctgctgcagctttgcagacctcagctgggcatctccagactcccctgaaggaagagccttcctcacccaaacccacaaaagatgctgaaaaagcctctctcagctgtgacctggctctgcattttcatcgtggcctttgtcagccacccagcgtggctgcagaagctctctaagcacaagacaccagcacagccacagctcaaagcggccaactgctgtgaggaggtgaaggagctcaaggcccaagttgccaaccttagcagcctgctgagtgaactgaacaagaagcaggagagggactgggtcagcgtggtcatgcaggtgatggagctggagagcaacagcaagcgcatggagtcgcggctcacagatgctgagagcaagtactccgagatgaacaaccaaattgacatcatgcagctgcaggcagcacagacggtcactcagacctccgcaggtaaggagaccagtcccctgagggagcgtggagtgcctccccatctacagcactgcttctacattcctcctgatgacttcctgggcagccctgaactggaggtgttctgtgacatggagacttcaggcggaggctggaccatcatccagagacgaaaaagtggccttgtctccttctaccgggactggaagcagtacaagcagggctttggcagcatccgtggggacttctggctggggaacgaacacatccaccggctctccagacagccaacccggctgcgtgtagagatggaggactgggagggcaacctgcgctacgctgagtatagccactttgttttgggcaatgaactcaacagctatcgcctcttcctggggaactacactggcaatgtggggaacgacgccctccagtatcataacaacacagccttcagcaccaaggacaaggacaatgacaactgcttggacaagtgtgcacagctccgcaaaggtggctactggtacaactgctgcacagactccaacctcaatggagtgtactaccgcctgggtgagcacaataagcacctggatggcatcacctggtatggctggcatggatctacctactccctcaaacgggtggagatgaaaatccgcccagaagacttcaagccttaaaaggaggctgccgtggagcacggatacagaaactgagacacgtggagactggatgagggcagatgaggacaggaagagagtgttagaaagggtaggactgagaaacagcctataatctccaaagaaagaataagtctccaaggagcacaaaaaaatcatatgtaccaaggatgttacagtaaacaggatgaactatttaaacccactgggtcctgccacatccttctcaaggtggtagactgagtggggtctctctgcccaagatccctgacatagcagtagcttgtcttttccacatgatttgtctgtgaaagaaaataattttgagatcgttttatctattttctctacggcttaggctatgtgagggcaaaacacaaatccctttgctaaaaagacccatattattttgattctcaaaggataggcctttgagtgttagagaaaggagtgaaggagccaggtgggaaatggtatttctatttttaaactccagtgaaattatcttgagtctacacattatttttaaaacacaaaaattgttcggctggaactgacccaggctggacttgcggggaggaaactccagggcactgcaatctggcgatcagactctgagcactgcccctgctcgccttggtcatgtacagcactgaaaggaatgaagcaccagcaggaggtggacagagtctctcatggatgccggcacaaaactgccttaaaatattcatagttaatacaggtatatctatttttatttactttgtaagaaacaagctcaaggagcttccttttaaattttgtctgtaggaaatggttgaaaactgaaggtagatggtgttatagttaataataaatgctgtaaataagcatctcactttgtaaaaataaaatattgtggttttgttttaaacattcaacgtttcttttccttctacaataaacactttcaaaatgtgaaa

SEQ ID NO: 91814 - DNA, 728 bp, Homo sapiens
ttttttttttttagaggccccatagatgacaggcccaggtgctttagttgggcaggacctgggagtcagtgaggaactcgccccgagaacagagaaaaggtaggcaaggagaggagatgctgatggcatctggaaacaagtcttagagatggtctgcacccagagggaataaggggagacatccccaactggaatgtgtcctggagcagctgcctgggaagaagtcctcgagtttcctcaaggtgggggacagaggtcaaggatgaggccgagctaaatggaagggcgacagtgaggcaggtgggctttaaggctgtggattcgtcatgctggcggctgccagcagcactttcaggttccttggggcttgtaggggatggggacttgtcagtggaaagacgggagggatgatgtttttggacttcagtacgggtgtgatgtcccaggaagtgggtgtggctccccatcctgtatgaaataagcagtaaagcttgctcatggctgttgcacatctctgtgactcttgtttctggcaggccccactcctggcagctgagtgctgcacctgccttctcgatcacgagcctagagaactgcacgggggagcagcccagactggctggaaaccatgttttcagactgcagggtcaagtggcgtgtaggactctatcaaaagggatgacccctttccccaccacatacccacaacttcacaggtttaaacagaa

SEQ ID NO: 91815 - DNA, 900 bp, Homo sapiens
cccgggagagagcggccaggtggaggaggagcgcggaggcgaccgcagcatctgcctgcccttctgccatccgagcgccctgactgcgccacactgcaggccatggagaatgagctgccagtcccacatacatctagcagtgcctgtgccaccagcagtaccagcggggccagtagcagcagtggctgcaacaacagcagcagtggtggaagtggccgccccaccgggccccagatttctgtgtacagtggtattccagaccggcagaccgtgcaggtgatccagcaggccctgcacagacagcccagcacggccgctcagtacctgcagcagatgtacgccgcccagcagcagcacctcatgctgcagaccgcggcgctccagcagcagcacctcagcagcgcccagctccagagcctggcagccgtacagcaggcaagcctggtatccaatagacaaggaagcacttcaggcagcaatgtgtctgcgcaggccccggcccagtcatcttcgatcaacctggcagcctccccagcagcagcccagctcctcaaccgggcccagagtgtgaactctgcagcagcctcaggcatcgctcagcaggctgtgctcttgggcaacacgtcttccccagccctgactgcaagccaagcacagatgtatctgagggcacagatgctcatcttcacgcccacggccaccgtcgctactgtgcagcctgagctcggcactggctcccccgcccggccccccacccccgcccaggtacagaacttgaccctccgaacacagcagacaccagcggcagcagcctcgggccccacccccactcagcctgtcctgcccagcttggccctgaaacccacgccgggcggtagccagcctctgcctaccccagca

SEQ ID NO: 91816 - DNA, 4239 bp, Homo sapiens; identical to SEQ ID NO: 59647

SEQ ID NO: 91817 - DNA, 1428 bp, Homo sapiens
ttttttttttttggagggaatgaatgaaaattattttatttttatttgagctttggttctgccatttgctagcagtgtgactcaagagaagccagtaacccccctgagcttccctagttcacaaaatgcttgtcatgaagtcgacagcttccggaggctgcgaggctcgcaagaaatgcccacatgaatgtgcgcttagggcgtgagtgctcactccagaaaactccaacacagtgaaaaggcagaagcggtgtttttcttttttacatttttataagaatatataaaaaatgatataaatggacatttacggtagtgggggaaggcatatatctacgttaaaaggcaggacatttttaaaagctctattttctaaatgaaaactacgaaagcggggtgggttgtggcgggggcagttgtggccctgtaggaccttcggtgactgatgatctaagtttccggaggtttctcagagcctctctggttctttcaatcggggatgtctgagggaccttccgcggcatctatgcgggcatggttactgccttctggtgccccccgcagccgcgcgccaggtacccgtgcgacatcgcgatggcccagctcctcagccaggtccaccgggcagacggccccaggcatcgcgccacgtccagccgcgccccgggcccggttgcagcaccaccagcgtgtccaggaagccctccccgggcagcgtcgtgcaacgttcggggtgagaagtggcggggtcggcgcagtttgggctcacgcgccgtggagcagcagcagctccgccactcgggcgctgcccatcatcatgacctccggccaacggagactcctgtacaaatctacatcggcgatctaggttccagccccgatccgccgaggccgcgccccgcgttcgcgcgccccctgccggcgaggccctggggccccagctacctggatcgcgcgcctcccgaaacggttgactccgttgggatccgcgccggcttccaggagctgtcgcaccttctccactagtccccgcgccgcggcgctggccagaccctcatcgctgccgcccccactgggcatgcccttgttctcctcgcgcattccgcagcccccagacgcgcagcggcccggataatccaccgttggccgtaaacttaacgacactcttcccttctttcccacgctgctccggcgcactctctccttcctaggagacctgggctcagcttctattaccctcccgtcgtccttctgcggcttggggccccgtgcagtggccgagcggccggtcgttagctccgggcttttcctggcgctcaagaaccagcgggcgcgcctggattgcttatgggaaaaagcgcctagcgcggacgcagccgagctcaaagccgctctggccgcagggtgcggacgcgtcgcggagtcctc

SEQ ID NO: 91818 - DNA, 1847 bp, Homo sapiens
gggcgggcgggcgcggggcgggggggatggccgagaagcgaaggggctcgccgtgcagcatgctaagcctcaaggcgcacgctttctcggtggaggcgctgatcggcgccgagaagcagcaacagcttcagaagaagcggcgaaaactgggcgccgaagaggcggcgggggccgtggacgacggaggctgcagccgcggcggcggcgcgggcgaaaagggttcttctgagggagacgaaggcgctgcgctcccgccgccggctggggcgacgtctgggccggctcggagtggccctttctctgtcctttgctgtccaggcggctgtgaggacggcttccagcagggagcttcccctctggcgtcaccgggaggctcccccaaggggtctccggcgcgctccctggcccggcccgggacccctctgccctcgccgcaggccccgcgggtggatctgcagggagccgagctctggaagcgctttcatgagataggcactgagatgatcatcaccaaggccggcaggcgcatgtttccagcaatgagagtgaagatctctggattagatcctcaccagcaatattacattgccatggatattgtaccagtggacaacaaaagatacaggtatgtttaccacagttcgaaatggatggtggcaggtaatgctgactcgcctgtgccaccccgtgtgtacattcatccagactcgcctgcctcgggggagacttggatgagacaagttatcagcttcgacaagctgaagctcaccaacaatgaactggatgaccaaggccatattattcttcattctatgcacaaataccaaccgcgagtgcacgtcatccgtaaagactgtggagacgatctttctcccatcaagcctgttccatccggggagggagtaaaggcattctcctttccagaaactgtcttcacaaccgtcactgcctatcagaatcagcagattactcgcctgaagatagataggaatccatttgctaaaggcttccgagactccgggcgcaacagaatgggtttggaagccttggtggaatcatatgcattctggcgaccatcactacggactctgacctttgatctttacatttcaacttcttttgtaggcaatgcaagttcctccaccttgctccaaggtactgggaatggcgttcctgccactcaccctcaccttttgtctggctcctcttgctcctctcctgccttccatctggggcccaacaccagccagctgtgtagtctggcccctgctgactattctgcctgtgcccgctcaggcctcaccctcaaccgatacagcacatctttggcagagacctacaacaggctcaccaaccaggctggtgagacctttgccccgcccaggactccctcctatgtgggcgtgagcagcagcacctccgtgaacatgtccatgggtggcactgatggggacaccttcagctgcccacagaccagcttatccatgcagatttcgggaatgtccccccagctccagtatatcatgccatcaccctccagcaatgccttcgccactaaccagacccatcagggttcctataatacttttagattacacagcccctgtgcactatatggatataacttctccacatcccccaaactggctgccagtcctgagaaaattgtttcttcccaaggaagtttcttggggtcctcaccgagtgggaccatgacggatcggcagatgttgccccctgtggaaggagtgcacctgcttagcagtgggggtcagcagagtttctttgactctaggaccctaggaagcttaactctgtcatcatctcaagtatctgcacatatggtc

SEQ ID NO: 91819 - DNA, 1066 bp, Homo sapiens; identical to SEQ ID NO: 59422

SEQ ID NO: 91820 - DNA, 1452 bp, Homo sapiens
atggcggagctgcggcctagcggcgcccccggccccaccgcgcccccggcccctggcccgactgcccccccggctttcgcttcgctctttcccccgggactgcacgccatctacggagagtgccgccgcctttaccctgaccagccgaacccgctccaggttaccgctatcgtcaagtactggttgggtggcccagaccccttggactatgttagcatgtacaggaatgtggggagcccttctgctaacatccccgagcactggcactacatcagcttcggcctgagtgatctctatggtgacaacagagtccatgagtttacaggaacagatggacctagtggttttggctttgagttgacctttcgtctgaagagagaaactggggagtctgccccaccaacatggcccgcagagttaatgcagggcttggcacgatacgtgttccagtcagagaacaccttctgcagtggggaccatgtgtcctggcacagccctttggataacagtgagtcaagaattcagcacatgctgctgacagaggacccacagatgcagcccgtgcagacaccctttggggtagttaccttcctccagatcgttggtgtctgcactgaagagctacactcagcccagcagtggaacgggcagggcatcctggagctgctgcggacagtgcctattgctggcggcccctggctgataactgacatgcggaggggagagaccatatttgagatcgatccacacctgcaagagagagttgacaaaggcatcgagacagatggctccaacctgagtggtgtcagtgccaagtgtgcctgggatgacctgagccggccccccgaggatgacgaggacagccggagcatctgcatcggcacacagccccggcgactctctggcaaagacacagagcagatccgggagaccctgaggagaggactcgagatcaacagcaaacctgtccttccaccaatcaaccctcagcggcagaatggcctcgcccacgaccgggccccgagccgcaaagacagcctggaaagtgacagctccacggccatcattccccatgagctgattcgcacgcggcagcttgagagcgtacatctgaaattcaaccaggagtccggagccctcattcctctctgcctaaggggcaggctcctgcatggacggcactttacatataaaagtatcacaggtgacatggccatcacgtttgtctccacgggagtggaaggcgcctttgccactgaggagcatccttacgcggctcatggaccctggttacaaattctgttgaccgaagagtttgtagagaaaatgttggaggatttagaagatttgacttctccagaggaattcaaacttcccaaagagtacagctggcctgaaaagaagctgaaggtctccatcctgcctgacgtggtgttcgacagtccgctacac

SEQ ID NO: 91821 - DNA, 1715 bp, Homo sapiens
ggtacctcctgccagcatctcttgggtttgctgagaactcacgggctccagctacctggccatgaccaccacatttctgcaaacttcttcctccacctttgggggtggctcaacccgagggggttccctcctggctgggggaggtggctttggtggggggagtctctctgggggaggtggaagccgaagtatctcagcttcttctgctaggtttgtctcttcagggtcaggaggaggatatgggggtggcatgagggtctgtggctttggtggaggggctggtagtgttttcggtggaggctttggagggggcgttggtgggggttttggtggtggctttggtggtggcgatggtggtctcctctctggcaatgagaaaattaccatgcagaacctcaatgaccgcctggcctcctacctggacaaggtacgtgccctggaggaggccaatgctgacctggaggtgaagatccatgactggtaccagaagcagaccccagccagcccagaatgcgactacagccaatacttcaagaccattgaagagctccgggacaagatcatggccaccaccatcgacaactcccgggtcatcctggagatcgacaatgccaggctggctgcggacgacttcaggctcaagtatgagaatgagctggccctgcgccagggcgttgaggctgacatcaacggcttgcgccgagtcctggatgagctgaccctggccaggactgacctggagatgcagatcgagggcctgaatgaggagctagcctacctgaagaagaaccacgaagaggagatgaaggagttcagcagccagctggccggccaggtcaatgtggagatggacgcagcaccgggtgtggacctgacccgtgtgctggcagagatgagggagcagtacgaggccatggcggagaagaaccgccgggatgtcgaggcctggttcttcagcaagactgaggagctgaacaaagaggtggcctccaacacagaaatgatccagaccagcaagacggagatcacagacctgagacgcacgatgcaggagctggagatcgagctgcagtcccagctcagcatgaaagctgggctggagaactcactggccgagacagagtgccgctatgccacgcagctgcagcagatccaggggctcattggtggcctggaggcccagctgagtgagctccgatgcgagatggaggctcagaaccaggagtacaagatgctgcttgacataaagacacggctggagcaggagatcgctacttaccgcagcctgctcgagggccaggatgccaagatggctggcattggcatcagggaagcctcttcaggaggtggtggtagcagcagcaatttccacatcaatgtagaagagtcagtggatggacaggtggtttcttcccacaagagagaaatctaagtgtctattgcaggagaaacgtcccttgccactccccactctcatcaggccaagtggaggactggccagagggcctgcacatgcaaactccagtccctgccttcagagagctgaaaagggtccctcggtcttttatttcagggctttgcatgcgctctattccccctctgcctctccccaccttctttggagcaaggagatgcagctgtattgtgtaacaagctcatttgtacagtgtctgttcatgtaataaagaattacttttccttttgcaaaaaaaaaa

SEQ ID NO: 91822 - DNA, 3706 bp, Homo sapiens
gggtcgacccacgcgtccgttccaagacaccattacaaagaaagccggactcttttcttataactgagctcagccaaggaaactcttgcacaaatgtacaatactgtttggaatatggaagacctggatttagaatatgccaagacagatataaattgtggcacagacttgatgttttatatagaaatggacccaccagcactgcctcctaaaccaccaaaacctactactgtagccaacaacggtatgaataacaatatgtccttacaagatgctgaatggtactggggagatatctcgagggaagaagtgaatgaaaaacttcgagatacagcagacgggacctttttggtacgagatgcgtctactaaaatgcatggtgattatactcttacactaaggaaagggggaaataacaaattaatcaaaatatttcatcgagatgggaaatatggcttctctgacccattaaccttcagttctgtggttgaattaataaaccactaccggaatgaatctctagctcagtataatcccaaattggatgtgaaattactttatccagtatccaaataccaacaggatcaagttgtcaaagaagataatattgaagctgtagggaaaaaattacatgaatataacactcagtttcaagaaaaaagtcgagaatatgatagattatatgaagaatatacccgcacatcccaggaaatccaaatgaaaaggacagctattgaagcatttaatgaaaccataaaaatatttgaagaacagtgccagacccaagagcggtacagcaaagaatacatagaaaagtttaaacgtgaaggcaatgagaaagaaatacaaaggattatgcataattatgataagttgaagtctcgaatcagtgaaattattgacagtagaagaagattggaagaagacttgaagaagcaggcagctgagtatcgagaaattgacaaacgtatgaacagcattaaaccagaccttatccagctgagaaagacgagagaccaatacttgatgtggttgactcaaaaaggtgttcggcaaaagaagttgaacgagtggttgggcaatgaaaacactgaagaccaatattcactggtggaagatgatgaagatttgccccatcatgatgagaagacatggaatgttggaagcagcaaccgaaacaaagctgaaaacctgttgcgagggaagcgagatggcacttttcttgtccgggagagcagtaaacagggctgctatgcctgctctgtagtggtggacggcgaagtaaagcattgtgtcataaacaaaacagcaactggctatggctttgccgagccctataacttgtacagctctctgaaagaactggtgctacattaccaacacacctcccttgtgcagcacaacgactccctcaatgtcacactagcctacccagtatatgcacagcagaggcgatgaagcgcttactctttgatccttctcctgaagttcagccaccctgaggcctctggaaagcaaagggctcctctccagtctgatctgtgaattgagctgcagaaacgaagccatctttctttggatgggactagagctttctttcacaaaaaagaagtaggggaagacatgcagcctaaggctgtatgatgaccacacgttcctaagctggagtgcttatcccttctttttctttttttctttggtttaatttaaagccacaaccacatacaacacaaagagaaaaagaaatgcaaaaatctctgcgtgcagggacaaagaggcctttaaccatggtgcttgttaatgctttctgaagctttaccagctgaaagttgggactctggagagcggaggagagagaggcagaagaaccctggcctgagaaggtttggtccagcctggtttagcctggatgttgctgtgcacggtggacccagacacatcgcactgtggattatttcattttgtaacaaatgaacgatatgtagcagaaaggcacgtccactcacaagggacgctttgggagaatgtcagttcatgtatgttcagaagaaattctgtcatagaaagtgccagaaagtgtttaacttgtcaaaaaacaaaaacccagcaacagaaaaatggagtttggaaaacaggacttaaaatgacattcagtatataaaatatgtacataatattggatgactaactatcaaatagatggatttgtatcaataccaaatagcttctgttttgttttgctgaaggctaaattcacagcgctatgcaattcttaattttcattaagttgttatttcagttttaaatgtaccttcagaataagcttccccaccccagtttttgttgcttgaaaatattgttgtcccggatttttgttaatattcatttttgttatccttttttaaaagtaaatgtacaggatgccagtaaaaaaaaaaaatggcttcagaattaaaactatgaaatattttacagttttttttgtacaaaggacttggctgttaccccagggttaaaaagttcataacaaattttttttggactgttttgttgggcagtgcctgataagcttcaaagctgctttattcaataaaaaaaagaaatgaaaaagatatatgaatatgacaaagtattgctgagtccaacaatgttgttttaagactcttaaaatacgggtacctgggcaatggttaattttccataaaagaattgtgaacttcttgaaatctaggggagggggaatgtagtgaagggatgtatcaagtggggtggtgggagggggaggcaaggttatatgcactttctcatgatttacagagaagtgaataactgcaaagtgaagttgcttcttctacttcagtcttctctcactttgatttgctagttgttatcaattaatgacaattacaaacctactgtatctctaatacagtgtgactggtcaggtatttcagttcttaggaaggaagtgccaagtttgtttttgggttcctggaacagcgctcacctttgtttagaacactggtttaaagggataatcatctctgtcacattagactatccatcatgaccagcaaatactcattttaggaaaaaaaaaagcatgatctgaaaaatacttttggtggtatgttggttaccctcctagctttccatttggtttagaacataaagcaaatagacacagtcatactgtcactgctctggactgtgtggagctcgctaaagtcatggtcattgcaggaatccaagtggcagtccttctcattcattctaatcattgtatgtgcttcactacgggggggagaaggaaacgttagcatcatgtttcccatttagggcaggagtgagaggtctctcttcctgatttagatatgcaaaagctggtatgttcagtaggaactgtacatgtgttgggaggcataaagactaattagcaaccataatatggtcactaccctaatagactaaatgaaatcttgcaatttcaaaattactcctttccccaatattaagatttaccccacaagctaatatttcccgtttaaagtactaagggtgagggttttctgttactttgttttttaatgttgttccttttgaaagaatcagtcttgcagctgagtgaaaaatctgtggaatgtattatttgtcctctttacatgaaactactcatacttaagcaaaagtcagtcttatagcaaga

SEQ ID NO: 91823 - DNA, 1079 bp, Homo sapiens
ttttttttttttcaggcttccgggtctttaatggggcgggggctgggggcagttcatccaaaggtggctccgaagctgaggtcaaccttggcggctggctctgcagggcagaggaggatggtaagcggcccgtcagcatggggggatcttgataggcggaaggagagccccatgggtggcagccacagctcaaagctgaggaggagcttccctggcccagtccccagagctttcaacacaggcagggcctggggcccaggcagaagcctgcactgccctctgggtggcctccttggcaggcgcggcttccccaggtggccgggacaacaggagctgggctgggcccactgggcatccctgaccagccctgggccggccctcgggacaccgggggtacgcaccgcctactccagggccttcaccagggcctcgttggcctcgattcggatctggatctctgcccgcgtggcctcgtcagctgtccccaccagctccgcctgggccttctccaagtttgccttggctgcccccaggtccaacatgtccagcgtcacggcctcttcggccaacaactgcaccgaagagtcggcgttcactgcgatggaaccgctgctcacaaagtatttggaggtggtgccgtcctctgcatgcaccacgaccagccccggccgcaggacctgcagcgtgggcacgtgggccgccaggatgccgaaggctccggtcagcgtgggcacgtccacctgccggacgttggcaccgttgaagaacacctgcagacaacagcgtggggaatgatggcggggcaggccggccccgcgcccaccgggcactcggcctgtcctgctaagtaatgggtcagggcaggacctggcgctgatgtgaggcactgagacaacccagcgcagggatccgaagttgcagctttggtcctcaacagttgcgcctcattctactgatccgcgaaatgggaatgcaacgatccggcgacacccaggctttggccagggagatcggggagggcacccaggagacgcttatctcggggaggtgcccgggacgagggcagcgcagggctcggg

SEQ ID NO: 91824 - DNA, 3592 bp, Homo sapiens
ctcaggctcataccacacggggggtgctagtgggctgctgtgtgtttacatgagtaatggagctgccgggggaggggagttgtaagcagagcgctgagcctcgcagctcgcattcggagggaagctgacatccacaccaagtcgagacttccagggatgtggccggggagcagtcacatgctgtagctttcatgagcacaggcatcagtcaggcagatgtttgtcgactggaatggcgccaaatcttaaaggcagaccacgcaaaaagaaaccatgcccacaaagaagagattcattcagtggtgttaaggattccaacaacaattccgatggcaaagccgttgccaaggtgaaatgtgaggccaggtcagccttgaccaagccgaagaataaccataactgtaaaaaagtctcaaatgaagaaaaaccaaaggttgccattggtgaagagtgcagggcagatgaacaagccttcttggtggcactttataaatacatgaaagaaaggaaaacgccgatagaacgaataccctatttaggttttaaacagattaacctttggactatgtttcaagctgctcaaaaactgggaggatatgaaacaataacagcccgccgtcagtggaaacatatttatgatgaattaggcggtaatcctgggagcaccagcgctgccacttgtacccgcagacattatgaaagattaatcctaccatatgaaagatttattaaaggagaagaagataagcccctgcctccaatcaaacctcggaaacaggagaacagttcacaggaaaatgagaacaaaacaaaagtatctggaaccaaacgcatcaaacatgaaatccctaaaagcaagaaagaaaaagaaaatgccccaaagccccaggatgcagcagaggtttcatcagagcaagaaaaagaacaagagactttaataagccagaaaagcatccctgagcctctcccagcagcagacatgaagaaaaaaatagaagggtatcaggaattttcagcgaagcccctggcatccagagtagacccagagaaggacaacgaaacagaccaaggttccaacagtgagaaggtggcagaggaggcgggagagaaggggcccacacctccactcccaagtgctcctctggccccagaaaaagattcagccttggtccctggggccagcaaacagccactcacctctcctagtgccctggtggactcaaaacaagaatccaaactgtgctgttttacagagagccctgaaagtgaaccccaagaagcatccttccccaggcttccccaccacacaggccaccgctggcaaaccagaatgagacggaggatgacaaactgcccgccatggcagattacattgccaactgcaccgtgaaggtggaccagctgggcagtgacgacatccacaatgcgctcaagcagaccccaaaggtccttgtggtccagtcgtttgacatgttcaaagacaaagacctgactgggcccatgaacgagaaccatggacttaattacacgcccctgctctactctaggggcaacccaggcatcatgtccccactggccaagaaaaagcttttgtcccaagtgagtggggccagcctctccagcagctacccttatggctccccaccccctttgatcagcaaaaagaaactgattgctagggatgacttgtgttccagtttgtcccagacccaccatggccaaagcactgaccatatggcggtcagccggccatcagtgattcagcacgtccagagtttcagaagcaagccctcggaagagagaaagaccatcaatgacatctttaagcatgagaaactgagtcgatcagatccccaccgctgcagcttctccaagcatcaccttaacccccttgctgactcctacgtcctgaagcaagaaattcaggagggcaaggataaactcttagagaaaagggccctcccccattcccacatgcctagcttcctggctgacttctactcgtcccctcatctccatagcctctacagacacaccgagcaccatcttcataatgaacagacatccaaatacccttccagggacatgtacagggaatcggaaaacagttcttttccttcccacagacaccaagaaaagctccatgtaaattatctcacgtccctgcacctgcaagacaaaaagtcggcggcagcagaagcccctacggatgatcagcctacagatctgagccttcccaagaacccgcacaaacctaccggcaagggcctgggcctggctcattccaccacagggccccaggagagcaaaggcatctcccagttccaggtcttaggcagccagagtcgagactgtcaccccaaagcctgtcgggtatcacccatgaccatgtcaggccctaaaaaataccctgaatcgctttcaagatcaggaaaacctcaccatgtgagactggagaatttcaggaagatggaaggcatggtccacccaatcctgcaccggaaaatgagcccgcagaacattggggcggcgcggccgatcaagcgcagcctggaggatttggaccttgtgattgcagggaaaaaggcccgggcagtgtctcccttagacccatccaaggaggtctctgggaaggagaaggcctctgagcaggagagtgaaggcagcaaagcagcgcacggtgggcattccgggggcggatcagaaggccacaagcttcccctctcctcccctatcttcccaggtctgtattccgggagcctgtgtaactcgggcctcaactccaggctcccggctgggtattctcattctctgcagtacttgaaaaaccagactgtgctttctccactcatgcagcccctggctttccactcgcttgtgatgcaaagaggaatttttacatcaccgacaaattctcagcagctgtacagacacttggctgcggctacacctgtaggaagttcatatggggaccttttgcataacagcatttaccctttagctgctataaatcctcaagctgcctttccatcttcccagctgtcatccgtgcaccccagtacaaaactgtaggctcagctctgcccagcagtccaaagcggcatggccaacagagcttcactccttacccaggagtgctggcttatagagttagaagtcagtatttcttctaatctgaggctatgatcagtcccagctgtaggggcccagaggggaggtgaacatgcctgatttttgtgggacaactgtagcccacaaactgactggctggtgagtcttgactcccttccaacacagatgcccaggcacctccagatcattcacttcgcacgtgggccttgtgaagggatttgtgaatatccaggaagaacttagaggaccccatctgagttcggatggtcaggaaacaatctgggcaaaaaagaggcaggcatttcaaaggaaggggcaaggaagactggcaaacagatggcaagggatgcccctctttttcataaaactctccaaggttcaatcaatgcaatgtatagtgaaacttcaatagatctttcattttgacactattaaacaatccagagaagtaaacactgtt

SEQ ID NO: 91825 - DNA, 1920 bp, Homo sapiens
gtcggaaaatccgcgagaccacgcgtccgggttgaggacaccttgactaacctccaagggcaactaaaggatcaagaaaggcccagcacagcagaagatcagctggatctagctcctgcaggagatgtgtacaaagacaatcccagtcctctggggatgtttcctcctgtggaatctctatgtctcatcctctcagaccatttaccctggaatcaaggcaaggattactcagagggcacttgactatggtgttcaagctggaatgaagatgattgagcaaatgctaaaagaaaagaaactcccagatttaagcggttctgagtctcttgaatttctaaaagttgattatgtaaactacaatttttcaaatataaaaatcagtgccttttcatttccaaatacctcattggcttttgtgcctggagtgggaatcaaagcgctaaccaaccatggcactgccaacatcagcacagactgggggttcgagtctccactttttgttctgtataactcctttgctgagcccatggagaaacccattttaaagaacttaaatgaaatgctctgtcccattattgcaagtgaagtcaaagcgctaaatgccaacctcagcacactggaggttttaaccaagattgacaactacactctgctggattactccctaatcagttctccagaaattactgagaactaccttgacctgaacttgaagggtgtattctacccactggaaaacctcaccgacccccccttctcaccagttccttttgtgctcccagaacgcagcaactccatgctctacattggaatcgccgagtatttctttaaatctgcgtcctttgctcatttcacagctggggttttcaatgtcactctctccaccgaagagatttccaaccattttgttcaaaactctcaaggccttggcaacgtgctctcccggattgcagagatctacatcttgtcccagcccttcatggtgaggatcatggccacagagcctcccataatcaatctacaaccaggcaatttcaccctggacatccctgcctccatcatgatgctcacccaacccaagaactccacagttgaaaccatcgtttccatggacttcgttgctagtaccagtgttggcctggttattttgggacaaagactggtctgctccttgtctctgaacagattccgccttgctttgccagagtccaatcgcagcaacattgaggtcttgaggtttgaaaatattctatcgtccattcttcactttggagtcctcccactggccaatgcaaaattgcagcaaggatttcctctgcccaatccacacaaattcttattcgtcaattcagatattgaagttcttgagggtttccttttgatttccaccgacctgaagtatgaaacatcctcaaagcagcagccaagtttccacgtatgggaaggtctgaacctgataagcagacagtggagggggaagtcagccccttgattgccggtttgcaattcaccccaggaagtaaatggtccttaatcctacaactactgtaaacccagaagggaaagacagtacacactggaattgtaaagcccttgtgaattgcttaggcagaaagttttctttcttaagccttcaggaacccagaataaggcagactctgttaaagggataaatagaggtgtctgaatgtgagtgtatgcatgctgcgtgtgtctgtgtttatgtttgtttgtttgtttggggcaagaaagattctaggacaagagctaggcatgtacttctgaccaggtgggtaagcaactctaagtctgtatttgtattggtcattctcagtggaaatcccttaggccctctagtggttttcccctacctgcatattggttttcatgttttatattcactgttactatcttctgtgg

SEQ ID NO: 91826 - DNA, 373 bp, Homo sapiens
  misc_feature (1)...(373): n = a,t,c or g
aaattccaaagattcagaggtttcctcacaggaatccaggacaaagaccagaccagacaaattatataatacctccccatcttaaaggtatgtggaatgcatgatttttaggtagcttgactacacaggccagcttagcatgctgcagagtcataaacaccacctggaagaggtaaggcagggcaagtttgtttctgcagctttttgtcgatcctttttatggttgttacccagtgatttaccacttgtcttattgggtgctatttgctttgagctttccttttccctggagatgctcttttctgagtcaagctttttcttctccgcagggaatctgatcccatctcttcacaccagagtgagtggtcctttn

SEQ ID NO: 91827 - DNA, 2814 bp, Homo sapiens
  misc_feature (1)...(2814): n = a,t,c or g
ttttttttttttggcagctcactccaggtttatttcagggcagtttgggggtgggggacaaagacccccctccagctcctaaactgggtcacttttctcccaggtgaaggggaccatcctcatgggatcctatcgatgtgagagctttgtgtccaccaggtgtggctgggtgcaccaaggtgaagggtttgagggctgcacagggacccccagcactgggagtttggcctcctccctcagactggatggtttcccagggttggaaaggggcaggtctcccctctcagcttgggacttctcagagggaggagctgagtgtctcctccctcagacccgcagcccctcaaggtgctgcgatctgtgccaccctctttgaccggtccctctgccctcagactagcggaagcaaattacacctgaaagtggaggagcgggtctctttctttcttagacccagggcatttgggcaaagtcttagaagcagaaagaatcagcaggggtcccatttcatccccaaaagctttagaccccaaaggcagaaacatttctaaaggaagatagaaacggaaacgaaaaacccaacagtcccaaatgtgcccatggtgggattgttggcagatgagctgtggttcttggatcctggacctaggacccatttcctagggtgggggcttggcgatggtcttggcagttcccacgagggtcagggcagggcagggggtgggcgccccatcccgaggctcagtcatcctcctcactggcgtagatgcgggattcccagcgctctgccatggcgttcttgtgacgggtcacccgtatggcttccaggacctctgagttgataccgtccgaggggttgatgccagcgtaccattgctccttctttctctgcccgggaggagcactgtccactggatcttccactgtccacgccacgtttgagtgtaggtggatggggctgaagaagggagactcagacaccgagtaactgcccgtgatgccggatgcctgggaggagctcctggagttctggtcagagttctcatctggcgttggggagaagacctctgggaagagagcatttctccgctcctctgccacctcttgctcccggcgcaggacactctccctctccctttccagcagatcagatgactgggacttctgcagcctcagtgcaggggccccagccacctcccagccccagacatgggggacttgggcctgctggggctcgtctggggccctgaaccgcagaggacgcaggcggaagtactcccaccgcacgacacccctgttggcttgcgggcatccccgagggggcttcgatgcctcttgctttgtgctcaggggttttccagaggattctgagagatgcctcggggacatcgtggcctttggtgaagtcgcagccttggcctccgctgtggagagactgctgggcttgccgaatgctccgaaggctgagaattctagctggggggtcccggggctcaggtacggctggtaggcatcaggtgggatgcggttcaccttcctcacttctggagctgggtcggccgcacgggcatctggggccgggctgaggatggaatctgagctgagggctctccggagtccgggctggggaccctccgagacccagtcgggtgtggacgcccggcccacgtgcaggccctcccgccggtggtcttcctcacgctgtgtctcctgtactatgtcccgctgcacgtagagggacgggcgccctctctcccgccgtggggctgtgatcaggctcagcttggtcagcagcggcctggtggggatttccaccagctcctggtggtcggttgcctgccgaagccccctctgctctcgcaggtctgcctcacgctcctgagccagacggatctcccgctcgatgggcgtctccttgggggtccccggggactccactgaggccaaggagccagggtcatccacaacttggacactggcccaggtgggcacagcacgcaccttgttctcttccctgaccacccccttcacctggggcttgatgggaaccacgtgcccgttggccaggtggggcttgttgaaggccttgggggcctggctggcccctggggttgtgcctgcgggggtccccctggccggggagctatgaggggcccccttgttcgcctgctccagactcaggaactgctgtctcgctgccaggaagtcaatctgctccctgtcaaccacgttctcctccaggggcgtggaccgaggtgggccgggggtcctggggtctccgtggtcaggagtgccctggagcgtggccacggtgctgctcttcctgactgcctggccctggatgacggcccagcgctcccgctccaggtcacacagcctcctggggtcagcgtccccagcatccaggcggtaggtcttcatctccttgtcctccccgtcctctgggcggagtgcccatgttggacgtccctggtgggcatccctggcgcccaggcggtaaacctgccaaccctcatcctccctgttctccgagtggagcccccgtggggacggctggccagtgtaggcatgcacgctgtaggacaccccctgcctctgcacgccctgctgggccctgtggtcagtgggccatgtctgcggctcatcctggccccagccgctggcctcggggcccatgcacaccagatggtatgtgtagctggtgtctccatccagcaccaggccggtgccacgggtgttccctgagggaatgcccaaggaatnggggtaatttgggtcnacggcgggttcaatctctttccgggggtctttggg

SEQ ID NO: 91828 - DNA, 4552 bp, Homo sapiens
acggggaagctgggacttagagcccagctttgtgaccagcgaaggtcacaaagctggtggtggagccagcactagcgcccaggtcttctttctcacatcacatttcctctccagggagcagtacaagatgttattaggcagcaaggaggagtttgtggcgaccttcaaaggcaatgagttcttctgctacgacctgtcacacaaccccatccagagcagcactgatgagatcacactggccttccgcaccctgcaacgcaacggcctgatgctgcatacaggcaagtcggccgactacgtcaacctgtccctcaagtctggggctgtctggctggtcatcaacctaggctcaggtgccttcgaggcccttgtggaacccgtcaatggcaagttcaacgacaacgcctggcacgacgtccgggtcacccgaaacctgcgccagcacgcagggattggacacgctatggtgaccatctcggtggacgggatcctgaccaccacaggctacacgcaggaggattacaccatgctgggctctgatgacttcttctacattgggggcagccccaacacagctgacctgccgggctcgcccgtcagcaacaacttcatgggctgcctcaaggacgtggtctataagaacaatgacttcaaattggaactatcccgcctggcaaaggaaggggaccccaagatgaagctgcagggggacttgtcattccgctgtgaggatgtggctgccctggaccctgtgacctttgagagtcccgaggcctttgtggcgctgccccgctggagcgctaagcgcactggctccatctccctagacttccgcaccaccgagcccaatgggctgctgctcttcagccagggccggcgggctgggggtggagctggcagccacagctctgctcagcgggccgactactttgccatggagctattggacggccacctctatcttctgctggacatgggatctgggggcatcaagctgcgggcatccagccgcaaggtcaatgatggcgagtggtgtcacgtggacttccagagggatgggcgaaaaggctccatctcagtgaatagtcgcagcacgccgttcttggccactggagacagcgagattctggacctggagagtgagctgtacctgggcggtctccctgaggggggccgggtggacctgcccctgcccccagaggtgtggacagcagcactccgggcaggctacgtgggctgtgtgcgggacctcttcatagatgggcgtagccgagacctccggggcctggctgaggctcagggggctgtgggcgttgcccccttttgctcccgggagacgctgaagcagtgtgcatctgccccctgtcgcaatgggggcgtctgtcgagaaggctggaaccgcttcatctgtgactgcatcgggaccggctttcttgggcgggtctgtgagagagaggccacggtcctgagctacgatggctccatgtacatgaagatcatgctgcctaacgccatgcacacggaggcagaggatgtgtccctgcgtttcatgtcccagcgggcctacggactcatgatggccaccacttccagggagtctgccgacaccctacgcctggagctggatggggggcagatgaagctcactgtcaacctcgactgcctgcgcgtcggctgcgcacccagtaaaggccccgaaacgctgtttgcggggcacaagctcaatgacaatgagtggcacacggtgagggtggtccggcgtggcaagagcctgcagctgtctgtggacaacgtgactgtggagggacagatggcaggagcccatatgcggctggagttccacaacattgagacgggcatcatgacggagcggcggtttatctccgtggtgccctccaacttcatcgggcatctgagtgggctcgtgttcaatggccagccctacatggaccagtgcaaggatggtgacatcacctactgtgagctcaatgctcgctttggcctgcgtgccattgtggccgatcccgtcaccttcaagagtcgcagcagctacctggcactcgccacgctccaagcctatgcttccatgcacctcttcttccagttcaagaccacggcccctgatgggcttcttctgttcaactcgggcaacggcaatgacttcattgtcatcgagctggtcaaggggtacatccactacgtgtttgacctggggaatggcccgtccttgatgaaggggaactcagacaaaccagtcaatgacaaccagtggcacaacgtggtggtgtccagggacccaggcaacgtgcacacgctcaagattgactcccgcactgtcacgcagcactccaatggcgcccgaaacctcgatctcaaaggggagttgtacattggcggtctgagcaagaatatgttcagcaacctgcccaagctggtggcctcccgggatggctttcagggctgcctggcctcagtggacctcaacggacgtctcccagacctcatcgccgacgccctgcaccgcattgggcaggtggagaggggctgtgatggccccagcaccacctgcactgaagagtcctgtgccaaccagggcgtctgcttgcagcagtgggatggcttcacctgcgactgcaccatgacttcctatggaggccctgtctgcaatgatcccgggaccacatacatctttgggaaggggggagcgctcatcacctacacgtggccccccaatgacaggcccagcacgaggatggatcgcctggccgtgggcttcagcacccaccagcggagcgctgtgctggtgcgggtggacagcgcctccggccttggagactacctgcagctgcacatcgaccagggcaccgtgggggtgatctttaacgtgggcacggacgacattaccatcgacgagcccaacgccatagtaagcgacggcaaataccacgtggtgcgcttcactcgaagcggcggcaacgccaccctgcaggtggacagctggccggtcaacgagcggtacccggcaggaaactttgataacgagcgcctggcgattgctagacagagaatcccctaccggcttggtcgagtagtagatgagtggctgctcgacaaaggccgccagctgaccatcttcaacagccaggctgccatcaagatcgggggccgggatcagggccgccccttccagggccaggtgtccggcctctactacaatgggctcaaggtgctggcgctggccgccgagagcgaccccaatgtgcggactgagggtcacctgcgcctggtgggggaggggccgtccgtgctgctcagtgcggagaccacggccaccaccctgctggctgacatggccaccaccatcatggagactaccaccaccatggccactaccaccacgcgccggggccgctcccccacactgagggacagcaccacccagaacacagatgacctgctggtggcctctgctgagtgtccaagcgatgatgaggacctggaggagtgtgagcccagtactggaggagagttaatattgcccattatcacggaggactccttagacccccctcccgtggccacccgatcccccttcgtgcccccgccccctaccttctaccccttcctcacgggagtgggcgccacccaagacacgctgcccccgcccgccgcgcgccgcccgccctctgggggcccgtgccaggccgagcgggacgacagcgactgcgaggagcccatcgaggcctcgggcttcgcctccggggaggtctttgactccagcctcccccccacggacgacgaggacttttacaccacctttcccctggtcacggaccgcaccaccctcctgtcaccccgcaaacccgctccccggcccaacctcaggacagatggggccacgggcgcccctggggtgctgtttgccccctccgccccggcccccaacctgccggcgggaaaaatgaaccaccgagacccgcttcagcccttgctggagaacccgcccttggggcccggggcccccacgtcctttgagccgcggaggccccctcccctgcgccccggcgtgacctcagcccccggcttcccccatctgcccacagccaaccccacagggcctggggagcggggcccgccgggcgcagtggaggtgatccgggagtccagcagcaccacgggcatggtggtgggcattgtggcggcggcggcgctctgcatcctcatcctcctctacgccatgtataagtaccgcaatcgtgatgagggctcctaccaggtggaccagagccgaaactacatcagtaactcggcccagagcaatggggcggtggtgaaagagaaggccccggctgcccccaagacgcccagcaaggccaagaagaacaaagacaaggagtattatgtctgagcccccggcactgcgccccactgccagctgcccctcctgggagggcccgggaggagggtgccaccctctccctgccaggggcctggggaccctctccctggctgcctcaggcttctcttacgaagaggaaacgcaaaaaaaaaa

SEQ ID NO: 91829 - DNA, 4132 bp, Homo sapiens
gttttaaatcataaatcagacacattaattataactttaacaaatgttattaaaagcagcaattaaaaaccatgaatctttttgaaggtgcagagggttataaggtcagttggcagtaatgcagctattatctggtatgaatgaaatgctggggtggggagtcagggtgacctcattaggccttgtgctatcttcccaggtggtgcagacaccccctccctccttttccctctccaggcccacagcctccccagagcccaggtagggaaggtccagatgtactgtaacaggattgctcatcccaggctatctcagaagtctggaaagcaggcctagaaggttgctgggctctctgaagccaggcaggaagctacaaattggatcccagttcccacagcacccctgggctaggggttggcttctcagctccccttccacctggccctagttggcccctgtggcagcagctgtggggctgaaaagggggaagaactgggtccaacgccagctcgtctatgcctgggctgtgccagggaagcagaggaaagtgggtgggctgtgcacaggaggtgaggtcccccttaaaaggcactgtgggagctgaggtctaagatgggggggcatctaaactatctcagggaccccctgaacgctcacaggtagagaggggtcaggcctagcaatggaaaaacagctcctgcaggcctgctgccccgccagtgcctcttgctgtactaccaccttcgccttcctgctggcggcctgcaaaaccagccaagctggaggccacagcagcagttggcaagggctggtccccatctggtgcccaccctccacgtcaaggcacttttgtccattttccaatcaagtgagtcagtttctaatatctctggaagcagcaaaacatcaggggtcctcttccccctcccaattttggtttccctccagatgaggcagaatttgaatgttggttccaaaaattctctttcaaacccccactggcaagggcttccctttgagggaaccaaatgatgcaggctctttaaaaatttcaacctatcccaaaaagtgattgtccatttcagggcagggcaagggatatgaaagagggtgagtcccctgtgcttccctatgggaccaatgctggttgatgggctgaaagaaggagcggccactgagctttcacatttagttgcagcacctgggccctggaagtgggccaagggaaagccaagggaggagccagcaggcccagagggacggtgtggctctgtgtgtgtacacttgggcatgtggtggtgtggccgtgtggggttgtctgcatgcctagagctgaaagtacaacacatgtggatggaagcttgtgcgagtgggtgtgtattgtctgctgtgtggtgtctggtgggtctggggatgggaggcaccagaaacaggtttagcaagacacatggtttccctcccaccactaccaccccccacccccgtcccccaggtttggaaggatgcctccattccagcaaggccaggcccagctctatggcgactgagggggtgaggccagagaacagaagacttctgggacctccaaagctgacattggcagccttcactctcagccttaatacctgggccctggtgctggtgccttctgaggcagacccagccctttactcttcagatcctcacaggctttcacaggggctctctcccatcccaccacctctctccgagggtagtggggagtggcaggaaagtggaagagaaaagcactgagcagcatcctcttatccaccttctcccatgctctctcaaaggtgcctgttatgtagtccctgggaggactggctgccccacgggtcacgtgtgaaggggatccagtggagggacagctgtgcacacacaggatgtgcgaacacacccagaaaggggcgagagaggtcaaggcacacaactggggacaaagacctgggcctcaggaggaagggtcccagcgcaggggacacaaggtcagagaacagataaacagagtttgagggggtgtggagtgtgtagagacacaggcacaggggtaacgagcctgaggaggccctggaacagagctggtacagcagagagacgcaggccttggcctggcaggcaggcaggcaggcagggcattctgccaggcacttgcagctctgtcctgcttccttctcccaccccagcctggagaaagctggggagcctatggcttctgctgctcctcctttggttttcaggacccctggcacccccgggggctagtcagtaaggggtggtcccttcccactccaccaggtactgaaccttgccctcaggtgtgaccctccgagccaacacctggtacttctccccacaggccaaccgcccagctgcaccaaagtagttggtgatagatgacttgaggtgggacagggatgagtcatcttcactgatgctctcaaatgtgtggctgtcaatgccttcgtctggccgctcggggactgaagccccctctgcactgctgtccgaggggcagcgtccatccagctcagctgcccaccgctttgcccgcaggggcatgtatgccttggctgccagcttcctctttcggctgcccactgtccatctggagtcataggagaggctggtggaggcagagccagaggtgctggcagcgtcggtggagtcgacatctgagaagaaggtctggcctgagctggcactttttaaactttgaatttcatccagcgtgaagtcaaatatgctagccaggtggtggttggtgctccaggctgaggtgaagtcactactgggaatagcatcttccagcaaaaactttgatctttttcttctataaactcgccttttctgctgctggaattcgtgaggcaacaaaccaggcttgctctttcctctcttacgcagctcagaggaggcgctgttctcatttggcagcagtcctttgtcaggcagcagcttccctggcgggttgggtgggacgcggatgcgcaggcggaagatgcacttcttcttcttgatctccttgccgcagaggaaccggcttttataactgttcagagcgttgaggagatgtggtcctcgatctgtcactggggtgctggtgagcttgccaagctgcaggagctcccagtggtggttgacaaaggccagaatctcctcaaagtcaaagtacttcttcttgctctgtacccccagattatagagggccaggtgaaccacatccacccatcgcaggggcagcctctcgatgtactctgggccctggttacacacggagcagaagaacaggtaaaaccggtctccaaacatcatgggctcattgaggcactgggtgcaggcctcgtggaaccactgcctgcaccggtaacattgcagcatccgcaggtaccattctccgggcccgccgcagtagcagtagcattgctgctggttggtgcgatggggcgagtcccactcgagctcctcgggctggtaggacagcaccatcttcacggcctgcagcgtcctggcgatggcgcccttcttcagcgcgccgcctttccgcacagccagtgcgaagatgcagcgtcggcagaaccaaggtgtgagcaggggctggtcagcactgcccgctatggggatgtggcactgctggtggtaacccaggccacacttcccgcagatgaggatctcattcagcggccctgatgtcttccctaggcagatgttgcacttgggctcctctcctggaacaccggcatgctgtatgtccttccataggacccagtatttggaattatcttcgaaagtcacgaggcagctttgcttagagctgctgaccctcttgatcttcccgaggtagtacaggccatctgtccaccggcacagcacatactggccctccgtcagtttggacatcaagtctttgaagttgttcttgaccttcgccagggcccccttgttggggaggtggctggtggcaccataggagtcccgagtccctggatccagagctcgattctccatcagcttcccctgacacgcgaggctgcgtgtccgccggtcccacttggagtctggccaccaggcgcatcggtggcggaggcgctgcgctcggcccgcggctgcccgg

SEQ ID NO: 91830 - DNA, 4094 bp, Homo sapiens
ctgcacacggtggtggcccgcgatccccgggacttaccactgaataaatccagtccagcgtgcgacgacttactggcttcatggggtcgcagccgccgctggggtctccgctgtctcgcgaggagggtgaagcgcccccgcctgctcccgcttcggagggtaggcggagaagtcgccgggtacgccttcgcggatcctgccgacaccgacctatctttctgggctgccgggagctcgcggcgagcgccccagccaggcctgcgccggcatcctccgagataatggcatcagctgctaaggaatttaaaatggacaacttttcacctaaagctggcactagcaaattgcaacagacagtaccagctgatgcatctcctgattctaagtgtcctatatgcttggatagatttgataatgtgtcttacttagatcgctgcttacataagttctgttttcgctgtgtacaggagtggtcaaaaaacaaagctgaatgcccactatgtaaacagccctttgattctattttccattctgtgagggcagaagatgacttcaaggagtatgtcctaaggccttcgtataatggttcttttgtcacccctgatcgacgatttcgctaccgtacaactctgacaagggaacgaaatgcttctgtgtattcacctagtggtcctgtgaacagaagaacaacaactccaccggatagtggagtactgtttgaagggttaggcatttcaacaagacctagagatgttgaaattcctcagtttatgagacagattgcagtaaggaggccaactacggcagatgaaagatctttgcggaaaattcaagaacaagatattattagttttagacgaactctttatcgtgctggtgctcgagttagaaatattgaagatggtggccgctacagggatatttcagctgaatttttccgtagaaatccagcttgccttcacagattagtcccctggttaaaacgtgaacttacagttctttttggagctcatggatctttagtgaatattgtccagcatattatcatgagtaatgttactcgctatgacttggagagtcaggcatttgtgtctgatttaagaccatttttacttaatcgaactgagcattttatacatgaatttatcagttttgcccgatctccttttaacatggcagcctttgaccagcatgccaattatgattgccctgctccttcatacgaagaaggcagccattctgattcttcagtcataacaatatctccagatgaggctgagacccaagagctggatattaatgtagccactgttagtcaggcaccatgggatgatgaaactccaggaccatcttactcaagctcagagcaggtacacgttactatgtcttctcttttaaatacttctgacagttcagatgaagaacttgtcacaggaggagccacgtctcagatacaaggagtacaaaccaatgacgacctaaataatgacagtgatgattcttcagataattgtgtcattgttgggtttgttaaaccactagctgagaggaccccagaacttgttgaactgtcctctgattctgaggacttaggttcttatgagaaaatggagacagtgaagacacaagaacaggagcaatcttacagttctggtgatagcgatgttagtagatgctcatctccacactctgtccttggaaaggatgaacaaataaataaaggtcattgtgattctagtacaagaatcaaatcaaagaaggaagagaaacgatctacatcattgtcatctcccagaaacctgaactcatctgtaagaggagacagagtatattctccatataaccatagacacagaaagaggggaagatcaagaagttcagattcacgttctcagagtagaagtgggcatgatcagaagaatcatagaaagcatcatgggaagaaaagaatgaaaagtaaacgatccagaagcagggaaagtagcagacctagagggagaagagacaaaaagagatcaagaactagagatagcagttggtccagaagaagccaaactctgtctctaagtagtgaaagcacaagcagatcaaggtctcgtagcagtgatcatggtaaaagaagatcacggagcagaaatagagatcgttattatttaagaaataattatggaagcagatacaaatgggagtatacttattacagtagaaacaaggacagggatgggtacgaatcatcttacaggaggaggactctgtccagagctcattattctagacagtcttcaagtccagaatttagagttcagtccttttctgaaagaacaaatgctaggaaaaaaaataatcacagtgagaggaagtattactactatgaaaggcacagatcaaggagcctgtctagtaacagatcaaggactgcatctaccgggactgaccgggtgagaaatgaaaagcctggagggaaacgaaaatacaaaacacggcatttggagggtactaacgaagtggctcagccatctcgtgaatttgcttctaaagcaaaggacagtcattaccaaaaatcttcatcaaaattggatggaaactacaaaaatgagagtgataccttttcagacagccgatcatcagacagagagacaaaacacaaaaggagaaaaaggaagacccggagcctaagtgtagagatagtttatgaaggaaaagctactgatacaactaaacaccataaaaagaaaaagaagaaacataagaagaagcataagaaacaccatggagataatgcttcacgttccccagttgtaattaccattgacagtgacagtgataaggattctgaagtaaaggaggatacagaatgtgacaatagtggtcctcaagaccctctacaaaatgagtttttggctccttccttggaaccatttgaaactaaagatgtagttacaatagaagctgaatttggtgtgctggacaaggaatgtgatattgccacacttagtaacaacttgaataatgccaacaaaactgtagataatattccacctctggcagcttcagttgaacaaactcttgatgtaagagaagagagcacctttgtttctgatttggagaaccagcccagtaacattgtgtctcttcaaactgagccatcaaggcaattgccatcgccacggacatcattaatgtcagtatgtcttggtagagactgtgatatgtcttaaaactgccaaagcatttcattgagaattatgatgttataaaaaggaaaaaggaagaatgtcgtctactgcagtctatttaaagatgacatttggtgaaaactctcttcctccttacaatattttaaatgattttttttttggtgttaatttgtaaaaatcattatttgttcaaaatgtatgtcccaccctcaaagatatgcacttttaagtgaagaaaatgatactgctagcagcttatttaaaacttggggtcctttttaaataagaaaaattatataaattttagaagttatttcataaagccatacggtattgacatatttttaaggtagtcaatgagtatttttgaatttttttttttttgagagttattctggaaatgtgttataagctaggagaatccctttggacagtctttatttttcttcttaaaaatttatatgattcaaaaccatttcttcaggttaaattgaggcattttaatctgcacagtttatcttctgccaaaataaaaatttactatttcctttatatacttgtttatctggactgccagtaaaacaaatgtgtattcaacaaaagaaaaaaaataaaacagtaacactttaaaacaagaatcagacattttcctatgcagtatttttttttaaagtttattttagtaaagttaaaatcttgaaagtagctaagggcataattatgtcataaatactgaacttcaggtgaacaaatactttatagttttaattattttctttgattttgaggagtatcttatttgctttctatcatcagtaaaaacagcatttaacttgctaaataaacatgaaaaacccttggcatacttcttttacattgggaggtctttcatataag

SEQ ID NO: 91831 - DNA, 623 bp, Homo sapiens
aagatacaatacagtcaagcaacaggaggaaagaaacaacaaatgggagacatgaggttccgaggatcatggttccaacacaggacagcagaaaagaggagttgcaaaatgactgctacaaaacagacttaaagagaaaacattccagtttcacgtaggaggacaaaagaaaaaacaaaacaacatgaaagaaggatggagcaaatgccccagatgaagcctacacgacatgagtcagagaactttggccaggatgtctggggaaaaagtttcctctttcttctctgggaactatctggagagggttgttttaacgctggatgtgaacagcgactcgtgtagccccagaagcctctgacagccgcgttggaatcataagttctcaaaatgaaggtgacattgcaggaatcagggaagagggagggaaaaattatttaaagcctcacccaaggcgggccctaccacctgaatatttaagttacttgggccattaaattgtatttttaaagccagtgcaagtcaggttttttgttactaataaccaaaagatttctgaaagacaaaaaaaaaaaaaaggggggggcgctttaaaagaaccaagttttatgtcccggtgatggcaa

SEQ ID NO: 91832 - DNA, 1083 bp, Homo sapiens
tgtttcatgtgactctcatctgtgttcagcagtccagtcccctttccctcattttcccatcatctccttgccttaccttagttgaaacctatctggtccctgagagaatgtcagggccaggattggaggatgttcaggtttatttggtggtgaccacctatgccagtccacagagagaggttgttattgctggaggacaggaagcgtcttccttttttccgcctctcgttcgcttttgtcttacgaggcttccggaacacggcccagaattacagagaaaacacactgcgcacgcgcactctctcgtcaccgctgtgcggcttctgtttggttggccagttcgtcccaatttccgactcacagggctgcggagcagcaactctcacgatatttgctgcgacccgcaggcgctatccgctgccgggttctggcgcgccctttcagttctgcttgctgtccgcaccgctgcgttacccggaaccgccgggccgaacagcatgacgtccgctttggagaactacatcaaccgaactgttgccgttattacatcagatgggagaatgattgtgggaacactgaaaggttttgaccagaccattaatttgattttggatgaaagccatgaacgagtattcagctcttcacagggggtagaacaagtggtactaggattatacattgtaagaggtgacaacgttgcagtcattggagaaatcgatgaagaaacagattctgcgcttgatttggggaatattcgagcagaacctttaaattctgtagcacactgaggaaaaactacatacttggacatctgtaaatctttgtacagaaactgattattctgaggatgatatatggagtttttatgaatgtgtcactggattttgactccttattgattcattgtaatatgtaaattaaaatatttctacattttattgaaaaaaaaacctttttttttgcctaaatataagtttggtagcttggtttcttttttttattaaatagtgtgaaaatataatggggcattttgaaaacttttaggaaaaaagtaggtactttttgatactttagtatttatgg

SEQ ID NO: 91833 - DNA, 533 bp, Homo sapiens; identical to SEQ ID NO: 58718

SEQ ID NO: 91834 - DNA, 424 bp, Homo sapiens
accatggaggcaggagaaactgttcacttctcctctgagaaatctaaccatttgaacttgatgtttcactggcctcgtaagtatttgatggattaaagatgaagttcattcattcatcacaggtcttctttggtaatcatctcaatgagacagtatgttattatggaaagctctttgaatccaagactaggtcctgttttttcacttgctagcttgagatcttgaccacatatgacggtagccttgtgtctgagtctcaggatccccagctgtaaggtggagaccgtgacactctgcctggcttttaggattggtgtaaggacccaactaagagaagtatatgaaagcactttgtaacttatgtaaatgtatgcttatcttacacttagtatttaattttagtcgtttttctatctctgtaacg

SEQ ID NO: 91835 - DNA, 409 bp, Homo sapiens
actgagttgcggtggtgagcccccttatctaaattgctgattctaccatccgaatgacagggtgcgttttcctagaagcccttgtagtattgctttattatccttctaaaatccatgaaatcagagcaggcgctttttatgtgacattattacgtactgccgcttgcccttttttattgtttgcctagagacacatttttatatatcactgaacgcttccttacccccacaagactgcgatatgcgtgacggaacccaactaacactacctgctagactcaaaatgaccttaccaaacattcacataatgcaactggattcattatccctgcctctctgtactcaacttgagaaaccagaatgataaaaaatgacatgactatttactgtgaatgtgatacagtaatct

SEQ ID NO: 91836 - DNA, 1411 bp, Homo sapiens
  misc_feature (1)...(1411): n = a,t,c or g
tttcgtggacgcttggggtctggacgcaacggcggcgggagcatgaacgcccctccagccttcgagtcgttcttgctcttcgagggcgagaagatcaccattaacaaggacaccaaggtacccaatgcctgcttattcaccatcaacaaagaagaccacacactgggaaacatcattaaatcnnnnnnnnnnnnnnnnnnnnnnnnnnnnnnnnnnnnnnnnnnnnnnnnnnnnnnnnnnnnnnnnnnnnnnnnnnnnnnnnnnnnnntctgccccagagcacatcagctatgtgccccagctctcaaacgacaccctggcggggaggctcaccctgtccaccttcacgctggagcagcctctaggccagttcagcagccacaacatctctgacttggataccatctggctggtggtggccctcagcaacgccacccagagcttcacggccccacggacaaaccaggacatccctgctcctgccaacttctcccagaggggctactatctcacactgagggccaaccgggtgctgtaccagaccagaggccagctccatgtcctccgcgtcggcaatgatacccactgccaaccaacaaaaattggctgcaaccatcccctaccaggacccggcccctacagggtgaagttcctggtgatgaatgacgaaggacccgtggctgaaaccaagtggtccagcgacactcgcctgcagcaagcccaggcacttcgggctgtccccggcccccagagcccgggcaccgtggtcatcatcgccatcctgtctatcctcctggccgtcctcctcacggtcctcctggctgtgctcatatacacctgcttcaacagctgcaggagcacttccctatcaggcccagaggaggcagggagtgtgagaagatacaccacgcacctcgcgttcagcactcctgccgagggggcttcctgaggggttccagaggggcccacgtgtccctccacctcctccctggcccaggctgcagagcctgagctgggacacgccctgaagcttctggaccctgagagagattgtttcttttctttactattttttttttttttttttgagacggagtctcactctgtcgccaggctgaggcaggagaatcgcttgaacccaggaggcggtggttgtagtgagctgggatcatgccattgcagtccagcctggacagcaaagctagactccatctcaaaaaaaaaagaaaagaaaaagtaaaaaatttaaaaattagatgggcatggtgacatgtgcctgtaatcccaggtactaaggaagctgaggtaggaggatgacttgagcctaggagttcgaggctgcagtgagctctgatcgcaccactgcactccagcctgagtgacacagcaagaccctgctttaaaaaaaaaa

SEQ ID NO: 91837 - DNA, 401 bp, Homo sapiens
acaggggtatggttagggtagtactgtaccgtaaattagttgttttaattgattgtttagaggggcatggcctaaatgcagagggtgtggccatcagaaacattatccacaagagactggccaagctggggaagtaagtgaatgaatgtgggggtggggggagtggctaaaatcttactgagcatagaagggacctggcttagaatgtaggggaaaatgtactaccaaaggaggtgtggcttgtggctgcgtcctgtaatctgattggcttcggagcttggacaaggtacatcgtcctttaatattaattgaatggtagagggcaagattgttgtagacactaagttggcccctgggaaaggtcaccaggggcatggctagattaactcagttacagtagg

SEQ ID NO: 91838 - DNA, 431 bp, Homo sapiens
tgtttggttaaaaatgctttaaactatgactggattataacgtttgggaagttggtgcattcatctgtggttattaagaccttacagatcttgtattcaagatgggaaaactagtcctttacatgcctcctgagaagagttaattttgtatacttttatatacttactgtgcctacaacctatataaaaagtagccattgtgtaatgatttttaaaattttctgtaactggtatcttcacataactaaaagtaatcttaaaatatcttttattggggaaaaattggttattttaaggttaatagactcaattcttgttttgtttgctattaacaacctataaaacagtaacataatgagaattattttttaaagttctattgtgtatccctttcaatggttttccccttcatagacgggattctccaagga

SEQ ID NO: 91839 - DNA, 1777 bp, Homo sapiens
cacaatctctcttcttcaaattctttccccaaaatgtcctttcccaacagctctcctgctgctaatacttttttagtagattccttgatcagtgcctgcaggagtgacagtttttattccagcagcgccagcatgtacatgccaccacctagcgcagacatggggacctatggaatgcaaacctgtggactgctcccgtctctggccaaaagagaagtgaaccaccaaaatatgggtatgaatgtgcatccttatatacctcaagtagacagttggacagatccgaacagatcttgtcgaatagagcaacctgttacacagcaagtccccacttgctccttcaccaccaacattaaggaagaatccaattgctgcatgtattctgataagcgcaacaaactcatttcggccgaggtcccttcgtaccagaggctggtccctgagtcttgtcccgttgagaaccctgaggttcccgtccctcgatattttagactgagtcagacctacgccaccgggaaaacccaagagtacaataatagccccgaaggcagctccactgtcatgctccagctcaaccctcgtggcgcggccaagccgcagctctccgctgcccagctgcagatggaaaagaagatgaacgagcccgtgagcggccaggagcccaccaaagtctcccaggtggagagccccgaggccaaaggcggccttcccgaagagaggagctgcctggctgaggtctccgtgtccagtcccgaagtgcaggagaaggaaagcaaagaggaaatcaagtctgatacaccaaccagcaattggctcactgcaaagagtggcagaaagaagaggtgcccttacactaagcaccaaacgctggaattagaaaaagagttcttgttcaatatgtacctcacccgcgagcgccgcctagagatcagtaagagcgttaacctcaccgacaggcaggtcaagatttggtttcaaaaccgccgaatgaaactcaagaagatgagccgagagaaccggatccgagaactgaccgccaacctcacgttttcttaggtctgaggccggtctgaggccggtcagaggccaggattggagagggggcaccgcgttccagggcccagtgctggaggactgggaaagcggaaacaaaaccttcaccgctctttgtttgttgttttgttgtattttgttttcctgctagaatgtgactttggggtcattatgttcgtgctgcaagtgatctgtaatccctatgagtatatatatatatatatatatatatatataaaaacttagcacgtgtaatttattattttttcatcgtaatgcagggtaactattattgcgcattttcattggggtcttaaacttattggaactgtagagcatcccatccatccatccatccagcaaatgtgactttttcatgtctttcctaacacaaaaggtctatgtgtgtggttagtccatgaactcatggcattttgaatacatccagtactttaaaaatgacatatatatttaaaaaaaaaaagattaagaaaacccacaagttggagggagggggacttaaaaagcacattacaatgtatcttttcacaaatgaatttagcagttgtccttggtgagatgggatattggcgatttatgccttgtagcctttcccttggggtgcatctgtggtttggtagaagtacaacagcaacctgtcctttctgtgcatgttctggtcgcatgtataatgcaataaactctggaaatgagaaaaaaaaaa

SEQ ID NO: 91840 - DNA, 691 bp, Homo sapiens
tgatcctggaaaattatagcaatcttgtctcagtaggtaaggagtttttttccgcacatggctatcaatagcatgcatttactagttgatgccctgtagttttctgatgtaaagcttgagattgaagtctctgagatgactgatcccatttggccaccataaaggtgctcttgccttgtcagagattggttcatttgtgcacattctttgagtagctggtgaagctgtgcctttcttccccatgatgtattcagagcccctgaaaccaagctatttagctctagtcctgtggtattttctcttaacagggtattgcattactaaaccagaagtgatctttaagatcgagcaaggagaagagccctggatattagaaaaaggattcccaagccagtgccacccagccaaatatctgtggtgtctccacgactgaaaggcagaaagttcaaactcagccctttcttttaagggttttaggagggagagcagagccaagtcttggaggcgctggacttgctgtgacacaggaaaacgagctgtgtgggttaagggatgggggatcagtatgacatgcttacgaattcgagctcggtacccaagaatacctaaggaaaaatttaacatgtgcaacatccatacactggcaattaaaagcattgttgagaaacaattaagggcccaattaaattaa

SEQ ID NO: 91841 - DNA, 3237 bp, Homo sapiens
ttttttttttttgagtatgatgtttaatgtaagatccagtggcttggcagagttggtgcaaaactgtaaagtaccagattaagttctagtcagtgagttagcagcctaggcacttgggcaaaaaaattggccctgctgtcccaagtcctccaaagccctctccgtatcaccagctaggagctccaagactgatatgccactacttggaggcttgagtagaatccacgcgtcctcagtttccaaagtgacaagagactggccccagccatcaaagcagtagaattttcaggacagggttgaggacagtggggacagaactggacatgggggcctgagctgctgaacatttgctacatgcagtagtctaagaggctcacagctggagaggttagcctgtccaccttcccacccatgtgtggtagggaagaaggtgaccatctagttaaagaaaaaaagatccttccaaagctgtatttggcataagctaataccactgctagtgctgccactggccaggcacagatacagaaggccctgaggagttgggaggaagggagaacaatgtgcaggcaaagcaggaaacagccagctcaggtccccgccccaggggcccagaaggataaaggccgtgcagtaaagggaacatacggttcttctctttggtcaggcaaaggcccgaatatgggcctgttaggtgaaagggctgaagggcacaggctctgcccttggaccctagctttaggctcatcacattgaggcggtgatggagcgagacgaaggcaggaagacagagcagtcaggctgggactcgccagctcctaggagctgcccttgtccttgttgtccatcaggtcataccaccgggctacaccctgggaaaggtctgtctcagctaggtccagctgcaccttccccagcagctcacgctctcttgacatgaaggaggaattagacttgacagagacatccagctttcgtctctgggcctcatccagggggagttcccactcaaaccgttcattaaattcaggactcagggtcctcttcttctgtgaggtcctcctcttggtgcctcggttcttgtctggcagtagcaacagtgacacatagggatcaggaggatcacgtccattctgtcgaagggaccggcaaccatgaacaatgctgaccagctttcgttcttcactgtagtaccacagagtcagtttcacctggcccagaggcccggctggagcctcaaggggactgtcaacatgtgttaggcgctgccggagctctggggctgaggaggtgatgtgagggggtccccccgagagctctggttcttcactcagcgatgaggagctgtggctgtagctgtggctatgagcttccactcccgagtgctgggacaccaggatccctagctgtgctctcagtagcacctgcccctgaccactgctgagtgtaaaccagcggtccaagcagagctggtcagccacgaggagctctgagaggggcagggataatgagcccagcacgccagtgccctcaccccgaacctgcaactctaggctctcagtgtgtggtttcctgatgagaaaggaggcactctcatcccagacaggggctgaagtttgcgaaatagtcttggttttatgagaactatctcccacagtgagagtagcataagggctgaggtgcttggtgccttttcgcagcgggaggtcctctgcccgctccatatagatggatagcagggccgcagccagctccgcactcttctgagtctggatcaaactattcacctgcagcacctcctctaactcagcagcagtgggacggggggtgagacgctccaggcgcaagtgcaggcggccagatgggacatcctccagggtcagccactcatcaaggaagccactgtttaagactgtggtgagacgcactttacacctgcccagaaaatcatccttgtccaagtccttgtcaaagacttcaacctctagctcttggcctggaactgatgtgacgatcacctcaaaaacctcattccagcggggattgagatcttcccgaacaacatggctccggaagcttcgtcctgccaactttagtttgacataggggtctgacttgcccttcaccagtccccccaagaaacggtctttggcaatcaggtcctgggcctctaatacatggatccgaagcacatgctcagtcccaaactggctatcaggagtcgtgtgacagggtcgaggtggggcatccacactgctgcctctctggggattctcactgtccacgtcccaagcaccaggacaaccaggcaccgtggggaagcatatttctgatgaatccaagtacaggatcctcatgactagtttcatatagagtctggagtttggaccagagctgctgagctggaaccactggtccaggatgagttctggggcagtcagcaggcgggccagaggcagcgtcagtgctcctaaagtcagggccctggaatcatccttcacttgcacatcgagctcctggctttgagggtcttgtaggaagaaccggaacgcttcctcccacactgggcagttggtactgtagacagccttgctctcctgagtcacatcctgaattgacagttgtaccatagggttgggttccttgttccccttcttcagaggaagatcctgggcccgatccaggtagacaactaagatggcagctgacgggggatctggtcgagaggagactccccaattccactgtagaacctgctccagtttctctgcatctgacaaaagtgacagccattctagcctcaagtgaacttggccttgcccaccttgtagagggaaccaatcatccagaacgctagcctgtaacaccttccctacatccagcttcattctgcccagaaagtcatctttatctggatccttgtcgaacacctccacttcaatctcctgccctgggacctcgtgtaccatcacctggggaacacagaaggctgagtgtctcatggggctgcagctgtgaggatcatccaatcagcatcttctctcacaacctcctggggcttccccatttcacagagctgctcaactctcccacctcataagtctctccccactgtgggttgagttcttcatcaatgacacgactgcagaatgtctgggtacccaaacgcacaagtgcatatgggtctgacaagccaacaatcaggcccttcacatatttgtccttggaactcagccc

SEQ ID NO: 91842 - DNA, 1924 bp, Homo sapiens
ttttttttttttaaacgctgagtctgctctttaatggacaccgcccacttgtctgcacctgactgaggcgggaacaggaggggtctgggaaatggtgccactgggcctgggtgccgcacagtctgctccctggggacagaaacccacagggtcgagccctgcaggcctctccttccaggaagggccacaactagcagccgcctgcctcctcagccccagggagggcacacaggctgggtggcacccagtggccaggccccttagctgggccgcaggcagcactgagccgcctggaggtccgaggtccgtggaggtggggagggggtgcagatgtcctggaggccaaggttcacccctcacatgttggtgctcatccgggactggctgttggctggagtcagctccccctggctcccttctctgggcggggacttgacatggatctggttgcggagcacagctgcccgcagcatcatggccttggcgcggcgctggaactccttgcccatcaacagagacttctcaaaggtggtgctgcgctgatccacgtcccgggcgtataggatcttgctgtgtgagtccacacgggcactgatcagcccctccaggattagctgcgtcagctcgtcctccagggcggccaccgtggtattgaaggctgccgccatcctatgcatgtcggctgacacgtaggggctgaaatactggatgagggcacggttgcgaatctgggtgtacagggtcctgacatggggggccagatacatgtccaggagcaggttgtccttcatctcgtccagcatcttgagacatgaggcgtacttggactcgtagaatttgaagatgatgtctcggacctgtggctccagctccaagaacaacttgaaggagctgctggagatgacattgcgctgcagctcctgccggtcaaaggtagccaaggcgcacaggccaccgtagatggccacgttgctgggggacagcagctcagggaagtcacagtgatcaaaggaagccagcaggaggcacttggcagcctgcttgtacttcctggcggccagctctgccaagcctgcggcacacttgagcttggtgaggatggcctgggtctggctgtcacgctctcctcgctgctcggcaatctctggggtggactcagccttgctgacgtagctgagcacatgagaccaattctgcaagtagacgctgaccttgatgacattgaggcacatgttgatgacgtgtttggcgctggtgcagtagtcccgggcccgggaatagcacttgagggcgttgctgaggtccccacagtccaggtagtggtcgcccaggtcgtcgtggccgcgccggatgctctctttgatggagttgcccttgtagttcttcaggtctgtgtccagcttctccagcttcagcagcgccttcttccgcgtggcctccacccaggccgtgtccagggctgggggctccacgccgctctcagggatggcgtcgggtgcgttctgcagctccctgagagaggacctggtggcctctgagagcttgcggtggatctcctcgtacatgtccacgttaaaggttctctgcacgaaggagagggccatcttcagggcctccacccgcagcgtggggcagtgatcagcaatgaactgcagccgttcgatgcgcatcaggccgctgtagctggccgcgtactgttccagatccaggctggggttctccaccacgtagttgacgtcaggtgcattctgcgggtcttcctgggggtccacgtcgatctgcatgggctccacggccccctgcaacatgggccaggcacctggcacctcgtcctggggactgccccaggagggcgagagacccgcactgttctctgaggtcagctctgcccaagatcttccaggccagtcggaccacactcccg

SEQ ID NO: 91843 - DNA, 1944 bp, Homo sapiens; identical to SEQ ID NO: 77758
  misc_feature (1)...(1944): n = a,t,c or g

SEQ ID NO: 91844 - DNA, 651 bp, Homo sapiens
ccgacttcccgggtcacatagattatctaagatcctcctactgtgtgccaggcactattctaaattacaaaggtggccagtgctataatttaacatatccagattaattgggagaaggaggaaaacaataagatagagaaaactggaatgaaattattcttctgtgatggaaagaaatcacactttttcaaagtgattcttctcaaactatctgtgataaagaccagttttatcttatttcaatttctaaacatatggaccagtactttgtaaaatgtacttaaaatgtgactgcaatgttaaatagctataaaaatttccaaagacttagtctcactttatatacttatctcatcattgactgattataaacaattcagaccagcactgattcatagatcactttaagcagcactagtttagggtcaatgaaacaagtatagaagatactgcatttattatttagaggtatggaaataattagaagaaaaattttaaatatttaaaataggtagtctccggaaggcaggtctaataatgagatataagaggctttatttatttctttatttatttttgcttttgtacatgtcttactgatttagatcttttatcaggtgcatgcaataactttcataaaaaagctaaaaa

SEQ ID NO: 91845 - DNA, 620 bp, Homo sapiens
ctataaaagaactagtggaatatgtattccttccctttttcttttttactctttgaatgcaaacatattgccacttatgagttgcttggggatgagggctaagagtttgagggggagtcttggtccctttccttaagagttcatatgtagattatttaaagctgataaccaaggaaaaggtaggagcagaccagaacaacctttctataaaatttatgttttctgtagttcagatttacccatctgattttaataaaagagtactggtagctaacatagtatgctttgtaggcatctcaatattatgctcttttttggcttattggagtcattacgtataatgcagaacagcttaatgattcacaaccaggttttagaaatcaaacagaccttgctttaaattccagcttttttacttgcttaagtattgcattgggaaagttacttaagatctctgaactcagggggttctctatgaggttaatgttaatatattttaataggattgtttcaagtattaaatgaaataatgcatctgatggacttagggcgcgccgctctaaaggacccctgtttacgtacgcgggcatgcaacgaatattttttttaaggggcactaa

SEQ ID NO: 91846 - DNA, 420 bp, Homo sapiens
actggcacccaggctttgtcaattagcataatagatgctagaaatggcttttcatgggtaaaactagtggtggtaaatgtgtctggagtcactaaaaatagtgtcaaaggcgtgagaatgtagcacgtcactttgtaagctggtaccttatgcttaggattctggaatgtttttgccatgtagtctgaatagtaggtttagctgaatcctgcatttaggctactttctcacctgcctcaggtaaatctttcatgcatggtgctgatagagccctcagaaggggacagacaacagggaaggcatggggtgcattggagaggatgtatgcatttgtttctgctttttaaatgaaggtgatttcagcataacagtacttagttaacaaatgtaatttagctgaacttaccacctccctttttt

SEQ ID NO: 91847 - DNA, 435 bp, Homo sapiens
ctagatgttgtatgggaagagggaggtagaaaagttaaggaatcctcattattaaggcaaaacaaatttaagagtttttttgtttctttgatgggaagaaaagcttaaagattgtttttagtataatagtgatactcattgacttatcagaagcattaaatatcaacagttatgatactgctgtgagaaaaactaattccatgaaataattgccaaggatataactggtgaggctaattgtagctgtggttaataagagaaagcataaacctagggcattgtgagagctcagaaacaggaagatgtttgcattagtgttatgcaagttcaaaatgaggaatcatttttttttctgtatagaacaatatgtttgtgtagcaccctacctctctactttttctcttggtattcctaaacatgtacctgccaccttaa

SEQ ID NO: 91848 - DNA, 402 bp, Homo sapiens
  misc_feature (1)...(402): n = a,t,c or g
tgttatttacatctcttatgctaattctaattttcttttattgtagtatagtagaattgagatttgttaatggaattggttctgaggaatatataaatgttcatatgtttttcaagaaatattgattgactagtatgtgttttgcggatatagcagtgaacaggatagacaaaggctttgcattcatagagtttatttgtacagtagtgtcacaggcaaactataaccaaatgaagaagtgaataaggaatacattatcaattccttttatgaagaaaatacaccggctgttgagagtgagaataagtgagggttactttagaccagccactttagaaaggctggttaggagcctggccagtgtggtgaaaccctgtctctaccaaaaatatanaatgagcc

SEQ ID NO: 91849 - DNA, 1673 bp, Homo sapiens
ttttttttttttttaaagcctggattgtaaccagattttcttttttcccccttctcagctgtagatatgatatctcctttcagggccccagcttaagggcaaagtgagttaatgtgtagacaaaggcgagggacaagagagagttaacatctagacagtggaaaaagccatggtgtgtggtttctgggaaccaccaacacttgcaggtttagctttttcccagggttgactacaagaaagaaaaccatgtttttgcaagattaaaatgtggttgagtgtgcctaaattaaccatccccatttttatcatatttccaccatcacttcagggttttaagagtcagtgctcacctgggcggagctggtagtacattttgcttcttagaaagctaagtcctgggttccgtctgattttaggttccaggaacttcctgagaacacccgatcgcagagggtaattttctggagtttgttttgcagggatagctgggagtatggccaccctgctccacgatgcggtaatgaatccagcagaagtggtgaagcagcgcttgcagatgtacaactcgcagcaccggtcagcaatcagctgcatccggacggtgtggaggaccgaggggttgggggccttctaccggagctacaccacgcagctgaccatgaacatccccttccagtccatccacttcatcacctatgagttcctgcaggagcaggtcaacccccaccggacctacaacccgcagtcccacatcatctcaggcgggctggccggggccctcgccgcggccgccacgacccccctggacgtctgtaagacccttctgaacactcaggagaacgtggccctctcgctggccaacatcagcggccggctgtcgggtatggccaatgccttccggacggtgtaccagctcaacggcctggccggctacttcaaaggcatccaggcgcgtgtcatctaccagatgccctccaccgccatttcttggtctgtctatgagttcttcaagtactttctcaccaagcgccagctggaaaatcgagctccatactaaaggaagggatcatagaatcttttcttaaagtcattctctgcctgcatccagccccttgccctctcctcacacgtagatcattttttttttttgcagggtgctgcctatgggccctctgctccccaatgccttagagagaggaggggacggcacggccgctcaccggaaggctgtgtgcggggacatccgaggtggtggtggacaggaaggacttgggaaggggagcgagaaattgctttttctcttcctccctgggcagaatgtagcttttctgcttcactgtggcagcctcctccctggatccttagatcccagaggagggaagaaaatttgcagtgactgaaaacagtaaaaaaaaaaaaatttatgtatataaaagttgcattacacagtacaaaatagatggataatgtttatcctttatttttctatgtagaagtttttgaatttgtgtgtgtgcttgtgcgtgtctacacctagtattacggctgggactctccagctgtttttgttgtggttatgtttttaagagggttgaattcttccatcaggtgaacgaaaaaggcaacaaagtaataaatcagtgaatgtggccggcagctgtgtttagcccctc

SEQ ID NO: 91850 - DNA, 2357 bp, Homo sapiens; identical to SEQ ID NO: 59662

SEQ ID NO: 91851 - DNA, 585 bp, Homo sapiens
aaaactgtagcttaaaaataaaaattagtaatataacttgtgtaaacctacacaaaagataaaagatatcttattgcaaaaatagggcaacattttgttttaaagaccaaatagtgaattgaatttaatgcatatctttaaatccttaatagtatctcaaatctggtttaaatctgtctctccttaacagaatagaaagtgaaacaaatccagaaatcttgttcgagtacatggtctgtgctagtaatcatatctaaagtggtaatgttaccatatgctgggtactgggctgagtaaatcacatattttaacttatttaaacactgcactgtattgcctgctagcgatgtcatttttttaaagttggatggtgaatacatgagttgttttttaaactcttttgggagcctaaaaaatttgaattttttttttttcccccccaaacggagtttcttttttttgccaggctggagggcagggacattatcttggctcactgcagcctttgattccctggttcgggcgattcttcgtgcctaaagcctcccgaggagctggggatatacagggcttcccaccaccacg

SEQ ID NO: 91852 - DNA, 591 bp, Homo sapiens
acaggatataaagatgcaattacattatagacttatttctctgggagaatagtacttagcatttttgtggtctaacttcagtaattgttgtaatattaaataatcatggctaacatttatcgaatattgctgatggcgaagctgggcccagaatccagatgtgtgactataaggcctgtgtttttagttgctattgctggattatggtgacaacagcaacaaaaacaatgcatctgctaagctgaactaaatcctcatataccccagtaatggtaattgtctaaatatattcttatggatggaggtatttgagtgcctactctgtgcttaacattgtactggatgaataggaaaaatgacagatgattttagctgtccttaatttttggtgatatatataagaacatgtgttactgtctggttctgaattgtcttttccagaatagttagttgagggttcatttaacaacttataaagttttcattgataaaaaattgtatatatttcatgagggcataacggggatgagtggaccaaatggcatacacttatacacacgatctgagctcaacctacactcgccagtgacc

SEQ ID NO: 91853 - DNA, 410 bp, Homo sapiens
ggatctgggagtggtagaagataatttgaagggggatgtcaggaaaatattaaatgcttggtctttttagggtttaatgattccccaccaggcatgtagagaaatcaacgtttttcagagtttgagctgatttgccaagttgctcttgtccttgtcttgcaggtgttttaagatgtgttgcttctcccgtgcgtgtcgtttgtgtcatttgtgtcactctcagtattgctctgaaggctttggagcagcctccaccttagcattgcaagcggtgtttatgcgcagtctgagttgtgcatgtggtgtctttaggagcatggacattgctcagttattaaggattaaggctgctttcaagggcttttaggcatcagcagataagtacaataagacctgagtttactgtaatg

SEQ ID NO: 91854 - DNA, 371 bp, Homo sapiens
caagatctcatttctaaaaatcaaataattttaaaattggaacatgatccactagatttaaacatgacccttacattgctttcaaaagacatagacttgtttaggtcagaaataagggaaataaaaggaagaattttaaacatttcctggcaaccttgtatagagctcatatttcttgtccttaaaatatttggatcatgagagttaaataatatagactttcagatagctagtcatatcgtcaaataattgagtcccaaaatttacatatattttagtgggcataccttgattgactatacaaattcagaaaaggacagctctgatgagaagctgatcccatattgtggagctactgtctgacacgcttg

SEQ ID NO: 91855 - DNA, 338 bp, Homo sapiens
aagaattcatgttcattaaaatgtataattacttttacaccatatgctcgtctgatggaaaataaagttagaggttttaaagagacacctatggcttcaaaattagattgcatagaatatcctgttcttctaagcataaaatgtgctttatgactttcactgaaagtctggagatgggagaagtgtcattggtaacacctaacctcaattccaactttagttggatattattacatgttccttcctctgcagacataatgctgttgtccttcagcatttttagtttgtggattcaatcttgaaaatatattgggctacaatcagctgcagttggaggc

SEQ ID NO: 91856 - DNA, 591 bp, Homo sapiens
aaaatggtgctgtatttcactcaaaatcaagttgcagtgttttttcctcctcattttaacatcactaaaatcagagtgtatctactaatggaattcttgataattctaaatttaataggtaacattgtttgactgctaataaaatcttaaccactatccaatgtaagaaaaatttgtttaaccatctccccttcatttcaaccattccttattaagaaaaaccaactacagtctcaaatgctcctttataactaaacccagggaagacatatctaacaccctagaggagagagaaaagggtatgaattaaggtttgagtgtgatatcaccatttcttctcatatggcttcagaacacttctcactgaagtattgtcaaaaggctctttatgcactgaaatcaataaaagaaaaaaacaatttctagcaggctatttattataagcaaatatgtgacgacacaaaactttctggtcctttgcaattttttaagtccaaaaaaaattctgtttaacaatattaaaggactattccagttaccaaaattgtgtggttgtggatgcttaatagaataatttaaacttggttaaaa

SEQ ID NO: 91857 - DNA, 364 bp, Homo sapiens
gcaccgtgcaacgaggattctacgtgacccagtggggcacgtctttcaggagtctccttaagtcctgagtctgcccttacactccaagtggcctgaaagatagaacaataagtcatttgtggggcttcaaaagacagttgtaagtagcagaccagagtgtctgggatgtcacaggagagtgacctctcggcaccttatgtaaagtcgggggagacaccggagctcctgttgctgggaggaggatgggggcctgcctggtgaaggcctctggctgcctaccatggggcaccagggccccccacgaccagcttctgagttggagcagggtgctttccgtgctcctagtactcaaaacactcatatt

SEQ ID NO: 91858 - DNA, 691 bp, Homo sapiens
tctagaatcgtgtggaacatgacataattcttagtcattttttcataaaattcttgaaattatattttagtggtcctgacttagcatgcctaataaatccctttgcattgtaagacagatacacacctgagacacagaagttagactttcagaattgcttttattatttccttgaaatgaatccccctttcatatcaacaggcttcttttccacattagagtccctctttcagttggatgggctgactaatatgttaactcatggggtactcactctacatatattctttgtaagttatgcatattttcacatacatgtatgattattctcaaattcagacttaaatctactacccagtccatctcttttccctgaaatgtcttggcttccccatttttcaagactcagctttgtgtaagcacttctgtgaaactaaactgatttccttccacttcccactatactccgttctttcaccagagctccctatggggttactaaggatggcatcttaatctgaattacagaatgttaactttaatcacttactttcattataaaatgtggacatcagttcaacttgcctggaataactatgggtcttccatgaattcaattaaataatatatggtaaagtacctagtcattgttaaccatatggtaaaacattcaagagatggtagatattaa

SEQ ID NO: 91859 - DNA, 401 bp, Homo sapiens
  misc_feature (1)...(401): n = a,t,c or g
ggaaaaagatgagctagccaacgaactttactgatggaaaaaacagatgtgattaaccagaaaaaacaagatgtttttgctaaaggtctataaagttagtttcaatattgtgttgatatttacgatagagaagtataaacaagaacaaagctattgtttgtggccaagcagagaccaattttacaagtatgcctcaacttaattagtatataagttccagtgagaattgtatgctctgaatggactcattttaagtggattataagaacacaatcttctaaataaacagtggaaatcattttgattatattctattttcagttggatgtgcatgcacgatagagatttatgtgtacaaagttgaaaggttgaatagtgatagaatgaanagagcacagagt

SEQ ID NO: 91860 - DNA, 695 bp, Homo sapiens
aactggctcaaagctctggtttttcccacacaaaggcacaaagcttcccaaagaacttttaactgaattctttctctcttccaaagactggatcaccctgtcttgctgattcccaaatggccttcttgcgtctcttccattctgctttacccatgtgtgagaagtcctcccaactcttcctccaaaaaggactcaacaatgacctaaggttctacatgaactgggcccatgcaaaacacaccaaagaaccttctgttaatttctgaacaaaggcatcttgagccatggagaagggaagccaacccttgcaacaccagatgctacatctgggcaaaatctttcctgagggaacaaacagctcccaaatatgtccaaaatgagtgagtgatgcactggtcccaggaagtcaggggttttccctcccgggagcttcatgtttcctgggactttccttctcaaggtcactccataagtcaatgaggaaccttctggtcttccacccttttccgatttgcaaccacaactataacattttccatggccaactgactctatgcttttcaacccaatgctatcctgtgagactggtgaatgactttgaactcaactccaggggaggaacccatccgcagtagtgatgtaactacagagatggcgcacattcaaatacttggcctgaagcccagaacacagac

SEQ ID NO: 91861 - DNA, 534 bp, Homo sapiens
ggtacaaatgtggaggggcagcaagagcacaggactgggagctctgctttcttaggacctgaagcaaattccttaaccctcttcatgtcagttcctcatctgttgaaggaggaagttgaactagaaaaagcacaagggcgctttcagctccaggatgacatttaaaacacacagcacctcctaacagattaaacttgccagccatttacagggaacttcctatcctgccgtgggaatgaatttcacaggagattatctcgaatctccattattgtggagtgggaggggtccgttggagcgaaacctatgctgcctaatatttatttctttattggtttgaaaaacctttgaggactctgaattattttgggtcttagtcattatgctgggcctcatttaaaggactagtttgtaaataggaagaaagttggaggaagttagcttatccaaaataacacaggaatgtagatcaggcaagaaaatgatacttcttcagttttatgaaagaaaatgatggcagaaagaaaaaaaaaa

SEQ ID NO: 91862 - DNA, 398 bp, Homo sapiens
cgcagcttttgtagagaagtgctgcaaggctgacgataaggagacctgctttgccgaggagggtaaaaaacttgttgctgcaagtcaagctgccttaggcttataacatcacatttaaaagcatctcagcctaccatgagaataagagaaagaaaatgaagatcaaaagcttattcatctgtttttctttttcgttggtgtaaagccaacaccctgtctaaaaaacataaatttctttaatcattttgcctcttttctctgtgcttcaattaataaaaaatgggaaatcatccataacagctttcagttgctcttttgttgccttgggcttgtgtttcacgagctcaacaaagagcagttggttcttgatttgtctctccttctcagaaagagagctt

SEQ ID NO: 91863 - DNA, 701 bp, Homo sapiens
  misc_feature (1)...(701): n = a,t,c or g
cggcacgagacatagcttggtaatccatgggtaccacttgaatggaagagaggagacacagacaaagacaaccaagaggcttaaactttccaaaaaatttatttataacaaaaagggcagcaaggtacatgtaaatatatacataatgctaacagtgtcagaagatgaatatcctgctttggtcagtgatttcatggagctgctgttttgcatttccttgtcatgttctctgtctacatgtttaaagggaggattacatgtgaacactattcattatcagtattatgcatctaagctggggttatcaatcattggtagatagatagtgagataacttctagttcccatctcctccagtaagaactaagatgcaaaccctttgtggtgaaccgacatcaagatgaaatatagcacccccattttctctgcattagcctgtcttcaggctcaccctgtgaactcatcaaaggtagtgaagtgctgatgtgtctcttttacctattttcaccttnggtcagttctagtttgggcattgtccagactgcccaggatgtgacgatcacaggcaagaggtcgtgttcattataaaaacactttggctccttatgattcagcaaaggtatccactggcctggcgnnccgggnngcctgcagacagtgtggagcttaaaaacaatcacgtagggccatgaagtgaggcc

SEQ ID NO: 91864 - DNA, 705 bp, Homo sapiens
aaataaacaaagggggctagaacacaaaaatctatgcaaatttctgaaagctgaaattggtacccccttcagtattatcatttatactaatttctgtctaaaccagccagacatatgaggcctctaactagatccaagacagttagatacagttggatcctggacccagtccaatttctgttgtaacttccaaacctagtttggatcagaaatttgctcaaactctgatagctcaaatgcacactgatggagcttcagaatctgagagagaacttacccacaatctccagttgctttgagagagcagtggacaaaatgagtccagtgggtaccttgctttgtcacttggtgttcctgggagttgctagaagctttagtttggatcccatttctgacaccatctattaaaattaaaaaccttagacaaattaaatttaacagaatttgattgagcaaagaagagttcataaatcagccagcttccaaaccagaataggttcagagaggcttcttagactatactttatacaatagatcatctctgaaaatgtgtacaggtgctctatttttgtatgataagctattaaatgttatagagcaataatgatgtaaagaagacctttgtacaaatagaaggatatttttccaaagaaaatctgatttatcttctgatagcattgcttttggggatgttttaaaaagcca

SEQ ID NO: 91865 - DNA, 980 bp, Homo sapiens
cagcatttaatcttagcattcgtctagaagcaaacattaggactgatttttttaaaattataaaatgtaacttaagagagggaacagaaaagaaaaaagcccgtagacactgacggtgatgtcttggacaagttactccaccttcaggacctgagctgtgtcatctgctaaatgttcctgtgaacacgaaatgaaatgttgggacagcacccagcaaggtgcctgatacttagtaataggtctgtttcagttgagtctgcaatccagacttctgaatgagtgaaccctgcttcccctctcaccttagcctgattgattgcaaaaatagctagaacctgatgtttatatacttatctcaagtgctaacagaatgttagcttttattttgttactactataatttacattgttactttatctttactgtaattaaatgaggtaagataataggtgcttgtctcctgttttaaagatcaagaaactgaccgagtttagatggtcttgtccaaggttgcaaagtcagcatatggcagattctggtcccaagtccaatgctttttcatttatgattcacatagttatgaaagcagatcatttgcatctacgtcagtgtctacgggcttttttcttttctgttccctctcttaagttacattctataagtgtaaaaaagcaatcctagaggttgcttctagacgaatgctctgattaagtgctgacaatgcttaaacagccttttttttttttaaagcatgagtgtttactacctttgcctgagaaagtgaacaatgagctccctacagagacctcctgaattctgtgcctgttcaggcacaggcactgagcatgacattctgaacaggcgggagaaactgacaggaaagtccaggccagaaagcaggtgcctctgcgtccactgcggaggcccacaggaccacctacacacccactctggactcaggaaccctgtcccggtagca

SEQ ID NO: 91866 - DNA, 711 bp, Homo sapiens
tttaaagttacttcacgtcattaaacatttgcattaattgaaaaataggatttattattcactaattctggatattttaagaattctttcctcttctttctagggaaattaatgactttcttttttaaaccagcatcattccccaatacagcattgtaactaacgatagctgggatatactcaattccaaatggtccagtgtcatttttctgtatagtaggattgaataagagcatctgtagattagccagaaggaaaatggctttgtgttttacctttgtagcagcctcttgaaggatatctaatttgatacgggtatctgtaagaaatagaataaagcacgataaagcacgtatggttagatgtgtggctgacagctctcctgaaagcagaaagtgctaattttttactttaaaaaaaaaatctggaaaaaggcctcaagtaattcagcgggaagacaaatgatgctgaaatgaagtcacgtgactcagtggataattccagagaaacccaggaagaaccgcattagtgatagtctgaagtatacaccgtgagttacaataggaggagtgcactaaacacaggagaaaatcctttctctgaggagcttacagcctacagatacaagctcgggcggtacaatatggagtgagaacaataagcgagccccactggcaggggtcttcatagctcaaatgcttcgaaacaagg

SEQ ID NO: 91867 - DNA, 577 bp, Homo sapiens
ggaaaaacttatttataagaatcctgttatataagaacatataggaaatatgttttttgaaatatatttagggctaggctccccttctgtcctcagtattctcttttgccactgcagcagctctgagtggtctccttgaagtccccctctatcaccgagggtgtcagcatgatgacagctctcaccagtaaatcctccacttttccatcttttgtagtctctccaccttcttttaatgggcttcaggagggaggtcataagaccaattcttggacacctcctttgcatgtcctgcttagctgggcctagaacctccctctgaaatgtgggagtagctggtgctcttgtcttgagacctcagtcaaaatagaccaaaagttctattttcacatcctgttacaaagagacaaaatggaagaggccaaacaaaattaaacatcaacagcaaggccaggtgtggtggctcacacttgcaattccagggcttttgggaggctgaggtgagagaagtgcttgagacttgcagttcaagaccagcctggataacatagtgagaccccatctcttaaaaaaaaaa

SEQ ID NO: 91868 - DNA, 788 bp, Homo sapiens
acttggtctgggagctgaggcctgagctgcagctgtaacccaacaggtctctgaagccatgggaagcccccacttggaaagaggaccagagggaggccagtgggtccagccatgggaccagcgggttctaatacctgcgctctgcaccagggggcagtgccctgcaacaatctctgcagccgccctttctctcctttgcctccttggggggtcagaaagtgcaccccctgctgcggtccctgcccttcccaaagtttgacgactctgaaaatgtccttttttctccatgcatacatttaaggcaattgcaatgagaagtccaatgcaactttgaagggactgggcaaagtgactccaaaattcatttggaagaatgacggatgggaattatcagtgtaattttcaggggaaagatgagagtagtggggaggtactggctgtgccgtcatttacacaagctcctgataagcctgcatgagaatcaccacggccggccccttctgtctcatcctgggaatgcaggccacggaggtttaacggtctggggctgaggtaagacccacgcgcaatagcccctagactgagtctggctccgatcgactccgcaacaacagcctgccttccgctccgtgtcagagctgtgctccgtcggggaccccgcatgccgcatacaccacgggccccgctcgttcccgcggtcggcgccctcgcgtggcgcgttcggacgtcccgcacgcgtcgccccgtacgccacccggacccctatcgccgtcccgcgcgtcctcgtc

SEQ ID NO: 91869 - DNA, 705 bp, Homo sapiens
ctggaagatctttgatgctatcaaagttaaagtctctgacccatgatcctagcaacatgaacacagacacctaaactttctgagttcttttcagcccctgcagcatggagtttgtgttgagatgtgttcctcctggtggctctttggcttacagagactcagtgatggaacctaccaacttagggcagaatctaatcctagaattaccaatttcatgaagccagtttctcctgtaaacctggagcccatctctgcaggatgcagccacctccctgctgctgccacaagacatggtgttaaggaaggtgtttgattcagtcttgagtggtgcaaaggttgtctagtttacaggggcccccggctacggttctaaagtagggtgtgtactctacagtggcccttctggaatatccagcttccaccacttcttttattttggcataagcctgagggtgaatttgcttttcttcaaaagcattcccatatttttaagcactctttcctgtgctccaaatgagaaaggagccaccattttccagcaatcaagaagaaagagtgctcatcataataaaggagtatggggcctttttctattatttagccggggtgtgaaaaacaaagggttatcttgggggcggcctttctccaggggaaagggaattttttttgagcccgggatccagattccccaactctttttttttt

SEQ ID NO: 91870 - DNA, 2231 bp, Homo sapiens
aacaaaaatggtgaacttaagccccagaatgcccataattatagtaagtgtaaatggtttaaatacaccaatgaaaatgtagagacaatagagaaaagtcgattcatctatacttttgcactttttgttctttcttctttccttccagatgaccccaaatacctcccaccttttttccccttatttctatttttttggtgtgcttccgtcagctattccttaaaggtgggtattataggaacccattctcttagtttttcttcactgataggagattgggagagtaaagaaaaaaaatgtggagagcggacatcttgtggctgtgtcgtgcgcgtgagccccgtagggccggggaggcaccagctgccgcgcggggaggaggccgaggccgcagcttgagggaggccccggcccctctgcgcctgtgtctggcagagctggtgtgagacgagacaatcctgccccgccgccgggataatcaagagttttggccggacctttgagcatacaccgagagagtgaggagccagacgacaagcacacactatggcgctgaaacggattaataaggaacttagtgatttggcccgtgaccctccagcacaatgttctgcaggtccagttggggatgatatgtttcattggcaagccacaattatgggacctaatgacagcccatatcaaggcggtgtattctttttgacaattcattttcctacagactaccccttcaaaccacctaaggttgcatttacaacaagaatttatcatccaaatattaacagtaatggcagcatttgtctcgatattctaagatcacagtggtcgcctgctttaacaatttctaaagttcttttatccatttgttcactgctatgtgatccaaacccagatgaccccctagtgccagagattgcacggatctataaaacagacagagataagtacaacagaatatctcgggaatggactcagaagtatgccatgtgatgctaccttaaagtcagaataacctgcattatagctggaataaactttaaattactgttccttttttgattttcttatccggctgctcccctatcagacctcatcttttttaattttattttttgtttacctccctccattcattcacatgctcatctgagaagacttaagttcttccagctttggacaataactgcttttagaaactgtaaagtagttacaagagaacagttgcccaagactcagaatttttaaaaaaaaaaatggagcatgtgtattatgtggccaatgtcttcactctaacttggttatgagactaaaaccattcctcactgctctaacatgctgaagaaatcatctgagggggagggagatggatgctcagttgtcacatcaaaggatacagcattattctagcagcatccattcttgtttaagccttccactgttagagatttgaggttacatgatatgctttatgctcataactgatgtggctggagaattggtattgaatttatagcatcagcagaacagaaaatgtgatgtattttatgcatgtcaataaaggaatgacctgttcttgttctacagagaatggaaattggaagtcaaacaccctttgtattccaaaatagggtctcaaacattttgtaattttcatttaaattgttaggaggcttggagctattagttaatctatcttccaatacactgtttaatatagcactgaataaatgatgcaagttgtcaatggatgagtgatcaactaatagctctgctagtaattgatttatttttcttcaataaagttgcataaaccaatgagttagctgcctggattaatcagtatgggaaacaatcttttgtaaatgcaaagctgttttttgtatatactgttgggatttgcttcattgtttgacatcaaatgatgatgtaaagttcgaaagagtgaatattttgccatgttcagttaaagtgcacagtctgttacaggttgacacattgcttgacctgatttatgcagaattaataagctatttggatagtgtagctttaatgtgctgcacatgatactggcagccctagagttcatagatggacttttgggacccagcagttttgaaatgtgtttatggagtttaagaaatttattttccaggtgcagcccctgtttaactgaaatttctcttcaccttgtacacttgacagctgaaaaaaaacaacatgggagtaataat

SEQ ID NO: 91871 - DNA, 682 bp, Homo sapiens
  misc_feature (1)...(682): n = a,t,c or g
tggaaaacaggccttactagcatagtgaggagtgttatctttgagaacattttgagggctgacgaaagagaaagagaactcaaaagggagaataagataaagagaaaatgaggctagaaaaacatgcaggagctagaaaggtaaaggaacccctgccccttgaccttccttccctctaccctcatggtcctcttactgtccttgactttcttctctgctttaacattccattctatttgtcaactgcgtaacacaggcgtagaagtggacattgttttccagagagtctcctttttatagtttcttcctcaaccttaaaatgtctgtccttttggcacgttgtgaaggagaacactaacgtgcctaagattggaggtgacgatatctctgtgatgctgggggagaaatcacaggggcaaaaacaaaactttaggggcattgacaaagggggcccttcttaaaaaaaaagggaattctgccttttttttncatctcattctagtagtacttgaatggtccatgaaagagaggcacaggaccctcacaccatctcttttgctttaattgggatggaagcttttcaataatacttagtgggctgctgcggcctcttatgctctatggagcatcccttgggaaacagttaaaaataattagggagaccagaccagggaaggggggg

SEQ ID NO: 91872 - DNA, 341 bp, Homo sapiens
gcaaaatgaaaacgtggggtctcttcctcaataacaggaaataatgctgttaaaagtactaaaatatataactttatcctttcttctgtggtctctctcatgtcctgttatggtgtttttgatttgccatttaattgtgctctcctcccctgggcaccttggccctctaactgctgggttccctgtccagccagggctgggctgacagccaagcccctaccaaggatggggaaatccatcttccatttccgtggacctgctgcaccaacccacagtgatgagctatcccccaagagattgtaacctctggaatgagaatggaaaggaagcttgcctgaagc

SEQ ID NO: 91873 - DNA, 307 bp, Homo sapiens
ctggaggtctgagaatttcttgtcaagccttcgttaaggtgtttggtttgtgatggcgtaggacagtgcagttctctctggatgaaaagcctccttttcgaaccgttggcatgcgccacttaagtttgatggtaaaatttgtcatcaggtcttggtctttttctctaggtaacagaaaggggaggtgtgtgggggtgagcattgaggggcagtgctcctttgaggctatgggtttttagaatctagaagtgcttagagatctgtgacaccttgtctttaattgcctcagttaaggagcaatgtaggg

SEQ ID NO: 91874 - DNA, 651 bp, Homo sapiens
ttctgaactgagcataggttgtccaacatcctcccctctcccacctaaattgagccccaaacacagaaacagtcatgctcatggaattcgaattcaccatgaaagtttgtgaacacaataaaaaggcatttctagctcccacttaccggatctctccagttcattttgctgtgtgaggtagtttgcacagtgggaccttccctcaatcccttagctacatctagtagggaatgtgctttcattcagcctagcaggagaagctgcccatacactggaatgtaaactatgttcatattatttctaattcaggataaaataagcaatttgttgtttgtcacttgcattattgcttttagggaggtagctttcacttatttcatttattttatccattcagcaaaccttggccaaggacttactctatgccaggccctgtgccaggtacggagagcacaagcagtgtaagagcctgctctcatggaacgtacattctagtgacagagagagagaatagataagtaaggacataaataagaggcaaggcagaggcgagtaggaggaggaaaataaaacagggcagaggaatgaatgtgacaaggtaagtggctgtttcggctcctccgtggggatggtgcgggggtctcttttctg

SEQ ID NO: 91875 - DNA, 406 bp, Homo sapiens
aaactgtacattttagatatgtgcagtttattgtatgtcaataatacctcaataaagctgtttatttaatgaacagagactatgaatgaatggggaagaggctgaaagtgatcgctccgataagaagccgtgctgtcttgccccatgtccgtatctgagtttattttctgacccagagcctgttgcttgaagacgcagccaaggtctgcagagggaaggcccagcaacaccactgccagcatttgctggaatgttctcgcaaaggaacgtggcatttactcacagggctgagcactctggcacagagacccctcacattgtaggaccgatggacacaggctctgagttgacgctggcatctaaagacctggagggtggctgggcacactggttcatgcctgttatc

SEQ ID NO: 91876 - DNA, 642 bp, Homo sapiens
cgctgcttctgagctctgaccctgcccagatgctcttagctggagagtaattcctcagtttaggtggctgctcaccctgacaatcccatgtggcttgacctgaaagggtggctaaagcacaacactaccttctccactggggcacacccatgtggtacggaagaagaaatgaggagagggaggggcctggcccttccagggctcccacacggggtgagcattgaagcaggtgctccatggcattggtctcacgtgatctttgctgtgatcctgaaatgggtagtattggctgtgcagattaggaacctgaggctcacagaagttacacagcttgaggacattgctcaaaattgtcccagtccagatttgactgggatttgtctgatttattacccatttgttgggggtgtgctgtttccaacagttccttcttccattagttttggttccattaatctgaattttctcagtctaatctagcagagttgcagtgctggacattaacatatgtatgcatcaaacccatccttagggctgtaggaggtactgcatgcaggttatgggagctataattttttttaggttgtaaataccgagtgcctcctctgtgtctacacagtgccaggtactatcggagaatac

SEQ ID NO: 91877 - DNA, 601 bp, Homo sapiens
caattctgaaggtcgccaagaaggagagaacaatgtcttctttacccgtgccatacaaactgcctgtgtctttgtctgttggttcctgcgtgataatcaaagggacaccaatccactcttttatcaatgacccacagctgcaggtggatttctacactgacatggatgaggattcagatattgccttccgtttccgagtgcactttggcaatcatgtggtcatgaacaggcgtgagtttgggatatggatgttggaggagacaacagactacgtgccctttgaggatggcaaacaatttgagctgtgcatctacgtacattacaatgagtatgagataaaggtcaatgggcatacgcatttacgggctttgtcccatcgaatcccgccatcatttgttgaagatgggtgcaagtgtccgaggagatatcttccctggacctcagtgtgtgtctgcaattgagggagatgatcacactcctcattgttgaggaatccctctttctacctgaccatgggattcccagaacctgctaacagaataatccctgctcacattttcccctacactttgtcattaaaacagcacgaaaactcaaaaaa

SEQ ID NO: 91878 - DNA, 479 bp, Homo sapiens
  misc_feature (1)...(479): n = a,t,c or g
tataatagatgattattctaatagaaattagataaggaccagtgggcacccaaacctgattgaaaatcttttcttttgaccccaaattatatattgattatatggagagaaaaattattagctacctgatggttagggagatacctggttatgacaaatgggccctctaactatgttagttgcagggtgttctaattgccctaatcgctcctttctgaaaatattggattatgccagaggtttgtttctcaacttaatttggataaatgtcttttagtcttgcagctttaagaaaaaaaaccagcatagatgcgtatttgccgtacgcgtatgtttacaaataatagagggatacggaaggcaagancttgatgtcactcttgtacgttaacaaatatatccctgangcatcttatatatagcatactcagtgccgttgcattttcagtgggaagaagtcaatgctcatgtagttctgn

SEQ ID NO: 91879 - DNA, 777 bp, Homo sapiens
aggtttcaggctaacattgtgatgggtaaagtggaaagtacattcaaagttgaataatagtatttgggagaccttatttttaaaattaaaaaatcatatatgagggtagggagaactccccacttaaagtcaaaaaaggtcattcatttcggaaatactgacttattagcattgccagctattgaaagcagatgactttctctttctggcagtattcttgtttctcccatttatgtctcaccaagaggtttaaacacaggatatatattttaatccctagaaaaagtgccatctttgcttaaccagaagagaaattcttacaaacacaaaaacgactttcaaaattgctccctgacttaattgtagacatctaaaatcttgaatatgccacacatttttaaacatcaggagggaacacttagtctatgaccaggtttgaatagagtgaatgaactatagatgttcatttccatgattctaccttttaataataaagatcaaactgcctttggggtttacagtttgtgtgagatgcaaagaaacctaggttcagttgactcttaatttgtaacagaaacccacatccccatcctaccccctgagaaaattgcttaccactctgacaaaaagtgggcaacagaagcaggaggcccaccaactgcaaagatgagggctttcattttgatgacctgagtcccgtctcttaaacgttatgaaaactgtaaaatcatggaggcacattttcacctcagtttcctggtgtcagcaacaaatgga

SEQ ID NO: 91880 - DNA, 482 bp, Homo sapiens
aagccaaaccatattgtttgagggcaaaggcaggtttttaggggagagacgaaataaatatccaagtagaaacaaagctagacttgagaccttggagataggttgacagctgtctatttggagggtcttgtgtctcatccctttttgcaggatggaactcagagctttggatgacgactggctaattctagaacactgcactgaatgttactcattatcaggctgtggttagagcagagtgcctttccaagtagtctcaggatgccagcgggacctgcctgtgcagtgaccatcttgagtctgaaatttaagtggaaagcagcaaattagccattcctgtgtttagaggaaaactgagtttagttagaaggtgtgaagtcgttgggggcagcatgttcctactgaagaaactgggaatcctcggcaggttagtagcaagcagaactttagagtcccttgaaggaaggttgaagtgatgcttg

SEQ ID NO: 91881 - DNA, 858 bp, Homo sapiens
agcctgaaggctataacggaagtgaatttcctgggacatacatgtggtgaatgatcacagggtaaaaagagtttctaaattattaaccaaattaataaaaatgaaacagggtttagcattttttatcttctctttttattatttgtatacacagtaattatgagatgatacccaacgtgcaaaatttatgtgtatgtgtactaggtagtatttacttgtagttgactggagtgtaaactgaagagagaagaaaatgataacatggtattttcagtatttatattggggcttctcccctcccacccaattccttcaattgtctcctagattaaaaataagtattgtttctctgagtgtttttatttggtcgctcgctttttaaatttttcccttcccatcatctacgtttccccattgggcgttaaaggaaataatatggcatattattttaatagtctttcagcattcagatgatagagagtcattttgaagaaaaaaccgtatcaggcagaatttacacagcagtgtgtatgggcttttagcagcagttgttagtgctaacaccgttttcccagttgctggtattaaggtagcagcaggcccatactagcagagctgtgatggcccaagcacagctgtatttctgccattcccgcaggtttgggtgcacctgggatcgaccacacccagttggtatcagtcaacagtgtatcatgccgcgtggttttttaattcatgatttcctcttgaaactccactgaggagtgttaactgtgtgcgtttttttaaattcagatttgtatgctagcattctttaaatgtctgccagaagattaatttgaatttctgatccctgaa

SEQ ID NO: 91882 - DNA, 379 bp, Homo sapiens
attataatctgtaccatactatatccatttatagctataatatatcaataagtggatgtaactatagatagatactgttggataatattgttattacattgttatgatacaatttatcatagacagtgctcttctttacatttttctattacttccagattttccttatgaaacatgacattatcaccaggaaaatatgcacacacacaatgaatgaaggtcggcgctgacggtgcaagtttggctgtcagtctacgcagagtggctctgcgtgtcttctcccctcccgtgccttgcttaaccttcggttggatgatccacccttttctgtggccagcgctggctcctggcatccttctgcttgccttttggttttcaa

SEQ ID NO: 91883 - DNA, 707 bp, Homo sapiens
attttcttgtggctccaagaaaaagaaaacccaagtttaagaaggcttaacaatggaggttacctgtatcatataagaagtcctgagttatacatctactaacaatagatccatggcaagacacatgttagaatttgcactttggaatggtctttctctcacatttctagtctcatggccgcaagatgacagattatcccaggcctcgtgtttacattcgcagactaaaaaacactgtggtagataggaaaagcccctccccagagatgactcccaagtcctcactcccagacctgtgaatttgttgccttacagtcaggtgtactctacagatgtgattaaattaaggatctggaaatgaagggattaacctgtcttacctgggtgagttcagtgtagtcataagagttgagtgagccaggagatttggcgagggaggtgtgaccctggaagcagaatgatgtggattaagaaagactcacctagcgattgctggttttaaagatggaagggtatcatgagccaaggcacatgagtgcctcttgaagttggaaaaggccaaggaacaggttctcccctataacatccagacaatgtcactcagtgggttctacttcaggcttctgacctccagaactgtaagaacactaatttttaaattttttgctttttttttttagaaaaaaaatttgcctcccccccccccc

SEQ ID NO: 91884 - DNA, 706 bp, Homo sapiens
  misc_feature (1)...(706): n = a,t,c or g
gggtatagtcgtcagatgttcctgacttgttcactggccattctgatcttataattccatcttctctggtccccagtctcagagtccatctgactatgagacctgatgctctcttgcccctgagccttctgtgtgatttcatggagatgattgctttcatctctcggttgtaaatagtagtcaccctctgcccccacccccactgccagactaacggttctcaactaaccaagagtattggaggtaaaacatgattttacccacaggagcattgtgcttactccccaagccccaagcttgtgtcttccacagtctgagggtagggaatcctgccctgccctttgcatcctgggaggatttgcagaacaaaagcagctcctgctaatgagcatcttcttgacacccagtgggacaagcactctttgtagcacaactttacggtcaaacagccattaagagatgcagccaggttcaaatctaggccagtacaagacaaagcttgggatcttattagtacagtctatcatgagttctccctccccagccccacaatcagggtgtgctgatgagtgacacctcctcccttcatcccagntcagaaaggatcagagcagaaggtagcagcttgttccattcctgggaagaaccccccaactttcgggccttatcaggggttttaatatttaaccaggcccccccccctttt

SEQ ID NO: 91885 - DNA, 1158 bp, Homo sapiens
tccccggtgtgtgggtctgtgacagggtccaacagggcctggtccgtgtccggtcccccaaatctgtcgtccctgcccccaggcattggcatcaacaaaagtcagaattcccgggaacttgaacagaggctgctaaattcccagtaattgctcctttggccttctagggactgacttcaaagaaggaaggaaagaatcaggcagtgcttcctcattctcttttaaaacccgcttcccgctgagtctgcacccaggagaccagagagcaccttgcccttccatggaaactcaggctgatctcgtatctcaggaacctcaggccctgcttgacagtgctcttccttcaaaagttcctgccttttccgacaaggacagcctgggggatgagatgttggcggctgcgctcctaaaggccaagtcccaggtgagctgtggttccgtttatccttttcctttccattttctgtgcaatgacatcccattcagagctttaaaccctgatctcctccatcaggcccatggttctgtcctgctgaatcatggaccctcaccttctatcttggactcctgtctctcttcctccaccctgtcctcccttcctcccttcccaaatgtgcatttttcaccccatcctcagtgatttttttggtgccgccattcacattcctcaccctgaaattgcatgccagcacgtgttgtttcaggagctggtaacctttgaggatgtagctgtgtaccttcatccggaaggagtggaagcgtttggaacctgctcagagggaccctctataggaggatgtgatgctgggaggaattacgggggaatgtgttcttcactggggttaagggagttatgcccttgtcaacaaaactcgctggtgtttctttgccttccttcgtttgcctagtaacaatctagtcactgaaaagagctgtttcagcagattttttttttgaggtgcaatggcacaatctttgctcagtgcaacatccatctcccagattcaagtgttcccaggttctcacctctgcctcccaagtagctgggaccacaggcacgcaccaccacaccaggctaatttttgtatttgttttgtttttttttgttttagtagagacggggtttcaccagcctgggcaacatagcaaaacccacct

SEQ ID NO: 91886 - DNA, 710 bp, Homo sapiens
ctaggagctaagttgaaaattttcaaaaaagaatttaaaagagactatggagtactgtgacaccaggaaaacttaaaactttgtgtaagacagactggccagcattagaggtaggttggccattagaaggaagcctggacaagtaagtcccttgtttcaaaggtatggcacaagataacctgtaagcctgggaacccagaccagttcccgtacatagacacttggttacagctagttttagatcccatgcccccaacacacagtggttgaaagaacagcagcataagcagctggcagaggcaaggaaagaccagcagagagagagaaaggaaagagacagagaggaaaagaggaaaagagagagaggaagagacaggaagagacagacagagagtcaaggatagagagagagagagagagagagacacacacacacacacacacacacagagagaggaagagacagaggcaaaaggaaagtcaaagagagagacaaagtcagagagagaaagatagagagacagagagagagatactaagttaagaaaaaaagccatctataccaattctattttagacaatacaaggtcttatttatagcctagggtattaaaatcgcaacttggaaggttttctttttattattattattattacaccttaagttttaaggttccatgtgcccaacttgcatttgttttaaatttctt

SEQ ID NO: 91887 - DNA, 395 bp, Homo sapiens
ggaatatgaaatgttcctgttgtctgactttccattatccaagtcttcacagctccgaggtacatgcagaagcagcaagtgctccttctgtgtggccctgcttatacgttcttccccggtcctcaccactgctacggtgacagtgcagactggcttcttagacccgttatgcatgtgacacatgaccatccaacacaagggcagagctggcatcaccccacagccttcagccctcaaagacccatccgggaactgacgctgctacaggccaccagagacaggagacagagtttgagagctccttccctgcctcagtcttactaatccaagtcagtcattcacacaggatgcctgctgcaaggacctagtccaacgcacctcgggatttccaggca

SEQ ID NO: 91888 - DNA, 694 bp, Homo sapiens
ccttgaacaagtctctgtttgtttcgtaccattcagatttcctcgtctgtaaacattaagtatctacattcactaaaagtagttctgaatgaatgttatttaatggtgccaatgatgttggaggatacctgtgtttcctaggctgttgtaacaaagtgccttgactgagtggttttgaaacaaagagagcttattccttcatggttctggaagtctgaagtctgaaatccaggtgaaagtagggccgcaccctctccaaagctccagggaagaatccttcctctcctttagttttctcagtggcccacagtacttggcgccctgtggttttgcggcagcaggtccacctcttgctctgtctccacatggctgtcttccctatgtgtccatgtccaaatttccctcctatgaggaaaccacagataccatgtattagattatagatccctctaatccatgattacctcatcattaaatctgcaaaaaatcccatttccaaataaggtcacattcacaggttccagttgaacaggcatttttagggggctgaagggtggcactaattaacccagtaaactccaccagctggcacccccaaattatgtttttccggcgcccaaaaacttccccctgcccccaatttttccccccttttagggaatcttaaaaagggccctttttctccctcaaaggg

SEQ ID NO: 91889 - DNA, 647 bp, Homo sapiens
acccagggggaggtaagatgtgcctttcactttccggcgtgattgtgaggcctcccagccatgtggaacctgagcacctgtttatgcactgcagtcgtgagtgagatagaatcatgtgaggagtggacagtctgccttacagcccatgctcagtacatatcctaatgaggaattggtccctggctgtcgttgtctccacgcccttgagttggacaatgctccgtcccaaggatgtgacagattctttcatttatgactatgccacgctcagcccatctaacctcaaatctaacctaatcctggtggccctcccaccttcccagcacacaggagcaagcagagaacatgggcagtcaagtcaaaaggaaaggatggcctacagatgctgttctgtgaggacagtgtccaaaccagaaagtcaagatgcctctttgaggatccgtctgaaaacaaacaaaatacgtgaaatccaggagagctggagtagaaaacgccgtgaaggtagcgtggagagcatcagggagcagctgctatttcaacacagtggggacttcacacctgggcctgagggagcctcactgtttcactgaatttatgttcatatatttatgataataaatatgttcatacacttacgttcaaaaaaa

SEQ ID NO: 91890 - DNA, 711 bp, Homo sapiens
gtgaattattcatgatgacatgaatgggggtattattttaaattagtatagaagcaaatggttcacaacccatttattaagaccctaatgttgatgtggctaccaagaagctttaccagcaagggccagtgtgttgccttccttggttggttagtttttctacatccacttaactcctagcctaattttatcttttttttcctctgtttttctttccctgaatgtttatttaagctctgataaatcattttgaattaagggcgggtatgtatttcctttcttctcatcttcttccccctccatgactgcctgcatttgaatacatttccattgggtgagaggcagtaatggtacagaggggtggggggaggtgacatgtttggtgagctgtggcttacatgtctccagagacaccgggcctaggatgactgattaaaaatcaacttttaactactataacggctgactttcctgaaacttgttatgctgtaaccccacctattgaagacataatcagaaccagatagtgaacaaaattgacccctggaaatattgtggccaccacctggggcattaaccccgaaacacttttttttttacgggaatttttttttgggcccccttccggaacccaattttgacatccaaatttttttcttttttaaagaaacggaaaaccccctcccccttttggggggtttttccttttca

SEQ ID NO: 91891 - DNA, 726 bp, Homo sapiens
cagagcacttgctcctgacttctgtagcaatggcctcaacactattgagtgtgtagtatttcttaggcatggttctctgcatacatgtatatattatttattcctcacagaggctctgtaaggcaggcactcatagacgctgaggtttagagaaacttaagtaacttgccccaggtcatagagtaagtgtccaagtcctcaagcccgggcagtcctgctgcatctgcatggcacatgcgcttggcctggtctgctcagtgtgtctccctgactgggctgtcagttcctggagggtagggatctgtcttcccttctctatccccagtgcctggcatgtagtagacactcagtaactgtcaaataaatgaaagccctggctcatcaaacaaagaccagatgtgatttaaatttcaaggagccatactttttacaaaaatgctaaaatgccaagaagtactttttcattaaaacaaaacaaaactgttttagctatgtaagggtggccttttagaactctgactgctttagatctttcctctacggggcataaagtttgggggcttcggccaacccccttgggtaaagaaaagaagcattttgtaaaaaaggttgggggccttaaaacggcccctcccaaggaaacccaaggcttcccggggttaaaaaataacctaaggggaaaataaccttaacggggggagaacgcgaaaacaccccacttttttc

SEQ ID NO: 91892 - DNA, 3267 bp, Homo sapiens
gaattcctttttttttactaatgaaacactgcagattagtatccccaaacaattcattttctgacgaaactcttaaagcccagtttcagaacataagctttaagcaacaagcaatcttgtgttaatctgagctctgttacagctctgccgtaatctcagccaaattgcttcatctgtacgtggtgataccaccatctttgtaatattgtggtgaggattagagatgtatgtaaaagtgcatgcactgcctaatacccaagaattgctcaataaatgtcagctattactactcttactgacttccaactatgtgcagattatggtggaaacatgtgatacagcagatacagtacttaaatgaaaatgtcaaaattgtacaactaatttaagagtgggaaatgacagtaatgctaaattttcctaagaatatgtatgaaaaatagcacttccttgatggaacatacatttttagaacagaaaccttatgttataatggtaaaactagagagtcaaagtctctagttctaactctggctatgaccttatctagttgcatggcttttgacaagacaactgctcccctctggagttcagttttgtcatctggctggatttgagtaatctcaaataatctctaaagtcctttgcagctttaaattatctattgagtgtgataaagattacatcagcttgcttttcatcctgcacttcatttttggttcttgttgtttgcttaacttgcactttagagtcataagcaattcacacagacaacacaactaaagaactgataatatcagacttgcagggtaatccaaaatgaagtttcaacaaggaggataaaacaaaatagaatcacactgaactctttaatagggccaaagtaaaccccaatgtttattctccagtcatttcattaagttattatatggaaaatatgcctggtagaatcttatacattcactgaaatagtctccacagaaaataataggctcatagtgaaataaaataccactttcttttctctcatcaggttgatctttaaataaagcaaaaatttatccaaagaagggctttcatcaagaaattaaagagagaaattacaagccatagagaaactgggcatttctatactagagaaaccacctaaaacaactgtatggagtaagatgaaaggtatgaatatgcctggaagaaattttacctagtgtgacatttttgctcatctttttgtcccaaaaggctgctaaggaagagagaatacagttttctagagaataagagtgcagtgtaaaaatggaaaccacaatttcagaaattcatgtagaaaacaaggatgagaagagatcagcagaaggtagtcctggggctgaaaggcagaaggaaaaggcatccatgctttgcttcaagagaagaaagaaagcagccaaagcactgaagcccaaagctggctctgaagctgctgatgtggcaaggaagtgtccacaagaagcaggagcttctgatcagccagagcccacacggggggcctgggcctcactcaaacgtcttgtaacacgcaggaaaaggtcagagtcttcaaagcagcaaaagccattggagggtgaaatgcaacctgcaataaatgctgaggatgctgatctttctaagaaaaaggcaaaatctagacttaagattccctgcataaaattcccaagagggccaaaaaggagtaatcattccaaaattatagaagactcagactgcagcatcaaagtccaggaagaagctgaaattttggatatacaaacacagaccccattgaatgatcaggcaacaaaggctaagtcaacccaggatctaagtgaaggcatctcacagaaagatggtgatgaggtctgtgaatcaaatgtgagcaatagcataacttctggagagaaagtgatttcagtagaacttggattagataatgggcattctgctattcaaacgggaactctaatccttgaagaaattgaaacgatcaaggaaaaacaagatgttcaaccccagcaagcaagcccacttgaaacttcagaaacagaccatcagcagccagtactttctgatgttcctcctttacctgcaattccagatcaacaaattgtggaagaagccagtaacagtaccctagaaagtgcaccaaatggaaaagactatgaaagtacagagattgtagctgaagaaactaagccaaaagatactgaattgagccaagaatcagattttaaagaaaatgggatcactgaagagaaatccaaatcagaagaaagcaaaagaatggagccaattgctattattattacagacactgaaatcagtgaatttgatgttacaaaatctaaaaatgtccctaagcaattcttaatttcagctgaaaatgagcaagtaggggtttttgctaatgataatggttttgaggatagaacttcagaacaatatgaaacactcttaattgaaacagcctcttctctagtcaagaatgctattcagttgtcaatagaacagctggttaatgaaatggcctctgatgataataaaataaacaatcttctacagtgacttactctccagagtcacggcagaaaaaacaagcttaatgaagaattcttttatacatttgtggcatttcttactcagtaacaaatgagagatttatcatctctagaacttaaaaggtacaattccagcgcagaagtgctaaagattaagtcaagtttataaaactctaccactgaaatgcagtcacttctggattggaggaagtcagcacagattgcagtgtaaaatgacataacatacagggagttgctaaaatggcatatggagattggagtgctttgggggaggaaggtgtatttattgagcacttatggtatgccataagctttttaatgacctctgatataacaaagtctggtttccttttgataattcagctctgtgtataggctaacatcacattaagtttttaaaaacttattttttacagtgcacatatatgtttaaaatggtgaataaggtgagctacttttgtgaatgtgatttgtaattgttacattcctaagcagcaggcttaactcaaaaaatacattgcattttcccaatttcagcagatagtgtgcagaatatgcatattgatattaaacgtgagtggtttcctagtcttaaggctcttataagcgctatttggccaggggcaggggctcacgcctataatcccagcactttgggaggccaaggcgggtg

SEQ ID NO: 91893 - DNA, 1147 bp, Homo sapiens
gacccttggaaacttcggaagctggtctgtgcgtgtatgcgtctaccatgtgggggtgcctgtgagtgtgctgttgcgtctgtttgaaggcctcctgagaccactccacggaaacgccgggaatccctgcagctgagcctgtctctcacgggaccgggaagctggagagagccccaaccctgcccgctggggccgagctccctgctcctgcagcagtcccatgccccacactctgagtctgccctatccacagctgctgggcctctctgtggccaccatggtgactcttacctacttcggggcccactttgctgtcatccgccgagcgtccctggagaagaacccgtaccaggctgtgcaccaatgggccttctctgcggggttgagcctggtgggcctcctgactctgggagccgtgctgagcgctgcagccaccgtgagggaggcccagggcctcatggcagggggcttcctgtgcttctccctggcgttctgcgcacaggtgcaggtggtgttctggagactccacagccccacccaggtggaggacgccatgctggacacctacgacctggtatatgagcaggcgatgaaaggtacgtcccacgtccggcggcaggagctggcggccatccaggacgtgtttctgtgctgtgggaagaagtctcctttcagccgtctggggagcacagaggctgacctgtgtcagggagaggaggcggcgagagaggactgccttcagggcatccggagcttcctgaggacacaccagcaggtcgcctccagcctgaccagcatcggcctggccctcacggtgtccgccttgctcttcagctccttcctgtggtttgccatccgctgtggctgcagcttggaccgcaagggcaaatacaccctgaccccacgagcatgtggccgccagccccaggagcccagcctcttgagatgctcccagggtggacccacacattgtctccactccgaagcagttgctattggtccaagaggatgctcgggtagtcttcggtggctgcaggagagcgatgctgcgcctctgcccctctcctgccacctggctgcccacagagctctccagggcagaagtcgcggtgggctcagtgggtgccctgagcggggtctctcagac

SEQ ID NO: 91894 - DNA, 3472 bp, Homo sapiens
tttcgtccggaggggcccagtgtggacggggccaccggctggagcggatcccacacctccggaccgagggacgcggttactccacaggatccgctgaacataggatgttgccacaaaatctacctcgtgtatttttctctttcactcatgagctgcacaattgcagatttgagcacaatgtctgcagactgtgttgaaaaactctgaagaacctaattaacacaggatgacctaggagtgattctaagtctgtgtaacaagatattactcattagtgaatgtgtcagtcttggtactgaatgctgcagataacagcaagtaggttctcctttatttctgaagtattcacttgaccttccatcagtaagacggacttttctaatctgttcctggagatattaatggaatacagtcatgtccactcaagacgagaggcagatcaatactgaatatgctgtgtcattgttggaacagttgaaactgttttatgaacagcagttgtttactgacatagtgttaattgttgagggcactgaattcccttgtcataagatggttcttgcaacatgtagctcttatttcagggccatgtttatgagtggactaagtgaaagcaaacaaacccatgtacacctgaggaatgtcgatgctgccaccttacagataataataacttatgcatacacgggtaacttggcaatgaatgacagcactgtagaacagctttatgaaacagcttgcttcctacaggtagaagatgtgttacaacgttgtcgagaatatttaattaaaaaaataaatgcagagaattgtgtacgattgttgagttttgctgatctcttcagttgggaggaattaaaacagagggctaaaagaatggtggagcacaagttcactgctgtgtatcatcaggacgcgttcatgcagctgtcacatgacctactgatagatattctcagcagcgacaatttaaatgtagaaaaggaagaaaccgttcgagaagctgctatgctgtggctagagtataacacagaatcacgatcccagtatttgtcttctgttcttagccaaatcagaattgatgcactttcagaagtaacacagagagcttggtttcaaggtctgccacccaatgataagtcagtggtggttcaaggtctgtataagtccatgcccaagtttttcaaaccaagacttgggatgactaaagaggaaatgatgattttcattgaagcatcttcagaaaatccttgtagtctttactcttctgtctgttacagcccccaagcagaaaaagtttacaagttatgtagcccaccagctgatttgcataaggttgggaccgttgtaactcctgataatgatatctacatagcagggggtcaagttcctctgaaaaacacaaaaacaaatcacagtaaaacaagcaaacttcagactgccttcagaactgtgaattgcttttattggtttgatgcacagcaaaatacctggtttccaaagaccccaatgctttttgtccgcataaagccatctttggtttgctgtgaaggctatatctatgcaattggaggagatagcgtaggtggagaacttaatcggaggaccgtagaaagatacgacactgagaaagatgagtggacgatggtaagccctttaccttgtgcttggcaatggagtgcagcagttgtggttcatgactgcatttatgtgatgacactgaacctcatgtactgttattttccaaggtctgactcatgggtagaaatggccatgagacagactagtaggtcctttgcttcagctgcagcttttggtgataaaattttctatattggagggttgcatattgctaccaattccggcataagactcccctctggcactgtagatgggtcttcagtaactgtggaaatttatgatgtgaataaaaatgagtggaaaatggcagccaacatccctgctaagaggtactctgacccctgtgttagagctgttgtgatctcaaattctctatgtgtgtttatgcgagaaacccacttaaatgagcgagctaaatacgtcacctaccaatatgacctggaacttgaccggtggtctctgcggcagcatatatctgaacgtgtactgtgggacttggggagagattttcgatgcactgtggggaaactctatccatcctgccttgaagagtctccatggaaaccaccaacttatcttttttcaacggatgggacagaagagtttgaactggatggagaaatggttgcactaccacctgtatagtggggaagttcagggagtgcacgcctgagttatgtgctttgtcattttctttgctaaacaaaagaggctatgaaagaactaaatatgagtacataaaattctatctttgataaattttatttttatgccctacttaatatttgcatcagtataatatatatcagtgagtcttacagaaagatatgcttccataatatgaaatagattattcaataattgagaaactttatgtgtaatcatgagagtataagaatctggattatctaacattgttagccctgtgtatgtacagttcaaaaagttcatttataaaagtagtttcctgttcctagtgtgatgtatcacaaattgtgctgaggttattttagtatgtgtgtttcattcccgtgcttctgttctgaagtcctggaatacagttttcagtgtaattaattcaactgcacttaacactaatgtccgtgttggtatagaaatgtctaaatcctatactctagttgaggaagatcttccataattttatggtattacacagggaaagctatgactgcaggatcagtctaactatactattaggtgcatgtattctcttttcactaacttatacttgtctatctagaatacaggtcttccagtcagctggtcatttaccaggtgtggacttaagttgctgggcttgcagtaagaattgccagccactcattgtgcgggtctgcgtggagctttaatcagaaaaagcctccactttctgtattatgttaacattgggctcatgcatataactatctgctgctgatgtagttctccatcttcaagatttagagtgggttaaccaggtcattacatcttaatttaataacaagcattactgtagagtgattgtgtatagatctgttagctgtcagggtgtgttttttttaacctgttgtgtgcgtgtgggggttaggattaataaggggaactgttcaggaattctctgcactagctgtgcagaagagcagataactcagcgctgctctggcattaatcccaggaaccactagcagtagtggggcgccgcaaatctaacatgagcacaggtgcttcatgacaaacattactagcatgttcaactgcaccatgttctggcactgtattttgaatgacattaatttattaaataaattgtatatattcaataaaaaaaaaa

SEQ ID NO: 91895 - DNA, 410 bp, Homo sapiens
agcagattaagattttgctaatctgtgggcaagattgttgaacgttttacctctttcccagtgacctgtggcagtcagttgtagtagaaataatacaatacttactcacctgtattcagtgaacttaggataaattattgcttttgcaggcatgccaccttctttcctcaacctttcatcattggcatcaagccacattgccatcgtgggctgatccttaccatggaccttccgtttattggcaaagatcacaggtccaactcttcctccttctattctgcccatgtatgttatattacttgacttttagcttttctacaacaaatccaacttgggttatgactccatgtatttatttacatgcatatattttccctaccaatgccttaattaaactagtttttctagtc

SEQ ID NO: 91896 - DNA, 857 bp, Homo sapiens
atcaaactgaggccccaagaagttaaataatttggccaaggtcatattgctaacaaacagtagagctaagatgcaaacccagatggtttggttccagagcctacactcttaattactatgctatacctcctacttccatttacatgtgattgtctttctcagagaagctatttctttggtacactcctttatgaactaaaacccttggagaaatttttggattgcggctgaaaatttccatttgccgaaagatcaagaaaaatcttacttctgtattcagagcaatgctgaacaactgaatgacaagaagacctgcagtaaaaacccagagatgcctcctcagtttctctacccactcacagggactgtttgggtgagaagtgacaattatagtgatgaagcctgttctccttcaggcagagttaggatatctttctgcattcccatagcacttttattctgtaacccttgccttcttggcttctaccttgtctatgtaactgaggaccattcaggggaagtggataagaataacagtgattccaactgaagtccccaccaatgtcatcacaagaatctctgaatataatcacaagaaacccagtgaaatctcctgacactcttgcaagatggtcaggatggcttgtgaagattctggtgcctgcagtcttgataaggccaattttttgcttcatcatgtggcagatgatgatgcttctccatcctctccctgctagggatgtggtgaaggctttacaggccgaatgaacccggtgactccaacttcttcaccttgtggccttggagacaaggcttaacatggtgtaagccgggcctaagacctgctctcagaatcc

SEQ ID NO: 91897 - DNA, 1886 bp, Homo sapiens
cattcagagacagaaggtggatagacaaatctccaccttcagactggtaggctcctccagaagccatcagacaggaagatgtgaaaatccccagcactcatcccagaatcactaagtggcacctgtcctgggccaaagtcccaggacagacctcattgttcctctgtgggaatacctccccaggagggcatcctggatttcccccttgcaacccaggtcagaagtttcatcgtcaaggttgtttcatcttttttttcctgtctaacagctctgactaccacccaaccttgaggcacagtgaagacatcggtggccactccaataacagcaggtcacagctgctcttctggaggtgtcctacaggtgaaaagcccagcgacccagtcaggatttaagtttacctcaaaaatggaagattttaacatggagagtgacagctttgaagatttctggaaaggtgaagatcttagtaattacagttacagctctaccctgcccccttttctactagatgccgccccatgtgaaccagaatccctggaaatcaacaagtattttgtggtcattatctatgccctggtattcctgctgagcctgctgggaaactccctcgtgatgctggtcatcttatacagcagggtcggccgctccgtcactgatgtctacctgctgaacctagccttggccgacctactctttgccctgaccttgcccatctgggccgcctccaaggtgaatggctggatttttggcacattcctgtgcaaggtggtctcactcctgaaggaagtcaacttctatagtggcatcctgctactggcctgcatcagtgtggaccgttacctggccattgtccatgccacacgcacactgacccagaagcgctacttggtcaaattcatatgtctcagcatctggggtctgtccttgctcctggccctgcctgtcttacttttccgaaggaccgtctactcatccaatgttagcccagcctgctatgaggacatgggcaacaatacagcaaactggcggatgctgttacggatcctgccccagtcctttggcttcatcgtgccactgctgatcatgctgttctgctacggattcaccctgcgtacgctgtttaaggcccacatggggcagaagcaccgggccatgcgggtcatctttgctgtcgtcctcatcttcctgctttgctggctgccctacaacctggtcctgctggcagacaccctcatgaggacccaggtgatccaggagacctgtgagcgccgcaatcacatcgaccgggctctggatgccaccgagattctgggcatccttcacagctgcctcaaccccctcatctacgccttcattggccagaagtttcgccatggactcctcaagattctagctatacatggcttgatcagcaaggactccctgcccaaagacagcaggccttcctttgttggctcttcttcagggcacacttccactactctctaagacctcctgcctaagtgcagccccgtggggttcctcccttctcttcacagtcacattccaagcctcatgtccactggttcttcttggtctcagtgtcaatgcagcccccattgtggtcacaggaagtagaggaggccacgttcttactagtttcccttgcatggtttagaaagcttgccctggtgcctcaccccttgccataattactatgtcatttgctggagctctgcccatcctgcccctgagcccatggcactctatgttctaagaagtgaaaatctacactccagtgagacagctctgcatactcattaggatggctagtatcaaaagaaagaaaatcaggctggccaacggggtgaaaccctgtctctactaaaaatacaaaaaaaaaa

SEQ ID NO: 91898 - DNA, 659 bp, Homo sapiens
acttacagaacacaggaaagaaagactgaagagagaagaacattagttctttcataaaaagaaggatgaagtcacaactagatgcaagattagtcagttttgtctgcccagttttgttgagagctacctctgggaaaagaaaaggggcttttctatggctgccaggatatcgcagatgaattcagagcacaggagattgatggacaggcccttctcttgctgaaagaagaccatctcatgagtgcaatgaatatcaagctaggcccagccctgaagatctgtgcacgcatcaactctctgaaggaatcttaacaggaacatgaagccttgataaaacagcagttttacttttctcacaaaaacttgtaaggtaaaggcctaacttggtctagaatatgacacttattgtggtggatagccaagcacattgggatctccacatcaaatactgacatttcttctacaggtataataattcatcatgcattttcataattaataaacattggtaaaattaattttacaggttacatgaaacattgaaagacttgttacagagggccatgatatttttcaaagaaatgtgttatactagataatttttttaaaggtgatgtttatcattaatataaagaatccttttaaaagtaaaaaaaaaa

SEQ ID NO: 91899 - DNA, 721 bp, Homo sapiens
ccccgccatggccaatttcaagctacctaatgttcctaaatgtataggtgggagagatgtgctattaccatcatatggagacacattccctcaagagcagagagcattgtaaagggccggaaaataggaagtgatgagattttcgcatgtcttacctttgtttttaacatgattcatttaattgtgagtttatataatttaactttaaataattgctgtgtttaacagccaggtcataaaattcctgaaagttcaacgtcagccacccccagcacactcctgctggctgggtgtcaggagatcctgacctgctgtccggctctgccacacagctgcagtgtgaccttgagctctgtaactcagctttctcacttcaaagtgggtaatggacttggattctaattctagatgtcctcttcttttgggggtgataagaaaataaagttcttaaaatgtgaacacataggtacatggattgtttttactgttatagtgttggaaactctgagaatagagactgatgccaaggtcttttgggtgaaaaaaaatctacagcagatatagactgctttatcccagtagcatcacataacctcaagtttacacctaacagtctatatctgctactgggataaagcagtctcccctgtgactctgaacacctgattccaggtcttgataccatctcataagatcggtttatctcctcacctgaggacct

SEQ ID NO: 91900 - DNA, 839 bp, Homo sapiens
tgacatctgtcgccgtgccactggtcccctcggctcaggcctcaggagattggaggagagactgaggtttctctgtgacaaacacagggaatcctgactgggatctccaatctctagtaaggtttgcacagttcttctcctcacatttctttggctgcatctgagccaaagtctggatggagctgtcggggaactgggttatgttgacctcccaacccctgcccaccctctggggtgtccttctgacaaatgggcctttcttccagatccccatcatgacccaccaggccaacggccccctagggtcttgaccccagtgcactcagagtcagcacctgccttcgttgcagcattgaccctctgccatcagatcccacccagggaaggaatgggctcctgtgtgggcgcctggcttctgggtgagaggggaagtgtgtgttgtgtaagtgcccttctgcgtcatgcgggtttgagcagtcataacctcttcctggctcccctgggagcaccagacctgccatggcccctctaagctctggcccgcaaaaccagcagaacctggttctgtgtctaacagccgtcccgccactatcttcgcgggtcggcacggcggaccttccggcttccaaaccgatcgcgcttagcaacccctcatgcgtccgcgtgcactcgtcgtccctggatcctacgtaaacccccgaagccagcccagtcgggcaccgtcggccgatccatacctagggccaggacttaggcatcgctgcactcgttacctcattccgacgcatcagcttgttcatcgtacgctcactcccgcctgatatgctcgcgctcgaaac

SEQ ID NO: 91901 - DNA, 384 bp, Homo sapiens
cccacgcgtccggcagtttgggaaaattctggatccctgtccccattaaaggggaaagacactttatgggccaaatcttgaaaaaactaagctgagaaatatgccagataaaagtcctgggtcactggggccgagtggtgggactcttagtaatgagatcccctctctgccctttccacctcctggactgctttacatcgtggctttgtgatcatgcattctggagtgaattgtcagctgattttattccaaacagggatcatgctttctcagtttacaaattgaataatccaaaccttactgcagagctttcatttctagggagtcctttgagtgtggcccttaggtaacgtttctttgagatctcaaaacaggaaagcctgg

SEQ ID NO: 91902 - DNA, 415 bp, Homo sapiens
aatacagtcggtttttttctgctccatggtttcgaatgggggttttacttctataacttccctcatgcaggggaaacgcatcttcataggacccattggtaagcaaacgattcataccaatcttgttttttccttcttcatattttattctttgtaaaatgtgatgcacgattctacttcttgtggcattgttgaagaacgtttctttgttgtgtatgatgaagggatggatcctttgctggctgaaaggggcagtgtaacagtcattctcctccaggtctgacagtgtctccttgtccagcctcattggcttcttaggtaaccatctcctaaacctgcttatttgtttatcgatcctgctcatgaacttgtaacggcggagcatgtaataacattttttctcctgaaagggctt

SEQ ID NO: 91903 - DNA, 3184 bp, Homo sapiens
tttcgtcttcaaggggacaaaaagagagctagaaaaaatagggggagggggtcatattgattcctgtgggagatgaaattcggatattaaacaactgacctaagtcgcttacagttcttcctcccacctttctattttgcctcttaatcagcccaggcgtcctttccctgagattaaaaaaaagagagaggggagcgttaacaattaaatgtaataagcaactccaaagatggggatgctgtcgaggtggtagttccgtgcaaaccttgctattaccgttgcaaatagacgcggagcccaaggaggtaaaatgcacacttgctgccccccagtaactttggaacaggaccttcacagaaaaatgcatagctggatgctgcagactctagcgtttgctgtaacatctctcgtcctttcgtgtgcagaaaccatcgattattatggggaaatctgtgacaatgcatgtccttgtgaggaaaaggacggcattttaactgtgagctgtgaaaaccgggggatcatcagtctctctgaaattagccctccccgtttcccaatctaccacctcttgttgtccggaaaccttttgaaccgtctctatcccaatgagtttgtcaattacactggggcttcaattttgcatctaggtagcaatgttatccaggacattgagaccggggctttccatgggctacggggtttgaggagattgcatctaaacaataataaactggaacttctgcgagatgataccttccttggcttggagaacctggagtacctacaggtcgattacaactacatcagcgtcattgaacccaatgcttttgggaaactgcatttgttgcaggtgcttatcctcaatgacaatcttttgtccagtttacccaacaatcttttccgttttgtgcccttaacgcacttggacctccgggggaaccggctgaaacttctgccctacgtggggctcttgcagcacatggataaagttgtggagctacagctggaggaaaacccttggaattgttcttgtgagctgatctctctaaaggattggttggacagcatctcctattcagccctggtgggggatgtagtttgtgagacccccttccgcttacacggaagggacttggacgaggtatccaagcaggaactttgcccaaggagacttatttctgactacgagatgaggccgcagacgcctttgagcaccacggggtatttacacaccaccccggcgtcagtgaattctgtggccacttcttcctctgctgtttacaaaccccctttgaagccccctaaggggactcgccaacccaacaagcccagggtgcgccccacctctcggcagccctctaaggacttgggctacagcaactatggccccagcatcgcctatcagaccaaatccccggtgcctttggagtgtcccaccgcgtgctcttgcaacctgcagatctctgatctgggcctcaacgtaaactgccaggagcgaaagatcgagagcatcgctgaactgcagcccaagccctacaatcccaagaaaatgtatctgacagagaactacatcgctgtcgtgcgcaggacagacctcctggaggccacggggctggacctcctgcacctggggaataaccgcatctcgatgatccaggaccgcgctttcggggatctcaccaacctgaggcgcctctacctgaatggcaacaggatcgagaggctgagcccggagttattctatggcctgcagagcctgcagtatctcttcctccagtacaatctcatccgcgagattcagtctggaacttttgacccggtcccaaacctccagctgctattcttgaataacaacctcctgcaggccatgccctcaggcgtcttctctggcttgaccctcctcaggctaaacctgaggagtaaccacttcacctccttgccagtgagtggagttttggaccagctgaagtcactcatccaaatcgacctgcatgacaatccttgggattgtacctgtgacattgtgggcatgaagctgtgggtggagcagctcaaagtgggcgtcctagtggacgaggtgatctgtaaggcgcccaaaaaattcgctgagaccgacatgcgctccattaagtcggagctgctgtgccctgactattcagatgtagtagtttccacgcccacaccctcctctatccaggtccctgcgaggaccagcgccgtgactcctgcggtccggttgaatagcaccggggcccccgcgagcttgggcgcaggcggaggggcgtcgtcggtgcccttgtctgtgttaattctcagcctcctgctggttttcatcatgtccgtcttcgtggccgccgggctcttcgtgctggtcatgaagcgcaggaagaagaaccagagcgaccacaccagcaccaacaactccgacgtgagctcctttaacatgcagtacagcgtgtacggcggcggcggcggcacgggcggccacccacacgcgcacgtgcatcaccgcgggcccgcgctgcccaaggtgaagacgcccgcgggccacgtgtatgaatacatcccccacccactgggccacatgtgcaaaaaccccatctaccgctcccgagagggcaactccgtagaggattacaaagacctgcacgagctcaaggtcacctacagcagcaaccaccacctgcagcagcagcagcagccgccgccgccaccgcagcagccacagcagcagcccccgccgcagctgcagctgcagcctggggaggaggagaggcgggaaagccaccacttgcggagccccgcctacagcgtcagcaccatcgagccccgggaggacctgctgtcgccggtgcaggacgccgaccgcttttacaggggcattttagaaccagacaaacactgctccaccacccccgccggcaatagcctcccggaatatcccaaattcccgtgcagccccgctgcttacactttctcccccaactatgacctgagacgcccccatcagtatttgcacccgggggcaggggacagcaggctacgggaaccggtgctctacagccccccgagtgctgtctttgtagaacccaaccggaacgaatatctggagttaaaagcaaaactaaacgttgagccggactacctcgaagtgctggaaaaacagaccacgtttagccagttc

SEQ ID NO: 91904 - DNA, 741 bp, Homo sapiens
  misc_feature (1)...(741): n = a,t,c or g
gacattgggttccaagaacaggtgtaaaataacagggattcttccctgcaggggcttttaaaanctatgtttcccttcatccaccctaaagacttgcaccatgcacactcacctcccatcagcgaaaagagctcttcctgcaggcagggaccatgctctgcccctcagccctcacttccaccagggggaggagctcttcctgcagggagggacctgggtatgccctcacctccatcaggggaaagagctcctcctgcagggatgaacctgggtatgccctcaaccttcaactccaccaggggaaaaagcacttcctgcggggagagacctggttatgccctcagaccccacctccaccagggggaagagctcttcctgcagggagggacctggatataccctcaaccttcaactccaccagggaaaggagctcttcctgcagggagagacctgggtatgacctcagccctcacctccaccaggcggaggagctcttcctgagaggagggaccccattctgtccctcaggtattgctgcagctgatcagctgagaacaggtgtactatccgtggctgcattagattctcataggagtgtgaaccctattttgaactgtgcatgtgagggatctaggttgtgtgctccttttgagaatctaatgcttgatgatctatcactgtctcccatcaccccccgatgggatcgtctagttgcaggaaaacaagctcagctacattatg

SEQ ID NO: 91905 - DNA, 701 bp, Homo sapiens
tttcgtgtttagctagcttgttagaaacttatctgatctaaatgtcttctgctgcaatttaaataatagggagtagctgacatcatttttcttatgcatcttagtaccaaccacatgaaaaagcacttactgagtatcaattcttttgaaagataccccgagtgcaaaggatcaaagttaatattggttaagttttgtcctttagcccttgcatgtcaagaccaaatccatacacagattattaacacaagtgctttgtggagaggctgcggttggattgcatattattgctttttagcagtggcttgctcataaaaggggagaagagccagtaatcaaagctttgtcaagggcctgtgtaattttagagttggcccaaacgtgttctgtttgcagaataaccatttgtttctttctttggagaacagctgctcagaatgtgggagcagggagagaattgtcttcaggccaagccctcaaccatttagtgagcacttactatgtgtaaggcattgtgggagagcaggcaaagaagcaagatataatccctccctgcaaggagctcaaggtcggctggggagagaagtcacatttgcctgtcattatgaggcgggtcagcatgtggttgttaagaacgtagtgaacaaaaggtgctggaaactcagtgacagggaggttacttctagttggggaattgtatt

SEQ ID NO: 91906 - DNA, 3821 bp, Homo sapiens
cacagacgtttgaacagagcaggctcctgaggtctccaggatgcctgtcccagcctcctggccccaccctccttgtcctttcctgctgatgacgctactgctggggagactcacaggagtggcaggtgaggacgagctacaggtgattcagcctgaaaagtccgtatcagttgcagctggagagtcggccactctgcgctgtgctatgacgtccctgatccctgtggggcccatcatgtggtttagaggagctggagcaggccgggaattaatctacaatcagaaagaaggccacttcccacgggtaacaactgtttcagaactcacaaagagaaacaacctgaacttttccatcagcatcagtaacatcaccccagcagacgccggcacctactactgtgtgaagttccggaaagggagccctgacgacgtggagtttaagtctggagcaggcactgagctgtctgtgcgcgccaaaccctctgcccccgtggtatcgggccctgcggtgagggccacacctgagcacacagtgagcttcacctgcgagtcccatggcttctctcccagagacatcaccctgaaatggttcaaaaatgggaatgagctctcagacttccagaccaacgtggaccccgcaggagacagtgtgtcctacagcatccacagcacagccagggtggtgctgacccgtggggacgttcactctcaagtcatctgcgagatggcccacatcaccttgcagggggaccctcttcgtgggactgccaacttgtctgaggccatccgagttccacccaccttggaggttactcaacagcccatgagggcagagaaccaggcaaacgtcacctgccaggtgagcaatttctacccccggggactacagctgacctggttggagaatggaaatgtgtcccggacagaaacagcttcgaccctcatagagaacaaggatggcacctacaactggatgagctggctcctggtgaacacctgtgcccacagggacgatgtggtgctcacctgtcaggtggagcatgatgggcagcaagcagtcagcaaaagctatgccctggagatctcagcacaccagaaggagcacggctcagatatcacccatgaaccagcgctggctcctactgctccactcctcgtagctctcctcctgggccccaagctgctactggtggttggtgtctctgccatctacatctgctggaaacagaaggcctgactgaccctcagtctctgctgcctcctcctttcttgagaagctcagcctgagagaaggagctggcgagaaccttccccacactcagctccaaacgcctcctctcccaggtcatctgcctgcccacacgctcctgttccaccttcacaagaccatgatgccccaaagcagtgtctctattcacggtcctgagcaggggccatgggattgggctctgggcactgactcatggcacctccctagaaggtgagaaacactccaaatctaaacacaccaggacttctcccatccgtcgccttgggactggccataaaccacagactctctccaggctctcaagagttatcctgtcttctggattcctgcctaccccaactcccccagccttgttgaggttctctactgcctcctgaatacacatgaacccctataccaattttaagaaaaaaatgattctctttcctctttgtccaagcatcctatccctcaaacccaaaaagaaagaagctctcccttctctctctgtgatggggacagtatttcttctagtatcctgcagccttcccagtcctgctgcttgtggtagaaatgctgccacagcccaacattgaggagccctcgatgactgccctttacaactcatattcagttctgcctccaaaatgcatgtgtccacttacgtgagatggtaaatgtttaacaatggactttctgaaagggaaaaaccaaaagctgttttgcagtgcttgccaatttctctagtgtaataactcccaacctgaccaatttcacactgccaacagttaaacaaccagattgcaagattcctgaaatttaacaattggttttcagggcccagtccaagcctgctgctggaaacctcagagttaaatccctattctccacacctctcacctccaccacccctccctgtcccagccagcatcatctctttggggaccactcctctggctttcatttttcagccacagtgattctttggaaaagtcaaatcatatcacttctctgcttcttccccaacacagctgcatggctcccgctctccctccttcaagtctctgctcaatgtcacttcattaaaggcggccttctataaactaccttgtataaaatattatttattttctctatcccggcattctaatttctcttatcctaattaatttttctttagcccttattttgatgagtattatgccgaatacaggcagccctcacttttcatggcagtgcaagattgcaaaaatgactgtgcaacctgaaacccaggaaagcagtctccatagtcaatcagaaaaacaatgatcattctgtgacctttaccattttttgtcaaaatattagaaactctcacactctcagttacaaatgtagaggacaatgaaaatataatgaaataaatatttatttgtgcactacaattcaaagcattagaaacattgagagttcaagtgctgtttctttgtaaaaatgtatccagagtagttgggaagagtgcttgcctttttttgtatatttctaatatggagtgatatagtttggctctgtgtctccatccaaatctcatcttaaattgtaatctgcatgtgttgtgggaatgggacctaggtaggaggtgactgaatacatgggggcggacttcccccttgctgttcttgtgatagtgagttctcataagatctcagtgagttctcatgagatctggttttttgaaagtgtgtggcaagtcccccttcgctctctctctctctctccctcctgccaccatgtgaagaaggtgcctgcttccttttctccttccaccatggttgtaagtttcctgaggcctcccagtcatgcttcctgttaagcctgtggaactgtgagtccaattaaacctcttttattcataaaatatccagtttctggtagttctttatagcagtgtgagaatgggctaatacacggagcaagcattgtttcttttcatttgtttattttatttttatttttttgagatggagtttcacccttattgcccaggctggagtgcaatgtcgtgatcttggctcactgcaacccccgcctccagggttcaagtgattctcctgcctcagcctcctgagtagctgggattacaggcatgtaccaccacacccagctaattttgtatttttagtagagatggggtttctccatgttgatcagactagtcttgaactcccgacctcaggtgatccacctgtcttggcctcccaaagtgctgggattacaggcatgagccaccatgcctagccagcaagcatcatttctattataccttggtgttttgccatctttctaagtttggactagcttccaacatcttatcccttgaattttcaatattgtggaatcactccagaagatcctttcatgtgaagttttttgctggcatttcaacctttgggacatcttcagcccttttattaccactcctctcccatttgtggcagtttgcgtttactacctccctctggctgcctatctgaagttcctgcatcagggtctacattgccacagtcaactatttgtacttctagaattc

SEQ ID NO: 91907 - DNA, 437 bp, Homo sapiens
tttcgtggggccaacctctcctcttgtgaacgagctctcatcctttcctggatacacagcttcttctttcctgcatacttttttctttgtacagcatgaaaatatactattgtgtcttgtttaaaaaaacaaaacaaaaactcaccttcacccgacctgcatcggcctttaagcaaaacttatccagacagttgtctatatatactccctggcactacctcctctcttctctttctttcttgagctcaagctaatcagatttccatctgtaattttacactaaaaccatcatattgaggttcatcatattggtttccttgttgttaagtcctgtggtcagtcttcattttacgtagcctcttagcagcatttaacacagttactcctatttctatctgaaacacttgcttcattttgcttccaataccccctgtatt

SEQ ID NO: 91908 - DNA, 5381 bp, Homo sapiens; identical to SEQ ID NO: 60352

SEQ ID NO: 91909 - DNA, 859 bp, Homo sapiens
cagctggaggcagagcagtcctctctggggagcctgaagcaaacatggatcaagaaactgtaggcaatgttgtcctgttggccatcgtcaccctcatcagcgtggtccagaatggattctttgcccataaagtggagcacgaaagcaggacccagaatgggaggagcttccagaggaccggaacacttgcctttgagcgggtctacactgccaaccagaactgtgtagatgcgtaccccactttcctcgctgtgctctggtctgcggggctactttgcagccaagttcctgctgcgtttgctggactgatgtacttgtttgtgaggcaaaagtactttgtcggttacctaggagagagaacgcagagcacccctggctacatatttgggaaacgcatcatactcttcctgttcctcatgtccgttgctggcatattcaactattacctcatcttctttttcggaagtgactttgaaaactacataaagacgatctccaccaccatctcccctctacttctcattccctaactctctgctgaatatggggttggtgttctcatctaatcaatacctacaagtcatcataattcagctcttgagagcattctgctcttctttagatggctgtaaatctattggccatctgggcttcacagcttgagttaaccttgcttttccgggaacaaaatgatgtcatgtcagctccgccccttgaacatgaccgtggccccaaatttgctattcccatgcattttgtttgtttcttcacttatcctgttctctgaagatgttttgtgaccaggtttgtgttttcttaaaataaaatgcagagacatgttttaagctgaaaaaaaaaa

SEQ ID NO: 91910 - DNA, 361 bp, Homo sapiens
ctttacttgcaagattagaaagtgaacatgatgggaaatgaaaaccttacaattgagagtgttagctattaagcaattaactggttcttggacatagtactgctattgaaatatctatctaagctatcttactaattattttgacagcctgggctgtactgttctttctgcatttgggcttggcttttaaaatgctctgtgtcgttccttctttcttgtgatgattccttgtcctttctgtcgcctccaggtccgacactggttcagaatttgccatcgtcagtgcagactgtgtgtgagtcctggaacaacatcaataccaatgaatttcccaatattggatcctgggtgagtccctatc

SEQ ID NO: 91911 - DNA, 950 bp, Homo sapiens; identical to SEQ ID NO: 58724

SEQ ID NO: 91912 - DNA, 2469 bp, Homo sapiens
gtcagcctcacgcggcgggaaggaaccggtccgaggccccgggctgccggcgcgggcgcccggcacgtccacaggctgggtcgcgaggtggcgatcgctgagaggcaggagggccgaggcgggcctggtagtcggcccggaggtggggcgccgctggggccggcccgcacgggcttcatctgagggcgcacggcccgcgaccgagcgtgcggactggcctcccaagcgtggggcgacaagctgccggagctgcaatgggccgcggctggggattcttgtttggcctcctgggcgccgtgtggctgctcagctcgggccacggagaggagcagcccccggagacagcggcacagaggtgcttctgccaggttagtggttacttggatgattgtacctgtgatgttgaaaccattgatagatttaataactacaggcttttcccaagactacaaaaacttcttgaaagtgactactttaggtattacaaggtaaacctgaagaggccgtgtcctttctggaatgacatcagccagtgtggaagaagggactgtgctgtcaaaccatgtcaatctgatgaagttcctgatggaattaaatctgcgagctacaagtattctgaagaagccaataatctcattgaagaatgtgaacaagctgaacgacttggagcagtggatgaatctctgagtgaggaaacacagaaggctgttcttcagtggaccaagcatgatgattcttcagataacttctgtgaagctgatgacattcagtcccctgaagctgaatatgtagatttgcttcttaatcctgagcgctacactggttacaagggaccagatgcttggaaaatatggaatgtcatctacgaagaaaactgttttaagccacagacaattaaaagacctttaaatcctttggcttctggtcaagggacaagtgaagagaacactttttacagttggctagaaggtctctgtgtagaaaaaagagcattctacagacttatatctggcctacatgcaagcattaatgtgcatttgagtgcaagatatcttttacaagagacctggttagaaaagaaatggggacacaacattacagaatttcaacagcgatttgatggaattttgactgaaggagaaggtccaagaaggcttaagaacttgtattttctctacttaatagaactaagggctttatccaaagtgttaccattcttcgagcgcccagattttcaactctttactggaaataaaattcaggatgaggaaaacaaaatgttacttctggaaatacttcatgaaatcaagtcatttcctttgcattttgatgagaattcattttttgctggggataaaaaagaagcacacaaactaaaggaggactttcgactgcattttagaaatatttcaagaattatggattgtgttggttgttttaaatgtcgtctgtggggaaagcttcagactcagggtttgggcactgctctgaagatcttattttctgagaaattgatagcaaatatgccagaaagtggacctagttatgaattccatctaaccagacaagaaatagtatcattattcaacgcatttggaagaatttcctacaagtgtgaaagaattaggaaaacttccaggaacttgttacagaatattcattaaagaaaacaagctgatatgtgcctgtttctggacaatggaggcgaaagagtggaatttcattcaaaggcataatagcaatgacagtcttaagccaaacattttatataaagttgcttttgtaaaggagaattatattgttttaagtaaacacatttttaaaaattgtgttaagtctatgtataatactactgtgagtaaaagtaatactttaataatgtggtacaaattttaaagtttaatattgaataaaaggaggattatcaaattcatatatgataaaagtgaatgttctaagtctctcaaactagcgttttatgtaataatatgtaatataaataaaactatggtaaatgtgacaagcatttaataggaaaatgctaaggaggcctcataaatgacccataattaccaacgtagaatttttcagtacatttagggttgctggatttagcaaataaaaataaagattgcccagttagatttgaatttcagataaacaattagttttttaatattttacatggaatatttggaaaatacttatactaaaaaattatttgtttgaaattcaaatttaactgggagtcttgtattttatctggcaatcctaaaatacattggtatgaaacaaatcacttttagaagtatattgctattttgattgggttgtttttgtgtgtagaaacgtacaataacaactcaaaggcacaggagatttctaaacattgtgaaaagttgaatagattatatatttattctcataatactttcactaatactaaataaaatttggggaacacttttt

SEQ ID NO: 91913 - DNA, 2338 bp, Homo sapiens; identical to SEQ ID NO: 60285

SEQ ID NO: 91914 - DNA, 1219 bp, Homo sapiens
tcccgggtcgacgatttcgtgggaccgggacgcagctggggagtcagggacgcgcgcagccagcccttccccctccggctcccgcaccgccggccgcctcccctcgccctcctactctcccctccctgctccttcgctttttcctcctcctcctctcccggccccggctgccagcaccatgtccgcagggggagattttgggaatccactgagaaaattcaagttggtgttcttgggggagcagagcgtcgggaagacgtctctgattacgaggttcatgtacgacagcttcgacaacacataccaggcaaccattgggattgacttcttgtcaaaaaccatgtacttggaggaccgcacggtgcgactgcagctctgggacacagctggtcaggagaggttccgcagcctgatccccagctacatccgggactccacggtggctgtggtggtgtacgacatcacaaatctcaactccttccaacagacctctaagtggatcgacgacgtcaggacagagaggggcagtgatgttatcatcatgctggtgggcaacaagacggacctggctgataagaggcagataaccatcgaggagggggagcagcgcgccaaagaactgagcgtcatgttcattgagaccagtgcgaagactggctacaacgtgaagcagctttttcgacgtgtggcgtcggctctacccggaatggagaatgtccaggagaaaagcaaagaagggatgattgacatcaagctggacaaaccccaggagcccccggccagcgagggcggctgctcctgctaatgcagagccgacctgtggcttcccatgacactccttgcttgttgtgttgcttcctattggctagcttcctaaggggggagggaaccgagttatcaagatgggaggatttttcttttctctctgtctttaggagtagggtgggatggggagggaggctgggcatcagggatcacatcactcttaacaacacattggtcataggagttactgatgttctatctacattaatgaacagctattggtgtatgcacagaggatacctcttaaggatgtactaaatggactttgtttggttgatgctgaaaattaattaccaaatcttaacttgcacgtgttaccttgtgaagggaactgcattagcaatgagagctacatcatcatgaagtactttaatgccatgaaattgcaaacact

SEQ ID NO: 91915 - DNA, 1088 bp, Homo sapiens
  misc_feature (1)...(1088): n = a,t,c or g
gtcgtgaggcgggccttcgggctgngctcgccgtcggctgccggggggttggcctgggtgtcattggctctgggaagcggcagcagaggcagggaccactcggggtctggtgtcggcacagccatggcgggcgcgttggtgcggaaagcggcggactatgtccgaagcaaggatttccgggactacctcatgagtacgcacttctggggcccagtagccaactggggtcttcccattgctgccatcaatgatatgaaaaagtctccagagattatcagtgggcggatgacatttgccctctgttgctattctttgacattcatgagatttgcctacaaggtacagcctcggaactggcttctgtttgcatgccacgcaacaaatgaagtagcccagctcatccagggagggcggcttatcaaacacgagatgactaaaacggcatctgcataacaatggaaaaggaagaacaaggtcttgaagggacagcattgccagctgctgctgagtcacagatttcattataaatagcctccctaaggaaaatacactgaatgctatttttactaaccattctatttttatagaaatagctgagagtttctaaaccaactctctgctgccttacaagtattaaatattttacttctttccataaagagtagctcaaaatatgcaattaatttaatactttctgatgatggttttatctgcagtaatatgtatatcatctattagaatttacttaatgaaaaactgaagagaacaaaatttgtaaccactagcacttaagtactcctgattcttaacattgtctttaatgaccacaagacaaccaacagctggccacgtacttaaaattttgtccccactgtttaaaaatgttacctgtgtatttccatgcagtgtatatattgagatgctgtaacttaatggcaataaatgatttaaatatttgttaaatgagtatgattnnnnnnnnnnnnnnnnnnnnnnnggggcgcccgctttaaaggatccaagtttacgtccgcggggaggcgaggaaatcttttttatagggcgcccaaatcaaatcccgggccggg

SEQ ID NO: 91916 - DNA, 400 bp, Homo sapiens
cccgttcttcgatttcgtaacaacagcgaatttgaagaaagggatttgtctatgtatagaaactagtgattattaacaccagaatggtagattgaactcaaattgtagatggttattcttttggggggaggaaaggctgtgagcagcacttcaaattctaaagcacatggtactcctaattcagaagggtttttttgaaaattattttagcagtgatatgcaggatagatgtgattaggcgaactacagctagtgagaatgttgtactttgtaaagggattggttaaatatttatggtggcttggctttgaatgcatttcatcataagagtatggaatcatactaagagaattgtcagtaaagggagcatccttgattttagttgttgaaattttaaaaa

SEQ ID NO: 91917 - DNA, 1267 bp, Homo sapiens
  misc_feature (1)...(1267): n = a,t,c or g
ctgcagagtgtgtcctaataacttagatagcactttgggacctttccatggatcatgaatgaagagaggggaacttttctcctttctgctcatgctttctccacacttctgtgaaatgatatggtgccttgctgggaggggcctgaaattgccaatcttaaagtcattggtacaaagagataaaaggtgagttgagcgaaaccccatgattctcaggtgactaccctataaaaagtggcctagatattgttacttccctgcatctaaactgatatcctcttcatttttcttcagcaaggcccagcctgggaccatttcctcctaaatagattccacataaaattcacagcctgaactatggagctatcgcaggcatcaaggttgcggtgctctcagtaatccctggataccctcagatccttgcttcttgactatttccttaggcttgtgatcattcttgattctgacttttatttatgtctccttggggctgngnttgaaaagtctacaagagacttgatcactaaagctcactttaaaaaaaatttacaaaattgggggtaagatacaccgaaccataaaaattaaacccttttaactaattttaagtggacgagcttaggagngattacgggcatttacatttcttgggctaccatccatctggggaatgcttttcatcttgcgacaccgcaacgctatctccgggaaacatggactcgcaatcccccttatgccaagggcttggaaatacgattctacttcttgggtagtgcgtctggactcgcgtgtgcgtcgtatccccggacccgagcagatcccgcttaggcgatccccaatccggggcgtcgctaacctcgaagcgccgccgatgcgggaagtggcagcccgggcactcggcgggacccggcgaaatgcgcatcgcggccaactccgggaaatgctggatatcgggaggcggccgcacgatccggagaatgggggagaagcggggacttggccgagaacggcggaacggcgagatgtgcggggataccgggcgcaatccgggaatggcggcggagcgcgggagactccgggaactggacggctgctcggcatctcggcgcaatcgtcggtaactgtgtgttcgatagattgacgcgcggctcccccagcgtgcgctgcgggcggcatcactacaccacgccgcggctatctgtcaatgatcgccgacagccgcgcagtcgacaaacgcgtgaaaggggcggacaggggaggggggccc

SEQ ID NO: 91918 - DNA, 867 bp, Homo sapiens
  misc_feature (1)...(867): n = a,t,c or g
gaattccgcacgagaagaaaataagctgatctctgtccatgtctcagtttactcacctgtataactggggatagtttagtcctactttacataaagatttagaagtgaagtgaagacagtctcctcctgttcaatgccaggagagccttggtaattagagtgtagcagttggtgcagggaagggaacattgggctagtaactgtgatcatttttcctaaataaataaagtataggtatttaaaagccattttgatagcaaggtcaaggtgtgtttttttctccaggtaaaggctttttctttcaagacaaattgtatgaccagatgcaaggttagccagctgacactaataaatccactgcgttcacaagttcagaaggtgcagacattagaaagagtacatttcttcctactcttccttgtaaatcttgtggtccataagtaaaatgcagaagcaaaaatgaataagcctatgcaattccctagagtttatgacagaggccaaattccaggaagaagcaaaccagttaagttaaatttcttggattagataagattggttactgtgtctatgcattggcttgatgtgctgtaaacctgtgaaatctgaaatcttcgttctcttcttttgcatcctccatcacactggactggcccacaagcatttataggatacctactgtgtgtattccttttctgggcccttccatgcctgaaattctggcctttggtacaaagggccatttctaattgggccagtgggcaantctgcttgcccacaatttttgtcaaacgaaaatanattaaaacatggtcagggaacttgggggaagaaaaaggcttttcggatttattagggaaaaatctt

SEQ ID NO: 91919 - DNA, 442 bp, Homo sapiens
gaggaattcggcacgaggtgcaggtttgcctggcactgagtagtttcccaggatgtggggctttcagtgcttaaaatacaggaaagtcccaggcaaactggaacaagttggttaccctggtgttatatgttgaaatggtagtgagaatactactgtcattcccacttttacagaaaagggaaccacgaggagtagttcgtctgaggctccacacggctgctagtgtgcagcagagctgggattcccgctgtgcccatatcacacgcaggaccatgctcttaagcagggtatgtgataatgcctcctgaaccatttaggactgcctttggttccgtgctaccgaaacctgatgacagtggcctaagcaataaagcctttcactttcgccagtggcgccattatgtcatcaggaacccaaactcctgttcgcctctcactggcc

SEQ ID NO: 91920 - DNA, 1197 bp, Homo sapiens
ttttttttttccaaaacaaaagccaaatttattcagcagacattttaattatgaaatcctataaatcaggaccaccacaatttcagacactccgttgcgaagtgtacatcaatagctacatctggaggatgaacaagccattgaatcttttaaaaattggtttagctaccttaaagtttgggggtggcaccttacaaaagcgccgtcaagtttcatacagccagcggcttcttctctgggagagtcacattttaaaaccggtttcagacacaaaagaagggctggcacgggaggaggaaataaattgtgagggtgaggagccgccgaggccgaggcccatggctccatggagggccagaagagagcagaaaaacgtccagggtctctcatgcattcctatagacaccagaaagggtggaataagaaagctcagctgggaggacaagaaagagactcaagagatcgtttatgactgtttctgagaaagctcctggcatggccatgagtggccttccgggagtcctgtaaaaaggaaagcacagaaaacaggaaagaactctccctacacgtccctctctgcctgtttgtgtcctcgggagactccaagcggtggtaaagcaccaacagggctcttcttggagcaagagaaagaaaagactccggggtgagtaagctctcccaggaaccccacagcaaaccgtgaccttgaacacagatggcaaggtcaagtcatttacaagtccacattcaaatccaaatctcccacctgcaaaattcttcacctctctccagtcccttaattggagttcacatctcccaccttcaccagccaccgaatcggtgggaaaaaggggcaatgccaagccacccaccaccaaacttttacattcttctcccctctggaatttctttgcacagcaattgtagcaccacttactaagctcctccaccagaaaataagaaaatgtatgcgtgtcgttagttttcaagtattgttataaagccatcgcgattcctacccctgagccctccttaaacaatccaagctcacgacgcccccaagggctaagtgaggtacaagtcgatgcaagtagctgccatagttctcccagtttatcccaggtccttgggcttggatggcccgggaaattctcatgccccacggaagcaccctggcgctcgtgcgaattccgcaga

SEQ ID NO: 91921 - DNA, 712 bp, Homo sapiens
tgcgcctgcaggaattcggcacgagacgatgcgagccaaaggattcttggctccaagcctggtcctggctgttagtttggaactcatgcacccagatgctaactcgccctcagaatgcagaggggatgaaacactgaccggacaattcaatctgtatatgggagataaactggaggggaagacgaatggcaggagggtgaagaggaaactgaattactgtgcaaacacccgccactcaaatccgggtggttactgcagagtgaataacgataggtactatttcgtgtaaggcaaagtcctttgaaagggctcctagagcgtcaaggcctccacctgatgaatgaatgagtcaggcaggcccagctccacttcacggatgggaaaactgaggtacgaggcctcgctgaaagatgcgaggcagagcggagaaccagaagcaccacttctctcaggctgatgctctaatctcggctccccccgcccctacaatggcgtagacggcctccgccgcccgactcacacacaccctcccccgggaacggcaagtctcctcgggttccaaggacagggtcaaaagacagggtcaaaagacaagaggcccgaggcgctcccgccgtgatttgcagccagataccgttgggagcgcagcccagagagcgttgggagcgtgcgtacccccagcccaacatggcggcggcagcggccgctgtag

SEQ ID NO: 91922 - DNA, 823 bp, Homo sapiens
tcttatgcagcaccgagcctgttcgtgaagtccctgtactgggccctggcgttcatggctgtgctcctggcagtctctggggttgtcattgtggtcctggcctcaagagcaggagccagatgccagcagtgccccccaggctgggtgttgtccgaggagcactgttactacttctctgcagaagcgcaggcctgggaagccagccaggctttctgctcagcctaccacgctaccctccccctgctaagccacacccaggacttcctgggcagatacccagtctccaggcactcctgggtgggggcctggcgaggcccccagggctggcactggatcgacgaggccccactcccgccccagctactccctgaggacggcgaggacaatctggatatcaactgtggggccctggaggaaggcacgctggtggctgcaaactgcagcactccaagaccctgggtctgtgccaaggggacccagtgatctgggctctgcctggtcctcagcctgccaggcagatgcagcaccccctacaggggaggccagttgagagcttgggcagcctcttcctggacccagttatccaggtcttcatgctctgctcaagggggccacatgagcgagcctaggagctggacttcaacccaggaagatgcatccgagggaaaggagattttctatggcctcaggcctgagtgccaatattagtctccagcttctgtggatgatcggtttgatgacattgggatggttgtttagcatttctgtgccttggtttcattaaaatgacaatttccccctagaggaaaaagacagggttaac

SEQ ID NO: 91923 - DNA, 944 bp, Homo sapiens; identical to SEQ ID NO: 59443

SEQ ID NO: 91924 - DNA, 2257 bp, Homo sapiens
actaatccgggtcaacgatctcgtcccaaatgcctaggggattgctgtgttcttcctaccctttgattgaggcgaagcggcccaccgcctgccaatagactgcgagatcagggcccgcgacggttaaacggggcccaaggcaggggtggcgggtcagtgctgctcgggggcttctccatccaggtccctggagttcctggtccctggagctccgcacttggcggcgcaacctgcgtgaggcagcgcgactctggcgactggccggccatgccttcccgggctgaggactatgaagtgttgtacaccattggcacaggctcctacggccgctgccagaagatccggaggaagagtgatggcaagatattagtttggaaagaacttgactatggctccatgacagaagctgagaaacagatgcttgtttctgaagtgaatttgcttcgtgaactgaaacatccaaacatcgttcgttactatgatcggattattgaccggaccaatacaacactgtacattgtaatggaatattgtgaaggaggggatctggctagtgtaattacaaagggaaccaaggaaaggcaatacttagatgaagagtttgttcttcgagtgatgactcagttgactctggccctgaaggaatgccacagacgaagtgatggtggtcataccgtattgcatcgggatctgaaaccagccaatgttttcctggatggcaagcaaaacgtcaagcttggagactttgggctagctagaatattaaaccacgacacgagttttgcaaaaacatttgttggcacaccttattacatgtctcctgaacaaatgaatcgcatgtcctacaatgagaaatcagatatctggtcattgggctgcttgctgtatgagttatgtgcattaatgcctccatttacagcttttagccagaaagaactcgctgggaaaatcagagaaggcaaattcaggcgaattccataccgttactctgatgaattgaatgaaattattacgaggatgttaaacttaaaggattaccatcgaccttctgttgaagaaattcttgagaaccctttaatagcagatttggttgcagacgagcaaagaagaaatcttgagagaagagggcgacaattaggagagccagaaaaatcgcaggattccagccctgtattgagtgagctgaaactgaaggaaattcagttacaggagcgagagcgagctctcaaagcaagagaagaaagattggagcagaaagaacaggagctttgtgttcgtgagagactagcagaggacaaactggctagagcagaaaatctgttgaagaactacagcttgctaaaggaacggaagttcctgtctctggcaagtaatccagaacttcttaatcttccatcctcagtaattaagaagaaagttcatttcagtggggaaagtaaagagaacatcatgaggagtgagaattctgagagtcagctcacatctaagtccaagtgcaaggacctgaagaaaaggcttcacgctgcccagctgcgggctcaagccctgtcagatattgagaaaaattaccaactgaaaagcagacagatcctgggcatgcgctagccaggtagagagacacagagctgtgtacaggatgtaatattacccaacctttaaagactgatattcaaatgctgtagtgttgaatacttggttccatgagccatgcctttctgtatagtacacatgatatttcggaattggttttactgttcttcagcaactattgtacaaaatgttcacatttaatttttctttcttcttttaagaacatattataaaaagaatactttcttggttgggcttttaatcctgtgtgtgattactagtaggaacatgagatgtgacattctaaatcttgggagaaaaaataatgttaggaaaaaaatatttatgcaggaagagtagcactcactgaatagttttaaatgactgagtggtatgcttacaattgtcatgtctagatttaaattttaagtctgagattttaaatgtttttgagcttagaaaacccagttagatgcaatttggtcattaataccatgacatcttgcttataaatattccattgctctgtagttcaaatctgttagctttgtgaaaattcatcactgtgatgtttgtattcttttttttttttctgtttaacagaatatgagctgtctgtcatttacctacttctttcccactcaataaaagaattcttcagttaaaa

SEQ ID NO: 91925 - DNA, 1682 bp, Homo sapiens
ccctctgcaggaattcggcacgaggtcatggcggcggccgcccccaatgccggaggctcggcccctgagacagcgggttccgccgaagctccgctgcagtacagcctgctcctgcagtacctggtgggtgacaagcgtcagccccggctcctggagcctgggagcctgggcgggatcccaagtccagccaagagtgaggagcagaagatgatcgagaaggcgatggaaagctgcgctttcaaggctgcgctggcctgcgtgggaggatttgtcttaggaggtgcatttggggtgtttaccgctggcatcgataccaacgtgggctttgaccctaaggatccttaccgtacaccgactgcaaaagaagtgctgaaagacatggggcagagaggaatgtcctatgccaaaaatttcgccattgtgggagccatgttttcttgtactgagtgtttgatagaatcttaccggggaacatcagactggaagaacagtgtcatcagtggctgcatcacgggaggagctattggtttcagagctggcttaaaggctggggccattggttgtggaggttttgctgctttctctgctgcgattgattattacctccggtgagagtaattgcctgcagggaaggatgatgccagccccggatccgggctgctctctggaggacagtttctgtaccacaccagggccttgcttcagggcctgaagacattcattttccctcatgtcgttggtattctgagggagctgcctggcttctctgcctccagcctttggggtagccacactttgctgctcctggactccagccagccttcacagaggacgtcccgtgccagattctctcacagcagatcgggagacaggatgttgacatataggaattcagctccacaaagcttcaggcctgaccacagctggccctctaggttgtttggtgttgtgggcacagaggtgacagtgtctctgcaggcactcaggaagctgttctaccttggaactccatgcaactatccgtctcgaataccagggcagggcaaggcggactgatgccgtccaaccaattatctcacttgttttgtgttctgtcatccttgttttttttttaaaaatacactcccctcccccaccgccacacaccttacagttcaaaaggttggtttatttgtattttattttcaaattccctattccaaaaatagtgccgggtggcccaaagataacatctgaagggaaagaatgagaaagctcccagggaagcgggggatggggcgctgaggcagggttgttagaggactgtgtcatcctcaccaagctcattacatctgccagggcctgcctcaagaagcccagcccagccttttcctgggatgcagtgaaatcccatccatgaactcgatgggcccctcctgtgccggccgagaggcacacactgccttcacgacgtgactgctggacctggccgagcttgaggccacatgtgaagggtcctgctgtggtcatcttggtgactcggtcacagcagctactggccaagatcagacgtcgctgaggggctgttcaccaccatcctcgttctccagggtcaaggaagtgttttaacatgtcgtgttttcgacttgaccttgtggtatttttcttggcctagttgtgtgccatggatattaaaaaaaaaa

SEQ ID NO: 91926 - DNA, 5054 bp, Homo sapiens
tgcccgaagtgacgaaaccaagtttaagccaaccaacggccgccagcccaattggcagctctccatcgccaccagtcaatggtggcaacaatgccaaaagggtggcagtgccgaacggacaaccgccaagcgccgcccgctacatgcctcgggaggtgccgccgcgattccgttgccagcaggaccacaaagtgttactaaaacgtgggcagccccctccaccgtcctgcatgctccttgggggtggggcagggcctcctccctgcacagcacctggagcaaacccaaacaacgcacaagtgacaggagcgctgctgcagagtgagagtgggactgcgccagactcaacccttggaggtgctgctgcttcaaattatgcaaattccacttggggctcgggagcctcctccaacaacggcacctcccccaacccaattcacatctgggacaaggtgattgtagacgggtctgacatggaagagtggccttgtattgccagcaaagacactgaatcttcttccgaaaacaccaccgataacaacagtgcctcgaaccctggctctgagaagagcactctgccaggaagcaccactagtaacaaaggaaaagggagccagtgccagtctgcaagttctgggaacgaatgtaatcttggggtctggaaatctgaccctaaggctaaatctgttcaatcttccaactctactacagagaacaacaatggactaggaaattggaggaatgtgagtggtcaggatagaattggacctggctctggcttcagcaactttaacccaaatagcaacccatctgcctggccagcactggtccaagaaggaacttctaggaaaggggcattggaaacagataatagtaattccagtgcacaggttagcacagtaggtcagacatccagggaacagcagtcaaagatggaaaatgcgggtgttaattttgttgtctctggcagagaacaggctcaaattcataacactgatggaccaaaaaatggaaacactaactccttgaacttaagttcaccaaaccccatggagaataagggaatgccctttggaatgggcttggggaacacctccaggagcactgatgccccttcacaaagcactggagatcgaaagactgggagtgttggatcttggggtgcagctagggggccttctggaactgacacagtctctggacaaagcaattctggaaacaatgggaacaatggaaaagagagagaggactcctggaaaggagcttctgttcagaaatcaactgggtcaaaaaatgactcttgggacaacaataacaggtctacgggtgggtcctggaactttggcccccaggactctaatgacaacaaatggggtgaagggaacaaaatgacatctggggtctctcagggagaatggaaacagccgactgggtctgatgagttgaaaattggagaatggagtggtccaaaccaaccaaattctagcactggagcatgggacaatcaaaagggccaccccctccttgaaaaccaaggcaatgcccaggctccctgttggggaagatcttccagctccacaggaagtgaagttgaaggtcaaagcactggaagcaaccacaaagcaggaagtagtgacagtcataactctggccgtcggtcgtacaggcccacacatcctgattgtcaggctgtcttgcagactcttttgagccgaactgatttggaccccagggtgctctcaaacactggctggggccaaactcaaattaagcaggacacagtgtgggacattgaagaggtgccaaggcctgaggggaaatctgacaaaggaactgaggggtgggagagcgctgccacacagaccaagaactcagggggctggggagatgcacccagccaaagcaatcaaatgaagtctggatggggggagctctcagcctctacagagtggaaagaccccaagaacacaggaggctggaatgactacaagaacaacaactcttccaactggggaggaggacgacctgatgaaaagacaccttcctcttggaatgagaatcccagcaaggatcaggggtggggaggtggacgccagcccaatcaaggatggtcttctggaaagaatggttggggggaggaagtcgatcagacaaaaaacagcaattgggaaagttctgcaagtaaacctgtgtctgggtggggtgaaggagggcagaatgaaatcgggacttggggtaatggtggcaatgcaagcctagcttcaaaaggtgggtgggaggattgcaaaagatccccagcatggaatgagacgggccgacagcccaattcctggaataaacaacaccaacagcagcagcccccacagcagccgccgccaccacaaccagaggcttctggttcgtggggaggcccacccccaccacctccaggcaacgttcgaccttccaattccagctggagcagcgggccacagcctgcaacacctaaggatgaggaacccagtggttgggaagagccatccccacagtcaattagtcggaaaatggacattgatgatggcacttcagcatggggagaccctaacagttataactacaagaatgtgaatctgtgggataagaattcccaagggggcccagcacctcgagaaccaaacctgcccaccccaatgaccagtaaatcggcatcagattccaaatctatgcaagacggctggggggagagtgacgggccagtcacaggagctcgccatcccagctgggaagaggaggaggatggaggagtctggaacaccactggctctcagggcagtgcttcctcccacaactcagcaagctggggacaaggaggaaagaaacaaatgaagtgctcactcaaaggaggaaacaatgattcatggatgaatcctcttgccaaacagttttcaaatatgggattgctgagtcagactgaagataatccaagcagcaaaatggatttgtctgtaggaagcctttcagataaaaaatttgatgtggacaagcgagcgatgaatctcggggattttaatgatatcatgaggaaggatcgatctgggttccgtccacctaattccaaagacatgggaaccacagatagtgggccttattttgagaagggcggtagtcatggtttgtttggaaacagcacagcacaatcgagaggtctgcacacacccgtgcagccactaaattcttctcccagtctccgggcgcaagtgcctccccagtttatttccccccaggtttctgcctcaatgctcaagcagtttcccaacagtggcctgagtccaggtcttttcaatgtggggccccagttatctcctcaacaaattgccatgctgagccagcttccacaaattccccagtttcagttggcatgtcagcttctcttgcagcagcagcaacagcagcagttgttacagaaccagagaaagatttctcaagctgtacgccaacagcaagagcagcagctggctcgaatggtgagtgcactgcagcagcagcagcagcagcagcagaggcagccaggcatgaagcactcgccctctcatcctgttgggcccaagccgcatctggacaacatggtacccaacgcattgaatgtggggctcccagaccttcaaaccaaagggccaatacctggatatggttctggcttcagctctggcggcatggactatggcatggttggtgggaaggaggctggaaccgagtctcgctttaaacagtggacctccatgatggaggggctgccctctgtagccacacaggaagccaatatgcacaaaaatggcgctatagtggcccctggtaaaacccggggagggtcaccgtacaaccagtttgatatcatccctggtgacacactgggtggccatacgggtcctgctggtgatagctggttacctgccaaatctccaccaacaaataaaatcggaagtaaatccagcaatgccagttggcctccagaattccaaccaggagtgccatggaaaggtatccaaaacattgaccctgaatctgacccctatgtcaccccaggaagtgtgctggggggtacagccacatctcccattgtagatactgaccaccaactgctgcgggataacaccacagggtctaattcttccctcaacacctcgctgccttcacctggtgcctggccctacagtgcctctgacaactcctttaccaacgttcatagcacttcagcaaagttccctgattacaaatcaacatggtccccagatcccataggacacaaccccactcatctctccaacaagatgtggaaaaaccatatttcctccaggaacactacaccgctgccccgcccacctcctggtctgaccaaccccaaaccatcatctccctggagcagcacagcaccccgatcagtcagggggtgggggacacaggactcacggctcgcctcggcctctacctggagtgatggtggctcagttcgtcctagttactggctggttcttcacaatctcaccccacagattgatgggtcaaccttgagaacgatctgcatgcagcatggcccactgctgacattccatctgaatctaacccagggcactgccctgatccgatacagcaccaaacaggaggcggccaaggcccaaactgcactgcacatgtgtgtgttgggaaacactaccatccttgctgagtttgccactgatgatgaagtcagccgctttctggcacaagctcagccccctacacctgcagcaaccccaagtgcgccagctgcggggtggcagtcgctggagaccggccagaaccagtcagatcccgtgggacctgctctgaatctttttggtgggtccactgggctcgggcagtggagcagcagcgctggtggcagcagcggggccgatcttgctggcgcttcattgtgggggcccccaaactattcttctagcttatggggagtcccaacggtggaagatccccataggatgggcagccctgctcctttactacctggtgaccttctgggaggagggtcggattcaatc

SEQ ID NO: 91927 - DNA, 2460 bp, Homo sapiens
ctcgctgttgtcctccccgttcctcaagggattcctggctggctatgtggtggccaaactgagggcatcagcagtattgggctttgctgtgggcacctgcactggcatctatgcggctcaggcatatgctgtgcccaacgtggagaagacattaagggactatttgcagttgctacgcaaggggcccgactagctctaggtgccatggaagaggcaggatgagcagctcagccttcaggtggagacactttatctggattccccagctgtcatccatttgctatctccaactttcctgccaccttcatccttgcctcccttcctgcagattgtggacagtagttcctcagcctgcaccctggattccttcttccccttcctagctccatgggactcgccccaagactgtggcttcaaggaccaccagccccttactcttcaagccctgactgtggagttggcccgctggaccctgatgctactcctatccactgccatgtacggtgcccatgccccattgctggcactgtgccatgtggacggccgagtgcccttccggccctcctcagccgtgctgctgactgagctgaccaagctactgttatgcgccttctcccttctggtaggctggcaagcatggccccaggggcccccaccctggcgccaggctgctcccttcgcactatcagccctgctctatggcgctaacaacaacctggtgatctatcttcagcgttacatggaccccagcacctaccaggtgctgagtaatctcaagattggaagcacagctgtgctctactgcctctgcctccggcaccgcctctctgtgcgtcaggggttagcgctgctgctgctgatggctgcgggagcctgctatgcagcagggggccttcaagttcccgggaacacccttcccagtccccctccagcagctgctgccagccccatgcccctgcatatcactccgctaggcctgctgctcctcattctgtactgcctcatctcaggcttgtcgtcagtgtacacagagctgctcatgaagcgacagcggctgcccctggcacttcagaacctcttcctctacacttttggtgtgcttctgaatctaggtctgcatgctggcggcggctctggcccaggcctcctggaaggtttctcaggatgggcagcactcgtggtgctgagccaggcactaaatggactgctcatgtctgctgtcatgaagcatggcagcagcatcacacgcctctttgtggtgtcctgctcgctggtggtcaacgccgtgctctcagcagtcctgctacggctgcagctcacagccgccttcttcctggccacattgctcattggcctggccatgcgcctgtactatggcagccgctagtccctgacaacttccaccctgattccggaccctgtagattgggcgccaccaccagatccccctcccaggccttcctccctctcccatcagcagccctgtaacaagtgccttgtgagaaaagctggagaagtgagggcagccaggttattctctggaggttggtggatgaaggggtacccctaggagatgtgaagtgtgggtttggttaaggaaatgcttaccatcccccacccccaaccaagttcttccagactaaagaattaaggtaacatcaatacctaggcctgagaaataaccccatccttgttgggcagctccctgctttgtcctgcatgaacagagttgatgaaagtggggtgtgggcaacaagtggctttccttgcctactttagtcacccagcagagccactggagctggctagtccagcccagccatggtgcatgactcttccataagggatcctcacccttccactttcatgcaagaaggcccagttgccacagattatacaaccattacccaaaccactctgacagtctcctccagttccagcaatgcctagagacatgctccctgccctctccacagtgctgctccccacacctagcctttgttctggaaaccccagagagggctgggcttgactcatctcagggaatgtagcccctgggccctggcttaagccgacactcctgacctctctgttcaccctgagggctgtcttgaagcccgctacccactctgaggctcctaggaggtaccatgcttcccactctggggcctgcccctgcctagcagtctcccagctcccaacagcctggggaagctctgcacagagtgacctgagaccaggtacaggaaacctgtagctcaatcagtgtctctttaactgcataagcaataagatcttaataaagtcttctaggctgtagggtggttcctacaaccacagccatgattgtcttgtgtcttctgtctgcgcaactcccctcaaacaattttgttcctctggggtcctgagtatcttaattctgggataacttttagactaagaaaaaattgttttctccaa

SEQ ID NO: 91928 - DNA, 852 bp, Homo sapiens
  misc_feature (1)...(852): n = a,t,c or g
cggaattcggcacgaggaacaatagatgataagactcccatttagaccgcaaaacagtgccacaggggtagacaggggtctgggggagataagatgggtggtgaagatgaccaacagcaaataaactttcctgtctctttgatgctaattatctctttgcacctaattatcatggcatcatcatcatcctctgatgtttgcaaactaagagttgatgtgtttgatcaggttagtgaatctgtcaggtatggcattctgcctgtttctgaagcttaagaatgagaagccagtagctatcatgcggaagatgtgaactgccccccagtccttgtcctttagcagtgtgtcattcctctgtttggacatgtgctctcttgcttcctctcttcctctctctgttcctgaagngtgctgcttccaacacttccccaaattaattcctacctgcatttaggtctcaacctagccatcactttttcaggaaactgctactgctctctctatttggcattgactgtaccaactaaaatgcccatatggcagctttcgtttatttcttattatgctctacaataactgcttggttacttgcctttttctcctactggattgtaagttttttcatggatggcacataatggtggttgctataatccccttctgggagtgccatagaaactcaatacattaagccgaagacaccgacaatttattttttccaacccccttttgccccgcccaccccggccttaccctcgggagcgcacgcacccaatctctgggaccagacgccctagcgaaactcggcccggcccccacggntgggagaggggaacgttccccccgcccccg

SEQ ID NO: 91929 - DNA, 409 bp, Homo sapiens
gcttgaaccgcctgcaggaattcggcacgaggatattttgaatggtaataagcaattagagtgagatttaaagaagaaaaaaacacctgtatataacttggcatcttttgtaataaatacaaacacctaaatataacttggcatcttttgtaataaatacaaacttttgtcaatcatgacttgatctaaccgatatgcctcaggtctgcacagaacggaaatgttttttggaaatcctagtacttcagaaggctttggcatccaaatccattgcaagtagctttctatttagtctctcattttctctctaaagagagattgatatgatgatttttagcttaatttgagagatgttgagttttctccaagacaccctcgttggttcaccttgctctgaatcctttgtctt

SEQ ID NO: 91930 - DNA, 762 bp, Homo sapiens
gcggcggcgggagcggcggtgatggacgggtccggggagcagcccagaggcggggggcccaccagctctgagcagatcatgaagacaggggcccttttgcttcagggtttcatccaggatcgagcagggcgaatggggggggaggcacccgagctggccctggacccggtgcctcaggatgcgtccaccaagaagctgagcgagtgtctcaagcgcatcggggacgaactggacagtaacatggagctgcagaggatgattgccgccgtggacacagactccccccgagaggtctttttccgagtggcagctgacatgttttctgacggcaacttcaactggggccgggttgtcgcccttttctactttgccagcaaactggtgctcaaggccctgtgcaccaaggtgccggaactgatcagaaccatcatgggctggacattggacttcctccgggagcggctgttgggctggatccaagaccagggtggttgggacggcctcctctcctactttgggacgcccacgtggcagaccgtgaccatctttgtggcgggagtgctcaccgcctcactcaccatctggaagaagatgggctgaggcccccagctgccttggactgtgtttttcctccataaattatggcatttttctgggaggggtggggattgggggacatgggcatttttcttacttttgtaattattggggggtgtggggaagagtggtcttgagggggtaataaacctccttcgggacaca

SEQ ID NO: 91931 - DNA, 2050 bp, Homo sapiens
tttttttttttttttttgaaagagaaatgagacttttattagctccaagagcatttttcaatactaagggcaaaaagtaaaaagaaggacaaggaaaaccaaggcacaaagaagggacctaggcgcaccccagaactcaccacggacacacagcagagggcttctcttcatatcaagggtatgggtaaacaagaaaggctgctgtttcactgagacaggacaaaccaccaagtccaaatgagaagacaagcagagacgtagtgtcagaccaggagggttagaacttgctagtgtagagggcaataatccacttgggcacacggaggaaggagggcaggtaggaggccagccagcccaggccggacacgtgtgagagaacagagctcaaagacaaatagtcttggacggggcggccgtccacatcccgaaggccatagcgtcgagcaaggtcacaggatggcagcaccttaccactcaggctcaggatattgggatctgcgggcacacagacaggtggagatggcaggcaggggagtatgcagagtgacaaggtttgggcccagttggacagggcactgctgagagccctggagctcaggatccctggagagctctttctcttgggccttggactttttccacacttcccaggagcctgctcctaaggctctcagacctcaaactgggaatgctgaccccatgggcctcaaaaagcagagaaaagaatgacatgttcctcaaccaactcccgagccagatctgggcactggatgctaccgcactacacatcctccatgccctttcttattaccagctgcccccaaacttcacctgttgccaaagccaccacacatttgccactcaattctgtggtttccgcagatgagaaggctgatttgaactgaaacacaggggcagagaagtgaagggttaatttccaagagcactgccccaggtctcctccccatttcaacttctgttccaggagaaaaagaccaaagaccaaagaggccaaagacctcaagcagggcctgtaggacccaaagtattggcaggtgccagagccactcctccccacatccaggtgagccctgtgccctggcaccaggatctgctgtctttgctaagtggaaggatctggtagtgccaaatagtgtttggaccttctaagctagctggtgtgggggtcaagtgcatggtctttggagctagacagcctttccacttaggacatatgtgaccttcaacaagtttctaaacctctctgggtttcagttttgccatctgtagaatggagctggtatctcccttacaggattaaaggaaataatgtgtgtcccatgctcagccctgcacctgccacagtaagcacctggtgagtgggagtatctgatcttgttattgaggatgcagaggccgactcccctgttctctgcttccttcgccctccccttgccaacctgcttcaacacaggatcctgcaggacctcctcctttgccatatgctccttcagcagttctgtctgcacaatccccggccacagagacacacagctgaccccatggcgccgcagctcgtgggcacagtcagcagccagcttgtcacactgtggagaggcggaaggcagggagccccaaggtctcagctgcccacgctccccaggtgtgatgcctactttagccaaccaagaggagcacaagcaaaggaactgtccatggatgaggcagaggaggagctgagaggagccagccttaccattctgaccactggggattgtaccctccctaaaatacagtgtctcgctgtgtcgtctagactggagtgcagtggtgtgatcatggctcaactcctgggctcaagcgatcctcctgcctcggcctccggagtagctgctgggactgcaggaacgtgccaccatgcctggctcaaacacaaagttttttcataaaactcacttggcggcaaaattctaccttacctgaagttatttacggggtttttaatttccactttgaataaatattcacatcttgttgagtaaaaaaaaaa

SEQ ID NO: 91932 - DNA, 922 bp, Homo sapiens; identical to SEQ ID NO: 58788

SEQ ID NO: 91933 - DNA, 1457 bp, Homo sapiens
ggcaatttccggcgcctccctcacgcccgccctccttgccgcccagccggtccaggcctctggcgaacatggcgcttgtcccctgccaggtgctgcggatggcaatcctgctgtcctactgctctatcctgtgtaactacaaggccatcgaaatgccctcacaccagacctacggagggagctggaaattcctgacgttcattgatctggttatccaggctgtcttttttggcatctgtgtgctgactgatctttccagtcttctgactcgaggaagtgggaaccaggagcaagagaggcagctcaagaagctcatctctctccgggactggatgttagctgtgttggcctttcctgttggggtttttgttgtagcagtgttctggatcatttatgcctatgacagagagatgatatacccgaagctgctggataattttatcccagggtggctgaatcacggaatgcacacgacggttctgccctttatattaatcgagatgaggacatcgcaccatcagtatcccagcaggagcagcggacttaccgccatatgtaccttctctgttggctatatattatgggtgtgctgggtgcatcatgtaactggcatgtgggtgtaccctttcctggaacacattggcccaggagccagaatcatcttctttgggtctacaaccatcttaatgaacttcctgtacctgctgggagaagttctgaacaactatatctgggatacacagaaaagtatggaagaagagaaagaaaagcctaaattggaatgagatccaagtctaaacgcaagagctagattgagccgccattgaagactccttcccctcgggcattggcagtgggggagaaaaggcttcaaaggaacttggtggcatcagcacccccctcccccaatgaggacaccttttatatataaatatgtataaacatagaatacagttgtttccaaaagaactcaccctcactgtgtgttaaagaattcttcccaaagtcattactgataataacattttttccttttctagttttaaaaccagaattggaccttggatttttattttggcaattgtaactccatctaatcaagaaagaataaaagtttattgcacttctttttgagaaatatgttaaagtcaaaggggcatatatagagtaaggcttttgtgtatttaatcctaaaggtggctgtaatcatgaacctaggccaccatggggacctgagagggaaggggacagatgtttctcattgcataatgtcacagttgcctcaaatgagcaccatttgtaataatgatgtcaatttcatgaaaagcctgagtgtattgcatctcttgatttaatcatgtgaaacttttcctagatgcaaatgctgactaataaagacaaagccaccctgaacctgacgtctgcattgtgcatctcaaaatcctaacagcattagt

SEQ ID NO: 91934 - DNA, 860 bp, Homo sapiens
accgtggtggaattcagtttctgccacttactggctgggtagccttaagtatgtgaccaagcctcccctagcctcagtttcctcatctgcaaaatgggaatcatatccatgcttacaaccccacagggcaagactaatttggatagtaagcccaacatatagatggagggccttttatggttggtgtgactgggctcaagggagcgtaagcagagctgagagtggacaaatgagcatgaacctgaaattataaggaatgccgcaccaaggcctgaaaggcaggcctttacagcccctttgtggagctggtgaccagtgcttgatcttggccaagtccctcaacctccctggctacactttcctcagctgcaaaatgggtttaataataatacaattctacctcatagtatttttcttttctttttgaggactgagatttttatatataaagtgcctacctagcctagcacaaggcacatagtaggtgctgaatttcttttgcattggaggctctgagccctctcagtctgagcggctcatctttgacattctgggcagtaatgactcacagggccccccatgtgggaagaggggtgcaggggagttctctgggtgacggtggttaagaatgtgaaattctggctctgctgcttcccagtgggaagagtttacataactaccccaccctcttgcacaggattaaataatttatagacgtgaggtgctcattaggaacagtgactagcacagaggtacgtgcttcaataacacccctcaaggattacctggctattggttacccggggcagaccttgaccaacggcgaaattgggttaacaaacaaaggttgcagcctcccg

SEQ ID NO: 91935 - DNA, 5580 bp, Homo sapiens; identical to SEQ ID NO: 59621

SEQ ID NO: 91936 - DNA, 1710 bp, Homo sapiens
tttttttcagaggagaaacagcgaggggcatttaatcttagaacttaagaggtctcagagacaaaggctttggaagaaaggcgtgggcattcctgaggctttactttccccggaaaattactgcaccataatttgtgagtttatttcttccaactaagaaatagaggcaagaaagagggagtaacccgaagtgaagggctctaggatccagggaccaccagccagctcaagttggatttcagcagtcggggctgcctggggcgtgcaaaagctgctgtgtgagcaaaacgctgccgtgaagacattccaggcggcttccaggaagcggctgtatgtgctgacacgcatgtggacaggcagtctggctggccacctctcaagactggtgtttcctagagctttccattggcaaatgctgcctcctggaactgagggacaaaggttttgaaataagcctttgctcttttggccatttcatttccatcccatctggggctgtacggataatttttttgggcctgggagtaaagctgtccactgttggtaaagtgataaacggactgaaatgtgagagttggctggtctcgagggaaaaacagaggcaggtcaatgtgtacaagaaaacaaaaatctttccacatcagcagcagagtgagttttgtaaagccttctgcatcatattccacgacacctgtgccaaagtgactgagaaaagcagcaatatactctcttcttttgtgatacccttgaatcacgtactgcaccttgttggtgagcaggtggcatacttgaggaacgtaatcaatgagacatcctcctcctggaaaagctgggatatgaagagctgaggagcctccaagtgcatgctcaattcgaggtgacaagtacagcttggggtacacctgggtggcttcagtgtcctcaaaactaacagagaggagggccacatcttctccagggtcttcatttacatccttgagaaggtatgtggggatattgctgaaatctacgggcagcttcaaaaggaaacgagctgaaaattcaccagtccagttgttttttttcccagcataaatttccatgttctctccatactgtggctcctccagtaatgtctggtattcaaacatgaggcgggagctctcccggaggcggctacattggaattggtgatattgttgcacaagttccttcaccacaagtaagagacattcaggatttgaaggattccaggaggcaagattctgcaaagctgaggggtctggcaggaattcagcatcttctccaaagataaaatcgggaggcagttctgggtattgggcattgaaaatgatatcccactttaatgtctctccagcatatggtatgtgcagtttaaatcggtcacagttgggcccaggagtcaatgatgtgcagccagattttaagtcagttatcctcaaacagtttgtagcatccagtcccacttttccattccggaccacgctagatatgaaaggggagagcattggagatattcggttcaaggccacttctggggacattttaacttgacttgtaaatcaccactatattaccgaattgttcttctgtgtttttccccacagtacccattattactttatctcttgcttctggaacttagtccgatcggtaaccggcgactacgtggggtacaggtacccgcccacgcgtccgcccacgcgtccg

SEQ ID NO: 91937 - DNA, 2966 bp, Homo sapiens; identical to SEQ ID NO: 59384
  misc_feature (1)...(2966): n = a,t,c or g

SEQ ID NO: 91938 - DNA, 1726 bp, Homo sapiens
atctgcttacgccaagcttggcacgagggtttgtctgagccgcctcggaagacctccggctcttgtcaggctcttgtttggtaattcctgggaatttacctgggctcatgcttgaagaagcagagggaccatctcggctgattagacacgccccagacccaaccccaggggtcaggtgaacagccaggcggctaagtgaccagctttcttgtcctctcctttttggcagatacagatcacttggattcagtcgagtttgctttgctccgtgggaactgcaccagagctggaggttagcatcttgcaaggaggtagtaacatatccagtcgtgaaactgggaaagaccagagctcttgcatcagggaaacatgtcccgtcggaaacagacaaatccaaataaagttcactgggatcaagtatttgctgggctagaagagcaagcccgccaggcgatgatgaaaactgattttcctggagaccttggcagtcagcgacaagctatccaacaactaagagatcaggactccagtagcagtgagttctgcaccttctggtgacagtgagggtgatgaagaggagacgacacaagatgaagtctcttcccacacatcagaggaagatggaggggtggtcaaagtggagaaagagttagaaaatacagaacagcctgttggtgggaacgaagtggtagagcacgaggtcacagggaatttgaattctgaccccttgcttgaactctgccagtgtcccctctgccagctagactgcgggagccgggagcagttgattgctcacgtgtaccagcacactgcagcagtggtgagcgccaagagctacatgtgtcctgtctgtggccgggcccttagctccccggggtcattgggtcgccacctcttaatccactcggaggaccagcgatctaactgtgctgtgtgtggagcccggttcaccagccatgccacttttaacagtgagaaacttcctgaagtactaaatatggaatccctacccacagtccacaatgagggtccctccagtgctgaggggaaggatattgcctttagtcctccagtgtaccctgctggaattctgcttgtgtgcaacaactgtgctgcctaccgtaaactgctggaagcccagactcccagtgtacgcaagtgggctctacgtcgacagaatgagcctttggaagtacggctgcagcggctggaacgagagcgcacggccaagaagagccggcgggacaatgagacccccgaggagcgggaggtgaggcgcatgagggaccgtgaagccaagcgcttgcagcgcatgcaggagacagacgagcagcgggcacgccggctgcagcgggatcgggaggccatgaggctgaagcgggccaatgaaaccccggaaaagcggcaggcccggctcatccgagagcgagaggccaagcggctcaagaggaggctggagaaaatggacatgatgttgcgagctcagtttggccaggacccttctgccatggcagccttagcagctgaaatgaacttcttccagctgcctgtaagtggggtggagttggacagccagcttctgggcaagatggcctttgaagagcagaacagcagctctctgcactgaaccacaccctcctgcctgccctccttcccacctacctacccacccacccacacccacaggcacgaggaccagtgctgctgccacccacgaggccctgcc

SEQ ID NO: 91939 - DNA, 2124 bp, Homo sapiens; identical to SEQ ID NO: 76414

SEQ ID NO: 91940 - DNA, 441 bp, Homo sapiens
gcttgtcgtggcttggcacgagggattggtagttgaaataatcccaactcattgcctgtttatcagtttctatggtgtgccagccgtgtgccatgtgctgggcatgcacagatggggtagatcaggccgctcccctctgggagcccagactaaccctcttggaagctctgagtcacctactcagatgatgtggtggacaaacacatgcgtaatgcaggtgtttatgtgatgcacgctttgatttctctgtgtgtgaaaatatgaggcctcccctgttgtttaaatggaagggaaagagctggagtgatcctgagctgtgctgggtcagggaaagaatggttcctgcctgggcactgtttctaacgggcaggtaacaagagcttgttggcctgctggctctcgcttttaagtgtagtcacatgcttgagagccagcttcctc

SEQ ID NO: 91941 - DNA, 1028 bp, Homo sapiens
cattacgccaagcttggcacgaggccgaggttgaagttcatgagttcgcccagcctcagtgacctgggcaagagagagccggccgccgccgcggacgagcggggcacgcagcagcgccgggcctgcgccaacgccacctggaacagcatccacaacggggtgatcgccgtcttccagcgcaaggggctgcccgaccaggagctcttcagcctcaacgagggcgtccggcagctgttgaagacagagctggggtccttcttcacggagtacctgcagaaccagctgctgacaaaaggcatggtgatccttcgggacaagattcgcttctatgagggacagaagctgctggactcactggcagagacctgggacttcttcttcagtgacgtgctgcccatgctgcaggccatcttctacccggtgcagggcaaggagccatcggtgcgccagctggccctgctgcacttccggaatgccatcaccctcagtgtgaagctagaggatgcgctggcccgggcccatgcccgtgtgccccctgccatcgtgcagatgctgctggtgctgcagggggtacatgagtccaggggcgtgactgaggactacctgcgcctggagacgctggtccagaaggtggtgtcgccatacctgggcacctacggcctccactccagcgaggggcccttcacccattcctgcatcctggaaaagcgcctcctccgccgctcccgctcgggggacgtgctggccaagaaccctgtggtgcgctccaagagctacaacacgcctctgctgaaccccgtgcaggagcacgaggcggagggcgcggcggccggcggtaccagcatccgcaggcactctgtgtcggagatgacgtcctgccccgagcctcagggcttctccgacccgcccggccagggccccaccgggaccttcaggtcctccccggcgccccactcagggccctgccccagcagactgtaccccacgacccagccccctgagcagggcttggatcccacccgcagctc

SEQ ID NO: 91942 - DNA, 2207 bp, Homo sapiens
ttttttttttttcaaggaaatcaaatcttcaatgaatgaaaaactcagtgccatctggggccagggggtcaccggaccaggtggaaagtcagccagtatatgatgaggggctggaaggctgcagctcccagagtcaggtagagctggagacgctgccgggggacggggccccccatgctgtcggggcccagggctgctgtccgcaaagagcgcacaatgaagtacatgagcgccgatgaggtccaggccagcgccacgtagtagccatcgctgccgaacagcagccccgtgagcacactgaggatcattcccacgtatttgtagccactgtaggccagcaggtgaaaggtgctcaggtcactgcgcacggtggccaggtagaggcccaggagcagggccagcacctccatcaccacccacaccagcgctgtgcttgcacacaggcccagcacctccggggagaaccttttctgaatgcccagtgccatcccagccaggagcacgtaagtaatgaaggccatcgtggggatatagaggtcaggggcgttgaggtcttgccgggggggcagaggagcatcacgactgtactgcacttcccagttctggtgtgtgtaggggaagaccagcagccctagcttcttggccacgtaggctgtgtccacagcaaaaaaatacttgagtttgctcacagacacaaaacggtgcagctccttgtgcaccatgtccttcccatgggatgcgatggagctgccataggccatagccacattggccattgggtccccaagcaagtggttgacactgaaggccacgtctgctcctgtggctgggtatcccccgggctggctggaataaccaccgcttgtgtcatcgaagaggggagggggatccggggctgcccgggccctgtgcttggagccgtgggctccgtagcccgagtgataagccatggccgcgacgctcgctgtccccgagggcccgctgcgccgcctcgtgggtacgaatactaatgaggcagctgctccgcgcccagggtaccgaccgaggccacccggccgcgcgacacgtcccccaccccgccggtctcggccaccatgtccgtggcgtcatcccccgcgcctgccattggctcttcggcggcgccggctcgcccctcccctctcccaattggccactgacgagctctggcctgagcggattcggcagaaggcaacatccgggtgagggacaggcggagcgacttgcggtgcctgggattggatcacgggcttgccagttcacggtgggaacagccaatagaagagttaagaaagaaggtgggcgagaattatttgcgcgcctgcgcggtgaggcacttgacgcaccctgccacgactacaccagggagtcgagaggtaacctgcagccggagtcaggagcaaagcttccttggtgggacgtactccaggagggaacggggcggtcgagttccaaccaagccctgcccttcggggcgcctgtttctccctctctgggcttgttttcctcccccgtcacctacacttcacccaatcttggaacggagccccggcagacccggaggtggtggtgggaggccggacctatcagtgacagagctgccaagcaagccccaggatgctgactccacccgcctcccactcctcttctccgcgcgggtgctgtccgtcgtccggtgctgaaaatgtcctcccgcctcagccgccatcctgtagactcccgggggcctgcgtatgggaaagttttggggtctcgaaccacacgctcctagcgagcgcgtggccgcacgcacacatacacgcatactgcaaaactggggcccagaggatccgaagtctgagagattgggtggtataggtggggcaggatcctgccccgggcctgtcccatagactctcccgtagtccagcagatttgggggcagaggtgtgctgatttgcgtcctgaagctgcagcctaaactcctgagtcatcgccgggcctgtggtcttcttgaagtgaggcccctaagcctcacttgtagtcccgggggttcctttctctccacccaggttctgatcactcccaaccccgcggagacagtcttcaggggcctccctctcacagaccttcagccaccgctttctagagagcatgagcaggttctctgcgacctctctaattagctaccaggtatccagttacaccag

SEQ ID NO: 91943 - DNA, 809 bp, Homo sapiens
tcataccctgctggacgaggaactacccatatttcaataaagaagagactagaactcatgaatattttcttttctacataaatatttttatgtggaaatgtcttttccacataaatatttctccttcatttcaaatcctatatctaacttacagtgcatgcttacctcttatttctccacaacacatggttttcattttaggtgaccaagatataaatctgtcatctatgatgtcacagacatgcttggtatcatagctgctcctgaaagcaagtcttgtcttattatacattattccatcaacacctgctcagcttcctcatttgcaatttgaaaaccatatgaacctgatgctctattctatttttgtgactctatattaatattggataaaaaagtgaaatgcgatatggtcatcctagacaccacagcaattttgcagttgtcgcttaaatgtaacagatttgggagccatccctaatgcttgcaaagcatgactggatggagattcttttatcccagaaaaccacctagagactgagactggctaaatacacaaagtgtaaacccccacacccccggggaaatatggcccccttttacctggtacaggtttttggggaaatttttttctctaaagaaaaaaccgggtggggtattcctttattccaaaaagctttgggatcaaaagggggcttttgggtttcccggtttttttttttttggattctgggaaaatatcaattttttaattccccaaaaaaataaaggggcaacacttcgaataactttgcgttcgaacacccccg

SEQ ID NO: 91944 - DNA, 1876 bp, Homo sapiens
cacgaggccgcaagctgagtcctttccgctcctttgccagcaccgagctcttccacttccatgttcctgaggacacattcctggctgtttggaacctcatcatcttcaaggagcaagggggaacttttggggaccactgcccagaccaaagtgtgactgtgtatttccggtccggggcaccccctgtcatcaatcccctgcatacacacttcccaggggacacagctgtgcctggggttttctcactgaccctcagctggacactgcccaaccgcacctcaggcatctttaacgtcagcagccccttacctggggactggttcttggctgcccaccttccccaggcccacggccacatctctgtcaagggtctccaggatgagtgtcagtacctccttcagccgcagctgattgtccggcgtttgctggacgtcgctgtgctggttcctggccggccctcagagcaaaccctctccccacacaatcgctcagccctgtacaaggtctttgtgcccagcttcacttacagggtttcagcacagctggtgtgtgtggggggccgtggggtatctgcctgccccctgtcactgcgtctgcgtcccaaagccccacccctgcacaactcaagctctgtggcctgtggaggtgcctcaggatgccagctggagctggcactgcccccctgggggcactgggtctacgtgcgtgtggaaacatcatcccggggccctggtaggaccatccgcttccagctgtgtgtgcagttgcaagagtgcccacagcccggcctgctccgagccctggtccctggagctgccatgaacatgccccagtccctgggcaaccagccactgcccccagaaccgccatcccttggaacccctgcggaggggcctgggaccacgtccccacccgagcactgctggccagtgcgcccgactctgcgcaacgagctggacaccttctctgtccacttctacatcttctttggcccaagtgtggcccttccccctgagcgcccagccgtgttcgccatgaggctgttgccagtgctggacagtggaggcgtcctcagcctggagctccagctcaatgcgagctccgtgcgccaggaaaacgtgacggtgtttggatgcttgactcacgaggtgcccttgagcctgggggatgcagcagtgacctgttccaaagagtccctggccggcttcctcctctctgtcagtgccaccaccagggttgccaggctgcgaatcccattcccgcagacggggacctggttcctggccctccgctccctgtgcggggtggggcctcggttcgtgcggtgccgcaacgcgacggccgaggtgcggatgcgcaccttcctgtccccatgcgtggacgactgcgggccctacggccagtgcaagctgctgcgcacacacaattatctgtacgcagcctgcgagtgcaaggccgggtggagaggctggggctgcaccgacagtgcagatgcgctcacctatggattccagctgctgtccacactcctgctctgcctgagcaacctcatgtttctgccacctgtggtcctggccattcggagtcgatatgtgctggaagctgcagtctacaccttcaccatgttcttctccacggtatgcggtggtgtctgcatcttatcactgggtgcttgtgcatggtggtgggtcacagtctgtatttccaccacgttctccgagggtttgggaatgtctgtgccttcactgtgtcttctacagacagagacagcagtgcttcccaaactgtcatgcatagataatggtcatttttgtaagacacattggagtaaatgaacaaaactgtttgcaacttaataaagtaagtttgggcctcc

SEQ ID NO: 91945 - DNA, 793 bp, Homo sapiens
tcattcactggcccgacggactgggaaaacagatgtttatttattccctcattcaatcaacgattgttttctgagactttttatcctccaggtactagagatatagcagtgaatgagacgctccctgccctccaagacctgttagtctgttagggctagataattaacattcagaatggtgaattgtaggaaaacaaaaataacagatacaaaataaacaagaatcgtaaagcctgagtgtgcctgacaatgtggctcacatatatttgtacaatgccaggtaccttacacatatttgtgtaactctctcaacaaccctacaaagttgggaagtattatgaaccccgctttacagctggaaaattgaaccatggacacatcaggtcacacagcacttaagtgccacatttgaggaggaaaactttgtagtttttaatgaccatacgttggttcatcaagtaaaacttctaagcattaacttagaggttgaatgacaacttaactttgccatcagcctagaatatcttcacttacaaatgcccccaaccatgaaactttttatccattgggattcatttcaaatatgaaagagtcccgcaagagaatttttcccagcactgaatgcccaaaagatttaatggtcccccccgggttggggcccgaaaagcccctctttttaaaacaaagacatttggagggccacaaaaaatttttttccttgccccaagggtggggtttttttttgcctgtggggacctcccggaaaatttgtgggaggtttgggggttccccc

SEQ ID NO: 91946 - DNA, 1508 bp, Homo sapiens
gataaagcatgttaaatacattaaatctatttacactgtacaaagcttttaaagttctaaaaatcagatttttatctaaatgaataaatttctctgtattgttaaaaccattctacttaactgcattgttctccaagtccctccagccaggaggcacggtaacaatgtgtcagatctccacactgagacaccaccttcccaagatcatggtacatcagcagcagaactgagacaaaaactggaacaaggaccaccttgctcctactgcattatagcttttgatagtatttgctacttgaagaggaggctataccttgtctagctcaatacagtttatgtttcagacactataagtatgatacccaaatgcttcatgagtgaacaaggtcagcagatcaccctgagaacaaggaagacacaatttccttataggctaatgattataaaaatagaaattaagagctccccagaaacaaaccacttagtcaaaaaggaaggagttttgactttcttctaagccaagtactcaagtttaagacttattggcctatttaaaaattctttctatgacttctaaacaatgatggcaaagtgacaaaaataatgtaatcatcttcttccctcattatatataacccaaactaaaaacaaaagaaatgaacaagctataatccaaaaaaaactagaaaatcctgacaggaatcatatagaacatctctaagaaaaggattcttggcttaagcaaaatattagagcagagaaagcaaaactcatgtcctttcatgcagtccggcaaggcccccctgcccagaaccctcctctctgagtcacatggatgagcagacagaagatctggacacagctatccatgttaagcatgagagagatgtaaagaaatagcagggtaggagggcaggcatactacagaaaaatgagagagaggaaaagagcatgccagagaatacaaatccaagaaacaaactgcactaagacagctaagaagaaatttcaggaatacgatgaatttcggaaaacaacacttcaaagatgagatgataaaatcatcctgagaaggaaacaagaaaaacatgggtaagaaaataaactgaggatcaaagcaacaccatcacagaaccacaaacacataaacagtagtgagatacaaacagccttggctggaatccaaaccgcagaaacaagaaagcccgtcgcaaggaatgcaaaggcaggcgcaagacgaaggcaactggagagaagacagcctgccagcctgcagacaagagaggcctggagtggtgtcacttcatggtaacaacggctgggtctgctgtgggctgcagtgatgtttgtgtgcatgcatgtgtgtggtttttatgtacctacttttggctttaatttgattttttttaatgataacacattttgtgactgtaggagagaaaaagatgccctctgcttaaaggaaagccagggtaaactgaataccctacagctttccacaaataccc

SEQ ID NO: 91947 - DNA, 2349 bp, Homo sapiens
gcggccgccgcgagtctggtatcctgagcttcgtgagttgagcgctgctgctccgcggtggagtcaccgcaccgctcccgggatcatggtgttctacttcaccagcagcagcgttaattcatctgcctacactatttacatgggaaaagataaatatgaaaatgaagatctgatcaagcatggctggcctgaagatatctggtttcatgtggacaaactctcttcggctcatgtataccttcgattacataagggagagaatatagaagacatcccaaaggaagtgctgatggactgtgcccaccttgtgaaggccaatagcattcaaggctgcaagatgaacaacgttaatgtggtatatacgccgtggtctaacctgaagaaaacagctgacatggatgtggggcagataggctttcacaggcagaaggatgtaaaaattgtgacagtggagaagaaagtaaatgagatcctgaaccgattagaaaagaccaaagtcgagcggttcccagacctagcagcagagaaagaatgcagagatcgtgaagagaggaatgagaaaaaagcccaaattcaggaaatgaaaaagagagaaaaagaagaaatgaagaagaagagggaaatggatgaacttaggagctattcatcactaatgaaagttgaaaatatgtcttcaaatcaggatggcaatgattcagatgaattcatgtaaaaggagaaaaggagaaaaggacctttgaaagatgtgaatgtagagacaattgcagaccttttggtttcatctgtgttctgaagtataaaatacaaccaaaattctaccttcatcctacccagaaattattgattttcaagttttaaaaaaattgtaccttttttgctgacagaaaaggatcagatatgtataaaatagttgaacttgacagcatataacttaaagtgaaaatgtttttgccagaacatgtcttggtaccttgtgaaagcaggctgcccttgttcttgagatagactttaaaatgaaccagctctgaaaagtacttctgctgctctggtctatccctgaaaacagatgtcttgaaacacttttcatattcttaaaataatcttcacttctgttaagaagaacatgttggtgggtaattatgcgaatgtttccctgtccctgatttctcgattaggcgtatgggttttgaaaaagagatttttcagaagattgtcagcttcagtattcacgttccatcgtgtcatctgggtctgttagtgtagtgaccctcagtgcagtctgtcccagcgtttatgtccttgcttcctctgagcagaggcctccatcttagtatcaacatatttaaagaaattgatggtgttcatcaagctggggcctgtggcagttgttgcctgagcaccaagtaacccaagccacctatgtgacaacttctgggcccaggagtaatttctcagcattgagggtaaaataggatggagtgctctgttgatcatttgggagatgtaggttacctgatttgtgccttaggatgcagcgtgaagcagaagtccatattgcaattatgattttagaaggaactaagcattttactcacacccacagcagcaagaatgacctcctgcagcagatattccacctgtaatagcactttggaactgtgggcaaaaccaaaaggctagtgtttccatttattccatgttggtgtatggggttgaactggaaaattccctgaggcaaaactcactggccaaattttgagagggtatagaaaatgactttagagatgagtggttttgtgtatgtgtctgatgatattcagtctgatgttccgcaattttaaaagttataataaaataccatttttttaatctggaaggacattgatatatgaattcttagaatttgctattaaaaagggtagcccccattccacaagctggttttgagggtgatcttgctctaaaaaacctcattcatcataggctcagtctgacaggttctgtacggggctatcatctttctcctcctctgctaaatgcctctttcttccagctgctcactgggtcaaagggatgtcctttctcagatgtattcttgatacatctcagatgtattcgtagctgtgctccttccatacttccaaggagtccggcttctacagaattcctctgtacctcacactgcaacacatgtagatagcgcttttgaaaaatacatatatttttactatagtatgagaggtcctggggctcaaactttaaacatttcctaactcagcttacactgagttaaaatgtccaggtctctgctgaattctcttgttgaattcatagctctccaacctcctc

SEQ ID NO: 91948 - DNA, 694 bp, Homo sapiens
tccctctctcctgcctgtgctcaaacacccacagagaactctggaaggagaagaaaaacatacctctctccttccccggcctttccccacacacactgaggttgagaagctgggaataaacagcgtccaacacttttaaatggcggtggcagctccagacaagggagaagggaaggactgagagaagaaattattagactttttagactggctgaacccagaacctttacattggttacaaaatcatgcctggaggtgaaaaattcaatagcattataccaagtgtttgggcaacggtgtagagacaatagtagagacaagctacagctttagacagtggtagagagaagctacaactttagcttgtagaaacagctgttgggtgttcagcagatgcagtctaggtgcatgcaaacccactgtgtgcagcatgccttcactctcacgacaagggagccagaccttgtgtctgcggctggctgaatattgcatggaatctgtggattcacagaggcttcttctcagctaagagggagtgtggctggatgcatttctctgtggctcattcaatttggggtatactcatactactgagtctctatgaaggagtgataagctgggtcttcaatttccaaatgtttaccaaactcctactatgtgccaagcactattcccactgctttgagagctaacg

SEQ ID NO: 91949 - DNA, 2196 bp, Homo sapiens
cggcaactgagaggaagcaaagggaaaaaaactccattaaaaagcccagctttcctccatgttagatgtgacttggaaaatgagaaagatttagcaaaattccaccgtgtcttttgccaggctagagacagggagagcagagtaaaaccctcaggctgctgaaatttctaggctgttaggaagcccctcgaattctgtgaaaatgagggtttcttaactcacactgagagcggaaaggggcagacccttttcataactccctcaagtgtgtgttacctttctttaccagcatggtaagcaacaggacatatcccagcctcggacatgtctgtatgatccaaggtacccaaagtcagacagagtaaactcaagcctggcactggctttctgccgcttcatgtgctttggaaaaagcaggagaagcaatagcagcaggagtccccagcagctggagccgcaagaatgaactgcaaagagggaactgacagcagctgcggctgcaggggcaacgacgagaagaagatgttgaagtgtgtggtggtgggggacggtgccgtggggaaaacctgcctgctgatgagctacgccaacgacgccttcccagaggaatacgtgcccactgtgtttgaccactatgcagttactgtgactgtgggaggcaagcaacacttgctcggactgtatgacaccgcgggacaggaggactacaaccagctgaggccactctcctaccccaacacggatgtgtttttgatctgcttctctgtcgtaaaccctgcctcttaccacaatgtccaggaggaatgggtccccgagctcaaggactgcatgcctcacgtgccttatgtcctcatagggacccagattgatctccgtgatgacccaaaaaccttggcccgtttgctgtatatgaaagagaaacctctcacttacgagcatggtgtgaagctcgcaaaagcgatcggagcacagtgctacttggaatgttcagctctgactcagaaaggtctcaaagcggtttttgatgaagcaatcctcaccattttccaccccaagaaaaagaagaaacgctgttctgagggtcacagctgctgttcaattatctgaggttgtctgggacctgcctccaccccatccagggatgagaatggcagccaatctctgtggccaagctccagccaaaaaggagggcacgaccagaaaggaactccctttgcacggaggcttgccccatcaccctctgagccctcccaacacagcacactagtcagcccactgccacgacctccctgccagccagaagcatccgtactgcacgctgtctgagaatgctgggcctggattgcagacagtgccgctgctgatcgcatcaaaaacaaagtcaaaggccatctcacattttacaaatccccagctcatgaacgtgaagctgataggaaatcaccccagggaacccgaaaaagaaacttgattcctctattgctggccttacttgatgtcttttataaaacttgggactacaatactaacctttttttctgaatctgctgttctacccatgtgtctcacattcatttgtattatttcaagaaatgtactaatttccagttcactcaggccttactaatccataccaaattagcctaaagacaaggcattttatattcatttctattttcagcatgtttctaccaaagctattagaaccaacacgtacctctgaatgcccgattataagaagacatgagaagactttaaaagttttggaaatttacagagccatgatttttgaacctaattgaaagaaaaccatctgaattgttgcaggtccacatttttgccaaagatacactctatagatgcttagtagtggcctgatttttttccatgtattgccacgacaaactaaaaatgaactgtgtttaagaatgtagtatttctgtttttcatccaagttgattgggggaagaatatggcaggatccatcttttacagtattttgtattcagtaaaggggacattcctgctcctcccttcccccattgcatgccctcttcctcccttgatttcactttctctcatgcccggatccttttattctccccagttataacccagttataaaagaaagatctgagcataaagatacgtgtttaaaaataactaaaagtaaaggaaagtgccttaaaaaaaaaa

SEQ ID NO: 91950 - DNA, 1849 bp, Homo sapiens; identical to SEQ ID NO: 59636

SEQ ID NO: 91951 - DNA, 584 bp, Homo sapiens
aggacccagggtacacagggtgggtggctattctccagaaatgtcaagtttctggccagggcttaaggtgtctgcagtcccctagtcccacccctggccttgcattccagctcagcgggtggaaggtataaatttcagctgctctcagccctgctgtgtttttccaaagcccttccaacagcaacatgaagttggcagccttcctcctcctgtgatcctcatcatcttcagcctagaggtacaagagcttcaggctgcaggagaccggcttttgggtacctgcgtcgagctctgcacaggtgactgggactgcaaccccggagaccactgtgtcagcaatgggtgtggccatgagtgtgttgcagggtaaggacagatgaagagttatcttaaggatcatctttccctaagatcgtcatcccttcctggagttcctatcttccaagatgtgactgtctggagttccttgactaggaagatggatgaaaacagcaagcctgtggatggagactacaggggatatgggaggcagggaagaggggttgtttcttttaataaatcatcattgttaaaagcaaaaaaaa

SEQ ID NO: 91952 - DNA, 846 bp, Homo sapiens
aaccttccaaattgtatcagatattccgtgagatgtatgtgcgttttttcttcagactccattccatctgcttctcatccttctggttattgtgtcactctgtctgctgtttgaaactcttcttcaaacttatcttccccaactcttttatcatctacgagaaattggggctcaaaccactccgcatatcatttaagtgggatggttcgagctttctctggatacttagctacagatcagctcttgcttttatgggatagaatcctaggatacaactctctggaaattcttgctgtgctggcagctgccgtgtttggctttccgagcagtgaacctgatggaggggacatcactggctgcagctgaagcagttcttgctgacctttctactttaaaagttatgcctcttcttcagatttttctgtttgctactgtcacctgatcttcttcacagtcactggcaacacatctagtttttcattagaaacaaatcatgaactatgcaaactctgcataaaaccaaaatgaaactttgcatataagccaataaagatcatgttccctcttcagttaaacctaagtagtttctcactttttgaaacaataactctgcaccaaatattgcatcgcatgctgctgattttcaagagagaagcaataaacacaacttctgctaaattgagcattatatatataatattataatatatatataatcctgacttgtaaatggcatgtaataatatatgcaataagaactaaagatactgtaataaacttcaagaggtaatgtagcttcttggataattcttttatgtcagtttataaatttatctctagataatg

SEQ ID NO: 91953 - DNA, 453 bp, Homo sapiens
  misc_feature (1)...(453): n = a,t,c or g
gacgattntctngcaagggcactccacgtcaggctggtcctcggggccattaccggagtaacatccttccagaatgcgctcgtggggtcagccgccggcttcacatcctgggtggcggatttgacctcaagcacgtcggccccgaacatcatcgaggccatcatcattccgagcaagactttctgcatgttctctcaatatatattgatctctatggtgtctcgccttcttgtgttgctttgccctctcatacttatggcacagtcgcaggcgcccgactgggtttctgtcgagaccaacgtcgcttactcgtcctatccgcagaccgtgctcgatgttttgcaatccaaaacatcatctgcggccgccaagcgcccagcggtaatcgtgatccacggcggcggctgggtcggcggcgccaaagagcacatggtgaacttctattgcctgccc

SEQ ID NO: 91954 - DNA, 2332 bp, Homo sapiens
ggaattcgcggcgccggcgtccgcggcagctgataccagagtcttgctccggccgcggccagcggagccctgggctggggcaggagccgcaatgtctcaggctgtgcagacaaacggaactcaaccattaagcaaaacatgggaactcagtttatatgagttacaacgaacacctcaggaggcaataacagatggcttagaaattgtggtttcacctcgaagtctacacagtgaattaatgtgcccaatttgtttggatatgttgaagaacaccatgactacaaaggagtgtttacatcgtttttgtgcagactgcatcatcacagcccttagaagtggcaacaaagaatgtcctacctgtcggaaaaaactagtttccaaaagatcactaaggccagacccaaactttgatgcactcatcagcaaaatttatccaagtcgtgatgagtatgaagctcatcaagagagagtattagccaggatcaacaagcacaataatcagcaagcactcagtcacagcattgaggaaggactgaagatacaggccatgaacagactgcagcgaggcaagaaacaacagattgaaaatggtagtggagcagaagataatggtgacagttcacactgcagtaatgcatccacacatagcaatcaggaagcaggccctagtaacaaacggaccaaaacatctgatgattctgggctagagcttgataataacaatgcagcaatggcaattgatccagtaatggatggtgctagtgaaattgaattagtattcaggcctcatcccacacttatggaaaaagatgacagtgcacagacgagatacataaagacttctggtaacgccactgttgatcacttatccaagtatctggctgtgaggttagctttagaagaacttcgaagcaaaggtgaatcaaaccagatgaaccttgatacagccagtgagaagcagtataccatttatatagcaacagccagtggccagttcactgtattaaatggctctttttctttggaattggtcagtgagaaatactggaaagtgaacaaacccatggaactttattacgcacctacaaaggagcacaaatgagcctttaaaaaccaattctgagactgaacttttttatagcctatttctttaatattaaagatgtactggcattacttttatggacagatcttggatatgttgttcaattttctttctgagccagactagtttacgctattcaaatcttttcccctttatttaagatttcctttttggaagggactgcaattattcagtatttttttctttcctttaaaaaaatatatctgaagtttcttgtgtttttttttttccccacaaagtgtgtttccacttggagcaccattttgacccaggaatttttcatagtttctgtattcttataagattcagttggctgtccttttcctgctcccctcaaaagatttttagtcatacagaatgttaaatattatgtattctgactttttttttcccccggagtcttgtatatttatagttttctatataaactgtagtatcttcatgaagacccaaggctcaaatttactgtccttaaaaacaattctcataggattattcttttcatggtattttcttccataatatctcattttaaaaagaagttctttatgaacttagtgtccattgtcatgcaatgttttttttttccattctttttccctgtaattttggaatttctggtcctgggaagaatcaaacaaaatcttaagttctatgagaacttggttcattgacatattctgctgaagaaagaaaaattaaattggtagtaaaatatagtcttcaagtatacgtttgagagtgcttttttttgtattagttctgctgtcacttcatttcctgtattatatgtgatgtttttccccattaaaataccagagataatggagatattttgcactttagccttgatgaaaagtacaagatatgttcaaagcttccctaatttttttcttatttgtagccacataagtttcaagaataacatggcacacagaacaatggaaaaaagtttctttccattggaaaattatatcattttgggttgccacatcagtttataaatttggcgctcttttaattacactctgtagaaggttaatagagcttgagccctgctttaatatgtagtgaaagataattctgtagaaaaacgtcagccagtagggtaaagtcattctactggtcttaatttttatattgaggaacaatattgtgtgtttgtgagccagaaagctttgttgacagatcagaaataagattgag

SEQ ID NO: 91955 - DNA, 430 bp, Homo sapiens
taattccgcacgagctcgtgccgaatgcagtttgacgttgcaggaacttcttcagaaagatctaagtcgtcagtaatgcctccaactataacaggatttaagcctaatgcacctctcactgatctgaacccggcagccagcagaacaacgacagagaacatggctccaataccaggttctaagcgcttttctcctgctggcctccatcatcgtatggcagcagaactcagttatctgaacgccattgaggagtcggtgcgccaactgtcagatgtagaaagagttagaggcatttcacttgctcagcaggagagtgtgtctctagctcagataataaaggcacaacagcaacgccatgaaagagacttggccctcttgaaactaaaggctgaacaagaggctctggagagtcagagacaaaaaaaaaaaa

SEQ ID NO: 91956 - DNA, 1088 bp, Homo sapiens
cgacccacgcgtccgcttccctaggctatttctgccgggcgctccgcgaagatgcagctcaagccgatggagatcaaccccgagatgctgaacaaagtgctgtcccggctgggggtcgccggccagtggcgcttcgtggacgtgctggggctggaagaggagtctctgggctcggtgccagcgcctgcctgcgcgctgctgctgctgtttcccctcacggcccagcatgagaacttcaggaaaaagcagattgaagagctgaagggacaagaagttagtcctaaagtgtacttcatgaagcagaccattgggaattcctgtggcacaatcggacttattcacgcagtggccaataatcaagacaaactgggatttgaggatggatcagttctgaaacagtttctttctgaaacagagaaaatgtcccctgaagacagagcaaaatgctttgaaaagaatgaggccatacaggcagcccatgatgccgtggcacaggaaggccaatgtcgggtagatgacaaggtgaatttccattttattctgtttaacaacgtggatggccacctctatgaacttgatggacgaatgccttttccggtgaaccatggcgccagttcagaggacaccctgctgaaggacgctgccaaggtctgcagagaattcaccgagcgtgagcaaggagaagtccgcttctctgccgtggctctctgcaaggcagcctaatgctctgtgggagggactttgctgatttcccctcttcccttcaacatgaaaatatatacccccccatgcagtctaaaatgcttcagtacttgtgaaacacagctgttcttctgttctgcagacacgccttcccctcagccacacccaggcacttaagcacaagcagagtgcacagctgtccactgggccattgtggtgtgagcttcagatggtgaagcattctccccagtgtatgtcttgtatccgatatctaacgctttaaatggctactttggtttctgtctgtaagttaagaccttggatgtggtttaattgtttgtcctcaaaaggaataaaacttttctgctgataagataaaaaaaaaa

SEQ ID NO: 91957 - DNA, 1231 bp, Homo sapiens
cgcctgcaggaattcggcacgagcaggcccgtggcgccgacaggatgggcaagtgtcgtggacttcgtactgctaggaagctccgtagtcaccgacgagaccagaagtggcatgataaacagtataagaaagctcatttgggcacagccctaaaggccaacccttttggaggtgcttctcatgcaaaaggaatcgtgctggaaaaagtaggagttgaagccaaacagccaaattctgccattaggaagtgtgtaagggtccagctgatcaagaatggcaagaaaatcacagcctttgtacccaatgacggttgcttgaactttattgaggaaaatgatgaagttctggttgctggatttggtcgcaaaggtcatgctgttggtgatattcctggagtccgctttaaggttgtcaaagtagccaatgtttctcttttggccctatacaaaggcaagaaggaaagaccaagatcataaatattaatggtgaaaacactgtagtaataaattttcatatgccaaaaaatgtttgtatcttactgtcccctgttctcaccatgaagatcatgttcattaccaccaccacccccccttattttttttatcctaaaccagtaaacgcaggacctgtaccaattttaggaaacaataagacagggttgtttcaggattctctagagttaataacatttgtaacctggcacagtttccctcatcctgtggaataagaaaatgagatagatctggaataaatgtgcagtattgtagtattactttaagaactttaagggaacttcaaaaactcactgaaattctagtgagatactttcttttttattcttggtattttccatatcgggtgcaacacttcagttaccaaatttcattgcacatagattatcttaggtacccttggaaatgcacattcttgtatccatcttacaggggcccaagatgataaatagtaaactcaaaattgctccccactctgtttattatttaaaggtgtcaggatctgtgttgtaatgtgtctacattaatgtgtttaggagaatacaggcattggttcatttagttgatggaagtatatgccaggcagggaaataaggatctgtctgtttagtggataccgtgtatcctttaatagaccaggtaacagttcgtgttagtttagactattgttttgtactgtactttcttgggtggcagaggaaagaaaagtaaaacattaa

SEQ ID NO: 91958 - DNA, 443 bp, Homo sapiens
  misc_feature (1)...(443): n = a,t,c or g
agctgaaattccgcacgagctggaacactgtcaggctctaaaaatgttagctagtttaaaaatgctgcttaatagtagtttccaggtctctcaggattttgccatgtaactttttttttaacctctctattttacaatggagaacttaattaaggttagggaattagtacaaagcaccatggtaagtaaggagaaccaggatttgaacacttgctcataaatactctgatgttcaattcatatcctgggtcttctagtgtctacagggttaagtgttgacaggacctgggtagctcatagtgtcctttagggaaagagctccaaggcatgggattgcagcatgggtttgatttcaactccaccttcactggcttctgggacccagagcctccagtcacttgtgtagcctcctggagnctggttcttcttcctttaaaagggga

SEQ ID NO: 91959 - DNA, 5678 bp, Homo sapiens
ggaagaagtacctacacaggaatcagtgaagtgggaaattaatgttattattaaaaatcctgaaattgtgtttgtagctgacatgacaaaaaatgatgctcctgctttagtcattacaacacaatgtgaaatttgctataaaggtaaccttgaaaatagtacaatgactgctgccattaaagatctccaagtgagagcctgcccgtttcttccagtcaagagaaaaggcaaaatcactactgttttgcagccctgtgacttgttttatcaaactactcagaaaggtacagatccacaagtgatcgatatgtcagtaaaatccctgacactaaaggtttcaccagttattataaatactatgattaccataacttcagcactgtatacaactaaggaaaccatcccagaagaaacggcttcttctactgcacatttatgggaaaagaaggatacaaagactttaaaaatgtggtttcttgaagaatcaaatgaaactgaaaaaatagctcccacaactgaattggtacccaaaggcgagatgataaaaatgaacattgattctatttttatagttcttgaggctggaattggtcatagaacagtacctatgcttctggcaaagtcacgtttttcaggggaaggcaaaaactggagttccctaataaatctgcactgtcagcttgagctagaagtgcattattataatgaaatgtttggtgtatgggagcctttgcttgaacccttagaaattgatcagactgaggattttagaccatggaatcttggtatcaagatgaaaaagaaagcaaaaatggccattgttgagtcagatcctgaagaagaaaactacaaagtgccagaatataaaactgtcatcagtttccattcaaaagaccaattaaacattacattatccaaatgtggtcttgtaatgttaaacaatttagtcaaggcatttacagaagctgccactggatcttcagctgacttcgtaaaggatctagcaccatttatgattttaaattcccttggacttactatttctgtttcgccaagtgattcttttagtgtactcaacattcctatggcaaaatcatatgtattgaaaaatggagaaagtttaagtatggattatatccgaaccaaggacaatgatcatttcaatgcaatgaccagcctaagcagcaaactcttcttcattcttcttacacctgttaaccattctactgctgataagattcctttaacaaaagtgggacgacgtctgtacactgtaagacacagagagtctggcgttgaaagatctattgtttgtcaaattgatacagtagaaggaagtaagaaggtcacaattcgctccccagtgcagataagaaatcatttttcagtcccactgtctgtttacgaaggggataccttattgggaactgcctcacctgaaaatgaattcaacataccattaggatcttaccgatcattcatttttctgaagccagaagatgagaactatcaaatgtgtgaaggaattgactttgaagagattataaaaaatgatggtgctcttctaaagaagaaatgtagatctaaaaacccttctaaggaatcatttctcattaatattgttccagaaaaagataatttaacatctctatcagtgtattcagaagatggttgggatttaccatacataatgcatttgtggccacctatcctgctccgaaatcttcttccttacaaaattgcttattatatagagggaattgaaaattcggtttttactctaagtgaaggacattcagcccagatttgtactgcacagttgggtaaagccaggctacatttaaaattacttgactatctcaatcacgattggaaaagtgaatatcacataaagcctaatcagcaagacattagttttgtcagttttacttgtgttacagaaatggaaaagactgatttagatattgctgtccatatgacttacaatactggtcagacagttgtggcatttcatagtccttattggatggtcaataaaactggccgcatgttacagtacaaagcagacggaattcatcgaaagcatccacctaattataaaaagccagttctcttttcttttcagccaaatcacttttttaataacaataaggttcaacttatggtaactgatagtgagttgtccaatcagttttcaattgatactgttggtagtcatggagctgttaaatgtaaaggcctgaaaatggactatcaagttggtgtcactatagacctgagcagttttaacattactagaattgtgacatttacccctttttatatgattaaaaacaaaagcaaataccatatatcagtggctgaagaaggaaatgataaatggctctctcttgatttggagcagtgtatccccttttggcctgagtatgcttctagtaaacttcttattcaagtcgaaaggagtgaagatcctcccaaaaggatatattttaacaagcaggaaaattgtattctattgcgtctagataacgagcttggaggtattatagcagaagtgaatttggccgagcattctacagttattacatttttagattatcatgatggagcagctacattcctcttaataaatcacacaaagaatgaacttgttcaatacaatcaaagttctctcagtgaaatagaagattccctccctcctggtaaagccgtgttttatacatgggctgatccggtgggctctagaaggctgaagtggagatgtagaaaaagccatggtgaagtaacacagaaggatgatatgatgatgcctatagatttgggggaaaagacaatatatttagtttcattctttgaaggtttacaacgcattattttattcactgaagatccaagggtatttaaagtaacatatgaaagtgagaaagcagagttagcagagcaagaaattgcagtggcattacaagatgttggaatttctcttgtcaacaattacacgaagcaagaagtagcctatataggcattacaagttctgatgtggtttgggaaacaaagcccaagaagaaggcaagatggaagccaatgagtgtaaagcacactgagaagttagagagagaatttaaggaatatactgaatcttctccttcagaagataaggttattcagttggacactaatgttccggttcgcctaacccctactggtcataacatgaaaattctgcagccgcatgtaatagctctacgaagaaattatcttccagcattaaaagtggaatataacacatctgcacatcaatcatcatttagaattcagatttacagaatacagatccaaaatcagatacatggtgctgtatttccctttgtgttttatcctgttaaacctccaaagtcggtcaccatggattcagcaccaaagccctttacagatgtcagtattgtcatgagatctgcaggacattcccagatatcacgtattaagtatttcaaagtattgattcaagaaatggatctcaggttagatcttgggtttatctatgctttaacagaccttatgacagaagctgaggtgactgaaaatacagaggttgagctttttcataaagatatagaagctttcaaagaagaatataaaacagcctcattagtagatcaatcacaagtcagcctctatgaatattttcatatatctcctatcaagttacatttaagtgtttcactgagttccggcagagaagaagctaaagattcaaaacaaaatggaggactgattccagttcattctttaaatcttttgctgaagagtattggtgccacactgacagatgtacaagatgtagtttttaagcttgcattttttgaactcaactatcagttccatacaacatccgatctacagtctgaagtcataagacactattcaaaacaggccattaagcagatgtatgtactcattcttggacttgatgttttgggaaatccatttggcttaattagagaattttctgaaggtgtagaagcatttttttatgaaccttaccagggagccatccagggtcctgaagagtttgtggaaggaatggcactaggacttaaggcactagttggtggagctgttggtggattggctggtgctgcctccaaaatcaccggtgctatggctaagggggtagcagctatgaccatggatgaagactaccaacagaagagaagagaagccatgaataagcaaccagctggttttagagaaggcatcactcgtggaggaaaaggcttagtttctggatttgttagtggcataacaggaattgttacaaaaccaatcaaaggagctcaaaaaggaggagcagctggtttctttaaaggtgttgggaaaggtttagtaggagcggtagcaaggccaactggaggcatcatagacatggctagcagtacatttcaggggataaaaagagctacagagacttctgaagtggagagtctgcgacctcctcggttcttcaatgaagatggagttatcagaccgtacaggttgagggatgggactggaaatcaaatgttacaggtcatggaaaatggaagatttgcaaaatacaaatattttacccatgtcatgatcaataagacagatatgctaatgataaccagacgtggtgtattgtttgtaacaaagggaacatttggacaactcacgtgtgagtggcagtatagttttgatgaatttaccaaagagccattcattgttcatgggagaagattgcgcattgaagcaaaggaacgagtgaagtctgtatttcatgccagagagtttggaaaaataattaacttcaagaccccagaggatgccaggtggatcctcacaaagctacaagaagcaagagaaccttctccgagcctctgacagagaacactgcctgaagacacacagcaataagtgattacagctcctagactaccttccaaaacctgtttgggaagcatattacagaaatgatttcaagtaccctgtattctggatgctaaaaaacaaaaacaaacaaaaaaacaaaaacaaaaaaacaaaaccagaatcaggtaaaacagctatgtgattaaaatattttaattcttcagcaattacccggttttctaaattgaatcatgcatctatttataattctaattattttgtaaaagaagataaaattatgaatcttaagtatttgctccatctttttctctgtaatggtggagaggctgcccataattcatctccacatggagccaagtttaatgtttctagttcacattttgtacttctgtcatgcttatttcaaactccctgagtgatgggtaagaaatcaaacattgcctcagtggtatcaagagaactttggtggtggtttcttcagaatcatgaagttcttttgccagataaatattttgatattattttcctttttaatataaaggataggtttgaattgtacttaaaatgcatagcattattaaaaacaatcttttaaaatataatttataacatagattgaagcctccccttaagaaaccttacagaaataagtatcctactcagaaaaggaagtctgtctcagaactttaaggcctttgaaatatctcctcaagcctatttcatgagatctacttggtttacccaagtcatgtttttaatagactgg

SEQ ID NO: 91960 - DNA, 390 bp, Homo sapiens
ttttcctgccccattacaaagacaattttaattatgattttaaccttgccagaattcacctgacaagagttttgtcaggaattaattgaattgtctttgtaatggggcaggaaaatcataattaaaattgttgcaggttataatcataatcaaaattacatgaaataggtacagctacttaagaagttagcattgtttatcatactccaatgtaacaaggccatttcccttcacttacaacatgattccacctctacttcagtttcattgtgccttcctactataccctgaaactttatttcaaagaaagcatgtgtgtgatactcaactgaaccttttatttcaactgtggccaaccaaacaactcaaaaggtgacttcatggggaccc

SEQ ID NO: 91961 - DNA, 746 bp, Homo sapiens
  misc_feature (1)...(746): n = a,t,c or g
ctgaatcttccatccactgttagcacatggctattcagactctgattcccatctgatgccatatgtgcttcctccacagtccgggagaggagctttgggtcatgtgattagccttttgccctggacagcgcagctaagctcagcacatgtcttgggatggagctgcagaatcttggtgccgtctcccccttggaaggctagagtcttggcactgagaggaagtccttcctccatccccagcctcctgactccattgctagcgactcccagcaagttaagaaagattcagtgggaagggtatagggctgggagttgtctggatctaagcctttcttgctcagtttgatagactttggaaaatctctgtctctctgggaactcaatctcgtctggtccctggctttagcacagtgtgtccaccattgcagccatgggcgagaagccactagagctatgtctcttccttaggagagcctgggggggatcccaaggtgttggtggtttggaagggcagtgaccctgcatgaccaggatccatttgcccaggcacctgctctctgccagcctgaacacccgggagcacctcccggatacgacagccacccactacttctgcatggccgnggccacatgggcacagtggggtgaagtgaagatctcagactctggagtcacacagtctggggtttgaatccgagctccaacacttctagctgtaggatcttaagcaaattgcttaaacatcc

SEQ ID NO: 91962 - DNA, 385 bp, Homo sapiens
tactatagagttagacatttctttaacatttttacccagcttatcactgtgtgggcatatgagcgggaaagtgcagatcctgatgagttgctggggaatgcagaagaaccttcaatagacctggcgtattgtagtaccaatgacaaaagatgatgcactaaaggagattagaggaaaccaagttacttttcaggattgctttattgcagattttcttattctgttgacttttcctttgttgaccatacctgaaattcctggttatttaccaatctcctcaccacgtggtagtcaattaatggcttcctgggatgcttgtgtagttgcatctgctgttttggtgacagatatggagacctttcacacaactgattcattcaaatct

SEQ ID NO: 91963 - DNA, 386 bp, Homo sapiens
aaatgcctaggaagattttctaacatattttgttgatagcccattagctaacattttaaaacacaacttcaaagtgtttataatatttgaaatttagtaaaattagcatatctgttttggtttggatacattattctaattattgttggacaacctagttcatgattttatttgtccaaaaatggcttgtttggttttaaaaaaattaatgtgttatgagatcttgatgttattttttaaaaaacccaaaaaagaaattacttttcatttaaagagaatctgcttcctgcttaagtggctaatattttaattaagtcgggagtgaagtttttctgagtgtctcctgataaactccctcttttatgttgatggtaattaaacagatc

SEQ ID NO: 91964 - DNA, 1026 bp, Homo sapiens
aaagtgaaacttagtgcctcagacaagcaggggcaagtctgctaaggaagctgtggccagaagcacagatcagaaacacgatggctctgttaacagccgaaacattccgcttacagtttaacaacaagcgccgcctcagaaggccttactacccgaggaaggccctcttgtgttaccagctgacgccgcagaatggctccacgcccacgagaggctactttgaaaacaagaaaaagtgccatgcagaaatttgctttattaacgagatcaagtccatgggactggacgaaacgcagtgctaccaagtcacctgttacctcacgtggagcccctgctcctcctgtgcctgggagctggttgacttcatcaaggctcacgaccatctgaacctgggcatcttcgcctcccgcctgtactaccactggtgcaagccccagcagaaggggctgcggcttctgtgtggatcccaggtcccggtggaggtcatgggcttcccacagtttgctgactgctgggaaaactttgtggaccacgagaaaccgctttccttcaacccctataagatgttagaggagctagataaaaacagtcgagccataaagcgacggcttgagaggataaagcagtcctgaagtgtggatgttttagagaatgacttaagaagtttgcagcttggacccgtatcccactcattatcaagaagcaactcaagatgactttccctggggcatgtcagttgcctcatagcctgctggtcctgtaagcaagcactaagctccacagtgccagttccttgccccaacctggccccatccaagtacagaagaccttcctttcctcctttttccatattgctttctgttctaagtgggtgaataattttataattgaaaaaataaagataaagtctgtaaatccagccgggtacggtggctcacgcctgtaatcctagcactttgggaggctgagatgctcggccaataaatttctattgtttatgaaaaaaaaaataaactaaaaaaaaaa

SEQ ID NO: 91965 - DNA, 710 bp, Homo sapiens
aataactactaggtcattagtgtggactttgagtatgagtgtaaagacctcactcactaaataattcatggcagtcagcaagttaagtcctgttagcaagtattgattcactaatgtaatactacctagtccaaactacgtaattttcctaatagaaataaactcctttaaatgtcaaagcaccatctagtcccagcctcctcccgaaaagcttaaatttgcatagccagtaggtaacaaaactggaactaaaacagaattcctgctaattgtttttccatgctgattatttcccttcccctcctccacctttgccttcttctttcctgccttcttgagatccaagagggctcaagatcctttggaattattggcttatttcccaaactggtttgaacatagcttttccaaaacctagaattaggaagtttagcaactagatgcaccacgaggagcaagaatatggtttctgttctccagctgaaaatctgtctgctgagaacttactactgtaccagccccagacttcaagagaaagttcagaagtacagaaccaatgtctttggaacaattcactgacgttttattttcaaactgatgtattcttttcaagataaaccaagggtcatgcagtggctcacattatgtatcccagcactttgggaggcccagggggatgaaacatttgagggcaagaagttcaaaacccc

SEQ ID NO: 91966 - DNA, 430 bp, Homo sapiens
atttaacaaaccctttctgggaaaaataaccccaatttgtggtgtttgttgatttctgtggtataaatactcaccatgttccctggtagctacatgtgtgaccatggaattggaaagagatgcatgcagtggctctcctgagctggtgtgagctggctcccgcacctgtacctgctttcagtgtgataatcttctggttcccttataatagaggatactgaaaatcccaaacctctaccataaacatttcttttcctcaccaaagctgacatggatgccagtgttgattgtgtatattaagtagtatttatcaatagtaatctcagtctttaacatcttattcagaaacttttcttaaaggaatactacatgtaattctatattaaataaaagtttctaaagtaaatcatttagggtaaccacggtttgt

SEQ ID NO: 91967 - DNA, 363 bp, Homo sapiens
tttcccagatgaatttagagacttagctccttctcttctagaattctacaggaaggctccagagaaggcactgtgtaagctcaagtgtgcacaggcctgtcttagtttatattgagctttgaaacttacttccttctcttctggaaaacaagcatgataataactactacatatgaatgatgagaagattacacaatgtagccaaagcacacagcacaatgatacagggtccttccctttctttttcctttgtttttctctcttctgcacaaagccaagcacaggttgcctgtgtaacaagtgttcaataaatcttgaatcactcaccattgactgttccaattcagctggttaaggcatcta

SEQ ID NO: 91968 - DNA, 614 bp, Homo sapiens
tggtaagaataggagacgggacaagaataagagatccattttgctcaggatgttgatactgaaaatgaagctttatcaccaagttattgtcaaaataataaccaccaaccactccaaatctccagggacttaaaacaaccatcatttcttctcacccgtgcgtccggggtggtctgggatcagctgttttcaattgagctatgttggtcttggcgccaagcttcaggctgggcccaggtgtgtgccatgtgtctctcatttttcttggctgggcaatctatccagagcgtcttcttgtcatggtgatgtcaaagcgcaacaaggcaatctgtgccctgtccaccatcaacccaacagccaaagccagtcatgtgaccacaatcaagatattggggaaggaggcatgactgcccagagtgggagaaggaagagagtgcatatgctttattgtttttatctaattatatatgttaaatatatgattgagaaaatgtgaaaataaagaaattatttggaaattattaaaattcctccttaatactaccacccagagagagtcaccttaacattttggagtatcaggcttgttttgaaatattctttaatattctttt

SEQ ID NO: 91969 - DNA, 656 bp, Homo sapiens
tgggcgggaaggctaacctggtgcggagccagcctgggtctcagccccgcgtacggcctttcacgagtcttcaagccttcaggctttcttctagtcaagatgagtgataaaccagacttgtcggaagtggagaagtttgacaggtcaaaactgaagaaaactaatactgaagaaaaaaatactcttccctcaaaggaaactatccagcaggagaaagagtgtgttcaaacatcataaaatggggatctcctccaaagagcagatttcagcattgcctgacagtcttggttttaggcttgtttttttgtaaacctgtgtgtttgtagagatttcagacatcttctgatttcttctcacctatattccctggttaagaggtcaggggtagtgaatgtttccttaagttcctttttaaacttcccattggtatgtaaattccaaatggcagatgctgtcaataaccttgccatggatgacctttgtgtaggtagtccttggcacctcatgcaggataagccaatttttaaactttctacaatgggtgcctcaatagtttcataatcttcatgaagttgcatcctttggcagcttcttacagtttattttcacttccaatgtagcaataaaataataaatataatagatgttgtctgaaa

SEQ ID NO: 91970 - DNA, 960 bp, Homo sapiens
ggcctttgtctcgctccagccagagctcagggtccatcttcattgcttagtatcctctgctctagtagttcccggtgactgtcgcagcctctgttgccctctgacttgcagatgctgtgagatccagagctaagactccacgacatcccggaagccgaaaaatggaactgttgacattcagggatgtgaccatagaattctctctggaggagtgggagtttctgaaccctgctcagcagagtttgtataggaaagtgatgctagagaactacagaaacctggtctctctgggtcttactgtttctaagccagaactgattagccgtctggagcaaagacaggagccctggaatgtgaagagacatgagaccatagccaaacccccaggtaggttggatgaatgaaacacatgccacaggtgaaagctccaaaggccaagaaggaagacagacttcaagagttatttgagaagctctgctccaatggagatgatttttgaggaacgtgattgtttattcttgctcttgtacagaggcatcttctgtctaatgctcctaaattctctaaaaagtaaccttactttgaggttatagtgagagccaaagtcctcttcatggcttataagagactttattatctgactgccctttcattgtcttggggcacacagaaatatatgtgtatttttgaggaactctatgttaaactatttttttcttttttttttgaaagagagtttcgctcgtgttgcccaggctggagtgcaatggctcaatcttggctcaccataacctctgcctcctgggttcaagcgattctcctgcctcagcctcccgagtagctgggattacgtatgccaccacgcccagctaattttgtatttttagtagagatggggtttctccaagttgttgaggctggtcttgaacccgcgacctcaggtgatccacccacctcacc

SEQ ID NO: 91971 - DNA, 398 bp, Homo sapiens
agtagtcactttattacataggcaggccttgacttacaaataggtccagtaaacggccaaatggcctttaggaactgaaaaccaggaagtcctatttcaaacatgctgccttggcccgggtttccccctctttctccttcactttctttcattgctctgatttaaaacactctccctcttcatactcagttgattttgttgtgtttcccccagtgtctatggctgcaggtctgtcctccctccgcagatccttgcctgtgttcttcctaacgtggacccagccagaactccttagggtcagcttcctcttcagaaatacacacgaatctgcagtgcgttgggcatcttgattatttgttcgtgtttcatctttctcaagagtcatagaaagtaaagac

SEQ ID NO: 91972 - DNA, 360 bp, Homo sapiens
gttggtcttgctggcatcttcacctaaaatagggtctggcagacaggcccatgcgctgcatcctgcccacggcctgatagatggcctgtgaatggcttttttacattttaaaagtggttgaaaacaaattaaaaatatatttcatgacatgaaaatcatgaaattcacatttcattatctgagaataaacttttatggatgcagccatgcctgtctgtccatgtcttatctgtgtctgctttgtgctacggctgcagagtggagtggctgggactgagacggaacgccctcctcacggggccgcgtctctccaccagggaccgcggggcttactctggaggctctgcttcttccccagcg

SEQ ID NO: 91973 - DNA, 394 bp, Homo sapiens
ttttttttttttaggggggccctgaaaagggccttttattggtagaaaaggacgctcaaccaccgaaaccgtaaagggtgcggccctggcgcttgagcgcgtagaccacatccatggcggtgaccgtcttgcgcttggcgtgctctgtataggtcacggcgtcccggatcacgttctccaggaacaccttcagcaccccgcgagtctcctcgtagatgaggccggagatgcgcttcacgccgccgcggcgagcaaggcgccggatggccggcttggtgatgccctggatattgtcgcgcagtactttacggtggcgcttagcgccgcctttgccaagacccttcccgcctttgccgcggccagacatgacgagcaagaggagtctcctcgtgcc

SEQ ID NO: 91974 - DNA, 4961 bp, Homo sapiens
gcatccccttgattaaatgtttttcctcctatgcaatcaccattagctgtttggctcccattctgtattcttctgaagcagccctgcattgcaaatcaatatctttctgaaaagacagtgtgttgtgaattgccttgacagcatatgcacggttactttggctgcaatgctgctgcagagcccggttactctgccttcgtgggaactccacagatatgtgtcacaaagatgtctacacggaactgccagggaatggactcagtgatcaaacccctggacacaattcctgaggataaaaaagtcagagttcagaggacacagagcacttttgacccatttgagaaaccagctaatcaagtaaagagggtgcattctgagaacaatgcttgcattaactttaagacctcctccactggcaaagagtcacctaaagttaggcggcactccagccccagctcgccaacaagtcccaaatttggaaaagctgactcatatgaaaagctggaaaaactaggggaaggatcttatgctacagtatacaaagggaaaagcaaggtaaatgggaagttggtagctctgaaggtgatcaggctgcaggaagaagaagggacacctttcacagctatcagggaagcttgtcttttaaaaggactaaaacatgctaacatagtgctacttcatgacatcatccataccaaggagacgctgacacttgtgtttgaatatgtgcacactgatttatgtcagtacatggacaagcaccctggggggctgcatccagataatgtgaagttgtttttatttcagttgctgcgaggtctgtcttacatccaccagcgttatattttgcacagagacctgaaaccacagaaccttctgatcagggacacgggggagttaaagctggcagatttcggtcttgcaagagcaaaatacgtccctagccacacatactccaacgaagtggttaccttgtggtacagacctccagatgtccttctaggctcaacagaatattccacctgccttgacatgtggggagtaagctgcatctttgttgaaatgatccaaggagttgctgcttttccaggaatgaaagacattcaggatcaacttgaacgaatatttctggttcttggaacaccaaatgaggacacatgggctggagttcattctttaccacattttaagccagaacgctttaccctgtacagctctaaaaaccttagacaagcatggaataagctcagctatgtgaaccatgcagaggacctggcctccaagctcctacaatgttccccaaagaacagactgtcggcacaggctgccttgagccacgagtattttagtgacctgccgccacggctatgggaactcaccgacatgtcttctatttttactgtcccaaatgtgagattgcaaccagaagctggaaaaagcatgcgggcctttgggaaaaacaatagttatggcaaaagtctatcaaacagcaagccctgacaagcagcacattctcaagagcacacaggattaagttgtcatcattttgggaagaaaaaaaaaacattaatgaagaggccaataatatgaagggaatcatggatcagttttctttcgctccctgtggtggatttcacttacaagaaaattgaagctggcaagaccctgttttctctgcaatttatttaaaaccttgcacgcatttggataccttgtgatttccaagaactacgtgaagattaagctttgcttagctgatacatggcatgtattcttttcagtcttttgtgtttgattttgtttgatttccctctgcatgcacagcgtctctgtaaagggtttttatggtttcaccagccatgtcttaaatacattaagacaacacatttggtgttcacacttcttcagtaatgtctgaacttgaaagccacagagtggcataaaacaatgtgtgttttctttgagagcagtgcacattttgcaaccactaggaaggaaattttctgctaaagcaaacccctgttctctgacttgacaacttggccccggactgtggggccccacctgttgcttaccttttgaggtaattttgcaaatgtggtttttttacttggaaataactgcacatttatatataggatattggactctgcttagcattttcaagccacatagcatgactgttttttgaataggttggaattgaaaaaacaattatcaaacgttaagaacaaagacagggataaattgcttacatttcaacctctagagattgaggtaactttttgtgtctgggtcttgtcaacatctaatttttttccatccattctgttacactttgtattttctaactggagaaaagagtgaggaacagaatgttttaaatctggtgcaaaagaactatatctgctggatgagccttgaaagcagtcttggcctgttagggcttacaaagtaaattacaaagtgatccagttcaaagtttgcttagttacaacaaagcacctttaaaaaaaatacattttaaaaaaacattccaagccaattggaagacatcattgggttcttactttaagacatctcctggaataactgttcaaatgcaggttttagaaacaatgcaggaatcttgctttaaagatgaaaaagggaatgggccagcttcccttactcaaggagttgagggaccttggaggatgaaggcgagtatgtgacactggagaaaagtggaccaggcatgtcttttgctttgatctggagggagggctgcctgatgcaggccggctcccagtggggcaggcctcgctgcagaatgcccagtagtactgcggccaaggggacagttaggagacttcatctaaagcatgaaacctagctcctctacacacaaattcctatggaaatacctttgtgtacagtgtcttacattttcctattagtcagaaagaaggagagaatgagtgagtgcttgaaatgtgtcatactgttttaggatcaagactaggaattaggagccaggttgacaaggactttttctgagagttgggtgagggtaaagcttttctataatcaagctcaatacaccaaggaaactggatccagaattcctaaactttaaaatggtactgtctgcggagtggagtatggatggttatgtcaaagtcatagttcatcctatccagatgtagcattcatggtaaacttttaagtgctaagcaaggaattatttactgattggttttaaagagagcagaaaacacccaagtgtagaatgtctactgtttgctacctagaaaacttttccattcctctttcatacattccaacccactggaagtctttagaggtattttgatttaaagtatacttaaattacgatttcttaaagaaaacatagggagaaaactttacatgcaattaaaaatggactttcctgtgatttgtttttaatcattcatttggagaagaggcatgacctttgtatttcactaagtttaaagcaagagcaactgatgattaaatgttgctttttaataaggtttttaacttgaaaatttgaaaatatttaatgttgaaagacttcaattagggctattagagttatatctccctgtcgtaggcagcttcttcggagaagtgaaatataacattactcagtggacggagaagtctgttttgttacagagacatgcctctcagaaggtcaggaggttttgagtacctatccttgccacccatacaggaaatccaaagtttggtgtctctctctctctctgtctctttctttctctttctccccccaaacccctctcactccctccctccctctctccttcccctatttgcaatcatattctccctctgcttcttttctcttctgccctccttgtgggcagtcatgaaaatcaattcagactgtattcattagcagatttattattctattgagaaagcactggaatgttttgtgagattatttttatatgaaggaatagcctgaactcaaacagatggtaagaatagtacaaacaccttagcacatcactgcacacacagtattctgaaaggagatttgacacttaattcccattttcttaaaataacagttttgttgacttaaaaatatgagatacataggatgtgaaaaaaaatgtttgcagtactcagcaaaaaatagggtacataaagcagggtggctgtccatccactgattctggggtgagaagcgatttctacctcgcaagagtgactagaaagtttctaggagcacctccaggcttgcaaagaaagtgaggcctcttggtatcctttcctcagtgtgtatatgacagccagtataatcaataccctaggttatgcgtctatatgatactcatctgtgaatattattggttttgtaatctttgttatataagaggatgtttaggctgtatatactggggtagattattgcctgccccttatacataggaatatgctgcataattgcgcataacttccatctcccttactggcttggaggcagaggaaactgtatatgttactgccttgtacttttctcatacaccaaaaacacaccaaaaaaatcaataaaataagcaatcttctattctcattccttttcccacagcagcatattttagaggcacatacaaaacctacattctctagttgggagtggatttttaaagttttccttttatcttttatttttttttgtatgatgcactgagatgtgtactttctaacaggggattggtacctaagaaatgtggtagcattattcagaaaactattatactttcaaatgacacatagtaaggagaatggaataatacatgttgcatatttgttaccagttgtaatttgtctgtattatgaaagatgtaatggtttgtcagctgtcactgttgttttcttgtaacatgatatggaataaagtatagcagaatctccgtaaa

SEQ ID NO: 91975 - DNA, 755 bp, Homo sapiens
ttttttttttttccttgccatgtttcacatttaataagattctttcactttaatgcataaaaccctttgaaatcaatgtcaaccaggaaaattcatgttagaaaaaaactggaatgagagctgatattctatattcagaacatctgagaaagcatttttgactattacaaaagtttatttaacaaaaagtctaatatgaaaatgtacatgacctaatttttacatcatagtaaaacaggccctatggagagaggacatgggtttctctgctgaacagccattatttatactcgttccaaggcttctaacatgatgatactatttcctcgtattaccaccattccaatattgttctgttgtccactagtcgccatctccacacattcatctatcacaaggttcataaagggatcaaatccccgcaatattccttggacatgtctgccaccatttaatttcaatgataacttcttgtccataaataaacacatttgctaagactaaagtggctttcggattctgatgcctcacgtagttttaaaaacacttccttcccttccagcccctccttagttccttcagagaatttccccctctagccgtctatctagaacatgatactattcgagatgttcaacaaaaggtagcactggagatcttcaaggaacgagggacagcgccgggtgaccaggggccagaccgcgggacctggagactagtcggccggaaggaggtgccgtggctgccggctgtaa

SEQ ID NO: 91976 - DNA, 525 bp, Homo sapiens
  misc_feature (1)...(525): n = a,t,c or g
cccacgcgttcgctgagttattggcagtttgtgggcaaagacaaaagtgcaatggcaacagaatacttcgattcattgaagcagtatgagaaaaactgcgaaggcgaggacaacatgagttgcttaactgatctttatgaaaccttggggcgatttctcaaggatctaggccttctcagtcaggcccataggtaccttttgcagaggttcttttaggagatttcgaggaaaccagctttttaaatcccccgatcaccccaaggaggtagccccaggtcccctccaccaaacttaccaaggtggtatacgtgccagtgggaaagaaagttttggccaattgccagaacaacctggtataaaccagggcggttgggaaaatcttcagaaaaatgccttatgggtggcggacccatcccattataccttgctcgtgaaactttgaaaccaccttgccaacttcttgtcttcannaaaaaaaaaacccaaacaacgggggaaccccccgagggattttttgggggcttt

SEQ ID NO: 91977 - DNA, 1026 bp, Homo sapiens; identical to SEQ ID NO: 82261

SEQ ID NO: 91978 - DNA, 2579 bp, Homo sapiens
ctttcagaggcttccggaggactgagcagctagaggtgattttgcatttgcgtttcccgacgttgccacatctcaggtgaataagttctatgaagcgctcacactagtacgtggcccctcggtggtttgtcctcgaggtcgaaggtccagatgtccaggggctgccctggactccagagtggtgcggctgagcaggctgtggtcttgggtgcttgggcacctcccgtctctccctgctcagagttcttctctcctgggcagccagaaaggatcagaaccggtcacatgcagagcggcctcccgtatcccacagcagctccgttctctaatctgggtcttcagatgcggctgtgtctcccggcaccttgctggaatgtggtgcatccctcggagtccagcagcccttaggcagagctgggtgccgagcttgagtccaggagggcctcagacacctgcgatcttgcagcctgttgccctggacagtgggtgtgctgtgggtggaggatggcgccctgcctccacggaagcatccccagcttgcccctcagtcacacgaagcgtctgtccccagcctggggcatttctgagtggcctccacttggcctcttcctttttctggagcaagtatttgaactcctgcaggcgccagagatctccttacctgtttcccgctacccttctccagccaggtttctgccctcagccagattgtcctgcagtgacttgcttttggccatggagtagtggctgctcagtgcctgagattgttttagcagcagaagggaccgggtccccctgctgctggcaacacagacgcttgcttacagttctctggtcctggacacctgaggtctcggcctccccaggacggcccttccagattctcaggaccaccttgccctccctgccctgtctcctaggtgaccctggcaaagatgagagtgcacatttcgtcctgcctgaaggtccaggagcagatggccaactgccccaagttcgtccccgtggtgcccacatcacagcctatccccagcaacatccccaacaggtccaccttcgcctgcccgtactgtggtgcccgcaacctggaccagcaggagctggtgaagcactgtgtggaaagccaccgcagcgaccccaaccgcgtggtgtgccccatctgctcggcaatgccctggggggaccccagctacaagagcgccaacttcctgcagcacctgcttcaccgacacaagttctcctacgacacctttgtggactacagtattgacgaggaggccgccttccaggctgctctggccctgtctctctctgagaactgaagggaagcgcagccacccgcctgcgtctggggtcagggatgtccccgctcctgtgtcgcacctggcacctgctcgggagcgcacctcaccggactgagctcacaggaggagcctgcacccgcgcagaaggggagccggggccgagcctccgggcctgaatacgggccagccgccgaggccgccagagcagggccgcctggtcccaccggcgtcgctgggttcttcggtgcttctggccgagcaggcggcctacttgggcagggctggacgctgggacctggagctgccgccgtctcttcaaagccatgataccccctcgtgggaagaagggaccgacgcgcgagtcgcgctccgcagtcgagccgggaggaacccaggctgctgccctgcccagcccgaccctgccccggccccgcttccaccttgcgcatttggtactggcttttgtgatacttaggaaccctggcatcttttctatattatccagtgtgataatcttttcacgttttatagagcaaagacagagcagttactcttcatattgcaatatctgtgtttgactaggaataatagtatttttatggaacatttacaaaattatattttttaagaaaacaatcaaaacaagcattgggggattggggcaaggatggaaggagcagtggggcagctgccagagctcaggcgagccatggggtctgctgtggggtctgccctggccacccactgtgtgtctgggtccttgaggtttgtacgtttctctttgatgaccaggaagaaatcccagcaccccagccacaggctgtggctgctcccagcagaggcggggccggcagagaaggggcctcctccacccagagtcctggccttggcccgctgtcaccttcaaagctgactgtgccccgctgcgggaggggacggcaccccagtggtggcagagcttgggggcctgggcaggggcccgcttggcgggccgggcaacacgtcaacattcttttctgttcttggcattaattattgctgtctttttttaaaaaaaaaaagtttaaataaaatgtctcagagcatcaaaaaaaaaaaaagggggggcccttttaaaagaacccttggggggcccaaatttaacgggggttggaaagttaaaatttttttctttatggggggcgatataaaaccctccttggaatttttggaaaagaacctttttttggggggggggaaaaatgggcccacctcccttccaaaatttaaggcttt

SEQ ID NO: 91979 - DNA, 386 bp, Homo sapiens
ccccggtggagccaaccacccggtataaagaaatccaaacaaaaattcggcatgtgtgcccatccaggcatgactgttcactgtgcatttcacttctacgtctgcactttcagcatggccacgaaactcagcacctgtttatctgccatgatttcaggcatccagattgttctggaaccatatatatcaaaagctctaaaacaccaaacccgtttctagaaatttatcctaaggaaataattggacaaatgcctaaaagatgtatgtacaaggtggttccctgctgtgttctttacagaagtgaaagactggaaatgcatcaatctcagtttggttgtctacagaacgggattgcaaaatctgatttacacgtgttacctcgtgcc

SEQ ID NO: 91980 - DNA, 8001 bp, Homo sapiens
tgtcgattgtgtatggctgatgggattctaggaccaagcaagaggttttttttttttcccccacatacttaacgtttctatatttctatttgaattcgactggacagttccatttgaattatttctctctctctctctctctctctgacacattttatcttgccaggttctaaacctttaggaaaaatggagcaatttccaaaggaaaccgttgtggagagcagtgggccaaaggttttggaaacagcagaagagatccaggagaggcgtcaggaagtgttgactcggtatcaaagtttcaaggagcgggttgctgagaggggtcagaagcttgaggattcctatcacttacaagttttcaagcgagatgcagatgatctggggaagtggatcatggagaaagtcaatatcttaaccgataagagctatgaagacccaactaatatacaggggaaatatcagaagcatcaatcccttgaagcagaggtgcaaacgaaatcaagactcatgtctgaactggaaaaaacaagggaagaacgatttaccatgggtcattctgcccacgaagaaacgaaggcccatatagaggagctacgccacctgtgggacctgctgttagagctgaccctggagaagggtgaccagttgctgcgggccctgaagttccagcagtatgtacaggagtgtgctgacatcttagagtggattggagacaaggaggctatagcgacatcagtggagctaggtgaagactgggagcgcaccgaagttctgcataagaaatttgaagacttccaagtggagctggtagctaaagaagggagagttgttgaagtgaaccaatatgccaatgagtgtgccgaggaaaaccatcctgacctacccttaattcagtctaagcaaaatgaggtgaatgctgcctgggagcgccttcgtggtttggctctccagagacagaaagctctgtccaatgctgcaaacttacaacgattcaaaagggatgtgactgaagccatccagtggatcaaggagaaggaacctgtactcacctctgaggactatggcaaagaccttgttgcctctgaaggactgtttcacagccacaagggacttgagagaaatcttgcagtcatgagtgacaaggtgaaggagttatgtgctaaagcagagaagctgacactttcccatccttcagatgcacctcagatccaggagatgaaagaagatctggtctccagctgggagcatattcgtgccctggccaccagcagatatgaaaaactgcaggctacttattggtaccatcgattttcatctgactttgatgaactctcaggctggatgaacgagaagactgctgcgatcaatgctgatgagctgccaacagatgtggctggtggagaagttctgctggacaggcatcagcagcataagcatgagattgactcttacgatgaccgatttcaatctgctgatgagactggtcaagacctcgtgaatgccaatcatgaagcctctgatgaagttcgggaaaagatggaaatacttgacaacaactggactgccctgctggaactgtgggacgagcgtcatcgtcagtatgagcagtgcttggactttcatctcttctacagagacagtgagcaagtggacagttggatgagtagacaagaggccttcctggaaaacgaggatctgggaaactcactgggcagtgcagaagcccttcttcagaagcatgaagactttgaggaagcctttactgcccaggaagagaagatcataactgtagacaagactgcaaccaaattgattggtgatgaccattatgattcagagaacatcaaggctatccgtgacggcctgttagcccggcgggatgccctacgtgaaaaggctgccactagacgtagattgctgaaggagtcattgcttctgcaaaaactgtatgaggactcagatgacctaaagaactggatcaacaagaagaaaaagttggcagatgatgaagattacaaggacatacagaacttgaagagcagggttcaaaagcagcaagtctttgaaaaggagttggcagttaataagacccagctggaaaacatacagaaaactggccaagagatgattgagggtggtcactatgcctctgacaatgtgaccactcgtctgagtgaagttgccagcctctgggaggagttgctggaggctacaaaacagaaagggacccagttgcatgaggccaaccagcagctgcaatttgaaaataatgcagaagatttgcagcgctggctggaggatgttgagtggcaagtcacctctgaggattatgggaaaggcctggccgaggtacagaatcgactcaggaaacacggcctcctggagtcggctgtggctgctcgtcaggatcaggtggatatccttacagacctggctgcatattttgaagaaataggccatcctgattctaaggatataagggcaaggcaagagtccttggtatgccgatttgaagctctgaaagagccactggccacccgaaagaagaagctcttagaccttctccatctgcagctgatttgtagagacacagaggatgaggaggcctggatccaagagactgaaccctcagctacttccacctaccttggaaaggacctgattgcttccaaaaagcttctgaataggcatagagtcatcctggagaacattgccagccatgaaccacgcattcaagagataacagaaaggggaaacaaaatggtagaggaaggacactttgctgcagaagatgtggcctctagggtcaagagtttgaaccagaatatggagtctctccgtgctcgagctgctaggcgacaaaatgatcttgaagccaatgtccagttccagcagtacctggctgacctgcatgaagcagaaacatggatcagagagaaggaacctattgtagataatactaactatggtgctgatgaagaagcagctggggctcttctaaagaagcatgaggcctttctattagatctcaattcatttggagacagtatgaaagctctgcggaatcaggcaaacgcctgccagcaacaacaggctgcaccagtggagggagttgctggagaacaaagggtcatggctttatatgacttccaggcccgcagcccccgagaagtcaccatgaagaaaggtgatgtcttaacgctgctcagttccatcaataaggactggtggaaggtggaagctgctgatcatcagggcattgtcccagctgtctatgtcagaagactggcccacgatgagttcccgatgctcccacagcggcgacgagaagagccaggaaacatcacccagcgccaggagcagattgagaaccaataccgctccctcttggatcgggcagaagaacgcagacgtcgtctattgcaacgttataatgaatttttattggcctatgaggcaggagacatgctggaatggattcaagagaaaaaggcagaaaacactggagtggaactagatgatgtttgggagctgcagaaaaagtttgatgagttccaaaaggatttgaataccaatgagcctcggctaagggatatcaacaaggtagctgatgatctactatttgaaggacttctaacaccagaaggagctcaaatccggcaggaattgaatgcccgctggggttctttgcagaggcttgcagatgaacagcggcagctgctgggcagtgcccatgctgttgaagtgtttcacagagaagcagatgacacgaaggagcagattgagaagaaatgccaggccctcagtgctgcagaccctggctcagatctgttcagtgttcaggctcttcagcgacggcatgagggctttgaaagggacctcgtacccctgggagataaggtgaccatactgggggagacagcagagcggctcagtgagtcccatccagatgccactgaggacctgcagagacagaaaatggagctgaatgaggcctgggaagacctgcaggggcgtacaaaggatcgtaaggagagcctaaatgaggcccagaaattctacctgttcctcagcaaggccagggatctgcagaactggatcagtagcattggtggcatggtatcatcacaggagctggccgaagacttaactggcatagagatcttgctggagagacatcaggagcaccgtgctgacatggaggcagaggctcccaccttccaggccttagaggacttcagtgcagaacttatcgacagtgggcaccatgctagccctgaaattgaaaaaaagcttcaagctgtcaagctagagagagatgatttggagaaggcttgggaaaaacgcaagaagatcctagaccagtgcctggagttgcagatgttccaggggaactgtgatcaagttgagagccggatggtggcacgtgagaattccctgaggtcagatgacaaaagttccttagacagtctggaggctttgatgaagaaacgggacgatttggacaaagcaatcactgcccaggaagggaagatcactgacctagaacattttgctgagagcctcattgctgatgaacactatgccaaagaagagattgctacgcggctccaacgtgtactagacaggtggaaggctctcaaagcacaactgattgatgagcggacaaagcttggagactatgccaacctaaaacaattctaccgagaccttgaggagctggaagaatggatcagtgagatgctgcccacagcctgtgatgaatcctacaaagacgccactaacattcagaggaaatacctgaaacaccagacctttgcacatgaagtcgatggccgatctgagcaggtgcatggcgtcatcaacctggggaactccctgattgagcgtagttgtgatggcaatgaagaggccatgaaggagcaactggaacagctgaaggaacattgggatcatctgcttgagagaacaaatgacaaagggaagaagctcaatgaggccagtcgtcaacagaggttcaacacaagcatccgggactttgagttctggctctcagaggcagagacattgctggccatgaaagatcaggccagggacttggcttcagcaggaaacctactcaagaagcatcagctattggagagagagatgttggctcgagaggatgcactcaaggacctgaatacattggctgaagatttgctctccagcgggactttcaacgttgatcagattgtgaagaaaaaagataatgtcaacaagcgtttcctgaatgtccaagaattggcagctgcacaccacgaaaaattgaaagaggcctatgccttgttccagttcttccaggatctagatgatgaggaatcctggatagaggagaagttgatacgagtgagctcccaggactatgggagagatcttcagggggttcagaacttgctgaagaagcacaaacgcctagagggggagctggtggcccatgagcctgccatccagaatgtgctggatatggcagagaagctgaaagacaaggctgctgtggggcaagaggagatccagttgcggctggctcagtttgttgaacactgggagaagctcaaagagttggccaaggcccgaggacttaagttggaagaatccctagaatacttgcaattcatgcagaatgctgaggaagaggaagcttggatcaatgaaaagaatgctttggctgtccgaggagattgtggagatacattagctgctactcagagcttgctaatgaagcatgaagctttggaaaatgactttgctgtccatgagacccgagtacaaaatgtgtgtgcacaaggagaagacatcctaaataaggtgttgcatgaggaaagtcagaacaaagagatttcttccaagatagaggctctgaatgaaaagaccccttctctggctaaggcaatagctgcttggaagttgcaattggaagacgattatgcctttcaggaattcaactggaaggctgatgtggtagaggcttggatagctgataaggaaacaagcctaaagaccaatggcaatggtgcagaccttggtgacttcctcactcttctggcaaaacaggacactctggatgccagtctgcagagtttccagcaagagagacttcctgagatcactgacctgaaggacaaactgatttctgctcaacacaaccagtctaaagccattgaagagcgttatgccgctctgctgaagcgctgggaacagttgctggaagcctcggcagtccacagacagaaattgctggagaaacagctgcctctacagaaggctgaggacctgttcgtggaatttgcacataaggcttcagctttgaacaactggtgtgaaaagatggaagaaaacttgtcagagcctgtgcactgtgtctccctgaatgaaattcggcagctgcagaaagaccatgaggacttcttggcctccctggctagggctcaagcagactttaaatgtttgctggagctagaccagcagattaaggccttaggtgtgccttccagcccttatacctggttaacagtggaggtgctggaaaggacctggaagcacctatctgacatcattgaggaacgggagcaggagctgcaaaaggaagaggcaagacaggtcaagaactttgagatgtgtcaggagtttgaacagaatgccagtaccttccttcaatggatcctggaaaccagggcttactttctggatggatcattgctcaaagaaacaggaactctggaatctcagctggaagcaaataaaagaaaacagaaggagatccaggcgatgaagcgtcaactaaccaagattgtggacctgggggacaacttggaagacgctctgatccttgatatcaaatacagcaccattggattggctcagcagtgggaccagctctaccagcttgggttgcggatgcaacacaacctggagcaacagatccaggccaaggacatcaaaggtgtgagtgaagagactctaaaggaatttagcacaatctataaacactttgatgagaatttgacagggcgcctgactcacaaagagttccggtcctgcctgagaggactcaattactacttgcccatggtggaggaggatgaacatgagcccaagtttgagaagttcctggatgctgtggatccagggaggaagggctatgtctcactggaggactatactgctttcctgattgacaaggagtcagaaaacatcaagtccagtgatgaaatagagaatgccttccaagccctggcagagggcaagtcatatattaccaaagaagacatgaagcaggcccttaccccagagcaagtgtcattctgtgccacacatatgcagcaatatatggacccacgggtcgaagccatctctctggctatgactacgttggcttcaccaattcctactttggcaactaataagcagctcctcgtggatcgtagaaaatcttagtgtcgtgggaaatttactggggggcaaagagtacaggcaaatgtggaagataaagatggcctcgtgtgtgtgtgtgtgtgtgtgtgtgtgtgtgtgtgcttgtgtttgtgtgcatattacatttattgtaggatctttaaaaaatctcaagggtgggagatagaaaggttaatagagttggaggagtggaagctattttgtatgcaactagtcactgctgaggggtgtcaaagtttctatttttatttgttctgttttgcacgtctttatcattttcctttattccgattatagaataaagtaattctttttaaaaatattttttggggcaaagttaagtaaaatgttgagcttctatatttctgggaactgtactcatataagagtgggcagctaattttactgtaaagaagggccatggtatagtagataaataaaatccaaggcaattttcaaacaatttttttaaactttggaatgtgtttaaatttaaatttgaaaataaagatatttgattttctgggg

SEQ ID NO: 91981 - DNA, 1456 bp, Homo sapiens
tcaccaccattacgcttagcttggcacgaggtggcacgagggtgagtgccgtcaccgagggccgcgccagactgcgacggatacagggagggcaagggtttccttttggcgcttccctttggaccccggagtgaaaaactctaacgtccagatcagtggagagaaacgcagatttaggaccctgaggagtctttttcacccgtttcccgtcactcgctcaggcgcgccgagggcagtccttgtggggtcctcgtggccagccaagatggttgcccccgcagtgaaggttgcccgaggatggtcgggcctggcgttgggcgtgcggcgggctgtcttgcagcttccagggctaactcaggtgagatggagccgctatagtcctgaattcaaggatcccttgattgacaaggaatattatcgcaagccagtggaggagctaactgaggaggagaaatatgttcgggagctcaagaagactcagctcatcaaagctgctccagcagggaaaacaagttctgtgtttgaagacccagtcatcagtaaattcaccaacatgatgatgataggaggaaacaaagtactggccagatccctcatgattcagactctggaagctgtgaaaaggaagcagtttgagaagtaccatgccgcttctgcagaggaacaggcaaccatcgaacgcaacccctacaccatcttccatcaagcactgaaaaactgtgagcctatgattgggctggtacccatcctcaagggaggccgtttctaccaggtccctgtacccctacccgaccggcgtcgccgcttcctagccatgaagtggatgatcactgagtgccgggataaaaagcaccagcggacactgatgccggagaagctgtcacacaagctgctggaggctttccataaccagggccccgtgatcaagaggaagcatgacttgcacaagatggcagaggccaaccgtgccctggcccactaccgctggtggtagagtctccaggaggagcccagggccctctgccgcaagaaacagtgtgagctactgccacgctgaaaactacctgtgggttaaggatgtagttcctttgtaagggtgggcaggcctcgtaagaaagatgtagcagcatattcactatccgttaatccttctttctttgaggctggaacttgctctctctgcccctatttccttgtaaagagggagcacattgacttgggaatttcctccaggaaactcagggctgttttctcttcccttaggttggggcggacctttggacatataaaggaagcagttttagtatcagaaaagatttattagaaaattctcacgctgaactggtgtagcatgtggtgcagcattcagtgaaactggctggaggaaataggcttgtttccagagttgtccttatacaaaatgtataaaaagcagtttctggtgtgaaaaaaaaaa

SEQ ID NO: 91982 - DNA, 358 bp, Homo sapiens
aaaataaagcttcaatattcacctataaccctaacatccttaacagcttagcagtgtggtaactggcacaaactatggcgtcttggtcatatccaacctcagtgaaggtagttcacatcctaaagatgagctgaatgctgatagctttgaggacttgtttatttgggggaagggaaagagatggtgagggtagagataggaatctgtctgtcgtaataggatttggtctgtgtattaatggaatgaactggccttttttgctctgcttcttttgtccttgctgagaagggaggctgaagtttccaagagttatggatgaagttggagagtattataggaactgttctctgaccttctg

SEQ ID NO: 91983 - DNA, 1973 bp, Homo sapiens
cggctgctggcccgggtgacacttccgcctgctataagagcagcggccctcggtgcctccttcctgacctcgcacccagctcggagcccggagcgtgcctcggcggcctgtcggttttcaccatggagcagctgagctcagcaaacacccgcttcgccttggacctgttcctggcgttgagtgagaacaatccggctggaaacatcttcatctctcccttcagcatttcatctgctatggccatggtttttctggggaccagaggtaacacggcagcacagctgtccaagactttccatttcaacacggttgaagaggttcattcaagattccagagtctgaatgctgatatcaacaaacgtggagcgtcttatattctgaaacttgctaatagattatatggagagaaaacttacaatttccttcctgagttcttggtttcgactcagaaaacatatggtgctgacctggccagtgtggattttcagcatgcctctgaagatgcaaggaagaccataaaccagtgggtcaaaggacagacagaaggaaaaattccggaactgttggcttcgggcatggttgataacatgaccaaacttgtgctagtaaatgccatctatttcaagggaaactggaaggataaattcatgaaagaagccacgacgaatgcaccattcagattgaataagaaagacagaaaaactgtgaaaatgatgtatcagaagaaaaaatttgcatatggctacatcgaggaccttaagtgccgtgtgctggaactgccttaccaaggcgaggagctcagcatggtcatcctgctgccggatgacattgaggacgagtccacgggcctgaagaagattgaggaacagttgactttggaaaagttgcatgagtggactaaacctgagaatctcgatttcattgaagttaatgtcagcttgcccaggttcaaactggaagagagttacactctcaactccgacctcgcccgcctaggtgtgcaggatctctttaacagtagcaaggctgatctgtctggcatgtcaggagccagagatatttttatatcaaaaattgtccacaagtcatttgtggaagtgaatgaagagggaacagaggcggcagctgccacagcaggcatcgcaactttctgcatgttgatgcccgaagaaaatttcactgccgaccatccattccttttctttattcggcataattcctcaggtagcatcctattcttggggagattttcttccccttagaagaaagagactgtagcaatacaaaaatcaagcttagtgctttattacctgagtttttaatagagccaatatgtcttatatctttaccaataaaaccactgtccagaaacaagtctttcattttctttgtaagtttggctctgttggctgtttacacccatgaattttggcatgggtatctatttttcttttttacattgaaaaaaatccaggggttgcttttgaatgcatcaagtaaagaagaagaaaagaatacatccgatgcgtagattcttgaccatgtagtaatctataaaattgctatatcctcctgatagccatgggaaaacatgataagatggtcatttattttgcagttagaattttggaagccacaaaatagacagacaccctgactgttgaagggaggtttaaaaacagatattcaattgaaatgtaagagagcaccccaattgagagcccaggttacgaagacaagcttgcctcgcctgacttttctgtcccttgttctgcaggattagtattctgttacagacctctagtttttagactcttcaattaaagggccaatggttataacctgcattcccttttttgttcttctttatgtataatatatagttcatgtggcgctgcatgaaatcaagaagtgggtgtcttaggataaaagataccaagagtctacaaaaataaccatgtagtaagataaac

SEQ ID NO: 91984 - DNA, 391 bp, Homo sapiens
ctcacattgtttcaatctcttgctttcatcatcacatctcctacttcctcttctggagtcaaatctctctctgcctttttgttttaaaaaatctaatgtgatccccttatccttgagggagatcgaggccgaggccactgtgacaatgttccaccaggtagcatgttgcaggggtagagcgcagtgtgtttggagatggtgcaggagggacgactttaacttgcagcaactgagggtgaacacattgggctcttgctggagtgcatctagtgtgtgtgtgtgtgtctttctctgtttccactcgagtatcagagacttgcttataacctttatgatatttttctggatagtgggaattgccttgtataatgtttcttttgctgaataattt

SEQ ID NO: 91985 - DNA, 5352 bp, Homo sapiens; identical to SEQ ID NO: 59050

SEQ ID NO: 91986 - DNA, 4300 bp, Homo sapiens
  misc_feature (1)...(4300): n = a,t,c or g
gaaactggatacatggtttacagcaggtcactaatgttggaaaaagtacagagtccagggaaagacttgcttgtaactttatgaattctggattttttttcctttgctttttcttaactttcactaagggttactgtagtctgatgtgtccttcccaaggccacgaaatttgacaagctgcacttttcttttgctcaatgatttctgctttaagccaaagaactgcctataatttcactaagaatgtcttctaattcagatactggggatttacaagagtctttaaagcacggacttacacctattggtgctgggcttccggaccgacacggatcccccatccccgcccgcggtcgccttgtcatgctgcccaaagtggagacggaagccctgggactggctcgatcgcatggggaacagggccagatgccggaaaacatgcaagtgtctcaatttaaaatggtgaattactcctatgatgaagatctggaagagctttgtcccgtgtgtggagataaagtgtctgggtaccattatgggctcctcacctgtgaaagctgcaagggattttttaagcgaacagtccaaaataataaaaggtacacatgtatagaaaaccagaactgccaaattgacaaaacacagagaaagcgttgtccttactgtcgttttcaaaaatgtctaagtgttggaatgaagctagaagctgtaagggccgaccgaatgcgtggaggaaggaataagtttgggccaatgtacaagagagacagggccctgaagcaacagaaaaaagccctcatccgagccaatggacttaagctagaagccatgtctcaggtgatccaagctatgccctctgacctgaccatttcctctgcaattcaaaacatccactctgcctccaaaggcctacctctgaaccatgctgccttgcctcctacagactatgacagaagtccctttgtaacatcccccattagcatgacaatgccccctcacggcagcctgcaaggttaccaaacatatggccactttcctagccgggccatcaagtctgagtacccagactcctataccagctcacccgagtccataatgggctattcatatatggatagttaccagacgagctctccagcaagcatcccacatctgatactggaacttttgaagtgtgagccagatgagcctcaagtccaggctaaaatcatggcctatttgcagcaagagcaggctaaccgaagcaagcacgaaaagctgagcacctttgggcttatgtgcaaaatggcagatcaaactctcttctccattgtcgagtgggccaggagtagtatcttcttcagagaacttaaggttgatgaccaaatgaagctgcttcagaactgctggagtgagctcttaatcctcgaccacatttaccgacaagtggtacatggaaaggaaggatccatcttcctggttactgggcaacaagtggactattccataatagcatcacaagccggagccaccctcaacaacctcatgagtcatgcacaggagttagtggcaaaacttcgttctctccagtttgatcaacgagagttcgtatgtctgaaattcttggtgctctttagtttagatgtcaaaaaccttgaaaacttccagctggtagaaggtgtccaggaacaagtcaatgccgccctgctggactacacaatgtgtaactacccgcagcagacagagaaatttggacagctacttcttcgactacccgaaatccgggccatcagtatgcaggctgaagaatacctctactacaagcacctgaacggggatgtgccctataataaccttctcattgaaatgttgcatgccaaaagagcataagttacaacccctaggagctctgctttcaaaacaaaaagagattgggggagtggggagggggaagaagaacaggaagaaaaaaagtactctgaactgctccaagtaacgctaattaaaaacttgctttaaagatattgaatttaaaaaggcataataatcaaatactaatagcaaataaatgatgtatcagggtatttgtattgcaaactgtgaatcaaagcttcacagccccagaggattccatataaaagacattgtaatggagtggattgaactcacagatggataccaacacggtcagaagaaaaacggacagaacggttcttgtatatttaaactgatctccactatgaagaaatttaggaactaatcttattaattaggcttatacagcgggggatttgagcttacaggattcctccatggtaaagctgaactgaaacaattctcaagaatgcatcagctgtacctacaatagcccctccctcttcctttgaaggcccgagcacctctgccctgtggtcaccgaatctgtactaaggacctgtgttcagccacacccagtggtagctccaccaaatcatgaacagcctaattttgagtgtctgtgtcttagacctgcaaacagctaataggaaattctattaatatgttagcttgccattttaaatatgttctgagggttgttttgtctcgtgttcatgatgttaagaaaatgcaggcagtatccctcatcttatgtaagtgtgaattaatattaagggaaatgactacaaactttcaaaggcaaatgctccatagctaaagcaacttagaccttatttctgctactgttgctgaaatgtggctttggcattgttggatttcataaaaaatttctggcaggaagtcttgttaggcatacatcagcctttttcatcatccaagtttgtagttcatttaaaaatacaacattaaacacattttgctaggatgtcaaatagtcacagttctaagtagttggaaacaaaattgacgcatgttaatctatgcaaagagaaaggaaaggatgaggtgatgtattgactcaaggttcattcttgctgcaattgaacatcctcaagagttgggatggaaatggtgatttttacatgtgtcctggaaagatattaaagtaattcaaatcttccccaaaggggaaaggaagagagtgatactgacctttttaagtcatagaccaaagtctgctgtagaacaaatatgggaggacaaagaatcgcaaattcttcaaatgactattatcagtattattaacatgcgatgccacaggtatgaaagtcttgccttatttcacaattttaaaaggtagctgtgcagatgtggatcaacatttgtttaaaataaagtattaatactttaaagtcaaataagatatagtgtttacattctttaggtcctgaggggcagggggatctgtgatataacaaaatagcaaaagcggtaatttccttaatgttatttttctgattggtaattatttttaacagtacttaattattctatgtcgagagacactaaaatcaaaaacgggaatctcatttagactttaatttttttgagattatcggcggcacaatcactttgtagaaactgtaaaaaataaaagtatctcctagtcccttaattttttcataaatatttctggcttttgagtagtgtatttatattgtatatcatactttcaactgtagacaattatgatgctaatttattgtttcttggtttcacctttgtataagatatagccaagactgaagaaaccaaatatatgtgtttactgtagcatgtcttcaaattagtggaacttagttcagggacatagaagagtcttaatgaattaaaatcattcacttgattaaatgtctgtaaatcttcatcattcctactgtagtttatttaatatctattgtaaattatgtgacttgtagcttcctctggttttcaagtaaactcaacaaggtggagtcttacctgggtttactttccaagcattgtaaattgtataccaaagatattagttattacttctgtgtgtacaaagaggattattttattatgtttattaatcacctctaatactcatccacatgaagggtacacattaggtaagctgggcgttgactcatgcgcaatctcagtcacccgtgttatcttcatggctcaaaggacaatgcaaaatcgccgatcagagctcatacccaaagcattacagagaacagcagcatcattgccctccccagctgaaaaacaagttggctagaagatacatggagaggaatggtgttgtcaacagttaatgaaacggttctatcatgcatgtgtaatgtggatggagacaattataagatttgactataactatntggagggtctttaacattgccaaaaaaac

SEQ ID NO: 91987 - DNA, 1575 bp, Homo sapiens; identical to SEQ ID NO: 59812

SEQ ID NO: 91988 - DNA, 968 bp, Homo sapiens
atcagcttaggtagaacagttctcggtgagggccagctacatacctggctaagcgctgcccactgcagaaaagctcatcacccgggacctgatctccaggactcagaagcacttggaggaaggcctattcacttagaagcagttaccagtgctgggcagtgtcctccaagtgccagaggagtgctgtggagaaaagaagtccatggaagccaggagatgggcaagattttgcctcttcaaggtgaatgcggcttcaaggggctatctttgtgctcctgccccacctggggcccatcctggtctggctgttcactcgtgatcacatgtctggttggtgtgagggcccgaggatgctgtcctggtgcccattctacaaagtcttattgcttgtacagacagccatctactctgtcgtgggctatgcctcctacctggtgtggaaggacctgggagggggcttggggtggcccctggccctgcctcttggcctctatgctgttcagctcaccatcagctggactgtcctggttctctttttcacagtccacaaccctggtctggccctgctgcacctgctgctgctgtatgggctggtggtgagcacagcactgatctggcatcccatcaacaaactggctgccctgttactgctgccctacctagcctggctcaccgtgacttcagccctcacctaccacctgtggagggacagcctttgtccagtgcaccagcctcagcccacggagaagagtgactgaggccctagggcatgggagaggagggacgcccagggtggggaggaagagtctgcaagcagggctgtggagttagggttcaccccaatgggaccaccctcctgggtcccctggagccgtttttccttagaaatcagagaaatgggaaagggggggaaagggatttcacacttaaataaaaaaataccaccagcaactctgaaaaaaaaaaaa

SEQ ID NO: 91989 - DNA, 381 bp, Homo sapiens
  misc_feature (1)...(381): n = a,t,c or g
tctcncgccagaatcctgatagtcaggatcaaagagaatggcaccggtgaacacagatgccacagataaagacatatccaagttcaaggtcacctccactttggtggtctccggaatagagtgcatcactggcatccttgggagtggcttcatcacggccatctatggggctgagtgggccaggggcaaaacactccccactggtgaccgcattatgttgatgctgagcttttccaggctcttgctacagatttggatgatgctggagaacattttcagtctgctattccgaattgtttataaccaaaactcagtgtatatcctcttcaaagtcatcactgtctttctgaaccattccaatctctggtttgctgcctggct

SEQ ID NO: 91990 - DNA, 661 bp, Homo sapiens
tctggctttagccttgagtacagtatggactgaatggagactactaggctctcagccatctgctgtgttctggtagtgctctacaatcatgtgtctctactacttctttgcaatgtaaatactagtgtaaaactactcagccacaagctctgagagagatcgagagatgttcttctcttaatagaaataagtcatttggtggaataactcttcgagtcaaccagtgtaagtaacagagacaccaaaaactagccattagtttagtttgcttgacccagcaatctacctcttagtatatgctttggtgacactcatgtacttatgcaccaggtggcaggtgtgtactagaattaagatattcatagtagcattgtgtcagacagtacaaaagtggtatccacaaaaaaagggaggaattatcagtgaaaattactgaactttggacacacacacatcctgccaaccttcatcaaaaaaagcattatttcttattctccatcctaacctagataagcggaagagaagaaggaatttttttaaaaaagtcctgatagctggaaaacttcccttcctgtatcccaagttatgaaaaacttttggggttgagggtgccaactgcgattccctaacacccacttgcgatactccaataaaggaatcg

SEQ ID NO: 91991 - DNA, 355 bp, Homo sapiens
tccttattgctggtaaactatgtttcatcaatgctactaatgaaactgtccaaaaacaaaagatatgaagaaggtaggttagtcttaaagatgtttaggttagacactaaccactgctcagcaactcccttcaatttgagctgaagcttagaatcccattgggatgattcatctatcaatgcttactgagtggctattctatgtaaagcatggtttaaagtgcaggcaaacagaagattcagtccttgccttcatgtttacagagcaaaacgttaagaaaatcaatatttacaaatatgggataaatgtctcacatacagtgatgctcagtaaattcactgatagctcgagaggt

SEQ ID NO: 91992 - DNA, 772 bp, Homo sapiens
caaacaaataaaaaattaagttgccctattaaattaccaatttttttcttctctctcactgtcctgtgcctcagaataggatttctgcctactttaaatttgacccactgtagtgaaattcttccaccctcttgtagacagtgttgaataataaaggattgaattaacccagaaataatcagtgacataaatggatctattatagtttacagaatgactaaacaagccaaccagtcagtgcatttttacattgttttcctttccacccaacattgggaagcattaatttattttcaatatctgaaaatgttgatttcattcttctatttcctttttccaggtgccctgggctctatgagaatgcaccagcatgggacagattcttgatcttctgaacttgcttccctttctgcctatctacttttcttatacacatattaataatttatgttaatggagttattatatcgcacttgccctaattctactacatggatacttaagcagtgcacttaccgtggcattttggtcaactaaaatttttaatgaaatttaggtgagttgattacacattatcgcacaaattattagcagcattaatagaaaaaatatatccgaaaataatcaggtcaggcatggtggcttacgcctgtaattctaacactttggaaggccaaggccggaggcttgcttgaaccccggagtttaggaacagccctgggccaaataagcaggaaccgcgtctttaccaaaaaattgaaaagggaaactg

SEQ ID NO: 91993 - DNA, 2338 bp, Homo sapiens
cctgagtgctcagtcgtaaagaggaaaggcagaatttttccttgctatggctggaacaaacgcacttttgatgctggaaaacttcatagatggaaaatttttaccttgtagctcatatatagattcttacgacccatcaacaggggaagtgtattgcagagtgccaaatagtggaaaagacgagatcgaagccgcggtcaaggccgccagagaagcctttcccagctggtcatcccgcagcccccaggagcgctcacgggtcctgaaccaggtggcggatttgctggagcagtccctggaggagtttgcccaggccgagtctaaagaccaagggaaaaccttagcactggcaagaaccatggacattccccggtctgtgcagaacttcaggttcttcgcttcctccagcctgcaccacacgtcagagtgcacgcagatggaccacctgggctgcatgcactacacggtgcgggccccggtgggagtcgctggtctgatcagcccctggaatttgccactctacttgctgacctggaagatagctccagcgatggctgcagggaacactgtgatagccaagcccagtgagctgacttcagtgactgcgtggatgttgtgcaaactcctggataaagcaggtgttccaccaggtgtggtcaatattgtgtttggaaccgggcccagggtgggtgaggccctggtgtcccacccagaggtgcccctgatctccttcaccgggagccagcccaccgctgagcggatcacccagctgagcgctccccactgcaaaaagctctccctggagctggggggcaagaatcctgccatcatctttgaggacgccaacctggatgagtgcattccggcaaccgtcaggtccagctttgccaaccagggtgaaatctgtctctgtaccagcaggatctttgtccagaagagcatctatagtgaatttttaaagagatttgtagaagctaccagaaagtggaaagtcggcattccctctgatccactggtgagcataggtgctctgataagtaaagcacatttggagaaagtcagaagttacgtcaagagagctcttgctgaaggtgcccaaatttggtgcggtgagggagtggataagttgagcctccctgccaggaaccaggcaggctactttatgcttcccacggtgataacagacattaaggatgaatcctgctgcatgacggaagagatatttggtccagtgacgtgtgtcgtcccctttgatagtgaagaggaggtgattgaaagagccaacaacgttaagtatgggctggcggctaccgtgtggtccagcaatgtggggcgcgtccaccgggtggctaagaagctgcagtctggcttggtctggaccaactgctggctcatcagggagctgaaccttcctttcggggggatgaagagttctggaataggtagagagggagccaaggactcttacgacttcttcactgagatcaaaaccatcaccgttaaacactgatctttgctaatggtggagccactatggccaatgcctggctgcaggcatcagttgttcaatgtggtagatgaaaatcatggcatgaattccagctatgccttgacttggcagaaggttatctctagcttatcctcagttcttagtaactttacccactagtgaagagatactgtctattttcaatgtggactcggaaaaaaagacttataagtaggaagatagaacaatgatgccagttgtcaggctcctcccaggttatgttttcatagtgtttctttcatcatcttcattgaactcttgggaatctccagataatcagattatttcatttggtaaattttaaaaaatatgcaatcaggcacagtgcctcatgcctataatcccagcactttgggaggccaaggtgggtggatcacttgagttcaggagttcgagatcagcctaggcaacatggtgaaatcctgtctttaccaaaagtttaaaaattagcttggtgtgggtgccctctgcctatagccccagctacttgggaggctgaggtgggaggatcgcttgagcccaggcggttgaggctgcagtgagccatgatcattccactgcatttcagcctgggggatacagtgagaccttgtctttaaaaaaaaaatgctgcaaaaccaaaaataaatagccataatttgccatctttggagagattatggagataatctccttgtctattagccactagcatggctaattgatcattgattggacctcattacataagggggctgtggacgtctttggaatttgttaggggaaggctatgtggtaagctctactaaa

SEQ ID NO: 91994 - DNA, 1620 bp, Homo sapiens
accgggtcgacccacgcgtccgagtatccgttccgccaaggggggaaaggaggagctggagacagattgtaggaccgagcgcgggcaggcgggaggcaacggagctaccagccgctcctctctgctatatgaaatatgggagacgacagaccgtttgtgtgcaatgccccgggctgtggacagagatttacaaacgaggaccacctggcagttcataaacacaagcatgagatgacattgaaatttggcccagcccgaactgactcagtcatcattgcagatcaaacgcctactccaactagattcctgaagaactgtgaggaggtgggactcttcaatgaactagctagctcctttgaacatgaattcaagaaagctgcagatgaggatgagaaaaaggcaagaagcaggactgttgccaaaaaactggtggctgctgctgggccccttgacatgtctctgccttccacaccagacatcaaaatcaaagaagaagagccagtggaggtagactcatccccacctgatagccctgcctctagtccctgttccccaccactgaaggagaaggaggttaccccaaagcctgttctgatctctacccccacacccaccattgtacgtcctggctccctgcctctccacttgggctatgatccacttcatccaacccttccctccccaacctctgtcatcacacaggctccaccatccaacaggcaaatggggtctcccactggctccctccctcttgtcatgcatcttgctaatggacagaccatgcctgtgttgccagggcctccagtacagatgccgtctgttatatcgctggccagacctgtgtccatggtgcccaacattcctggtatccctggcccaccagttaacagtagtggctccatttctccctctggccaccctataccatcagaagccaagatgagactgaaagccaccctaactcaccaagtctcctcaatcaatggtggttgtggaatggtggtgggtactgccagcaccatggtgacagcccgcccagagcagagccagattctcatccagcaccctgatgccccatcccctgcccagccacaggtctcaccagctcagcccacccctagtactggggggcgacggcggcgcacagtagatgaagatccagatgagcgacggcagcgctttctggagcgcaaccgggctgcagcctcccgctgccgccaaaagcgaaagctgtgggtgtcctccctagagaagaaggccgaagaactcacttctcagaacattcagctgagtaatgaagtcacattactacgcaatgaggtggcccagttgaaacagctactgttagctcataaagactgcccagtcactgcactacagaaaaagactcaaggctatttagaaagccccaaggaaagctcagagccaacgggttctccagcccctgtgattcagcacagctcagcaacagcccctagcaatggcctcagtgttcgctctgcagctgaagctgtggccacctcggtcctcactcagatggccagccaaaggacagaactgagcatgccgatacaatcgcatgtaatcatgaccccacagtcccagtctgcgggcagatga

SEQ ID NO: 91995 - DNA, 832 bp, Homo sapiens
gtagatgtttgtatcttagaatggctttcctgagtcttcacactctttttgttatgaacttttaaataagtaacttaggagaaagcttcacccattgaagtttacggttatattaattgggtgtgtgtttaaaaagtagttaaacaggtagagctaacttctcattaggttgttttagagattatagatttaaagacttttggtttacctgatgctggcatatccttttcttttaaaatttcaacctttaaagtcaccaattaacttcagcaaaagtgatgtggttaatcagtacagtatttagaactatatgtaatgcaatacttaccgacattaaaactaatttgcaatacctggcagctttaaaaagactaaaaatgatgtgtacaatctgatttttagtctatagaaacaaatatattttgagggtataggtttggccaaacatctaacgtataaacctttgggggaaagaccccagactacatatttataattaagggcatggttactctgtgaagctttctaaaaccgggtcccttaaatggagcagtcaccctataaagccattttttaaacacaggatcttatggcccgcgttagctttttcctcccccggggaaggtacccagttcagacccctttttcaaaccggggattggggggcctctggccccaatgtgtaaaaattttttggccccccaagccccaccgccttaggcccccccccacatcatctttacccccgcccggccgaccggggaaccgccccaccaatcatcacaacaacactggacgccctcgggcgcttgccccgtcgaccccctcaacg

SEQ ID NO: 91996 - DNA, 1853 bp, Homo sapiens
cgcggcgcgggccggcaggaagcgtattctgggcacggggcgccgggcgggccggctgcgccgagcggcagtggtgggataccacccaaggcctcgcgcggcgccgcccgtcgaggggcgggcggcggcgtagccactgggccgtcgaagagcgcaggaggccggtgggccgggccgggccgcgcggcgcagccatgccctggctttacgtgctgcgtgccaggctgctacaacaactcgcaccgggacaaggcgctgcacttctacacgtttccaaaggacgctgagttgcggcgcctctggctcaagaacgtgtcgcgtgccggcgtcagtgggtgcttctccaccttccagcccaccacaggccaccgtctctgcagcgttcacttccagggcggccgcaagacctacacggtacgcgtccccaccatcttcccgctgcgcggcgtcaatgagcgcaaagtagcgcgcatacccgctggggccgcggccgcccgccgaaggaggcaagcagcaacagcagcagtagcagcagcagcagtagcagcaacagcagcagcagcagcaacagcagcagcagcagcagcagcagcagcagtcctcaccctctgcctccactgcccagactgcccagctgcagccgaacctggtatctgcttccgcggccgtgctttctcacccttcaggccactgtagacagcagtcaggctccgggatccgtacagccggcgcccatcactcccactggagaagacgtgaagcccatcgatctcacagtgcaagtggagtttgcagccgcagagggcgcagccgctgcggccgccgcgtcggagttacaggctgctaccgcagggctggaggctgccgagtgccctatgggcccccagttggtggtggtaggggaagagggcttccctgatactggctccgaccattcgtactccttgtcgtcaggcaccacggaggaggagctcctgcgcaagctgaatgagcagcgggacatcctggctctgatggaagtgaagatgaaagagatgaaaggcagcattcgccacctgcgtctcactgaggccaagctgcgcgaagaactgcgtgagaaggatcggctgcttgccatggctgtcatccgcaagaagcacggaatgtgaactggtgccccggcagcctgctggactcccagaccccatccagccaggggaccgcaggccattgttgaactcctctatactcctgggcactggttgacagtactgaggcttaaggcagctggactctcttgctggtgacctggcatcctcaattgtttcctcctgaagtggaagctggggccttagactctgccctggtgacaccagcaattatgactttgtctacccttcctccccagttattgttgcagattctggttaagcagaggcttcagaaccactgaacttgaaacttaccctctagggatgcaggtgggatgtccagggactataggtttgggaaaaccataccttaaggttggtcagcagtcagacaactctaatgtgtgtagtgataagagattcaagtaacatcagttctcctccttttcatgcttttccttcccaggtgcagcctgtgattctgatggggactggtaaatctgtgcctctgcctcctaggacttattttcccaggaggccatttacaaggggatctggatgacctgctgatggagatccagcttgccagggacttaggtttatcctgttttgtttgctactggttacaaattctattttctgtacaattagtcagactaaagttttcactgtgtttgtttggcaaaacaaattaaacaaaaagtaaggtttttaaaaaaaaat

SEQ ID NO: 91997 - DNA, 945 bp, Homo sapiens
  misc_feature (1)...(945): n = a,t,c or g
atgttgactgttctgttcagtgtctattgtcttgttagtagttgtgaaagttttcatgtcaagacgttgatattgcccaagacgtctaagtaaaaacttcttcaaagtccttagtgctgattttttgtcacaggaggttaaatttctcatcaatcatttaggctggtcaccacagtcctgtcttttctgccagaagcaaatcaagtgttgttacaagaacaagtgtgaaaaacatttccctaattaagatttctagcaccatgaaagttgtaagtatttagatcatcatattccacgtccaagtgattagacgtcctctaaactaaaccagtagtgaattcaaaacagccaccctgcagatttcctcactcacctctcttgtcattctgtaacttttcctgtgcccttaagtagaacactgtgtaaagaaatgtacgcccgtactgctttacttcgtttagattcttactctgttcctctgtggctactctcccaccttaaaagtgatccgagtagtccttttccaccttgtccctgccccctaccccgcacatctccttttccggtgagacagcaagttctgcgtctccaggacttggctctgctctcactccttaaacccttaaaagaaaaaactaagtttaagctatttgcctttaagtcataaagacaccaaaagtatttaaagtgcagatctagaagaagaagaatgcctagatcaaactgacccagaagatctcaggctggctctagtcctcctccctcgatcttaaagctacagcaatgtagcaagtagtattagctgttgtaagtttttctgctctttgtagtcatgttgattctgttctatcactactccagtcccccaagaaataagtttctctgtccatgctaagnttaatatcaatgctcaaatcttattaaaatgccttcacaaaaaaaaaa

SEQ ID NO: 91998 - DNA, 753 bp, Homo sapiens
  misc_feature (1)...(753): n = a,t,c or g
gcacgaggaggcttccgtcaccccagggctcttccaggaaaggctggcagggcccgcgggtgccctggagctgcctgcaggagtcaggcactaagtcagtgggagccaaggttggaaaggaagacccccttccattccatcctgaatgactccatgggtgagtgggacccaggacggctgcccttcagagctcagcccagttcccagagacgagacggtgagatggttaccaggatggtccctgccccttggccccggcctctgtttccagctgctccccttagcatctgcacaattgcctagtgaggccatcatgaccctgtgggcacagacttctgggactgatgcctgtggttgtggcacccccaccctcaccccttctccccacaggctgaactttgatccacacttttcctttgatttcaccgtctcctcccacgcctaaaataacatacaggcctttggctatttccaaagggtttctgggaactgcgccccagtgaggaggcttcccagcagccttggccttcccttcaggcagactcctcatccacagtcaggagcccacaggtctcagttcactgacctgctgagaaagaagaaaaaccttccacacccttaaaaaaaaacaaaacgagaaagggttttttttttaaggcgggcgcaagcgtttacccttttgtggggggggttatttttttgttggcgcccgggggcgggtttttaaacagggggggnagggggggcgggaaa

SEQ ID NO: 91999 - DNA, 1882 bp, Homo sapiens
ttttttttttttatggttatgacttttattaatcatatctgctgttattcccaaacttctcaatgttacatgaatactaacccttgttttatataaaatatgactaaagtaaatttacctacaggtgcctctctccttcattggtgattaaaatttcacgccagagactaaacttcattgaaactactgcaagcatgtgtatgatagacccatttagctaagtatctggcattgtggccagaaaaaaaaaaaaatcggttcctacaaaatctcttgggcaacacttaagccatggaagagcccacatgaatccaggtctactttcctttacaggtagattccagaacaacaacaaaaaatgtaagactacaagaaatgatttaatatgataaaactcccatttcaaaacccagttctaaaggatttactgactaatgctgattatttagtcatggaaaatgtctctcataaaagtgctcctaacaaaacatgatctacaataatttataaaatgtgaagggttgggatgtgcagactgattggtgcacgtcaggttgtttctcttaaataaggtataaaaaactatgatatcatagtcttttgactttattttctgagataaaaaagtataggcataggtgtttttaatagtcttcttgatgatatcctttagaataatctatcaaatggcttctttcatgtttcctgattatcagcattcatcagtgttactgtcagccttgattaagtggttgaaaatttcagagaagaataagcaacttctgtgaacctttccccaatccctgagaatcataatcattacagaaatattttatcctttcatcaaatatctctggaaagtagccgtgttcgttcattgttaatagggcaaggtgcagtgtcatagagggttaatccatgtaaattggcttccacccgtaaagaaattttctgaaaatcacgaatgtaagtcaggaaaaaaccaaagaaggaaaatgacatagaccattctgctgcagtagtgatcatgtgaagcacataacctttgtcctcggggttccaatggagtttctgttctaaatcagtcccaaaattgccactgtgcaaaactgatgagcaagtcagcatgctaagtgcacttactccacaccagataaccaacaacagtctgatccagaagacttgtttgccatggattttgggctgcatttggtaggaaaggatggtctgaacaaacatatataatgagcccataccaaaggtaagcacagctccacttacatgtgcagcaaaaagggttgttttctggaagtttgccacaatagaaagtcctaaacaactcagtattccaagtacaaggccagccttgtttaatttgatgataacgttctcttcaggactcagagcatgaacttgcttataacgaacataaatggtagcaatgcataaaactgccgcaatatttagcattgccccaaataagcatttttctggagctactgtaccagtgtcactgatataaggtaaagccgggtctatatggtggagtgttactgcagtaatgtatgaaaatatgaaagcagcagatgtccaaattacaagggctgaaggaaggaaactgaggccttgctgaaaccaccacatttctaacaggttttctgttttacaacttcacaaaatgttagtcttcagacctgctcatacctgcaccttttgtaaatccagaggaattaattagaccgctgattttctccggaagcgcgaagcactaggccgtttgaggatctccgctccgctttgcctgggaccaggaaaagacgcgagagacggaactcggcatcaggcactgcttggggcaggaggagagtaggggaaacttacc

SEQ ID NO: 92000 - DNA, 383 bp, Homo sapiens
gtcccagccttctctgagttaccaaagttactcttctgcagacaggacacagtagtagcacccaccacaggggatttgatgagataaagcatgagagcacttagcccagggcccggcccgttgaggtgccaggcaaacatgaaagctaacaatcaaagggtcctgtgaggccaccccagaggacaggcagtgcccagcaaaggggaaatccagctgcccaagataaggccgaggggcgagccgcagggaccactcctcaggcgcctgctggctataagcagcaggctggctctggactttcctacagaaattccaccagctaggcaacatcattgtcccacttttcagatgaggaagcagccgcactaggactctgaagagtc

SEQ ID NO: 92001 - DNA, 1862 bp, Homo sapiens
cattcacaaaagaccagagggtacttggtccccagtactgacctgaaagtgcacgcatttaatactgctctgaactcaaggttaactctagcagaattaaggagtcctcgtttttttaacttattaaaggtcactctatgatccagagctggaagaactgcttctaaaaagaacgtcctaatgaaggcaggacccaaagttatttccagttcctagtcctgctttctgtagctgtaggtatcagtatagttggctaagataacaagaacagagagattggcccactctgggaaccaaatttacatgttttgcacttaagttagtcaaattcatttttaaaaattaggttatcataaagacttcagttatggaatagaaattccataactcgcaagtagaggggaatgggaggaagaattagtcaactaaaaagtgcatgtctttccaaagcaggtgtaggaggtcaagaggggctcgaggcttctggaagttttgctcctttacaggttttgatctagccacttgatgtaactattcctagtccggattcccactgagaagttggtgggccagctagtgaaaatcatacatccgtgaaagccatcctcaaagtgatccagggtcacctccacaccggcactctccaaacgcttggcatacatgatgccatcgtctctgaggacatcatgctcacacgtcagaatgtaggtctttgggaggagctgcagcactgcctggtctgcaatgagtggggcggagcgggcatccagcaactgaggaagctcctggacaatcctggcattgcctgtggtctgtacaacaggcttgtagttctttgtgaaggatgcaggcaagagggatgtccagtttagacgggccctgacagcagcagcctcttccacatcaagtgaagtgtgattgttaacgatcattgcctgcacaaagtcatagttgcctttgaagtagtccacccaatacttcaccatgacatagcggggcaggattggggtgttcacattttgctgataagatggtgtgttaaaatctaaagcttgaagaactggataaattaaagcttgtagtttgagcttattttttaggctggcatcttgagtaaactgttgtccaagggcagcagccagatttccaccagcactgtcaccagaaatgcaaattctgcctggatcaaccatatacttctgtaagacttctggcttcaggaaatactttgtggcccgtacaacatcatgaatttgctcaggaaaataaacctttggaactagcctgtattcaatggaaacaatgacagcattcaattcctcagccattgctgtacacagctcatcataatacctgatttttgcacttgccaaggcccagcctcctccgtggatataaacgacgctgcgtttcagtggctcttcgggcttcggagggccttcaaacactctgacttccacaccatcaaagtctgtgtcggtcaccttcacttgggcagaagaccacgcgctttttttgccaaaagaaacaatgataaaattcagtgccagcaggtgatggctcagtcccaggtagtggatcaggttactcagctcctctttgtacctctggtagaatttggctgtgaatctgtctggccctggaatttttttggttggtaggctattaattattgcctcaatttcagaacctgttattggtctattcagggattcaacttcttcctggtttagtcttgggagagtgtatgtgtccaggaatttatccatttcttctagattttctagtttatttgcgtagaggtgttcataatattctctgatggtagtttgtatttccatgtagggcttggtgccagccat

SEQ ID NO: 92002 - DNA, 2699 bp, Homo sapiens
atcgcgtaatggcggacacaggcagggcgagcgcggctgggggcgtagcgcgctgagggggtccggccgtttggcagcccgcgaggcggtccgcgggagcacactctgtgcggagactgggcggccggccgacccttcctgtcgctgacggcgactgcgggaggccaggttgtttttcaccattcagaacattgcctgaagcaggtccaccatgccgttagtaacgaggaacatcgagccaaggcacctgtgccgtcagacgttgcctagcgttagaagcgagctggaatgcgtgaccaacatcaccctggcaaatgtcatccgacagctgggcagcctgagtaaatatgcagaggacatttttggagagctctttactcaggcaaatacctttgcctctcgggtaagctcccttgctgagagggtcgaccgactacaggttaaagtcactcagctggatcccaaggaagaagaagtgtcactgcaaggaatcaacacccgaaaagccttcagaagttccaccattcaagaccagaagctttttgacagaaactctctcccagtgcctgtcttagaaacatacaatacctgtgatactcctccccctctcaacaatcttaccccttacagggacgatggaaaagaggcactcaaattctacacagacccttcatacttctttgatctttggaaggagaagatgctgcaggacaccaaggatatcatgaaagagaagagaaagcataggaaagaaaagaaagataatccaaatcgagggaatgtaaacccacgtaaaatcaagacacgtaaggaagagtgggagaaaatgaagatggggcaagaatttgtggagtccaaagaaaagctggggacttctgggtatccacccactttggtgtaccagaatggcagcattggctgtgttgaaaacgtggatgcaagtagctatccgccaccaccacagtcagactctgcttcttcaccttctccttccttctccgaggacaacttgcctcctccaccagcagaattcagttacccagtggacaaccaaagaggatctggtttggctggacccaaaagatccagtgtggtcagcccaagccatccaccaccagctcctcctctaggctctccaccaggccctaaacccgggtttgctccaccacctgcccctccgccacctccgcctccaatgataggcatcccacctccaccaccgcctgtaggatttgggtctccagggacgcctccaccaccctcacccccatctttcccacctcaccctgattttgctgcccctccacctcctcctccaccaccagcagctgactacccaactctgccaccacctcccttgtcccagccaacaggaggagcacctcctcctccccctcctcctcctcctccggggccccctcctccccctttcactggtgcagatggccagcctgctataccaccaccgctttctgataccaccaagcccaagtcctccttgcctgccgtgagcgatgcccgtagcgacctgctttcagccatccgtcaaggttttcagctgcgcagggttgaggagcagcgggaacaagagaagcgggatgttgtgggcaatgacgtggccaccatcttgtctcgtcgcattgctgttgagtacagtgactcagaagatgactcctctgaatttgatgaggacgactggtccgattaactctttctgcctgctgcccaccttctttttctttccttcctacctgccttctttgatgccaaccccaacagacccgtagggggagaaaagggaggaaaaaagtaattttaaggggccaaagctttccctgaagcaaccaaagatatatccaagtgcttcctccaagtcaacatgtatttcctctccccattttcaggccctgtggggctcctgaggttcagtagctgggatgttccctctttccttcaagtgcctgttgcatattgaaaggaaggagaaatcccaaagcagattcctttgatcgggtttctgttggagatggggcttcccttaggagccatattcaactacagccttctaaaacctgtgccctcagccacttcgaatgccagccaccttctggttctaaaacggggagtggtctgaatgaacacagctgacccctttcccgcgcactgaaagggcagagtaggccgaagggtccaagggccagactgcctcaccctctgccctaatcagcagggtgggcctgccttttgctaagcgatctctatgcctgggatgccctttattccaggaggcatcaagcctctaaagaatgtctcacctcctctgcccaaaaatgatgcctttctgtaggctggtgttgttgcctccctcccaggatccctttggtgagtatggtgttcaggatgcaccaccaccacctctagataccttcaggcaacacagcccagttttaacctctagtatccatgaccaaactatccctgacacatgaggacaggggcctcttctggctgtcaggagcaaagcctgaagacttggagctgcaggactggaagaacagtggagccccgtgggtctcaccctttaaggatgctgaggcctagagatgggaagtgacttgctcaaggtcacacaattggatagtgacatagctagagcgcagagttcctgattccaagtcacctgtgctttctgggaccaa

SEQ ID NO: 92003 - DNA, 2455 bp, Homo sapiens
ggcggggcaccacccgcttccgtgcccgctcgagaatcccccgtatctggcgcgcagggaagttcccgaacgcgcgggcataaaagggcagccggcgcccgcgcgccacagctctgcagctcgtggcagcggcgcagcgctccagccatgtcgcgcggcctccagcttctgctcctgagctgcgcctacagcctggctcccgcgacgccggaggtgaaggtggcttgctccgaagatgtggacttgccctgcaccgccccctgggatccgcaggttccctacacggtctcctgggtcaagttattggagggtggtgaagagaggatggagacaccccaggaagaccacctcagaggacagcactatcatcagaaggggcaaaatggttctttcgacgcccccaatgaaaggccctattccctgaagatccgaaacactaccagctgcaactcggggacatacaggtgcactctgcaggacccggatgggcagagaaacctaagtggcaaggtgatcttgagagtgacaggatgccctgcacagcgtaaagaagagacttttaagaaatacagagcggagattgtcctgctgctggctctggttattttctacttaacactcatcattttcacttgtaagtttgcacggctacagagtatcttcccagatttttctaaagctggcatggaacgagcttttctcccagttacctccccaaataagcatttagggctagtgactcctcacaagacagaactggtatgagcaggatttctgcaggttcttcttcctgaagctgaggctcaggggtgtgcctgtctgttacactggaggagagaagaatgagcctacgctgaagatggcatcctgtgaagtccttcacctcactgaaaacatctggaaggggatcccaccccattttctgtgggcaggcctcgaaaaccatcacatgaccacatagcatgaggccactgctggcttctccatggccaccttttcagcgatgtatgcagctatctggtcaacctcctggacattttttcagtcatataaaagctatggtgagatgcagctggaaaagggtcttgggaaatatgaatgcccccagctggcccgtgacagactcctgaggacagctgtcctcttctgcatcttggggacatctctttgaattttctgtgttttgctgtaccagcccagatgttttacgtctgggagaaattgacagatcaagctgtgagacagtgggaaatatttagcaaataatttcctggtgtgaaggtcctgctattactaaggagtaatctgtgtacaaagaaataacaagtcgatgaactattccccagcagggtcttttcatctgggaaagacatccataaagaagcaataaagaagagtgccacatttatttttatatctatatgtacttgtcaaagaaggtttgtgtttttctgcttttgaaatctgtatctgtagtgagatagcattgtgaactgacaggcagcctggacatagagagggagaagaagtcagagagggtgacaagatagagagctatttaatggccggctggaaatgctgggctgacggtgcagtctgggtgctcgcccacttgtcccactatctgggtgcatgatcttgagcaagttccttctggtgtctgctttctccgttgtaaaccacaaggctgttgcatgggctaatgaagatcatatacgtgaaaattctttgaaaacatataaagcactatacagattcgaaactccattgagtcattatccttgcctatgcatgatggtgttttggaggatgagagggtgctatccatttctcatgttttcccattgtttgaaacaaagaaggttaccaagaagcctttcctgtagccttctgtaggaattcttttggggaagtgaggaagccaggtccacggtctgttcttgaagcagtagcctaacacactccaagatatggacaaacggtggacgcggctggcagaagggacttcacgaagtgttgcatggatgtttttagccatcgttggctttcccttatcaaacttgggcccttcccttcttggtttccaaaggcattcttattgcttgagttatatgttcactgttcccccctaatattagggagtaaaacggaataccaaggttgatttagtgtttttacctctgtccttggctttcatgttattaaacgtatgccatgtgaagaaagggtgtttttctgttttatattcaactccataagactttgggataggaaaaaatgagtaatggttactaggcttaatacctgggtgattacataatctgtacaacgaacccccatgatgtaagtttacctatgtaacaaacctgcacttatacccatgaacttaaaatgaaagttaaaaataaaaaacatatacaaataaaaaaatcccgactttgggatgagtgctagg

SEQ ID NO: 92004 - DNA, 547 bp, Homo sapiens
cacgaagccgggccttgttgccaaaacagttggggattgttgctgtataaaacataacttcacccatgaatggtctggcccggtgttccacaggattgaaggcacgtggttttagaatgtcactctttgcatttcgatcttcttttctatgttgtgggaaatcctcagtgaggccaactgttttccattcacaggctgccaatttgagctgtggaaatgagattgctggactcttcctttgtcttagtcaggattctcttgatggccgatgatagaaagtcagcccaaggaactctggcaagaaggagcctgtctgccccagagctggtgtgtctggtggagaatgcggggcccatgcctggtcccaccgcctccctccgtcttttgtcccttcttggctccaggcttcctgcaggtgcacctcacccagggagttttggaagctacatcccggttgggcaggtgcaggcatggctcaaggagatgggggtctacgaagagggcggggcagggataactgttggccgggcgatagcgctacacttaa

SEQ ID NO: 92005 - DNA, 1225 bp, Homo sapiens
agcttggagattgaccaagcagccaagaaacccaagaaaggcaaagagatggtggataaccagaaacaagtcaaatgtccggaagatcaagttggacaggtggactgcaacattttcaaagcaaaagaatcccgttgctgtcgtgatgtgaaaccagcaccagttctgctggccacgcgccttgtcggcatgcagcacagggtcccccagcagagcccacaggcctgcggctgtgctctgaacaccaaagactgcacgcgtggccgccaggtcccagaagaccttctctctggccaccaaagaacggtaagtggcattcagggaagaggacagctggtggcagaccacaaagacgcccaagtagaagacaaagccagcgaccatcagcgtggagcggatcccccaggatgcatagtccaggtcaaaaatgctctctgatgtgcccccatcgctcgcaggattcattgtccacagctatattccaaaggagtcctggggccaacacgggccgggccctacactgtgtcttgtctaaggaaatgaagtcagtgcagcggtccctgggattgtcacgtatccatcttcaatctaaaagaaagatcattcattttgtgttgactcgatagaaacaaggacacatcacttaccccaggaacgcaaacattatactacaaaatatttaattctgtaccttattcttaatgaacttacaaggatgcataaacataccaagggaacatccactgacagtataggaggaaagaaaatgaaacttaagcgttagagcggtccaccaccaatcagaaggccgaatcgttgctggcaggaacacacggtcctatgctcgtcctatgtgcaccccaccagcaagtctcccgccttcacagcagtcccaatcagtcacacaattcaggcatcgcacgatgaaacatgattaagtcattacactgggatacactttgttacagcactgaacttctgctgtttgattctacgtgacactcccaggatgtcacgaaaacctgtgctcccgggcttcaagggatttccctggtaaagggcccggaaggcttttcaacagaacaaggaaaggctgaacttcctccttggacctacggacctttgaaaagggaatataaattatcctttcttgtttcactctaaccatccctgcattcacttcatgctatactttcaatctttgaaaaattacactctctggacc

SEQ ID NO: 92006 - DNA, 618 bp, Homo sapiens
tttcgtcgcatgactgaccgcgccactaccacagcttccttaacgttcgagtcgctttatggcacacatcacggatggctgaaaagctggctgacgcgcaaactccagtctgcttttgatgcacatgacattgcccaggacacttttttgcgggtaatggtcagcgaaacgctctcgacgatccgcgatcctcgctccttcctctgcactatcgccaaacgcgtgatggtggacctgtttcgccgaaacgcgctggaaaaagcgtatctggagatgctggcgcttatgccggaggggggagcgccttcacctgaggaacgcgaaagccaactcgaaaccctacaactcctcgacagcatgctggacgggctaaacggcaaaacacgtgaagcgtttctgctttcgcaactggatggtctgacatacagcgagattgcgcacaaactcggtgtttccatcagctccgtgaaaaaatacgtggcgaaagccgtcgagcactgcctgctgttccgtctggagtatgggttatgaatcctttgttaaccgattcccgccgtcaggcgctgcgttcagcttcccactggtatgcaggtcagctgcgagcaatcactagtcgca

SEQ ID NO: 92007 - DNA, 2803 bp, Homo sapiens
  misc_feature (1)...(2803): n = a,t,c or g
gcgtgctgctgggcctgagctgtctgtctcgtttctgtccgcgcgccctgcatcccggccccgggcgcccgctggaggtcgccgaggagccacagggctgactggtctgctgcccgggcccaggagtgcctggtgtagcagtcgcggagccatcccggcgtctgctgccatgaccgactctcccctcagaggagactcttcctcagcggtggctgcagagacagatgagcggcggctcctggccgcgggaccgtgagacgggttcgtggccggccatttagggggacgctgcgaccaccgcctgcgcccctccggactggttccttgggccccggaagctcgcggcgggccctgcgggaggcggcatgctcccgcggaggctgctggccgcctggctggcggggacgcggggcgggggcctgctggcgcttctggccaatcagtgccgcttcgtcacgggcctgcgcgtgcggcgcgcgcagcagatcgcgcagctctacggccgcctctactccgagagctcacgccgcgttctcctcggtcgcctctggcgccggctgcacggccgtcctggccatgcctctgccttgatggcggcgttagccggcgtcttcgtttgggacgaggagaggatccaggaggaggagttgcagagatctattaatgagatgaagcggttggaagaaatgtcaaatatgtttcagagctctggagtccagcaccaccctccagaaccaaaagcccaaacagaagggaatgaagattcagagggcaaagagcaacgttgggaaatggtgatggataagaaacactttaagctgtggcggcgcccaattacaggcacccacctttaccagtaccgagtttttggaacctacacagatgtgacacctcggcagttcttcaatgttcagctggacacagagtatagaaaaaaatgggatgccctggtaatcaagctggaggtgattgagagggatgtggttagtggttccgaggttcttcactgggtaacccattttccttatccaatgtactcacgggattatgtttatgttcggcggtatagtgtggatcaggaaaacaacatgatggtgttggtgtcgcgtgctgtggagcatccgagtgtgccagagtctccagaattcgtcagggtcagatcatatgaatcccaaatggttatccgtccccacaagtcatttgatgagaatggctttgactacttactaacatacagtgacaatccccaaacggtgtttcctcgctactgtgttagttggatggtttccagtggcatgccagatttcctggagaagctgcacatggccactctgaaagccaagaatatggagattaaagtaaaggactacatctcagctaagcctctggaaatgagtagtgaagccaaggccaccagccagtcctctgagcgaaagaacgagggcagctgtggccctgctcggattgagtatgcttgacaggctttgggataagaagggacaaggtgcttctagccctgtctcagtccgttatcactctgctgtagaagggggacatgccacatgtattagaaggcatctgctgtaacttccagtgcaagataattcaataactgatgtcccatttcattcagagcccttattgctcttatcaaaacagaagaaggctacatttgtgggagtgttgtcatattctcaggccaactgttttgaaattcggtatctcactgagctaatctggaacaaacctctcacctcaggccagaaggggatgacctccatttgcttctctgagtagtttcctctgctgacattccaaatcccaccatcgattgtgcagcgctttggatttccttcagttctccaggtccacctggaaagtatagttggccagttgagtctctcaaatgaggggctactgggagtgctcttggtaacaatcatgatgtgaatgggtgtgaacgatacttggctatgttaagtgccttgtccgcaccttgcttttatctctagagacatgaagttattattaattttttttttttttaagtagagatggagtttcactctgtttcccaggctggtcttgaactcctgggccatgcctggccagggacatgaatttgtacaaagaaatttccctccctgcctgcacaatatcacccattgactcaccttatccaaagcaagtttcctgtgaatcggccagttcttctatattcattggatcattgcctccttcctaaccttccccatttaccaagaacactgggagactaatccttttagatagtagctttttgatgctcaaaacatcacatttaaatttagtttaaaaattttttaacttttgtgtcaaataggagttgaggaattgagcaggattctaccctagtccgattgtatagaaaacaccattttgattcaggtattatttttcatatttcaggtttgacttgttcttttcagaaggctaaagtcagaggaatgggggctgggccactcccttggagctctcagatctacagacaagctgtgtgaatgcatagatgtaatcttgtctcaaatactaatacagtggagatttggtttatgttaccattaagttcctctaaaaagtttttcttcctctcttcagagccaaaataaaagtgaactacactgttcagataaggtcacaatctgatgctgtcagtttgaccgagctggttttgcttatggtcatgctgcaatttgttagaataatagggatcaagttttaaatcctcctccttccctttgttctggagtcttgaagccanaat

SEQ ID NO: 92008 - DNA, 1608 bp, Homo sapiens
  misc_feature (1)...(1608): n = a,t,c or g
gcaaagccaggaagacncagagggaaacaggtttttctcacatgagggaagagcagcctgcatcacttaatggttggactgagttaatgcaggacttaggcctcttaaaaggcaacaatgagaacccttacttggacccactccccaccacggttgatctctcattatgctgagcatatctcttggaaaggggcaggccgggcgcggtggctcatgcctgtaatcccagcactttggaaggccaaggttttgctagagacacgtgcccaggccctatgggcacacccacttgaacatatattcaggagccagctcagaaaccaagagactcaggctgcccaaatcttcaggtttccttcctaggcaggcagcagaagagttcagacaggaaatttctctctgtggcataacacaaatggaaagaaaacctctaggggacacacaggaagaaataaggtttctgtttcttcctcaagtgtcccaagtgccatggcagcaatggccttccaggtccatacatggagcaggttttagtaggtcagcccagcccaactgcactgacatgagggagcaggcagaagacaggaatgtgcatgttgccagaaggggcagagggcactcagggattctcagtaagtacaactgactggagtgtttttgggtagaaggaagaattgagttgcagccaggcgaagacagagcacccccatgccaggagctcatgctgaagtaacacggtaagcccctgagaatcctgaatctgtgaatgtggcccagacagaacaggcatgcaggcaacacttggaatgcacaggaaatacacttcagcctctggtggcccaaaccaagtctgggtgggcacagaaaggccaacatcttggctaggagcaaccattcaagtgtaggagagcaagttcaggtcataacagccatccacatcaaagcggccgatccttgcggaggtgtgactggcccggatcatctctgtcagtgcccacatctgctgcacctcggaggataccctgctggggtctgggagaccctcacggaggagtgcaggttgctcacagggcactgggtgggagagccacttgggaaaggtcacggaggggctctttggtccctgctgatagatctgcagctcctccactgtgaaagacagccacagtggtgatggctgccgcagaatcaggcgtagctccgatattctagccatgtcacacagcatctgatgcttgaacagcgatacatactcctgggctccctcctcactgtgtgggtcaggcattaggcagtagtcccgcaggcaggtcacccacttggcaggtgtgtgtgctgaggtgtactgacggacacggatgctcaaaaaagctgtgtagtaattcttaaacgtgatttcctgcaactcgaagggagcgacgctggggaaggtgacatcgatgaccagcacgccaggccggccttgggaggtccgcacgtcgcccacctggagggctacggagcctttcacatggcaaggcaccaaaacgcgggacatggtgacagcagccgcaactaagtgcaaccgccgctctaggcccccgaccaccagcccttcccggcacgaaa

SEQ ID NO: 92009 - DNA, 1472 bp, Homo sapiens
ccttttcggagatttgaatttcccccagcgaggcgaagtgaggcgaaatacccgtatggtgatagctggccttttcgcgccaatactgaaaaaggcagaacgttcctccgctggcgccagccaatcagcaggactcctgccttccttcggggcaaggtcgcagcatctgcctcggaaatcacgaaatcacggggcttctttctgctggctcagccgggaggcccagagtgttctgcagaggctgcgtattgaaggctgctctctgaagctccctgccccaggtcacgccgccggttccagatgaatccagagtgggggcaggccttcgtgcacgtggccgtggccggtggcctctgtgccgtggctgtgttcacgggcattttcgacagtgtttccgtgcaagtgggctatgagcactacgccgaggcgcccgtggccggcctccctgccttcctggccatgccgttcaactcactcgtgaacatggcctacacgctgctggggctgtcgtggctgcacaggggcggcgcgatggggctgggtccccgctacctgaaggacgtgttcgcagccatggccctgctctatggccccgtgcagtggctgcgcctgtggacgcagtggcgccgtgccgcggtgctggaccagtggctcacactgcccatctttgcatggcacgaggcctggtgcctctacctagaccgcggctggcggccctggctgttcctctctcttgagtgcgtctccctggccagttatggcctcgctctgctgcatccccagggcttcgaggtcgcactgggtgctcacgtggtggccgctgtggggcaggcgctgcgcacccacaggcactatggcagcaccacctcggctacctacttagctttgggggtgctctcttgcctgggctttgtggtcctcaagctgtgtgaccatcagctcgcacggtggcgtctcttccagtgcctcacaggccacttctggtccaaggtctgtgacgtgctccagttccactttgcgtttttgtttctgacgcatttcaacactcacccaagattccatccctctggcgggaagacgcgttgaacccagggaagaacctgctgaaaaccgatgacccccagcattgaaatggactctgagatggcagcgtggtgcccagtgtcagacatcctgtgtgtgatgatatgcactgatcacacaagactgccctttcctgagaagctgcgggcttcggtgtggaggggtggagtgctgtgatctcgacaacttactttcaaagacataaagcacagatctccgcacaggggatgtgtggtgttcctgatgtaatttgcataacttttctgtagtttgaaatgtttccaaataaatattggcaaggggagtggaaatgacaccaagaagcccctcatgtctcatggttggacagagaaaaaacaacaacaaaacaaaaaaacacaaagtcgacc

SEQ ID NO: 92010 - DNA, 391 bp, Homo sapiens
aatacaatgtgcctgatcctgctttgtgttccagtaaggagggtgagaaaggtcactaccagcactagcaacagtctctattgatacatgtttattaagcatatgtagaagagctgcaaaatgatagctaaagatgactttcaagttgcacatttgcaagagtaaatatatggcatagattccattttcatctctaggtgacatttctcagcctcccctgtggccagtatgaacatgtgactaagtggtcaccaatggaatgtgagccgacattaaggaccctgagtcctaagccttggggaaacatgctgcccccatgttcttctctcctcccctccaggtacgatgatgacctgacctggaacacgcaggtgaggacaatgtcctataa

SEQ ID NO: 92011 - DNA, 734 bp, Homo sapiens; identical to SEQ ID NO: 60127

SEQ ID NO: 92012 - DNA, 2759 bp, Homo sapiens; identical to SEQ ID NO: 59533

SEQ ID NO: 92013 - DNA, 1932 bp, Homo sapiens
cgtgcgcatgcgcggcaggcccttcgggacgagctggaggcagagcgtgagtacaaagtgatcggcctcggccgcacgtagtagcccccctactccccggccaagtcagggcctccctcttcccgcggagtcgcaaccacgggtagctcgtgtaggtaacggcaggtccaggcctccgcatgagcggagggccccccgcgcgaccttgaatggcccgggcgcgcgcggtcgtgtgggagttgtagtcctccgtccccgtccgcgcggactccgtttcccgtggtgccccgggcggcccgcttccggcgcagttagttacgagtcggcgcacgcggcctcggtccggttgactttgcggagccatggagggcggcttcggctccgatttcgggggctccggcagcgggaagctggacccagggctcataatggagcaggtgaaagtgcagatcgccgtggccaacgcgcaggagctgctgcagaggatgacggacaagtgtttccggaagtgtatagggaaacctgggggctccctggacaactccgagcagaagtgcatcgccatgtgcatggaccgctacatggacgcctggaacaccgtgtctcgcgcctacaactcgcggctgcagcgggaacgagccaacatgtgaccggcgagcgcgggccaccccaccctgttcatttccataaacgtgctttgagaggcggggtccgcatgtacgtactgcctgcccggggcttaggagggtggcaccggtgctgggacacacgggactgtgtcctcgccaccccccgccctgccccctgccagccagtgcagcttggatctcgggggtgtggggccctgtgccttcctgaagtgctggcagcccagtggcacctccttcaggcctttggggtattcccctagtgtgcccaagtcagcctcatattctgggcggacagcttgtctggacttcggagttgggggtggtcagacaccacaggagctgtcacctcctgcggatgggcaaataaattggtggaggacggagagaaacctctttatttccctactgaggggactctgggaagaggtgacgcgtgtccctggaaccccagctcggagggtctcagcctcccctgggttgggagaagtccatctttccccttagtgccaccgggctgctgagtcacgaggaatgtgttgctgctgccacccctgccccaaaggctaagggggacagccttccccttgtcagggcttgctttgaccctgcttcgttccaccccgggtcctggtggagcaccaggcaggtggtcctcgctgtgacactgaggtgctgagccagtgagctagggtggaggggctgtgtttattggaacaaagggtggtaccaaaatgcatccccatgacccacagcccccccacacccgtccttgggtagggtacggtggggtggggtgttgggtggcctgctgctcctgttgctttcacgtagagtctcggcctgggcagtcacgtggtggtcactcctggatgtgctgtcctatccagcctctcacagctgccacccgggtatagacacctgggaagtggggccggccacagccatagccccagctagtgaccccagttagcacccaccgtccagagggctccctgcaggccaggggtcccccagcgtcaccctgttggggagagaagaaagggggttcagaggccggtacctcccctacagcagcccttgggtcattggcccctctaggagtgaccctagtgacttcccctgggagccgcattttcactatctggaaaatgggctcaatgcaaaggtggcagacatttatggacacccgccacgtggtcccggagtggaacggtgcctcccactgcagcctctgcctgctctgccgccgaggcccggggatgggatgcggtgggttgcccaa

SEQ ID NO: 92014 - DNA, 3685 bp, Homo sapiens
ttttttttttttgcaaaatgaaacaagtttattttctccaataacttctgtaaattacaaagacaaaatactaaaaactacagcatataagcttttcaatatttaaccagagtactcgtaataaatatgcatccggaaacaagataaaaggctacacctcgtcaggcatcctacaaaaatgtctcaagttttatatactctgcagcatttctgtgcgggggcagaaggggctgttgtgtattttctgaagtgctgtgacaaaaggtcctttcacatttctttggagcatttttgaaattgcttaactataattaaacaacttaagaaaagtaacaccaagctttaaagccatttttgctttgctgtcattggtccttatccaatacagatcaacatatcatccagcacagccaagcacccactgaggccaagcagccttgtgggacatgggccctgtcagagcaggccctactttcagttaaatactttggagagtccaggattctgtctctctccctcaacaagattaatgccataagggaagttgcaagcgtgttagaaacatttttaacctgaaagtaaagtgaacagaaatattttttttccgagacctctgctatgcacccataatattacccatatcagggtttttagcttcaaagttgaaaaacagaattggtacctaacagtcccctcctagagatcatttatgggcgctggtagagtcagggcattcaaaacattcaacgggtaaaaggaggatttgctagattcagaaatgcgctacaattctgaagacaccatggctgaaagttctaggggtgttggtggcagctcatattaggtctggcatacataactaccttttgctatagctgaaaactttaaggaaaaagttatatttttaaaaagtctcaagcatggctacctaaaaagtattttgttaatataatctactgtaatttcacttatttaggagttcagatatgaaaacatctttatgagccaataaaaatattacagagaaaaaaatacttctacaaaagttgaggttaagaactatgaggcatttcttttggctgtaaacacacagtttactgtcccttgttgaaacacaaatgtttggatttcctgagcttcacagataacagcaggaggcaagtttgcatagaaaatttgcagtatgtcaacaatttacttaaaaaaagaacttttaaggacaacttgcttttgtttttaagtttcatattttagttaatagtgctcatcaaactgaatattgataagcagggtgatgagatatataaggcagatgggaagaaaacatggaattagagtttttaaatccacaggatatcatgatgaagggttttaagcagatacttcataactagtgccatactaatttagttagaaattaaatcatgttttggaattgaaagccaaaggcaaaaagagctctcctgtgctgaatggcactgcccgagtacaggaatggaaggagcattcactgcaggaggcctcagcacatcactcggtggtgataaagccactcagccagtcagggatggaggagggggcccccctgccagcatcaggaccagacctctgggcatggctgatcccagctctggaatctgaagggatgacagggactttcacctctgctggtttgaagtctctaagcagttctgaggcgggcagtcttctcctgggagaagtcctcagaaacctttggaaagggaagaagctacgctaggccacagtgcataccacgaatgagaacaatggcagcggctgccgacaactctggatctaacacaaagacagatgacaaggggcagtgtcctgccaaggaatccactttacttcttttgagactggtttttacacatggtaaggatttgcttcagtactttctggacatcttcatccatctggccctgcacagcatacagaagatgcattctgtaaactgatatgacctcctggtgttgtttcttgcattccgccagctggttctggagctgtttgacttgctgctgcagcgcctccagctgctgactctgccttttggatgagcttgttgagtaggagagctgggagaggctgttcaaggcctccttcaatttggtgacttccttcgacatctcatttatctttttatctttatcttcctccagttttgaagagctctcagagtatcttttcatttctgcaagttcttcctgagcttgctggaatttttgcagaagttcatttacttcttgctctttggatttcaagagagtctgaatattttccttttctcttttcacctgtgagacctcacttctaatctggacaacctctgaatggaccttctctttctctttcacagattcctttaatttcgatgccaacacactcacttcactctctaaggatgactggagtttttcataggaagaccgaggtaccattgcatcagtcatagcagctttctcttctaagagttgtttctccagctttgctacttccacttccttgcttgcaaggtgttccttaagattgcttattttttcttccatctcttttgctgcagtccgcagcgtggttatcacttgcaaatgttctgtgatagagacagagttctctttttgtgcatccaccagttgtttgagctgggtcaactcattcaacacttttgaatactgagacttcatttcagacagtgcatcttctgctttagccctggacacgtttgtcaattgcatcagtttctcatgctctgctttatggatatattcagctgtgacatcctctagagatttcctcttcctgtaatcctccagctcagcctgggcttctttgtacagctgtgacagctcgctcacctgtttattgagttcatctatcatcctattcatggcttctttcatgtcctcagcttcatcactggcttcctgtgtcatctgactttttagtgtgtcttttaattacatgatttcttcttgggcttcttgggatttctcaaacaaaaatgctttctccttattcatattctcaataacagagcaatatgaacttttcatttcctcgtactcttccacaggtggcttaatcactgtacctttctccctctctaccagtttttcctctaactctctcactttctctttatttctttcactttcttctaatgcattctgcagatcctgctttagcacatttatttcctcttccgtgaccctcagctcgtggaaatgtgaataattatccatgctttcaggtgagacaagaccgagtttcatctgcttctgcacactaaggacttctttcatagcctcctcgtatttgctctgagtttctttaagtttctggctgaggtcagagctgttctctgaaatctcagtgttgtttaagcataccagttctgcccttcgggattggagttcgacctgtagctgttttctctctgcttcagagctctctaatctcttctgtagatcttgcaaaatctcttgcagttgctgaattctgacatcattgtcagtagtggatttacctaaagaatgtattaagacagatggagatgatttggagtctgggggagaggtttcaccaggttttcccagggatgggcccaagtcagtttgggtggaatggtatgagtcaaagcttaggtctgcttccgcctccttgg

SEQ ID NO: 92015 - DNA, 2116 bp, Homo sapiens
tttcgtctctctggaggaggctgggctgccgggcctgtcctccaaggaagaagcagcaccaacttgaagctggatgcagccttgcatgtgttctcaggtcttctgcctcagtttccctgcctgacaatccaggggagcaatgcctgtggggctgctcactgcccccagaccttctgcacatgtgtgactcctgtgacatcatctgtctccaggtttccagacttctcagccccacccttgcagcagcaggtcagcctggcttttagaaagagaattttatttggaatgaaaatatagagcccaccctcccgcctcctctggggagggagcagagggctgggcagtggtcggggagatggtccctcagaggtcgaggagctcgcctgggcgtagacatcctccacaggaacagtgaggaaagctgggcgctggcttcggcctgggcctgggacgggtgggggtgggaactgacccctgcgctgcctcagaggctctgggcagccagctagcccggtgcgacccgctggcagaagctgagtgggaagggggcggcggaggagatgaaggtggcgtgtggctgtggccctacgcatccccgttctccatgcggcccagctgctcctccaggcggcagatgcggtcgccctgctccttgaccagcgccctcagggcccgcagctcctgcatcacctcctccagcttcccagcctccccggctctggccaggctgccgctgggggtggcatcagcagcagtggtggtggaggcgggggcccctaggtgggaggagcccggggccatggcgggccggctgtcagacaacacgttgcgccggctgatcttcaggtcccgctgcttgctgggcacgtaggcctcccgcagtgagatgaggatcgggtcggcatcccgcccgctcacccactcctcagcctccagggctgcctcgggcccggctgtgtcggggtacagatcatcctggaagaggtccgactttcttggcacagtcatgacgatgggctcacacttgcgctcatgcagtttgtagaaccgggcgatctcgcacttgctgacctccaggccccgcttgggcatgctgcccataccccgctgcggctccttgctggtgaacgtgttcaggaagtggatgtagggaggctcctctgtgatctcaaagtaccggatgctggagtcacccttgccgcagacgtagaccacactggtgtcggggtcgtagaagggcagcagggccccgttgctcgagtccagttcctgcagggccatgggttcctcgaggttttctgggtcccagagcgccagctgccgctcgctcattcggctgaagcctgtggtgaacaccttgccatctgccaggaagatggcccgcatgggccgggccccctcatgagccttctcccgctctgccaccagggtgccccgacgggggtcgatgatgcgcacgctcttgtccttgcatgctgagcaaaacaggctgccattgtggttccagctgacattgtagatgaggtcagggtgcaggctgtccaggcggtacagctcctccgctgtgcccacattccagatgagtaccacgttgtcgcagcctgcactgagcagcacgtttcgggccgtggggtgccaggcgatgatgcccactcgcttggtgtgcccctccagtaccaccaccggctctgtcagcggggaggtcagcccgttctctgggatctgccacaccatgaccgtgcagtcctccgagccgctggctatgacttcgtcgttgtgaggacaccagtcgatgtccaggacaggtcccgtgtgcccacacaccgtcgggtaggccttgtcaatgcggcccgtcttgcttagggggagcaccagaaaggcaccccctccactggcctccacaatcaccgccaggaacttggggttgacggcgcagaaggtgctgtcccaggtaacacgggacacgcgaatgtcctcatagcactggtcgttcttgaccggctgcccgaacacatgccggaatttgctctgccggaccactttgcggaaggacatgtcggggtcaccgggggcgcagggggatgaggcaccggcttcgggcggctccggaacgaaa

SEQ ID NO: 92016 - DNA, 1124 bp, Homo sapiens
cccactaagtaggacatcagaccggccgctactactgcaggctgaaacggcgtgggggtgtcgtcttaagtccatccgcgtggacgtgcagtacctggatgagccaatgctgacggtgcaccagacggtgagcgatgtgcgaggcaacttctaccaggagaagacggtgttcctgcgctgtactgtcaactccaacccacctgcccgcttcatctggaagcggggttccgataccctatcccacagccaggacaatggggttgacatctatgagcccctctacactcagggggagaccaaggtcctgaagctgaagaacctgcggccccaggactatgccagctacacctgccaggtgtctgtgcgtaacgtgtgcggcatcccagacaaggccatcaccttccggctcaccaacaccacggcaccaccagccctgaagctgtctgtgaacgaaactctggtggtgaaccctggggagaatgtgacggtgcagtgtctgctgacaggcggtgatcccctcccccagctgcagtggtcccatgggcctggcccactgcccctgggtgctctggcccagggtggcaccctcagcatcccttcagtgcaggcccgggactctggctactacaactgcacagccaccaacaatgtgggcaaccctgccaagaagactgtcaacctgctggtgcgatccatgaagaacgctacattccagatcactcctgacgtgatcaaagagagtgagaacatccagctgggccaggacctgaagctatcgtgccacgtggatgcagtgccccaggagaaggtgacctaccagtggttcaagaatggcaagccggcacgcatgtccaagcggctgctggtgacccgcaatgatcctgagctgcccgcagtcaccagcagcctagagctcattgacctgcacttcagtgactatggcacctacctgtgcatggcttctttcccaggggcacccgtgcccgacctcagcgtcgaggtcaacatctcctctgagacagtgccgcccaccatcagtgtgcccaagggtagggccgtggtgaccgtgcgcgagggatcgcctgccgagctgcaatgcgaggtgcggggcaagccgcggccgc

SEQ ID NO: 92017 - DNA, 421 bp, Homo sapiens
atacagacccccacttcagcgttctttacatcccatcccatgtgcattttgaagacttaatatgaaaaaaacccataaagctcaaattaacgttttctacagactacatgttgagataaaatgttggatatagaggtgaaatgaaacctgcaaggattaatgacacctgcattgctctacttctcctatcagggctgctaggaagcctgagactgcagacagcctgtgctctgtttccactgaagacactgggtctagaacgtctcctgccagaaaggagagcgtggtcagctgagtgggccccaccaccacaaagaccatctgtggcaggagccacgtgaacacagtcggtggcctattatggaccatctgtcggatccaacaccagcacccccactggaataacaagggcgtggcctct

SEQ ID NO: 92018 - DNA, 1120 bp, Homo sapiens; identical to SEQ ID NO: 60191

SEQ ID NO: 92019 - DNA, 471 bp, Homo sapiens
atgatgagaagctgcgacgttgttagatcctctagagcggccgcatacattgggcgttttctttgtgcattgatttgtttttttaaaggcattccattaaaaatatgtttatctattttaatgtttttttggtgcccctttaaattctctatccacagtcctgagccttaatacgaagtgagggcctggcctctgggcatcaagcagccagaaagtcccttaggagctttctctgaattgttgaattgtgactgatcttttcctttcctgacttccttaatatccacaatttcctcgtaaccatccccccaaagccacacccacaaggcacctccaagacctatcatgaagcagatattcaaagattatttgtaaatcttcacaccccaccccttccagaatgtcttccaacatcccttcgccagatactcaagatgggtggtgccgggctctgaaagacatgcttcaagg

SEQ ID NO: 92020 - DNA, 937 bp, Homo sapiens
acgcagcagccaccgccgcgtccctctctccacgaggctgccggcttaggacccccagctccgacgtagggccctctcgcgcgccacctccatccgctgcccctctgcccacgggccgggctcagatgtcgccctctggtcgcctgtgtcttctcaccatcgttggcctgattctccccaccagaggacagacgttgaaagataccacgtccagttcttcagcagacgcaactatcatggacattcaggtcccgacacgagccccagatgcagtctacacagaactccagcccacctctccaaccccaacctggcctgctgatgaaacaccacaaccccagacccagacccagcaactggaaggaacggatgggcctctagtgacagatccagagacacacaagagcaccaaagcagctcatcccactgatgacaccacgacgctctctgagagaccatccccaagcacagacgtccagacagacccccagaccctcaagccatctggttttcatgaggatgaccccttcttctatgatgaacacaccctccggaaacgggggctgttggtcgcagctgtgctgttcatcacaggcatcatcatcctcaccagtggcaagtgcaggcagctgtcccggttatgccggaatcattgcaggtgagtccatcagaaacaggagctgacaacctgctgggcacccgaagaccaagccccctgccagctcaccgtgcccagcctcctgcatcccctcgaagagcctggccagagagggaagacacagatgatgaagctggagccagggctgccggtccgagtctcctacctcccccaaccctgcccgcccctgaaggctacctggcgccttgggggctgtccctcaagttatctcctctgctaagacaaaaagtaaagcactgtggtctttgaaaaaaaaaa

SEQ ID NO: 92021 - DNA, 1079 bp, Homo sapiens
tacggctgcgagaagacgacagaaggggactccctctctcttctccactatggacagagcctccactgagctgctgcctgcccgccacatacccagctgacatgggcaccgcaggagccatgcagctgtgctgggtgatcctgggcttcctcctgttccgaggccacaactcccagcccacaatgacccagacctctagctctcagggaggccttggcggtctaagtctgaccacagagccagtttcttccaacccaggatacatcccttcctcagaggctaacaggccaagccatctgtccagcactggtaccccaggcgcaggtgtccccagcagtggaagagacggaggcacaagcagagacacatttcaaactgttccccccaattcaaccaccatgagcctgagcatgagggaagatgcgaccatcctgcccagccccacgtcagagactgtgctcactgtggctgcatttggtgttatcagcttcattgtcatcctggtggttgtggtgatcatcctagttggtgtggtcagcctgaggttcaagtgtcggaagagcaaggagtctgaagatccccagaaacctgggagttcagggctgtctgaaagctgctccacagccaatggagagaaagacagcatcacccttatctccatgaagaacatcaacatgaataatggcaaacaaagtctctcagcagagaaggttctttaaaagcaactttgggtccccatgagtccaaggatgatgcagctgccctgtgactacaaggaggaagagatggaattagtagaggcaatgaaccacatgtaaattattttattgtttcatgtctgcttctagatctaaaggacactagcattggcccaggatcttgggagcaagctaccaacaggggaggactcttttcctgtatgggacaggctgctgtgggaaatacttgcctgcttctccccacctcctcaagagccacaggaaagaggaggtgacaagagagagagcaaggaaagtgatgaggtggattgatactttctaactttgcattaaaattattttctagcctgcaaaaaaaaa

SEQ ID NO: 92022 - DNA, 1554 bp, Homo sapiens; identical to SEQ ID NO: 59824

SEQ ID NO: 92023 - DNA, 1178 bp, Homo sapiens
ttttttttttttgtgtgttggagttataactttggttctgtttttaccctttatttggaatacagtgcaacattacagttttggatcattaaatgaatggacttggtgatatagtactaacaagcacgacctgaattctgggagtaagtggttttctagttcatgggggaggaaaacagatacgtgcaagatctccagaggagaacagaaccatggtactcagtgagtcaccaaagggctttggcttcaactcactaatggctggaacaagtgccagtcttggtcagccatccaggattttcatcacagcaaatcaaaatctccaatttttcaaactaattgtaggtagaagagagagaataactccaaactgtcttataaaaggatctagatgactactgaagtgtcctccattcatgagttggcaaaatcttcagagtgactgttggagcaaggagcctttcatgtgctcccagttattatatagtgcatagaggctggtaagtgttagtcctgtcagaccacctcgtgctatccctcgaagaccacctgtacatttatacaacatgcctgtcatggttccagctgctactgtgttaaggtcatcttctgcacctcgtgttttctcaatgatgacaccaaatgcactatagagcaaagccagagaacctagagtattagcccaaagtgccccttgcctagtcaccatattcaaaatctgtacatttcttggtttggaccaggccatgttctgggtttccttcaatcctagccgaagaccattcattgcaccaaacgcagcccctgtcatgcaacatcctccaatcgtaaagaaggccagctcaaatctgccccgggttttattagctccggtaggtaaaataaactcatctgtatcctgcacgaggtatcgtggatccacatttaaataaggagacagagggttcataccagttagcgggacgccagccaaatccgcgtgcgagtaacctgctccgccggctccgaaaaagccggccaatccccctgtggttttgttgccgcttcccccgcctccttccatggtatcgcagcaaaccgagtggttcccgccgctgcctcaagcctgggtggtccgctgggccgttactcctcaataacagcgggtaaccccgcgttgccagcgcctacctcgtgcc

SEQ ID NO: 92024 - DNA, 1601 bp, Homo sapiens
  misc_feature (1)...(1601): n = a,t,c or g
tttttttttttgatgttctccagtgcctcagtggcagcagaactggccctgtatcaggccgctaccgccactccatgaccaacctccctgcatacccccccccccagcacccctcccacaggaccgcttctgtgtttgggacccaccaggcctttgcaccatacaacaaaccctcactctccggggcccggtctgcgcccaggctgaacaccacgaacgcctgggacgcagctcctccttccctggggagccagcccctctaccgctccagcctctcccacctgggaccgcagcacctgcccccaggatcctccacctccggtgcagtcagtgcctccctccccagcggtccctcaagcagcccaggcgagcgtccctgccactgtgcccatgcagatgccaagccagcagagtcagcaggcgctcgctggagcgacccgaagccagagcagagcagagcaggtcataaaactacacggaagagctgaaagtgcccccagatgaggactgcatcatctgcatggagaagctgtccgcagcgtctggatacagcgatgtgactgacagcaaggcaatggggcccctggctgtgggctgcctcaccaagtgcagccacgccttccacctgctgtgcctcctggccatgtactgcaacggcaataagggccctgagcaccccaatcccggaaagccgttcactgccagagggtttcccgccagtgctaccttccagacaacgccagggccgcaagcctccaggggcttccagaacccggagacactggctgacattccggcctccccacagctgctgaccgatggccactacatgacgctgcccgtgtctccggaccagctgccctgtgacgaccccatggcgggcagcggaggcgcccccgtgctgcgggtgggccatgaccacggctgccaccagcagccacgtatctgcaacgcgcccctccctggccctggaccctatcgtacagaacctgctaaggccatcaaacctatcgatcggaagtcagtccatcagatttgctctgggccggtggtactgagtctaagcactgcggtgaaggagttagtagaaaacagtctggatgctggtgccaccaatattgatctaaagcttaaggactatggagtggatctcattgaagtttcagacaatggatgtggggtagaagaagaaaactttgaaggcttaacgatgtcaccatttctacctgccacgcatcggcgaaggttgggactcgactggtgtttgatcacgatgggaaaatcatccagaaaaccccctacccccaccccagagggaccacagtcagcgtgaagcagttattttctacactacctgtgcaccataaggaatttcaaaggaatattaagaagacggagtcttctcactctgtcgcccaggctggagtgcagtggtgtgatcttggctcactgcaacctctacctcctgggttcaagtgattctcctgcctcagtctcccaagtggctgggattatggacgtgcctgtttccccttcgccttctgccgtgattgtcagtttcctgaggcctccccagccatgcttcctgtacagcnctgagg

SEQ ID NO: 92025 - DNA, 1733 bp, Homo sapiens
ggaaagagccggtgaaggggcagaacaggcaggttccctcgacccaggaccccctgttcccaggctatggcccccagtgccctgtagacctggcaggccccccgtgcttgcgacccctatttgggggtctgggtggctactggagggccttgcagaggggcagagaaggcaggaccatgacatctagggcctctgaactttctccggggcgcagcgtgacggctggcatcatcattgttggagatgagatccttaagggacacactcaggacaccaacaccttctttctgtgccggacactgcgctccctaggggtccaggtttgccgagtctcagttgtacctgatgaggtagccaccattgcagctgaggtcacttctttctccaaccgcttcacccatgtcctcacagcagggggcatcggccccactcatgatgatgtgacctttgaggcagtggcacaggcctttggagatgagctgaagccacaccccaagttggaagcagccaccaaagccctaggaggggaaggctgggagaagctatcattggtgccctcctctgcccgcctgcattatggcacagatccttgcactggtcaacctttcagattccctctggtctccgtccgaaacgtctacctcttcccaggcattccagagctgctgcggcgggtgctggaggggatgaagggactattccaaaacccagctgttcagttccactcaaaggagctatatgtggctgctgatgaagcctccatcgcccccattctggctgaggcccaggcccactttggacgtaggcttggcctgggttcctaccctgactggggcagcaactactatcaggtgaagctgactctagactcagaggaagaaggacccctggaggaatgcttggcctacctgactgcccgtttgccccagggatcgctggtcccctacatgcccaacgctgtggagcaggccagtgaggctgtatacaaactcgctgaatcagggtcttctttggggaaaaaggtggcaggtgccctacagaccattgagacctccctggctcagtacagcctcacccagctctgtgtgggcttcaacgggggcaaagactgcactgccctcctgcacctcttccatgcagctgtgcagaggaaattacctgatgttccaaaccccctccagatcctgtatatccgcagcatctcccctttccctgagctggaacagtttctacaggacactatcaagaggtataatctgcagatgttggaagctgagggcagcatgaagcaggccctgggtgaactgcaggcacggcacccccagctggaggctgtccttatgggcacccgccggactgacccctactcctgtagcctctgccctttcagccccactgacccaggctggcccgcattcatgcgcatcaacccactgctggactggacctacagagacatctgggattttctgcgtcagctgtttgtcccatactgtatcctgtatgaccgaggatacacatcactggggagtcgggagaataccgtgcggaacccggccctgaagtgcctgagcccaggaggacaccccacataccgtccagcctatctactggagaacgaagaagaggagcggaactcccgcacatgacctcccaccctaggagggagggaaggacaccgtcctagggtataacctggcaataaaccgtgcctctcactgtgaaaaaaaaaa

SEQ ID NO: 92026 - DNA, 611 bp, Homo sapiens
ggcacgagctttaagtttacgacactgctcacggcccaccttccaacacatagccacaactttgatcccattcccatctcattccaggggcccagagcagcattaatgcaatagtggatgtgcactgcctgtacacggtggggggcggggggaccttttgcggctgatggtaacaagatggagggtgagaacgctggggcggcgtcatgagccgtgtgcagccagagaggcagcttgcgttttctggaccagaagcagggagggtgtggagaaggccaaaaacctcagggcgacctaagagctgtcctgcagcggggacagtggggacagcagggacagcggggaggcaggaaaagccccgaacacagctgaggcaggttctcagagcaagcctcagggccactaccaggtgacccctgccctcagctctcaccagcgaccctcacagaaacacaaaagggaggggcgccgacctcaacaatggcccagaggggccatactgcctggcaggggttctcaacctttagggagcgggagcaaggggccttccgaggataaatagaaatgaggaaaatgaggggaggtgacctctcatccttcctcttagctgg

SEQ ID NO: 92027 - DNA, 1668 bp, Homo sapiens
ttttttttttttatttggctcatttctccatttattagaataaccacatttggagaggcatgaagcacttaagttttacatgactacaaagttatcacaaatctcaaactttttagccacagatatttcacctctgtttaaagaaaaagctttcaaaacatctgagttagcttaatacacagagaccctgaaatatatgggaactacatattttaaatgcttgtacttcctgctctaataatgtcttctttaaacggaatccagcataaaagggattgaaatgtataaggtcatgatgcaaatgctttggagatagtgaaactgatctgcacaacatggaaaaagatgtcatgtgcacagaagttctgcaaggattcactgagccatctgggcttccatggcttgtgctgtccattctggtgctgtttgactaattttctccaaaaggttattcacttggaaacaaagtgattggatctgcttatcccacgttggcagggcttctcgtgtttcaaaatgaactattccatcaatctggtcaataaatccattcatacgtccttcggttatcatttgagatgctatcttttccgccttagctgcagggatctctaaaagagctccaagttcttcgaaggtaatattattatataatttgcttgcagacaacaaattgtgttcaataacagctctgtccaagatgctggaaccatcagctgtagttgctttttggtgaggcatcagcatggcagcaaattcttgaagttgatttcctctgatgatcctatctagatacattttctctaggatcccataggcagcaagttgctggcacctttcatccttaaaaagagtagctagcatccgagaacgctgctgccctgctgatgctaagatcgtacagtgcaaagcatgttttaaggcctctagtctttcactttcgtggactattgtcttgtaagagagctcattgtacctttgtgcagcttcaatgaattttcttctataatcaagaacacgtgcatagcataccttataatgtatctgtaattgttcattggttgattcattctgaagcaacgatgctcgatttatgtaagcctctgcctggactggatcatcatcctccagatatagcctagcaatcttcaagtaagtctccagtttataatctacattgtactgtttttgtcctgtttccaaaggaattcccaccaacacttgggctgcatttctccaatcttcttctttctcatatatagatgcaagatgctgtcttatggaagcaacctgctcctcaaatgaaatgactctaggctggatcttttccaaggtgaagtgatagatttctttggctgtgctatcaggcaagttaggaagatgtgtgcaaaaatcagtcagcaactgccgcgagatcacgagactgacattctcatttaccattgcttccacaaaagctttcaaagcttctagttgttctgctccagataactgaatggctttttccaggatctgacgatacttgccagccagatctttatgagagccgctcgaattcatgagctgggccaaatcctgtcgcacggctgccgccatctttctcccagctcagcggtggatgcgggggcctctggcagccaaaaagaaaacgagtgtggtcctccagag

SEQ ID NO: 92028 - DNA, 982 bp, Homo sapiens; identical to SEQ ID NO: 59243
  misc_feature (1)...(982): n = a,t,c or g

SEQ ID NO: 92029 - DNA, 4504 bp, Homo sapiens
ttttttttttttcagactttcagcccctttaattaggtgctctgagaagaggtcagaatggcaggcagggggtggggaaggcggtgcttcttgagccccacttagcaactggtcactcatcctctggcagctggatcttgctggggtcgaagcagttggattccatgatgggaaggccattggcctctcggtatttcacaagcctctcagcttcgcggcgggaccactctttcatcctgtagtcaggcagataggccacaaaggtgctgccaaggaccaggatgatggagacgccaaagaagaagacaagtcgcatgttccagacgtccaaaacggggtccttgtcataaccatgggagtctgggttcttctcatacaagttttcgtcctcgggttctgggtcctcttgccacggtgtggtcggttctgggggccgctttcccgccacagcggacggggcgaccacagtcctggagaagctagattcccagcggacgcgggcggccgggagccctcgcgtcgccgctgccgccaaaagacggcgagcgctcaaaccaaacagcccagccgccatgacagatggtgctgcagggtctcaggggcggggaaagaaatgcgactgtgcgcagctgcagtgggtgcgagcgcgacaatcatcgccccgcctccgccacgctatataggtcccagatctgatttggttttccaatgaggcggggcgttgagcaaccctctttgcctccagttgtcgtggcttcgtggggccaaccattttcggccaggctgagaaatttcttattgatgggtctgctcatttcctgcataggaagaaatcggtgacatttgggtggatacagttcccagccaatcgccccgagttccctcgcccactggggaaagaggcagacgtccgctagtctttcatcttcaaaggaaatcaagcttctaaaaagcgggccctgccgaattggctaatagctactccttttctccactaggggagcgttcgcaaggggtgtggggaggtggccagcgcttgccaatcagaggaggccagggctgtcccctagcgggcggtgaccaatcgccggggccggccagagcgcgcttccttagtaggtggatggtggtcggagcgccgactcccttctcgtcgtcgccattttgagctggtgactgtggccggctgggagtaggcggcagtgagtttccctgggagggcagcgcgcttggcgcttctcccctccccccgatctgcctccagtctcggacttggttgttgcgcgctccggctccggctgagctgggagagttggaggaggtggcggcgggcagaggtgatgtctgggagcccttccttgacagcccgggccgagaagagtccctgcaggaagcatcacccaggctggcagatcatggtagcagcagcgggggtggctgggaagtgaaacggagccagcggctgaggaggggccccagcagcccccgaaggccctatcaggacatggagtatgaaagacgtggtggtcgtggtgacaggactggccgctatggagccactgaccgctcgcaggatgatggtggggagaaccgcagccgagaccacgactaccgggacatggactaccgttcatatcctcgcgagtatggcagccaggagggcaagcatgactatgacgactcatctgaggagcagagtgcggaggattcctacgaggcctccccgggctccgagactcagcgtaggcggcggcggcggcacaggcacagccccaccggcccgccaggcttcccccgagacggcgactatcgggaccaggactatcggaccgagcaaggggaggaggaggaggaggaggaggatgaggaggaggaggagaaggccagtaacatcgtcatgctgaggatgctgccacaggcagccactgaggatgacatccgtggccagctgcagtcgcacggcgtgcaagcacgggaggttcggctgatgcggaacaaatcttcaggtcagagccggggcttcgccttcgtcgagtttagtcacttgcaggacgctacacgatggatggaagccaatcagcactccctcaacatcctgggccagaaggtgtcgatgcactacagtgaccccaagcccaagatcaatgaggactggctgtgcaataagtgtggcgtccagaacttcaaacgccgagagaagtgcttcaaatgtggcgtgcccaagtcagaggcagagcagaagctgcccctcggcacgaggctggatcagcagacactgccactgggtggccgggagctgagccagggcctgcttcccctgccgcagccctaccaggcccagggagtcctggcctcccaagccctgtcacagggctcggagccaagctcagagaacgccaatgacaccatcattttgcgcaacctgaacccacacagcaccatggattccatcctgggggccctggcaccctacgcggtgctgtcctcctccaacgtgcgcgtcataaaggacaagcagacccaactgaaccgcggctttgccttcatccagctctccaccatcgaggcagcccagctgctgcagatcctgcaggccctgcacccaccactcactatcgacggcaagaccatcaatgttgagtttgccaagggttctaagagggacatggcctccaatgaaggcagtcgcatcagtgctgcctctgtggccagcactgccattgctgcggcccagtgggccatctcacaggcctcccaaggtggggagggtacctgggccacctccgaggagccgccggtcgactacagctactaccaacaggatgagggctatggcaacagccagggcacagagtcttccctctatgcccatggctacctcaagggcaccaagggccctggcatcactggaaccaaaggggatcccactggagcaggtcccgaggcctccctagagcctggggccgactctgtgtcgatgcaggctttctctcgcccccagcctggtgctgctcctggcatctaccaacaatcagccgaggcgagcagtagccagggcactgctgccaacagccagtcgtataccatcatgtcacccgctgtgctcaaatctgagctccagagccctacccatcctagttctgctctcccaccggctaccagccccactgcccaggaatcctacagccagtaccctgttcccgacgtctctacctaccagtacgatgagacctccggctactactatgacccccagaccggcctctactatgaccccaactcccagtattactacaatgctcagagccagcagtacctgtactgggatggggagaggcggacctatgttcccgccctggagcagtcggccgacggacataaggagacaggggcaccctcgaaggagggcaaagagaagaaggagaagcacaagaccaagacagctcaacagattgccaaggacatggaacgctgggcccgcagtctcaacaaacaaaaagaaaacttcaaaaatagcttccagcctatcagctccctgcgagatgacgagaggcgggagtcagccactgcagatgctggctatgccatcctcgagaagaagggagcactagccgagagacagcacaccagcatggatctcccgaaattggccagtgacgaccgcccaagccctccgcgaggactggtggcagcctacagcggggagagtgacagtgaggaggagcaggagcgtgggggccctgagcgggaggagaagctcaccgactggcagaagctggcctgtctgctctgccgacgccagttccccagcaaagaggcgctcatccggcaccagcagctctcagggctccacaagcaaaaccttgagattcaccggcgagcccacttgtcagaaaacgagctagaagcactagagaagaatgacatggagcaaatgaagtaccgggaccgtgcagctgaacgcagagaaaagtatggcatccccgagccgccagagcccaagaggaggaagtacggcggcatatccacagcctctgtagacttcgagcagcctactcgggacgggctgggcagtgacaacattggcagtcggatgctgcaggccatgggctggaaagagggcagcggcctgggccgcaagaagcagggcattgtaacgcctatcgaggcccaaacacgggtgcggggctccggcctgggtgcacggggcagctcctacggggtcacctcaaccgagtcctacaaggagacactgcacaagacaatggtgacccgcttcaacgaggcccagtgagcagcttcaagagcaacttctccacatgttgggtgtccatcctggggcagggaaggacagagtgttggatggctgggacggggccttgctcttgtcggccagcccactccccagccagagagggcttgaccaaatcaaattgaggtggtgacttttgttggaaaattgggctgggatcacgtcctgttttgtaataaaagctgaaaagtc

SEQ ID NO: 92030 - DNA, 1464 bp, Homo sapiens; identical to SEQ ID NO: 60016

SEQ ID NO: 92031 - DNA, 1945 bp, Homo sapiens
  misc_feature (1)...(1945): n = a,t,c or g
ccggacccgccagtggtatggctgagccgactagtgatttcgagactcctatcgggtggcatgcgtctcccgagctgactcccacgttagggcccctgagcgacactgccccgccgcgggacaggtggatgttctgggcaatgctgccgccaccgccaccaccacttacgtcctcgcttcccgcagccgggtcaaagccttcctctgagtcgcagccccccatggaggcccagtctctccccggggctccgccccccttcgacgcccagattcttcccggggcgcaaccccccttcgacgcccagtctccccttgattctcagcctcaacccagcggccagccttggaatttccatgcttccacatcgtggtattggagacagtcttctgataggtttcctcggcatcagaagtcccttaaccctgcagttaaaaattcttattatccacgaaagtatgatgcaaaattcacagacttcagcttacctcccagtagaaaacagaaaaaaaagaaaagaaaggaaccagtttttcactttttttgtgatacctgtgatcgtggttttaaaaatcaagaaaagtatgacaaacacatgtctgaacatacaaaatgccctgaattagattgctcttttactgcacacgagaagattgtccagttccattggagaaatatgcatgctcctggcatgaagaagatcaagttagacactccagaggaaattgcacggtggagggaagaaagaaggaaaaactatccaactctggccaatattgaaaggaagaagaagttaaaacttgaaaaggagaagagaggagcagtattgacaacaacacaatatggcaagatgaaggggatgtccagacattcacaaatggcaaagatcagaagtcctggcaagaatcacaaatggaaaaacgacaattctagacagagagcagtcactggatcaggcagtcacttgtgtgatttgaagctagaaggtccaccggaggcaaatgcagatcctcttggtgttttgataaacagtgattctgagtctgataaggaggagaaaccacaacattctgtgatacccaaggaagtgacaccagccctatgctcactaatgagtagctatggcagtctttcagggtcagagagtgagccagaagaaactcccatcaagactgaagcagacgttttggcagaaaaccaggttcttgatagcagtgctcctaagagtccaagtcaagatgttaaagcaactgttagaaatttttcagaagccaagagtgagaaccgaaagaaaagctttgaaaaaacaaaccctaagagggaaaaaagattatcacaactatcaaacgttattcgaaccaagaacacaccatccatatctcttggaaatgcttctagctccggacattcgacatgaaagaaatgtgattttgcagtgtgttcggtacatcatcaaaaaagacttttttggactggatactaattctgcgaaaagtaaagatgtataggcatctggtgtttcagcatacataactgaagcatgtgaaacagtatcatcctcgttagtagaggaaaaccaaaacccttttttccgtcaaaattggatttgtaattaaattgtaagcctcgtaggatgtatgttggaattttaagtctttcctttggttctatgcaaataaaaaaataactgattttttaagactgtgtctgtattgttgggattgaatctagtatttgctgggagaattttttctttgtatttattttaatgtattgttctcatgtaagaatgactgatgttgtgttagttaagaattgaagataggtttagcagtaaagaagaaagcttttaaaaggattgattcagctaagcaaagttgggcagtcctcgtgccnnnctggncgtnttgnangtccatcaggtccatctaatnnnnnntgctcgca

SEQ ID NO: 92032 - DNA, 3805 bp, Homo sapiens
ttttttttttttggaagagggacggattgtgaaactttattgataaagaattccgttccaaaggtgtattccagtcacatttaccctacataaaataccaacatcttcttattgcaaaaacagaaactccggccgttgtattgatgctgacttaagagaaatagaagcctctatataaggcaagagtccataccagaagaattccgaccaatatgaggatacctccaaaaaaaatcaacttcaataacctactttatatggtaaggaggacccaaaaaaggtcaggcttttgtgggaagttgatatgcagtttattgaacaaacagagtgtacagtaactaaacgaactgtgtatttccaaaggaattaagaccgcatatctggattcacacctaaaagcacatagaaaattaaaccaaagaagggcaagttttgtactaaaatcacttgggcccaggttattctataagaagattctcactggcatttgatagtaacttatcaccttctgtgcgagcttgggaaccagctgactcagtgaactgcttcctgtcttcagtgcgtgatgacacagatgtgtcaagcttaatagatcttatatgtaaatttaagaataagaagttttatacccaccctggttttattccaaagttactgctctgcaattttgggctccatccttaggaagatactggaaaagcaagagaacctttctcagctgcctgtgtgaagtgacgttgttctagaacggtgccctggggcctcatgcacgatttcacaagtatagctgcataatctgtggatgtcactgaatggaagaagaatcatcaatggtatatttaggttatagaaggttccactgagataagaaaaggttctacaatgcaggtagctgtcaagcctcctaaatatttaactcgttttagttaacatcacactgtgcattgagtgcaagattctttggttacaccatattaaccaccaggaggataactcctggtttgtaaaagacatcagtggttcttaacggaggggtgatatggccccaggagacatctgactatgtctggagagaatttttcacagctctagcgggggtgctactggcacctaatggatatggatggcaggaatgctgctgaacattctaccatgcacagggtggccccacaacaaacacctctcaggccactaatatgaatagtcccgaggttgaaatgtcctgaaaaaggttcagaaaacatgtctagacgtttgcaaagtcaaatgtatattatggaggctgcaaggcgccccttgcatctcacagctgagggaccccgtcacctctcaccatcagaggcccattcattcccgccttccattccaggcccagtgcctgctccttctcactgaagaactcaatagagatttgctgaatgaatgagggaaaaataagctagaagcatagtttaaagtcttccatcgactacattaaacagcaattttatgtggcctaaactttattctgaaccttagtggtgtcatagtctctgactatatagaacctcaaagttaaggctaacacgttcttaaagatggagtgcacatcttaaggggagtttgtctaaacacttctcgagtcattttagtgggacaaaccaaataaaatggtgctaaaggcaaacattcaatatacttcattttaaactaaaaaattaacatataaaatgccatgcacagcagacaccattcttttttttacatatttacaattttacatatttacttatcaatataatttctatctttacaattataaaattattccaaactgtggaagagtggtaccatttaattttcttgaacatacactttgtagcattcatttgtttaatcctttaaaaggcaattatttaccaaaaccacagtgaatgccagaggaagcacataggaaaatcatggagggaaaaaaagattgagacaaaatttgcacacaagccttaaatgaatctgtatcagtaactcaaataagtagtattttattattaactaaggttcccctgctaggaaaaacgaaacaatccccatatactgtacctttaaaaaatgctctgacatttataagcaatttagttacattctagatcccaatcagttgagtgtagtaagggctacctacaatttaggctcaaataaatactctccactaaattgtgatcatcctgcataaacttgaggttgcagtggtggaggaagtttatcattttcaacgttttcagagtcaatagctgctaacggttgattcggaggcttaatttccagtgggtatttctcaacgatgtcttgaacttctcttgcaattccatctgtccaatctatgaggtctttttccagtttcttggcttcattcatgatcctttcttgtcgttcattcaactgagacaagagatccaagttcttatacatttgcttgacgcctaagcaagcatcaggagaccaactctcagcttcttgcttcctgggagaggtctggccagacatgtagcgatcaaaatcctcctgacttagattcaaagactgggcgtctagcttctcaatgaaagccacagcacagcacagattggtgaaatagtagccatcctctccagtcatcagtcggcttggattgcagaagcgcgtgatatactggatattagactgaaggcgtggggggttgcccttcaaaacaatgtagatgagggtggggaggaagtcatccgctgacgccggctcattcttggtgatcttgatggcattgaagatgtgcttgctgcacttggtgatgcaggccagcttgtctcgaggcacacgcttggaatccatttcaatgatatctgtgatcgccttcaccaccatatcagacacttctgggatgtcttcattaacagggacacacagcatctgaggcgtaacccagcgcagggctctgattctcttttgaatggcaagatctttcttctcatcatcagtagtttctggacagaatacatatttatagagacgagtcatgatgtacttttcaatctgatccattatcttctcgactctttctggaggcactttcccacgagtttgcatcctttcggccacattgtggtagaaatcctgagcacactctgactgttcttcaatgcttagatcccttttgtaatgcattccttccaaaaacagcttggtctgtttatagatttcttggcctgtcttgtggaaggtcttgagaaattctatgaactccttagacactctatccgtttcaatgctggtttgccggtttatggaaggactgggagcttttgcttcctgaatttccttctttgatccgaccctggaagatgcactgaagaatttcttcactgtggtaaccttgcgggtcttctcgttggttttcttttcttcaaacttggagaatgtgagggattgggccccttggctgctctgactgctggcaaaggcctcttcttcctcccgctggagtcgctccgccagctcccagtcctcctgaatctgcttctgcctggctttgtggtactcttccctccagcacttggagcagaaaccctgccaggcagggttgccgtagtaaccacatcctttcttgcacaggagatccgattgatccacatgaattcctcggcgttcagacttaaggctcatcttcttcctgctaaccactcgcccgcgtctccgccggcgtccaaaccaccgctcgcccgcttcgcccgggtaggtctgggctccgcggccagctcccgcctcacacccaccctcctgctcgcccacgaaa

SEQ ID NO: 92033 - DNA, 1408 bp, Homo sapiens
ttaagtaacaaatattgaaaaatttcatttgtacagtttatggttttaaagaaaccatcctgaataagctcaagttatagctaccagttatgaatttataaagtttatgttgacctttattataattaatatttgtattaatcatcacatattattatatataagatataaatttaatataactatctggtaattatacctatgtttactaacaattttacaactgctggctgcagcggtcgcatcgacattcattattattacaatttccattttgcaaaatgtttagaggaactccttcccatttgtcaggtgtgaccccatgacttgcatgtctctggggacactctgggaagatgtcttcataagataatgaagctcagataaacatgagacagaacagtcccaaaatccctcagcatgccccagccctcaggggagttcctacttgtttatgaatctgtccatattatagctcgttgagtagagaaattccaggatcttcctgcatggatttctgatcagaagagtggtccagagtgagctgtcataatacacttcttcttggcgcagagctccccctttgatgatctccagggcacattcctcctttggagctgcttgcatatggactatcccagaaactgccttcatggctgtttctgtgtctatgaggccaagaacacagagagtgattgatacattgaccctggacactgaatattcctttctgatggaggagaagaacccatccaaagcaaacttgcttgcagaataggcagcaaccattggataagccactttcccagccagagaggagacgacaacaatgcttccattgctctgcttcagcatgggcaaggcagctacagtcaggaccacgtaactgaggaagttgacttccatgcttttgcgcacatggtgaatatcatcatgaaaaagattcaaagaagtgttggtgatgtggttgagaatgagcatgtctagtcctcccatgagctttcctgcttgggcaacaaattgctctgcgaaggtcatgtcttccatggtgccagcaatgtagtgtgctgaggctgctccaagctccaggcagtgggataccaccttctgtagagtttcttttgacctcgctgtcaccaccacatgggctcccatcttcgccagatgataagccatctctcttccgatccctttgctggcccctgtgacaatcactttctttccttggagcatctctggtctgaattcctcgtttgcagaatagtagtagtaggccatgaagagccccagaatggggaggagatattttttcataaaagccatccgacagggagctggcctgaagactcctgtaggacacacagagagaacctacagagctttctacaacctcctaagcaggcagcag

SEQ ID NO: 92034 - DNA, 1513 bp, Homo sapiens
cccacgcgtccggaaaaatgcagagaaacaggagtcttggctactcctttagaggcagactcagaccctcctgcctcacagctttatctttgtatttgccccttactttatcttgtgccttgagaaattgctggggagagaggtatgtccactgggcagctgtacaggatggaggatctagggcgtttccactcccagcagccaggttccctcaccccaagctcacccactgttggggagattatctacaataacaccagaaacacattggggtggattgggggtatccttatgggttcttttcagggaaccattgctggacaaggcacaggagccacctccatttctgagctctgcaagggacaagaactagagccatcaggggctgggctcactgtggccccaccccaagccgtcagcctccagggatctacaccctgccttggctgctacagctttttcactccactgccctaggggagttcagcaacctaatgatctctatctctgaacatctcttcatcccatgctccaagtccagcaacctgcaccctggaaccaggagtggaccctacccgagctgtctgtattaatccccatcccccaccaccaatcttaaaaagccctctgtccccctaccctaaaccccagttaggtacccatgctgggcaggtcagttaacaatttatgcacaggtactagttttattgtattaccgttccagggtagctttgaaaaaagtatctcaaaaaggcaacactgcgcctggctgatcccagcacttttcaaatgatgccgctcaaagccgtgacttggcctactttgaacagcaaacttgttgctgctgttgtcaacctgaaggcctctcaaatgccagcttcaagcagggtgtgaattggccagtgtcagatctcaggagtcctgtgttgagagtgtggctttcagctgcggggagctgcacttggtggggaaagccaggcaggtcaccctcacagccagataatgtggaggtcagaacccaaggaagggagtgagacctccactcccagtgggggacctggccacccatccttggggacctgagaaagcgtacttcaccttggggtgaaggctgggtggggccagagggaccagtgccctcctcagtgcttaggggcagagccacctgcagcaatggtatctgcatattagcccctctccaccttctttctcccgctgaatcatttccctcaaagcccaagagctgtcactgcttctttctccctgggaagaatgcgtggactctgcctggtgatagactgaagccagaacagtgccacaccctcgccttaattccttgctaggtgttctcagatttatgagacttcttagtcaaatatgagggaggttggatgtgggtggcttgtgcctgtaatcccagcattttgggaggccgaggtgggaggatcccttgaagccaggagtttgagacaagcctgggcaacaaagcaagaccctatctctaaaaaaaaaa

SEQ ID NO: 92035 - DNA, 1677 bp, Homo sapiens
tacggctgcgagaagacgacagaaggggagactgacgtgtgagctgcatcgcgggaggcgcatggcggggatggcgctggcgcgggcctggaagcagatgtcctggttctactaccagtacctgctggtcacggcgctctacatgctggagccctgggagcggacggtgttcaattccatgctggtttccattgtggggatggcactatacacaggatacgtcttcatgccccagcacatcatggcgatattgcactactttgaaatcgtacaatgaccaagatgcgaccaggatcagaggttccttggggaagacccaccctacgaagttggaatgagaccatcagatgtgataagaaactcttctagatgtcaacataaccaaccttataaagactaaaattcatgagtagaacaggaaaatcatcctgactcatgtgttgtgttctttatttttaattttcaaagaggctcttgtatagcagtttttgtctattttaacattgtagtcatttgtactttgatatcagtattttcttaacctttgtgactgtttcaatattacccccgtgaaagcttttcttaatgtaactttgagtacattttaattgccttctatttttaaaactcaaaatcattagttgggctttactgttcttgctattgtatggcatatacatctgcctggatatatttctactcttgaccaaagttttgtaaagaacaatataagatttcgggtaggggtatggggagggaagatattttattgagaactacttaacaaaagatttatctgtaagcttgaactcaggagtacagttttagctatctagactctaacagcttttgctttaaaattattaaagtgtttcttaatgaaaaagaaaagatcttgctaaagttaaaataaggaacatttcaccttttaaatatttaattcttatgtggacttatttccagaaaactttggtgataattcttgagacaaaaggtggttaagtagcattattatgtaatgcttatataccatagagtttttaatagaagagaaatccatttcctccgagggtcactattaacaatgtacttccttaaatttagtttaatgattgtaatgggtgctgcatttgcacattgcattaagttatgatgagacgaattgttgttaaaaattatagcaaaaagaaatgtaaacttggttaaaatcctttcactctttgtattgttttttttaaggtttttattccttaaatgtaaaatgactacctaattttttgatgtaaatacattaaattcaaagagaaaaaaaatcagctgatgtagcagtatatcttttccttgatggttaaatattgatctagtatttatattgctgaattattttctgtggaggaccagataagcagtaagtatgtcttatcctatatgttttgcaacataaaaatattgctaattgaaaagaattaggcaattatgtgtgttgctgggttgtttttttgtttttttttttttgagacggagcttgaccctgtcgcccagggatggagtgcaacagcatgatctcggttcactgcaacctccatctcctggggatccaagtgattctcctgcctcagcctcctgaatagctggggtttacagggcacctgccaccatgcccgggtaattttttgt

SEQ ID NO: 92036 - DNA, 1677 bp, Homo sapiens; identical to SEQ ID NO: 92035

SEQ ID NO: 92037 - DNA, 1040 bp, Homo sapiens
gtagtatgaaagacttctgaagctcttctttctaaggaagcagtttggcacttaagctttgtggggacagagagtcatatttttaatttcagagccagccagtgtcaaacacgtgcaaaagagccgggccggattttttcagcttgtcctatggtagtcacttgtcagcctgagtttactggcctggtccttttgtctccactgtaagtactgaagccttctggtgtagttgtatcaccttaatgtccagcatttaactaggaaaggagactacaatgaagagttggtggccaattaagaaaaataatagactacatcataaatcatttcaggacttgagtggccgcagatcactgtccctgatagcatgtttcaaccttggtatacattttttttaagatgcatatttactgtgtgtgcttttgctttctaatccatctattgactattggccacaatttatataatgcacatgcaattaattgaaacctgtgtcatggcattggatatctctgattcatttcttattataatagtctgtgtaactggggcctgagagattagaagcaaaatgtagtcgtacgtatgtctaaaggtggacgctggtgatattgccattgaatacctttgcagaatacactaatgtcaaaggcttgcaggattaatgtggaggaaccaacataagacatggaatatatataagaattatctagttacatgactaaaaaggaattggcatactatcttaaattggaggcttttattttaatggccttacatttaaaatgggatctttcaagggaagtcccaaaaaggaaggttaattttgaggattctgaagaaattatggttgtctcgaagcggactcaagacctaaccctatctcaatttgactaggttctgcacttacagcgtttcatacaaaccacaacggcctgccagagacattcacgccatacaactactatggattcggttctttctctcgccgttgccccgcgctcgcttctctaccccgcgctgccacgtctgttctcacc

SEQ ID NO: 92038 - DNA, 300 bp, Homo sapiens
gtaaggattgtggtttatagaaatgctcttatgtattggtttagtaatcctggtttatagtttattttgaacttgatttatgaacagaagtattactctcatttattaaggctgatgggtttctctccccaccctctcttcagaactttctgctttgtcctttctaataaatttgggagtgtggaacacactgtccatgattcttccttccaacattagattttagactaattaacagaagaaagcaagcatctttcaaaaacttgactttaagtacttgggtatatataatcaggacca

SEQ ID NO: 92039 - DNA, 340 bp, Homo sapiens
gaaacacgcgttatgcgcccctaaaggcggcagtcccactcaaggatggttatctgaagagcctcatacaactggagtggacatctcctttcatatgttatagctttttgattgttaaagtcaattgtcttgaagcctttctatgaacttcaaccagcaatgataatgtccaaaacacatgctctcaacactaccacatgcttctcttcatgcccttccaatgggaggaagatggtggccaagtccacatggcactggaagttttcctcagatgcatccagaggaaatggaaacatgccttactaatactttcagtttcttctttcctagttgtggaacc

SEQ ID NO: 92040 - DNA, 679 bp, Homo sapiens
ggcacgagctggatagtaggtagggacagtggtgggaaagcccaaggaagcaccatggaggtgggcggcgctggggacccgagagaccagggtttccagggtctccttgccctcctctgggcccttgatctctctatgaccttggccaagccaccttccctctctgggactcggttttctctctctaaaatgaggagcttaccaaagttagtatttctcaaaccttttaaccaaagtcccaaacaagctcaggagaatgaatttgtaagcatcgtgtaaaatattgccttttatcttaaaagttcatgaaaattttgcagtctgaagtatctcaaagcttaaattactttaggaaacattgtgtattaagaatatgtgtgaggccaaggcaggaggatcacctgaggccagaagttcaaaccaacatgggcaacatagctagaccccgtctctatagaaaatgtaaaaatcagcctacaatcgcttgagcccaggagttggaggctccagggagctatgtgtgaattaacttaagaaatggatacataaatgattcaaattttatacttatttaaaatctttaaaaattgcatgtaataggataaccataattaaaaattcctctcttcttaaaaattatttttagaataaataatggcttccatgggtcaaaatctta

SEQ ID NO: 92041 - DNA, 351 bp, Homo sapiens
ggcacgagaactgtgtgaagaaaacaaggctgtacagaagtttctgaacagcgaagtgatatgagaatgaggaaaccaggctgattgaacttaccttggtatgcagaatgtttccaaagaggttaattgaaatcaggtatggtactatggctgatgtgttatatgaatgttatgtgtacttataataagattttttgttatctgctttagtgcttatatacctgtatctattcttgttagatcttgatgtatgtacatggatatgttacttttgcatgtgtcttggtttataattatattagtttatcaggctatatattagctagttggtactatgttattatttgctct

SEQ ID NO: 92042 - DNA, 1119 bp, Homo sapiens
gtccgtcacccacgcgtcggagaactgccaactactttccaagtggccacatcagtttttattcccctggcagtgtatgagagtttcagcttctccacattcaggtatcttagtctggctctgggtgccccatcaccattcccgtttccttccaggagctgctccggacacaggaggagcttaaggaactgtaggcagaacggcagagccaggaggtggctgggcgacaccgggaccgggagttggagaagcagctggcggtcctgagggtcgaggctgatcgaggtcgggagctggaagaacagaacctccagctacaaaagaccctccagcaactgcgacaggactgtgaagaggcttccaaggcaaggctaagatggtggccgaggcagaggcaacagtgctggggcagcggcgggccgcagtggagacgacgcttcgggagacccaggaggaaaatgacgaattccgccggcgcatcctgggtttggagcagcagctgaaggagactcgaggtctggtggatggtggggaagcggtggaggcacgactacgggacaagctgcagcggctggaggcagagaaacagcagctggaggaggccctgaatgcgtcccaggaagaggaggggagtctggcagcagccaagcgggcactggaggcacgcctagaggaggctcagcgggggctggcccgcctggggcaggagcagcagacactgaaccgggccctggaggaggaagggaagcagcgggaggtgctccggcgaggcaaggctgagctggaggagcagaagcgtttgctggacaggactgtggaccgactgaacaaggagttggagaagatcggggaggactctaagcaagccctgcagcagctccaggcccagctggaggattataaggaaaaggcccggcgggaggtggcagatgcccagcgccaggccaaggattgggccagtgaggctgagaagacctctggaggactgagccgacttcaggatgagatccagaggctgcggcaggccctgcaggcatcccaggctgagcgggacacagcccggctggacaaagagctactggcccagcgactgcaggggctggagcaagaggcagagaa

SEQ ID NO: 92043 - DNA, 372 bp, Homo sapiens
ggcacgaggttttactccattgcagttgttatttttgatgctcatccattgagcttgtaatgtgaatgattatttttttttatttctgggtttctattttattatttttcaaatatgctcggtcttttaaaaaacaatctcttactccttgtgttttttaattcctcactttatttctttaatcatattaaacacgtttattttgtattctgtatccaataaatctaatatctaaagtatttgcaattatagttgtattgtttgatgcttctgctgacttccactcatgagggtgtcgtacttaggtgttacggattaacgtatcgtcgctgtttcctaatcccttttgtaatttgtctgtgcgagattggt

SEQ ID NO: 92044 - DNA, 387 bp, Homo sapiens
tttttttttgccagataaactcatactaactttttataacatgtctgaacagaatctagtgtgaggctcccagaagggtaagacatcagcttgaaaacagcccctgtgagaggaacatgaattttgctaaaattgaagcaagaacaaatgtgtcaagtttacggtgacacttgagtgaaagaatggtgaaaccactgatgctttatgaaaactttaggagtataatgtcccaaagaaatcagcaatttacaaatgggtaactcgttttaagaagggatgagatgatgttgaagatgaagcccatagtggcaagccatccacatcaatttgtgaggaaaaaattcatctttttcatgccctagttaaagaggactgataattaacagc

SEQ ID NO: 92045 - DNA, 1776 bp, Homo sapiens; identical to SEQ ID NO: 63170

SEQ ID NO: 92046 - DNA, 1652 bp, Homo sapiens
  misc_feature (1)...(1652): n = a,t,c or g
tggagaactacaggaacctggagtctgtggatggagttttgctcttgttgcccggactggggtgcagtggtggggtctcggctcgccgcagcctcctcctcccgggttcgggctattctcctgcctctgcctcccgggttgctgggactgcgggtgcctgtcaccatgcccaggattgacttctaaggactcttggtacatgaggaagaaacccggaaggggaagaggaaagcaaaggcgtcaggaatggttcttcctcagggtctattgacattcagggatgtggccatagaattctctcaggaggagtggaaatgcctggaccctgctcagaggactctatacagagatgtgatgttggagaattataggaacctggtctccctgggtattttttctaaatgtgagatcaaggaattaccaccaaaaaaggagagtaatacaggagaaatattccagacagtaatgttggaaagacatgaaagccacgacatacaagatttttgcttcagagaaacccagaaaaatgtacatgactctcagtgtctgtggaaacatgattgaagacattataagcgagtgcgtgtgacctataaggaaagtctcattggtagaagagacatgcatgggagaaaggatgatgcacaaaagcagcctgttaaaaatcagcttggattaaacccgcagtcacatctaccagaactgcagctatttcaagctgaagggaaaatatataaatatgatcacatggaaaaatctgtcaacagtagttccttagtttccccaccccaacgtatttcttctactgtcaaaacccacatttctcatacatatgaatgtaattttgtggattcattattcacacaaaaagagaaagcaaatattgggacagaacactacaaatgtaatgagcgtggcaaggcctttcatcaaggcttacattttactatacatcaaataatccatactaaagagacgcaatttaaatgtgatatatgtggcaagatcttcaataaaaaatcaaaccttgcaagtcatcaaagaattcatactggagagaagccatataaatgtaatgaatgtggcaaggtcttccataatatgtcacaccttgcacagcatcgcaggattcatactggagagaaaccatataaatgtaatgaatgtggcaaggtctttaatcaaatttcacaccttgcacaacatcaaagaattcataccggagagaaaccttataaatgtaatgaatgtggaaaggtcttccatcaaatttcacaccttgcacaacatcggacaattcatactggagaaaaaccttacgaatgtaacaaatgtggccaaggtgttcagtcgcaattcctaccttgtacaacatctgatcattcatactggggaggaaaccttacagatgtaatgtatgtgggaaggtcttccatcatatttcacaccttgcacaacatcagagaatccacactggagagaaaccttacaaatgtaacgtgcatgcttaagcttttacccaggcatnaaaaccggaacatcacagggtttatactggagagtaactacacaaagataatgtaataagcctttcagtgtaatattcatgattttgtcgtgagagatccactcaataaaaaccaggcaaatgt

SEQ ID NO: 92047 - DNA, 358 bp, Homo sapiens
ggcacgaggcaacacgttataccatttacccaggctgtgtagaaagctgaaccttcgttggtttagtgcgagtacactttatgatgtgcagcatgatgacaagatgggtagcaacacattttttaaacggaatgattgccgctatgtgatgatttcatgcaaagctgacatggcatatgataatgtgcgccatcctttcatgatataatctattagaactgattatggaggaaacataccttaacataataaaagccgtatatgacagacccacagctagtatcatactgaatggtgaaaaactgaaagtctttcctgtaagatctggaacatgacaaggatgctcagtgtggccccg

SEQ ID NO: 92048 - DNA, 304 bp, Homo sapiens
tctgttgaaccacggttctaatagaaggatatgccttatttggctaaatggcctttggattgagcctcagcagtcacctactatagtagacaaactgcgtaagcttaaaattgaatagccttggtgttcactgccttagctcaggatcttcagccgcgttcatttgaagatcatgaccaattagtgaatgaagtaactgaatttgccaaaacatgtgctgctgatgagtcagctgaaaattgggacaagtccttcataccctttttggagacacattatgcacagctgcaactcttcgtgtaac

SEQ ID NO: 92049 - DNA, 666 bp, Homo sapiens; identical to SEQ ID NO: 63192
  misc_feature (1)...(666): n = a,t,c or g

SEQ ID NO: 92050 - DNA, 358 bp, Homo sapiens
ggcacgaggtctaattaagatgtaattataaatctaagctaggaacgtaaaatgagaatgcaaagtaagaaacaaatatggggaaaattatatgtaaaagtaataggacttggcatcttactgatgtgattgattatgagaaaaatgaagcatgtggaggagcactctgatctattttaatattcatattatatcttgctgctttatttactccttaacattttttatatatcttatatcttatatttatattctattattatttctatgttttttctttgtttagagattattaattccatttatatatttcattttatcttatatattctttattttttctttttatttgttattt

SEQ ID NO: 92051 - DNA, 359 bp, Homo sapiens
ttctgcagttgttgaaattgtccccgcagttttcaatcatgtctgaaccgatcagagtccttgtgactggagcagctggtctaattgcatattcactgatgtacagtattggaaatggatctggctttggtaaagatcagcctataattcttgtgctgttggatatcacccccatgatgggtgcactggacggtgacctaatggaactgctagactgtgccctttccctcctgaaggatgacatcgcaccggatatagtataacgtagcctttaaaagacctgaatggcggtaatacttgtgggctccatgcccagaatggaaagcatggcgtaaaaagaattactgaaagccaacgtt

SEQ ID NO: 92052 - DNA, 314 bp, Homo sapiens
cgggcgggaagatggcggctgggttcaaaaccgtggaacctctggagtgttacaggagatgtctgaaagagaactgccgtcctgatggaagataacttggtgaattcataaccacaactgtcaacataggattaattactaccgtagatggttctgctttactgtatctgtactctctactgtcctctgttcgcttaaccatctctctttcttttctcatcatattctttctccttctcgttctgtgtttccccctcctctattattcaatctcttttgcatttttttcttcactgcgctattcctctcttttc

SEQ ID NO: 92053 - DNA, 312 bp, Homo sapiens
gaacagccccgggcggcgagacggtccccgccatgtctgcggccatgagggagaggttcggccggctacctgcacgagaagaactgcatgactgaccttctggccaatctcgatgccaaaaccggcgtgaacaggagcttcatcgctattgtcgtcgactgactggtcttctttcactttctctatgcttcttaattctttcctttacatcctcttcatcatcgtatattatatgtttattttctagatttgtttcttctgtttttattatattccttaatttctatattcctgtccctctatatttcatac

SEQ ID NO: 92054 - DNA, 347 bp, Homo sapiens
ttgtagtcggcccggctgcaaagcgtttttctgcaggctgttttcccaggttccctcggcctgtacctcgcgcactcctcttgctccaggtccttcagtctccgctcgtctcaccgtaggctgtgacgacatgagcaacaaagaagggatcaggagggttcaggaaaaggaagcatgacaatttcccacataaccaaagaagagaagggaaggatgtcaactcatctatacccgatacgtccgcctttaatcatctcaacatataacccgacgtcagcaacgactaatactagtaacttatgatattctatcttatatctaaactgatattctaaatcacacacttc

SEQ ID NO: 92055 - DNA, 393 bp, Homo sapiens
  misc_feature (1)...(393): n = a,t,c or g
atttgctccttttntggcatataagttcttaagaatgtccgtcctttgtcatatattgtaactttgtttagccttatttgtcatttagcatagtttggggtatttcagtatacaagccggtgccataccaattaaacaggcgtgaactggaaggactgaggaaaaacagctctacgacaaatacccacatgctgtggccacatggcttaaccctgacccatctcataatcagaatctcctagccccacacaatgctgagtcctctgaagaaaccaatgactttaatcaagagacccttcccagaagggcaacgaaagccatgaccacatggatgacatggatggggaagatgatgatgaccatggggacaggcaagactccactgactggacg

SEQ ID NO: 92056 - DNA, 1992 bp, Homo sapiens; identical to SEQ ID NO: 63291

SEQ ID NO: 92057 - DNA, 1163 bp, Homo sapiens
gtgcacattcccccaatggcatgctgtgagcccgcagagtcatccttggccccgtcccgcccttggggaagaatagtgcccctctgtcctcaggccccttcgacgtgctgagcatccagacgtggcgaggagcccgaagtcgctggggtcccctctgcagggtcctgcttgttgcctgtttccggcgggcggggtgcacaatggggtctctaaggaccgtttcccgccactggccccattgtcactgtctccgccttcctcctcggcctttcagccgcataaagggccagtgaggtttgggacagccacagcccaaggctccgaggctaaaagcccctgggtgggggtgttccaggacacctggaccctgtgtgagctgcctcctctcaccccaacccctcggatcctgggaaagagacagccatggctcaagggccagggacccctgggctgagccccagaaatgggctttccattctcgcctgggccggggtgggggtggaggccagagccttgacccaggcagatgaagcccccagctttcaagggggaaactgaggctgtgtgagggacacagctgtgcacgggcccacaaacacggtcctttctctaggttagcggatgcagatgcctgatgagtgccatgccctctgtggacacctggggaggggggtcacctccagcgccgccctgggacttccactgcacgtgcaagagacttaccctttcacacagatcacctgcctgccgcagggctgatgaggatgggtgaggagcgcagccactgggtgtcatgcactgtgggggttctcccaccttctgcccctcctcaggttccttgctgcttctctcctctcccaactgtggcacgctgagggctcaggcacaggaccgctcctctggggcagcctccaataacccttggacaacctccactttttcatcttcagccctgaccactccctggggcccatagccttacatccatctgcccccagcccaaacacttctgcaaacactagaaaaggaggtagcccgtgtgccctcctgcaccgcctcctccactcctgtcttggagaggctttcccgtgggcccagcaacccccttacctttggcacttgccctgattctctggccagcttcctacaacctctccttttca

SEQ ID NO: 92058 - DNA, 412 bp, Homo sapiens
aatctggtttacaccggctcctgccctgccttcactcttctttcctgattcatgactcctctgctttggactgaagcactgcaggagtttgtgaccaagaacttcaagagtcaagacagaaggaagccaagggagcagtgcaaaggatttctcagtatagggagacgtagacatagaggtgacctgtcccatctgcctgcaactcctgacagaacctctgagcctaaattgtggcctcagattatgacaagtctgcataactgcttagatcaaggagtcagtgatcatctcaggagggtaaagcagtagtcctgtgtgtcataccacattccagcctgcgaacctgcgaactagtcgatatttgccaacatagtcgataaagtcattgggtcctgatgagccccaggagggg

SEQ ID NO: 92059 - DNA, 419 bp, Homo sapiens
tatacacctttatatacttcaattccttgcagaaattcagaacttctgaaatgctggctagccctggaatgtccttgactgtgctaatttataaacctgtactgcaaaagacagctaggtattgttaatttagctctcagtttatagatttgtgttcttcacggctatcacaccgagttccttgcttccttgctgtacacagactctctgattatggaatatttgatatcaatagccgctactgatgtaatgatggcaaaacctcaggagcagttaatgcctgtcatttatcctgcagtgctttgctgcatgataacatcgctgatgctgtatctagtgcatagagggttgtcccttatacacatagccttaaattattgcatgctaggataaatttgaggcaatacaacaaatatccg

SEQ ID NO: 92060 - DNA, 472 bp, Homo sapiens
atcgaacgctgcggtactgtcctgaatccgggtcgaccacgcgtccgggagcatggagggtgtagaagagaagaagaaggaggttcctgctgtgccagaaacccttaagaaaaagcgaaggaatttcgcagagctgaagatcaagcgcctgagagggaagtttgcccaaaagatgcttcgaaaggcaaggaggaagcttatctatgaaaaatcatagcactatcacaaggaatataggcagatgtacagaactgaaatttgaatggccaggatggcacgaattgctggcatcttctatgtacctgcatatcccaaattggtcgttggaactatattcactaggcattaattgtgtctagtctcctattcagtaactctggtttctcattttattctttatttgataattctcctcattcatcacccagtcctgtctctgttgtctccttatcggcattcgatcattataacg

SEQ ID NO: 92061 - DNA, 375 bp, Homo sapiens
tgttagaattgtggtaaagctctctgttgttcccatttacatgaaagatgtgaacagtcacattgtagaaaaatgctgtgagagttgggaatctggaaccacttctttattatctcaggtcataatgaacttgtaagaattcacagtggcaggaaaccctatgtaaatggaaaatatgggaaaggcttcatttaatccataggactgataccacaaaacttcccactaggagaaaaacctatgtttatacggaatgtgggaaaatcttcacttatttctcaagccttaaagtgtatgtcaggattcccagtggagagaagccatattgatgtaaggaatgtgggaaagcccttgcctgccacttagtccttgatg

SEQ ID NO: 92062 - DNA, 414 bp, Homo sapiens
cggagctagaaagagcatccaaacttaaacactagaaaagctgcaaattaccaactcctcttaagcccatcagaaacgtttagatggtagtaaatatagacaaggtgatatctaaggagagacttgaactgcagggaaaaaaacaggcaccaaggttttgttttaaaaagaaaatatttaaggcaaaaatggtaacaatattctggctgtttatgtaaaaggaaagtatatggcaacagtagcacaaaggatggacatcgggaggatgggaggtaggtatcattctaaacatgcaccgatgcctccacccaatgcctcacgcctcaatcctcagaacatgtgaatataatgagatgttgcttccatgactgttaccttatatgaacagttgaccttcaccagcttctgctcatt

SEQ ID NO: 92063 - DNA, 435 bp, Homo sapiens
tgtgattccaatacactagacaactcagaagacactatttaacagcagtcttatctaaagaaataacacctccagggacgaagcatcagaacgcttcaattaactggggaaaatgagaagaattgtgaagtttcagaacgtattagaaggtccggaccatggaaagagatttcttttggggattatatttgccacacatttcagggagattgctgggctgatcgatccccacttcatgaagctgcagctcatgggcgcttactggcccttaaaactttaattgcacaaggtgtcaatgtgaacctttggacattaaccgggtgtcttctctccacgaggcatgcctttgaggtcccgtggcctgtgccaagccttattggaaaatggtgccacgtcatggagggacagttacgggccccccccttttaatggttg

SEQ ID NO: 92064 - DNA, 2640 bp, Homo sapiens
ggaggccatggccgtcgcccccgaggagcctccgcccagcgccggcgaggacatcgtgggggacacagcaccccctgacctgtgtgatcccgggagcttaacaggcgatgcgagcccgttgtcccaggacgcaaaggggatgatcgcggagggcccgcgggactcggcgttggcggaagccccggaagggttgagtccggctccgcctgcgcggtcggaggagccctgcgagcagccactccttgttcaccccagcggggaccacgcccgggacgctcaggacccatcccagagcttgggcgcacccgaggccgcagagcggccgccagctcctgtgctggacatggccccggccggtcacccggaaggggacgctgagcctagccccggcgagagggtcgaggacgccgcggcgccgaaagccccaggcccttccccagcgaaggagaaaatcggcagcctcagaaaggtggaccgaggccactaccgcagccggagagagcgctcgtccagcggggagcccgccagagagagcaggagcaagactgagggccaccgtcaccggcggcgccgcacctgcccccgggagcgcgaccgccaggaccgccacgccccggagcaccaccccggccacggcgacaggctcagccctggcgagcgccgctctctgggcaggtgcagtcaccaccactcccgacaccggagcggggtggagctggactgggtcagacaccactacaccgagggcgagcgtggctggggccgggagaagttctaccccgacaggccgcgctgggacaggtgccggtactaccatgacaggtacgccctgtacgctgcccgggactggaagcccttccacggcggccgcgagcacgagcgggccgggctgcacgagcggccgcacaaggaccacaaccggggccgtaggggctgctatgccggcccgggagagggagcggcaccgccccagcagcccccgcgcaggcgcgccccacgccctcgccccgcaccccgaccgcttctcccacgacagaactgcacttgtagccggagacaactgtaacctctctgatcggtttcacgaacacgaaaatggaaagtcccggaaacggagacacgacagtgtggagaacagtgacagtcatgttgaaaagaaagcccggaggagcgaacagaaggatcctctagaagagcctaaagcaaagaagcacaaaaaatcaaagaagaaaaagaaatccaaagacaaacaccgagaccgcgactccaggcatcagcaggactcagacctctcagcagcgtgctctgacgctgacctccacagacacaaaaaaaagaagaagaaaaagaagagacattcaagaaaatcagaggactttgttaaagattcagaactgcacttacccagggtcaccagcttggagactgtcgcccagttccggagagcccagggtggctttcctctctctggtggcccgcctctggaaggcgtcggacctttccgtgagaaaacgaaacacttacggatggaaagcagggatgacaggtgtcgtctctttgagtatggccagggtgattgaaaactcagcctcaaaacaaaaaattcactagttatgattcaacgcgttcaacagaagccatccccagcccagcttaaattataaagatagacaataactctgttccaatctgcgtggtgcttctttagtaaatactgtacagattttaccatggagaactttttttttagtttttaccttttcttaattacccttattccgaatggacgaacactttctaccactgctgaccattgtaaaataccgtgtatataaatcccattgaaataatgccctggaatagaacatctcaaatgctgcttaattacagactcaggtcgattacttgtatttcatgtaatgttccctccaagttagacatctgggtgcaagaccaaccgggagaccatgggaattgtcaaaagtacaaacttgacagtgtgtatatttaatttaaaggacttatttaaaaaactcacaagctctcacctagactttggagagcagtctgttttctgtaatgtctgatactagaaactaatttgcttattttagttgtattcaagatttgaagatgtattttatagacaagttctgtttttgaactttgtggaactgttccaatcaatcaatttcccagttatgatgagtatttacattatgaatgtataacccagacatgatttgtaaagccgacagtatgtttctattacacaacactttttgatacagcgtctcttgtcttcactgatactggagtctccgttgtctgcttggtcccttcgagtttctagttacagacacaatcatactgtgattttatttttaatatggatatgctatcaaactgtgatacacttataattcactggtcctgcatcaggagatggagtggggaaaactgtatttaatacagtttgtatctgaataatctgtatggtttatacagtttgtgttgttcagagatgtttaaagtttgatctttgtttttctaaagattaaaaaagcacttgccccactgtaaatatacagcatgtaaaatttctatagtatataaatggcagcaaatcaaaaaaaaaaa

SEQ ID NO: 92065 - DNA, 1012 bp, Homo sapiens
cttggagataaaacaggaggagaagtttgttggtcaatgcataaaagaggaattgatgcatggagagtgtgtaaaagaagagaaggatttcctgaagaaagaaatcgtggatgatacaaaggtgaaagaagagcctccgataaatcacccggtgggctgcaagcggaaactggccatgtcaaggtgtgagacttgtggtacagaagaagcaaagtacagatgtccacgttgtatgcgatattcctgcagtttgccctgtgtaaagaaacacaaagcagaactgacatgtaatggagttcgagataaaactgcatacatttcaatacaacagtttactgaaatgaatctcctaagtgattatcgatttttggaagatgtggcaagaacagcggaccatatttctagagatgcttttttgaagagaccaataagcaataaatatatgtactttatgaaaaatcgtgcccggaggcaaggtattaacttaaaacttctacccaatggattcaccaagaggaaggagaattcaaccttttttgataagaaaaaacaacagttttgttggcatgtgaagctccagtttcctcaaagtcaagctgagtacatagaaaaaaagagtaccagatgataaaactattaatgaaatcctaaaaccttacattgatcctgaaaagtctgatcctgtaattcgtcaaaggttgaaagcctacattcgctctcagactggggttcagattttaatgaagattgaatatatgcagcaaaatttagtaagatattatgaactagatccttataaaagtctcctagacaatttgaggaacaaagtgatcattgagtatccaacattacatgtggtattgaaaggatccaataatgacatgaaagttcttcaccaagtgaagagtgaatctaccaagaacgttggcaatgaaaattgagcattttttctggaagaagaaagtgaaaacttccagacaactgcagcagactctgcattgatgggctggtg

SEQ ID NO: 92066 - DNA, 387 bp, Homo sapiens
ggcgaaagtaaagtaatacaaactggcagaaaatggataaaactccaaaatataccaagatctagatttcattcgtttggcttgaggacagagaagaaaagatgcaaactgtctaacaggcatttggaagaaaagccattattttaaagtacagttgaattgtacatactattttggtaacagccttttgtcattatgagtagtatcagaaaatgcatttgaatgaaaactataaaacattaatgcaataaattgaaggggacataaaaaaatagagaaatattccatgttcatgttttggaataatcaatgttgttaaaatgtccatagtacccaaagcaatgggtagtacagattcaatgcaatccctatcaataccaattacat

SEQ ID NO: 92067 - DNA, 445 bp, Homo sapiens
ttttcagtcagaatcatgaaagttgaatcaattgagatgtctacggtgttggctactgtttctgctgtgaattgttggtcctttttagttcaggcatgaacaagattactttttcctcacaaatttatgtggatggtctgccagtgtgggcttcatcttttacatcatctaataccttcttaaaacaagttacccatttataagctgctaattttgggacgtcattattctataaacttttcataaagcatgaatgatttaatcattcttccactcaagcatcattttaaatttggtttttgtttttgcttcaaatttaccaaagtgcatgttgctctgataggggctgtttccaaactgatgtttcatcctacttagtgcgtcaaagtagatccttttcatacatgttataacaagttagtgtaagttgattttagtgccaaaa

SEQ ID NO: 92068 - DNA, 408 bp, Homo sapiens
acaatttgagtgtagtgtgtctcagcatgtacttgtttggttcatcttcattgggggtatattggtcttcggggatctagatgttcttttcattctccatatttggaaagctttcagccattatttatttgaataagctttatggacctttgtatattctccttctgggacttccctactgaatatattgatcaatttgattgtgttccattagtcccttaagctttctttattcttatgtattatttttcttttcgctcctctgacttataatttcaaatgacccctctttgtattcacagattctttcttatgcttgatctagtctgctgttgaacccctttagtgaatttttcagcttagctattgttttcttcagcttctaatttttatttggctctttttctg

SEQ ID NO: 92069 - DNA, 662 bp, Homo sapiens
ttttttttggctcatcagcttatcgttaatgtatcctatgtgtggcccaagacaattcttctccttccgttgtggcccagggaagctaaaagagtgaatacccctgtactaaaagatcattaatgatctaaaataagtgatcttataaagaattgataaacctccagctagactgactgatccaggaaaaaatagaaaaaacaaaaattaccaatatgaagagactgcaatacagattagattctacagacattaaaaggatattaaaggaatattctgaaaaattttatgccaataaatccaacaacttggatgaaatgaaattttcctaaaagacacaaattaccaaaactgacaacagaaaaatctgaaaatatctcctaaaaaatcttaattctcccacaaaaaactaaaaccaaaccaaacaaaaccctctaggttcagattacttcactggtaaatcctatccaccatgtaaagaagaaatcatacctatcttacacagctatttccaaaaacagggaaggagacagcacttcccatctaattttatgacacccaatatcaccttgacaccaaaatcaaataaagacattacaagaaaaggatacaaaagtccaatatctcccatcaacaccaatatagaaatcttaaaaaaaaaa

SEQ ID NO: 92070 - DNA, 398 bp, Homo sapiens
aatcaaatagaatgtggtccttgccttcaaataatttaaaatctagtgagagagccaaattaacggaatattaaaattgttttaaaaatcagttgattaaaataatttaatttaaaagatgaaaaagagaaaagggaaacaacagatgagacaaatagcaagatgatagacttaaatacattagtaatcacactaaaggtaaatggtccaaacaccccaattaaatgtatagactatcagattagatgaaacagcaaagcccaactgtatgctacaagaaacacaccttaaaattaaaaatacacattgtttaaaagtaaaaggatggaagaagatgtgccctgctaatctacattaaaggaaaactagaccacattaatatcagataaagtagattt

SEQ ID NO: 92071 - DNA, 1536 bp, Homo sapiens
aacttccgtgtcgacgatcccgcggggcttggcctctgcccggccacagagccggagctggaggtgctgtcccgtctggcggcgatccccgggcagggcccggggccggggtttgaagatgctgaacgtcccttcccagtctttcccggcccccaggtcgcagcagcgtgtcgcctccggggggcgtagcaaggtacctttaaaacagggcagaagccttatggattggattcgactgaccaaaagtggaaaggatctaacgggattaaaaggcaggttaattgaagtaactgaagaagaacttaagaaacacaacaaaaaagatgattgttggatatgcataagaggtttcgtttataatgtcagcccttatatggagtatcatcctggtggagaagatgaactaatgagagcagcaggatcagatggtactgaactttttgatcaggttcatcgttgggtcaattatgaatccatgctgaaagaatgcctggttggcagaatggccattaaacctgctgttctgaaagactatcgtgaggaggaaaagaaagtcttaaatggcatgcttcccaagagccaagtgacagatacacttgccaaagaaggtcctagttatccaagctatgattggttccaaacagactctttagtcaccattggcatatatactaaacagaaggatatcaatttagactcaataatagttgatcatcagaatgattcctttacagcagaaacaattattaaggattgcttatatcttatacatattgggctaagccatgaggttcaggaagatttttctgtgcgggttgttgagagtgtgggaaaaatagagattgttctacaaaaaaaagagaatacttcttgggactttcttggccatcccctgaagaatcataattcacttattccaaggaaagatacaggtttgtactacagaaagtgccagttaatttccaaggaagatgttactcatgatacgaggcttttctgtttgatgctgccaccaagcactcatcttcaagtgcccattgggcaacatgtttacctcaagctacctattacaggtacagaaatagtaaagccatatacacctgtatctggttccttactctcagagttcaaggaaccagttcttcccaacaataaatacatctactttttgataaaaatctatcccactggactcttcacaccagagcttgatcgtcttcagattggagattttgtttctgtaagcagtcctgagggcaattttaaaatatccaagttccaagaattagaagatctctttttgttggcagctggaacaggcttcacaccaatggttaaaatactgaattatgctttgactgatatacccagtctcaggaaagtgaagctgatgttcttcaataaaacagaagatgatataatttggagaagccaattggagaaattagcatttaaagataaaagactggatgttgaatttgttctctcagcacctatttctgaatggaatggcaaacagggacatatttcaccagc

SEQ ID NO: 92072 - DNA, 5762 bp, Homo sapiens
ttttttttttttttttttttttttaaaacagttttaatttttctttgtataagcaagatgcccccataaaacattcacttttcaaaaacctttatatgcaaataacttacaaaaatctgtgtaagataaaagaaacaactaaaaccagacaggcaccaccaccacagatcctaatagcaggccagatcaagatgcagatctcctgaaaacaagctgctcacattcccagaaccacaaccccctgggggtggaatcttgtcttctttaactcgctgggtggtagagcccataggaattactcaaactatgaaaatcccaaagcatggtcaccagtgagctgtctctttgggccttttgattttcctatttgaaaatccacaacggttccaaacgagtagctctcacaccacttcaaatacgtggcaacctggtaaccactaaaatgcaccttgtgaaaaaccgtctcagcggctgcccccgcctcctctgctggatgtgaaatggcggtcggcgagtggtttgcgtccgtgacatcatcatcatggcaacaagagctgcagcctgggaccgaggagcccgtgtgattcccggcggtggcgcagtggcggcagcaccagcaccgacgaaagcttcgagggcttctctccttgcggccccttgccgggtgctcctgaggaggcggcggcagcagcgcctacaccgccccgcccgccgttcctcgaggtgcctctgtgtgaggggagggggccgtgccgagaaggggagggggcgccgccgccgctgcggagggagccgccgccgctgctgctgccgctgccgggtcgccagtgaagggaggcagtggcggcggcggcgaacatgttttcagtaaggatagtgactgcagactaatacatggccagcccgctgcaggggctggatacctgccaatcccccctcacccaggcccctgtcaagaaggtgccggtggtgcgagtcttcggagcgaccccggcagaataaaacccaagacaagccacataaaagcaacctaaaaattaaactgtcatcatattatttgttttaaaactatggaataatatatctgaggaagatttctctcaaaattgtttttctcaatttcaagtcagaagacatgtcttcatctacatggcatctttccttacctctatgtgccatacgatggttatggacagcagccagaaagctatctttctcagatggcattcagtatcgacagagcacttaatgtggctttaggcaatccatcttccactgctcagcatgtgttcaaagtgtcattagtatcaggaatgcctttttatggttatcatgagaaggaaagacactttatgaagatctatctttacaatcctacaatggtgaaaaggatatgtgaacttttgcaaagcggagccataatgaataaattttaccagcctcatgaagcgcatattccctacctcctacagctcttcattgactacaatctttatggcatgaatttaataaatctggctgctgtcaagttccgaaaagcaagaaggaaaagtaatacattgcatgcaactggatcctgcaagaatcatttatcaggaaattctcttgctgatactttatttcggtgggaacaagatgaaataccaagctctttaatattggaaggtgttgaaccacacagtacatgtgaattacaagtggatgctgtagctgctgatatcttaaatcgtctggacattgaagctcaaattggtggaaaccctggtctacaggccatatgggaagatgaaaagcaacggcgaagaaacagaaatgaaacttctcaaatgagccaacctgagtcacaagatcacaggtttgtgccagcaacagaaagtgaaaaaaaatttcagaagagacttcaggaaattctcaaacagaatgatttctctgtaacattatcaggatctgtggactacagcgatggatcccaggagttctctgctgagttaacattgcactctgaggttctgtctcctgaaatgcttcagtgtacaccagccaatatggtagaagttcacaaagacaaagagtcaagcaaaggtcacactagacacaaagtggaagaagctcttattaatgaagaagcaattttgaaccttatggaaaatagtcagacttttcagcctttgacccaaagactgagtgagtcacctgttttcatggacagtagtcctgatgaggctctggtacatcttcttgctggtttggaaagtgatggatatcggggggaaagaaataggatgccatcaccatgtcgctcctttggaaataataaatatccacaaaatagtgatgatgaagaaaatgaaccacagattgaaaaagaggaaatggagcttagtttggtgatgtcccagagatgggacagcaatattgaagaacattgtgccaaaaagagatcactgtgcagaaatacccacagaagttcaactgaagatgatgactcatcttcaggagaagaaatggaatggagtgataacagtttgcttctagccagtctttctatacctcagttagatggaactgcagatgaaaatagtgacaatccattgaacaatgaaaattctagaacccactcttctgtaattgcaacaagcaagctttcagttaaaccctccatctttcacaaagatgctgctacattagaaccctcatcttctgctaagattacctttcagtgtaaacacacaagtgccctttcttcccatgttttgaacaaggaagatttaattgaagacctttcacagacaaacaaaaatacagaaaaaggtctagataactcagtcacttcttttacaaacgaaagcacttattctatgaaataccctggatctttaagcagtactgttcattcagaaaattctcataaagagaatagtaagaaagagatcctcccagtatcttcctgtgaaagtagtatttttgattatgaagaagatattccatctgttacaagacaagtaccaagtagaaaatatacaaacattagaaaaatcgaaaaggattccccttttatacatatgcaccgtcaccctaacgagaatacattgggcaaaaattctttcaacttttctgacttaaatcattcaaaaaataaagtatcctctgaaggaaatgaaaaaggaaacagcacagctctgagtagtttattcccttcatcatttactgaaaattgtgaattactgtcatgctcaggggagaatagaactatggtgcattctcttaatagcactgctgatgaaagtggactaaataaacttaaaattaggtatgaagaatttcaagaacataaaacagaaaagccaagcctcagccagcaagcagcacactatatgttttttcccagggttgttctttctaactgtcttactagaccacagaaactatctcctgtcacatataaattacaacctggcaataaaccatcccggttaaaattgaataaaaggaaacttgcaggtcatcaggagacttctaccaaaagtagtgagactggatccacaaaagataattttatacaaaataatccttgtaatagtaatcctgagaaggataatgcattggctagtgatttaactaaaaccactcgtggagcttttgaaaataaaacacccacagatggttttatagactgtcactttggagatggaacgttagaaactgagcagtcctttggactatatggaaataaatacacacttagagccaaacgcaaggtaaattatgagactgaagacagtgagtcaagttttgtaactcacaactcaaaaattagtctacctcatcccatggaaattggtgaaagtttagatggaactctcaaatcccgaaaacgaagaaaaatgtctaaaaagctgccccctgtcatcataaagtatattattattaatagatttagagggagaaaaaatatgcttgtgaagctaggaaaaatagactctaaagaaaaacaagtaatattaacagaagaaaaaatggaactatataaaaagcttgcacctttgaaggacttttggccaaaagttcccgactcccctgcaaccaaatatcccatttatccactaacaccaaagaaaagtcacagaagaaagtcaaaacataaatctgctaagaaaaaaactggtaaacaacaaaggacaaataatgaaaatattaaaagaactttgtctttcaggaaaaaacggtcacatgctattctttctcctccctcaccatcttacaatgctgaaaccgaagattgtgacctgaattatagtgatgttatgtctaaactaggttttctttctgagagaagcacaagtcccataaattcttctccacctcgctgctggtctcccacagatccaagagctgaagaaatcatggctgctgcagaaaaagaggcaatgctttttaagggtcctaatgtatataagaagactgttaattctcgtataggaaaaactagtcgcgcaagagcacagattaagaaatcaaaagcaaagcttgctaatccctctatagttactaagaaaaggaacaaacgaaatcagacaaataaactagtagatgatggaaaaaagaaaccaagagcaaaacaaaaaacaaatgagaaaggtacatcgagaaagcatacaacacttaaggatgaaaaaataaaatctcagtctggtgctgaggttaagtttgtactgaaacaccagaatgtgtctgaatttgcaagtagttctggaggctctcaactactttttaaacagaaagatatgccactaatgggctctgctgtagatcatcccctttctgcttccctacccactggaattaatgcacaacagaagttatctggctgcttttcttctttcttagaaagcaagaagtctgtagatttgcagacattccccagttcacgagatgatttgcatccatcagttgtttgtaattctataggacctggagtctcaaaaattaatgttcaaaggcctcataatcaaagtgctatgtttactctaaaggaatcaacgttaattcaaaaaaatatatttgacctttccaatcatttatctcaggtagcacagaatacacagatatcttctggtatgtcctcaaagatagaagataatgcaaataatatacaaagaaactatttgtcatcaatcggaaagttaagtgaatatcgcaattccctagaatcaaagctggaccaagcatatacccctaattttttgcattgcaaagacagtcagcagcagattgtgtgcatagcggaacagtcaaagcacagtgaaacttgttctccgggaaatacagcttcagaggaaagccaaatgcctaataattgctttgtaacttccttgagaagtccaatcaaacaaatagcatgggagcaaaagcaaaggggctttattttagatatgtcaaattttaaacctgaaagagtaaaaccgaggtcattatcagaagcaatttcacaaaccaaagcactttctcagtgtaaaaatcgaaatgtgtcaacaccttcagcatttggtgaaggacagtctggactggcagttctaaaagaattgttacaaaaaagacagcagaaagcacaaaatgcaaatactacacaagacccattatccaataaacatcaaccaaataaaaatatttctggttcccttgagcataacaaagcaaataaacggacacgatcggtaacgtccccaagaaaacctcgaactcccagaagtacaaaaaaaaaa

SEQ ID NO: 92073 - DNA, 876 bp, Homo sapiens
  misc_feature (1)...(876): n = a,t,c or g
ggaatatctccaaagagggattacaaggtcaaagagcatgaagtattttatagctcttgttttatattgccagattgctttctagaaagatccaatctttgggttggaaggaccttaaaggtcatctagtttagcctccccaccccctctgaatgcttgaatcccctcgacaatttatgatgccaccagcaatgtataagcatttctgtttaccaatagctctgccagtattgggttttgccatttttatttatttttgctagtttaatagggtatgtatagttgttcttgaagagttgttttatttcattaattgctagcaaggctgagcacttttccatgtgatgatttactagttgtatttccttgggtgtaaaatgttcattcatttcttatgaccacttgttaagaggaactgatctcatatatttgcatcagaactgtatttttatgttatattgtatagtttgctctcctgcccctctccttaaaactgaatggtgccaataatttgatactaatgactacaaaaaaaggtaatgcctcatttactagtattgttgtaaaatgaggaatgtatgtgaatattcagataaccgaggattaaccctttaagtgctgaatctttaaaattttaatatatttttttttgagggaaatctttctaaaatgtattacgcacttccctgccttagtaaacagagtatactggagagtatttaaccttttcttgatgagtcatggtcatgattataaacatcagccccttttataccttggtacggggcagtgatatcattaagagctatcaatatgtgtagggcttggcttggccttttataggatattatgctgttctcactgatnggtntttac

SEQ ID NO: 92074 - DNA, 1672 bp, Homo sapiens
tttcccttcaaagatttttttttattaaatggttttttaagatcctaaagtctcccagtttcccctatatacataagaccatttaaaccacaacctggttaccaccgaccctttcgtgatgattcttggccaaacccctgaactacaagcacatccatttacgcctgaaaccagaattgtcctgagattcgagcaagacacaaggcggcaattgggtaccacagcttcatggaagtaagtggtgggaatttgcatattattttgttaaatgagggtccagttcttttgggccatggcccaaatttgttgatcccagtgagggtacagatgagggcctggatttagggtgtgcggtaaggactgcccttcacagaagcaaaacaggcagctgcccctttcagcaggctcggagtctccctccaaggcagggtctgccccgagggcttacagggggtttttccggacatcaatcatccccgggctggctcgtcgcagttcccgccggggcttggacaaaggcccaaagttccagggcaggcctgcctcacccacaggaagcacccgccccaccaggggctcagccgcctcccgctgcctcagttcctcgggggacccctgctcctcaccacacaggctcgagcgtttccaggtcaagggtaacggagcgtggaccaagtcccgcgtctcctcccgggtgcggggggccccctcagtgaggggggacagccagagaagctcgggtgccaggtggagctcatcttcatttccaggagcctgtctgccctccgagcacaggctcctcttctccccacccctgctgtggcctacagcgttcacaccgccgagcttctgtttcagttcctggtttatccacatgtaacggcccagttccttctccagagcttgaatccgggcctcatactgcctcctgctgtctgctaacccttcaccgaggtggtctcgactctgctgcaggagcagctgcatgttctgctcgtgctccttctgctgcagggtcagctggcggtccatctccaggcgctgccgctccagggccacctccagccagtacaccagcctctgctgctcctccagctgcatctccagttccgagaaggcaatctgctgctggtgctgctcctctcggagcgtcaccacctgtcccaagacccagccaggctcagcccgcatcatgacccctcttcatccagctaatcctcaatcacagacacagtattggcacacttgccaccacggcactaagaaatcaccagggtcttccctgctgagccaagactcagcctcagacacctcagcagtgctctagttatcttccaacgatcagagctggctctcaccttatctgctatctctgccacaaaccctttcctagccacacactatggagctgggcagagcgtcaagttgtgggatttcatctagaccaacctcagcactatggacatctgggaccagataattcttggttgtgggggcctgtcctgtgtgttataggatgtttagtaacatccctggcctccacccccaccactgtgacaaccaaaagtatctccagccatggccaaatgtcacaaaagggcaaaaacttcccctactgagagctactattgtggccatggaccaccctgaggttagccaatcagagcagaag

SEQ ID NO: 92075 - DNA, 1590 bp, Homo sapiens
ttttttttttttaaagttatatcaataagcagctttttattgaaggactgaaagaattaaatagaaggcacagtagcactgtaaagctttctcagaacataataatctttttctatgtatgtgtggaacccagactttcttttttgttgttaaaaatgtcttctggacaatcagaaaatctttatttgtcatccttccctttggtcttttctgtaaaccattttctcgaaaactggccagaatcttgttctctctctttcgtctctcttcttgggttaaacggatgcaagggctctcttctcatcagcactgtagattctggttctcttttcgcagtccgcacagcctccattcggcgatgcctgcttaccactcattacataacctgagcattcaaatgatggcaatttctttaccttgtcaagccaatttcacctcttcgtgggatacgttttccagcttttacatattcagccatagctgcaccttcaccaggtaacagagcatggccatagttcaaaggtttatcatcttgagaggtaagtgtttttggagcctctgggccaattaaatctgatggttcttcagcctttgttcgatccttccagggattttccagaaactcttcttgggattctttagagcttgaatcactggactcttttctgctcttcttagacctctttttcttatatttcttcgatctgtgtttcttcttcttttcctttttcttggctttctttgctctccttttgttatcttcatcactggagtctgtttcagaatcagagtcactgtcgctatcttcagaatacttcttatgttttcttttcgatgattttttctttctccttttcttggacctttcttttgaacggctagacttcttctttttttcttcttctgaagtagaagctgaagtagtgcttttctttggctcttcatcctccactggtgtatgttcatcagaatctggttcaggattctttggagaaagtccccatacttcaggagctcccaattctccaattctctctctctcacttaatctcttctgccgcaggctctcctccctctccttgtcgaggaggctaggccaaggcttgtcgctcccgtaggggcgcgagtagctgccgtaatagactgacgaggaggcagaagcgaaggggatgccccggggcgcagagggccgctctctagaacgcgaccgcgagcgtgagcggtaggactggtttcgggagccttggctgaggccacccagctgatgggtgagtccattccggtccccggaccgagagcaagagtgcgagcgagagcggcggccccgcggggagcgggcagatttgctgggcttcggactcttcgacgaactgcgacgtcttccccccgagcccgaggcctccctatccgggctgcgtgagccggacaccggagccatggctactggggggccccagcagccgtgggacaagggggcgctctcgcgagcctaggaagatgtctgttgccttggttcccgggacctgccgctgcggaacagcccaaatctgaggaaaccttggacacagttctgggtacttctgcaaaacc

SEQ ID NO: 92076 - DNA, 452 bp, Homo sapiens
  misc_feature (1)...(452): n = a,t,c or g
nctcgataaccntgcggtaccgcnccgctgaccccttcgacccacgcgtccgattaaattgtacaaataaacatgaaagcctgtttcaaatcatttaaagaaagcttactggcaaatggaaaaaagtaagttgtatagcacgatacataaaaggttaatatccttaatgaataaacaacacaggagtaaggaaaacacaagaaattcatggaaaaacagacaaaagacatggaggggacaattctttggagaatcacagagaaccaataaaggaaaaatgaagccgcactcagtattataaagatccgcaaataacgcagtcgagtgatagcatatttttaatctcttgggttaaagatctagacaaacatctgaattttaattagatgccccaggacacagagactttatcaaaaacatgaatacagggacttcttgggttgactgtggtg

SEQ ID NO: 92077 - DNA, 367 bp, Homo sapiens
cttttccccaaatgtgctcttcctatttccccatctcagtagatggcaactccgtcttccaactgtgttctggcatcgtctcggactccctgctttcacaatgcatcaacatatcccaatggggctaccttcaaaacatactcagaattccaattccaccactaccaccatgatccaaacaccatgtctcttacttcaataatttcaagagtttcccaaagatctccctgcttgtatactgccccccgccccctcaatctacacaggagccagagaaatcctgttaaaaccaaagtcattcttctgctcaaaaccctcccagggttcccatctcattcagagtaaaagtcaaagtccttacaatggc

SEQ ID NO: 92078 - DNA, 870 bp, Homo sapiens
  misc_feature (1)...(870): n = a,t,c or g
cgttgctgtcggccggcaggaaatttaaactgaagccgcggccgaaaacgccaagagattgatgctgtagctgccctgagataaccaggactgtggaatcgggaagagctcatggagctcgcgaatgtaatacggaggcctctgaggaaggagtacggaggccgagaaggagccggcatttgatgagcgaaccgggaaagggagacgattgcctcgagctggagagttccatggctgagagtaggctccgggccccggacctaggagtttccaggtgtctaggaaaatgccagaagaactcaccaggtgccaggaagcatcccttttccggaaagtccttttacttggatctgcctgctggcaagaatctccagtttttgacgggggccattcagcaactgggtggggtaattgagggttttctgagcaaagaagtaagttacatcgtgtccagccgcagagaagtaaaggcagagagcagtgggaaaagccatagaggctgccctagccctagccccagtgaggtcagagtggaaacatcggccatggttgatccaaaaggcagccaccccaggccttcacggaaacccgttgactcggtgcctctaagcagagggaaggagctgctgcagaaggctatcagaaaccagaaatgatgatgcaccgtgcaacagctgtctcattgccgtctttatgtgtgaaaaaacaacagccaaaagaagccagagggaacatgtccagcagcagagtcaagaacacggaaagtggccagacttgaaaggcccccgtncctcaaaaatcgaagatgaaaagcaggaagtttcgtcctttccnatcatcagtttaaatccttttccctgaaatttcttt

SEQ ID NO: 92079 - DNA, 405 bp, Homo sapiens
aatggctgtcctggattgtgttaacatgggttatgtggcgacctatggtttctataatctaaccttttatggctccacggcataattcaccaatagcctacttgcaggagatatggaaggcagaagtgaagaaagcattagtcaggctttatagccaccatatgtggagacagatggatgcataggagcttcagggacacctgcttccaccacattgtcctgatcctttgctctgccaattgagagtattcttagaaccaccactaactgcttgactgccatattttccttccttccttccttctttctttccctttccctttcttttctttctttactttctttttccgagatggagtcttgctctgtcgcccaagctggagtgcagtggtacgatcttggctc

SEQ ID NO: 92080 - DNA, 363 bp, Homo sapiens
cttgctcctctgcaacggactgaagactttgggcaaactttaactagttaactccatgatggacaggcttgccgttaagttacagccttaggaactgggcatttccagccaccacggcgaacacaaatcctatatataatgtaaccttgcttggctttgtagcccagtcggcatgctttatcgggctgggtggagcggggagccctgtggagagcagagagctgccactctgtgccagccctgtggagagcagggtactgccagcagcggaccctcagaagaaagtgcatgacatcagactgcttctttctccacagctcctggatgtacttgtaagcacctatcttggcctacctgatggct

SEQ ID NO: 92081 - DNA, 1347 bp, Homo sapiens
tttcggcgcagtttcctacaggcccggaaacggatcgtgttgggtgaaggtgacggcgtcgagcgacctctctgacctcatctcctgcctgtgtcctcctcgctccctctgctccagccaagcatgcgtccttcctgttcctgggccgagcttgctcctgcctcaaggccttcacgtgggctgtgcctctgctggaactcgctggcccctcagctgcagcattgacttccaaagactcctggcacatgaggaagaaacccagaagaggagagcaaaggagtcaggaatggcttttactcagttgacattcagggacgtggccatcgaattctctcaagatgagtggaaatgcctgaactctacacagaggactttatacagggatgtgatgttggagaactacaggaacctggtctccctggatctgtctcgtaactgtgtaatcaaggaactagcaccacaacaggaaggtaacccaggagaagtattccacacagtgacattggaacaacatgaaaaacatgacattgaagagttttgcttcagggaaatcaagaaaaaaatacacgactttgactgtcagtggagagatgatgaaagaaattgcaacaaagtgactacggccccaaaagaaaatcttacttgtaggagagaccaacgcgatagaagaggtataggaaacaagtctattaaacatcagcttggattaagctttctaccacatccccatgaactgcagcagtttcaagctgaagggaaaatttatgaatgtaaccatgttgagaagtctgtcaaccatggttcctcagtttcaccaccccaaataatttcttctaccatcaaaacccatgtttctaataaatatgggactgatttcatctgttcttcattactcacacaagaacagaaatcatgcattagggaaaaaccttacagatatattgagtgcgacaaagccttgaatcatggctcacacatgactgtacgtcaggtaagtcattctggagagaaaggatataaatgtgatctgtgtggcaaggtctttagtcaaaaatcaaaccttgcgcgtcattggagagttcatactggagagaaaccatacaaatgtaatgaatgtgacagaagtttcagtcgcaactcatgccttgcactacatcggagagttcacactggagagaaaccttacaaatgttatgagtgtgacaaggtcttcagtcgaaattcatgccttgcactacatcagaaaactcatattggagagaaaccttacacgtgtaaagagtgtgggcaagcctttagtgtgaggtcaacacttaccaaccatcaggtaattcatagtgacaagaa

SEQ ID NO: 92082 - DNA, 341 bp, Homo sapiens
atgaaatgatgagatgaactgatgagatgaaatgaaatgaaatactgaaatgaaattgaaataaaactgaaatgagatgaaatgattagatgagatgatgaaataaaatgatgaaatgatgagatgtgatgagatgaaatgatgagatgagatgacatgaaataatgaaatgaaataatgacatgaaattgaaatgagatgagaacatatgagatgagatgaaatgatgaaatgatcacatgaaaagagttgatgacatgatgagataacatgatgagatgaaatgatgagatgaacagatgagatgaaatgatcatattaaatgggatgaaatgaaatta

SEQ ID NO: 92083 - DNA, 314 bp, Homo sapiens
gggcgagtacgggtgctgcaaggcctgggaagagcttcaatgtctctacggtggctaaagcgtcctcccgcgctcaatcgcgctgcaggttgccgaggagcccaagtagaagaaatatggagtttagagcctgacaattttgaaaaattaaagccacggtcatgggttaatttttcttttaaaggggcgcccaggacaagaaccaccctgctctggggtttaggactacccgcttgacacgatattttttgctaagcacgccattaataatgcttgagcctctcacaccatattgagtgggctactgaactgag

SEQ ID NO: 92084 - DNA, 1035 bp, Homo sapiens
gcacgagccagaagccagccccctctgacagcttcctctttggccaagccctgcctctgtacagcctcgagtggacagccagaggctgcagctggagcccagagcccaagatggagccccagctggggcctgaggctgccgccctccgccctggctggctggccctgctgctgtgggtctcagccctgagctgttctttctccttgccagcttcttccctttcttctctggtgccccaagtcagaaccagctacaattttggaaggactttcctcggtcttgataaatgcaatgcctgcatcgggacatctatttgcaagaagttctttaaagaagaaataagatctgacaactggctggcttcccaccttggactgcctcccgattccttgctttcttatcctgcaaattactcagatgattccaaaatctggcgccctgtggagatctttagactggtcagcaaatatcaaaacgagatctcagacaggagaatctgtgcctctgcatcagccccaaagacctgcagcattgagcgtgtcctgcggaaaacagagaggttccagaaatggctgcaggccaagcgcctcacgccggacctggtgcagggcctggccagcccgctcctgcgctgcccttcgcagcgactcctggatcgcgtggtcaggcgctatgcagaggtggccgacgccggcagcatcttcatggaccacttcaccgaccgtgacaagctgcgcctgctctacacgctggctgtcaactcgcaccccatcctcctacagatcttccctggggctgagggatggccgctgcccaagtacctgggctcctgtggcagattcctcgtcagcaccagcaccagaccgctgcaggaattctatgatgcacccccagatcaggcagccgaccttgcctaccagctcctgggtgtcctggagtctttgaggagcaagatatttaggcaatagaattgatttgcagaaggagaatgtattgcggccgctctagaggatcaagagtcgtacgaagaatacg

SEQ ID NO: 92085 - DNA, 345 bp, Homo sapiens
aatgaaaaaatttcatgactaaatagttggatgtttttactatattgtttgatctccagttaaaatacaagagcaacacccaaccatactccttttccttatgaacgctatgaatgcataaacatttcttacaaggtctacagatttaaatcgaaatacccgtctttattcagcgagcggttgttcaccaactcttaccgaggtccctaccacttacacggcccccaccctgatcttctggatgaccgtgccatgtatgctttcccaaaaattctttcaatgacaggccgctctggatcgcttaaggtgtcagatgtgatcccaccgccctaccaaattacaaag

SEQ ID NO: 92086 - DNA, 872 bp, Homo sapiens
aagtgtggtggaattcattacaggcacgcaccaccatgctcagctaatttttgtatttttagttgagatggagtttcaccatcttggcccaggctggtctcgaactcctgacctcgtgatccgcccgccttggcctcccaaagtgctgggattacaggcttgagccgctgtgcctggcagtttcaagaaattttgcaaagggaaggaaagtcttgaaaatcaggagcgtagtggctggtcgccagaagttgataactaccggttaagagcaatcagcaaagctgatcctcttaaggctacttgagatgttgccgaagaactcaatgtggaccattctacagtccttcagcatttgaagcaaattaaaaagtgaaaaagctcgataagtgggtgcctcatgaactgaccgaaaaaaaaagtcattgttttgaagtgtccttatcccttattttttgcaacaacaaaccatttcttggtcagattgtgatgtgcgagaaaaagtggattttatacaacaactggtgatggccagctcagtagatggactgagaagattctccaaagcacttaccaaagccaaacttgcaccaaaaaaaggtcatggtcactgttttgtggtctgctgctggtctgatccactatagcattctgaatcctggcgaaaccattacatctgagaagtatggtcagcaaatcgatgagatgcaccaaaaactgcaacgcttgcagtcagcattggtcaacagaaagaggcccaattcttcacaatgcccttccgcatgttgcacaaccaatgcttcaaaagttgaacaaattgggctgtgacattttgcctcatccgccatattcacttgacctctgtcgacgcggcc

SEQ ID NO: 92087 - DNA, 314 bp, Homo sapiens
cgacaaattgatttttgacaagggtgccaaaataatttcagtggtgaaaggaccatcttttcaacaaatggaactggaaaaactggatatccatatgcaaaagaatgaagctaaatccttaaaatacactatacacaaacattaactcaaagtggatcaaagacctaaatttaaaaaaataaaagaaaaccttcatgaccttggattcggcaatggtatcttaagcataacaaccaaaaggacaagcaacaacaacaaaaaaagtaaagagtggattgtccggctttggagtggcaaccttcgtggccccaggg

SEQ ID NO: 92088 - DNA, 2234 bp, Homo sapiens
atggctgcctccagtatccgtgacgagaggacgcgaacttactacctcccagtcgtccgtgctccgtacacctgcaacttcagaccttcctcggccgccgtaggccggcttggaggctgggggagggcccagaagtggaataattcaggaaagtgcaggttctgggaagtctcggaatcactgaccctggaggatgtggctgtggagttcacttgggaggagtggcagctcctcggccctgctcagaaggacctgtaccgagacgtgatgttggagaactatagcaacctcgtgtcagtggggtatcaagccagcaaaccagatgcactcttcaagttggaacaaggagagccatggacagtagaaaatgaaatccacagccaaatctgtccaggtatgtatgcactgtacaggaaaaaacataatggatatagggttaagtatgattcagagtttcaggcatccatggtgtggggggtgtcttggaacatatcgcccatagatgagggattactgtatatttataaaagacataaggaatttactactgaagtagacaaagggtgtgagacaaacatacaaatgaaagatgataaaatcaagaaagttgacaatcatctacagatgcactcacaaaagcaaagatgtctgaagagagtggaacaatgccataaacataatgcatttggaaacatcattcatcagaggaaaagtgattttcctttaaggcaaaatcatgatacatttgacttacatgggaaaatactgaaatcaaatttaagtttagtcaaccagaacaaaaggtatgaaatcaagaattctgtgggggttaatggagatgggaaatccttccttcatgccaagcatgaacaatttcataatgaaatgaacttccccgaaggtggaaattctgtgaatacaaattcacaattcattaagcatcagcgaactcaaaacatagataaaccccatgtatgcactgagtgtgggaaggctttcctcaagaagtctcgcctcatctatcatcagagagttcacactggggagaaacctcatggatgcagtatatgtgggaaagccttctccagaaagtccgggctcactgaacaccagagaaaccacacaggagagaaaccctatgaatgcactgaatgtgacaaagcattccgctggaaatcacagctcaatgcacaccagaaaattcatacaggagagaagtcatatatatgcagtgattgtggaaaaggcttcatcaagaagtctcggctcattaatcatcagagagttcatacaggagagaaaccacatggatgcagcctgtgtgggaaggccttctccaaaaggtccaggctcactgaacaccagagaactcatacaggagagaaaccctatgaatgcactgaatgtgacaaagcattccgctggaaatcacagctcaatgcacatcagaaagctcacacaggagagaagtcatatatatgccgtgattgtggaaaaggcttcattcagaagggaaatctcattgtacatcagcgaattcatactggagaaaaaccctatatatgcaatgaatgtggaaaaggcttcatccaaaagggcaacctccttattcatcgacgtactcacactggagagaaaccctatgtatgcaatgaatgtgggaaaggcttcagccagaagacatgtttaatatcccatcagagatttcacacaggaaagacaccctttgtatgtactgagtgtggaaaatcctgctcacacaagtcaggtctcattaaccaccagagaattcacacaggagagaaaccctatacatgcagtgactgtgggaaagctttcagagataaatcatgtctcaacagacatcggagaactcatacaggggagagaccgtatggatgctctgattgtgggaaagctttctcccacttgtcatgccttgtttatcataagggaatgctgcatgcaagagagaaatgtgtaggttcagtcaaattggaaaatccttgctcagagagtcatagcttatcacatacacgtgatctcatacaggataaagactctgttaacatggtgactctgcagatgccttctgtggcagctcagacctcattaactaacagtgcgttccaagcagagagcaaagtagccattgtgagccagcctgttgccagaagttcagtctcagcagatagtagaattgccacggaattaaaaaccattatgaatgcaga

SEQ ID NO: 92089 - DNA, 1981 bp, Homo sapiens
aatacaaactccttcagggaaggaaccagtgacatttgaggatgtggctgtggacttcacgcaggaagagtggcagcagttgaatcctgctcagaagaccctgcatagggatgtgatgctggagacctataatcacctggtctccgtggggtgttcaggtataaaaccagatgtaatctttaagttggaacatggaaaggacccatggatcatagagagtgagttgtcaaggtggatctacccagacagagtgaaaggccttgaatcttcccagcagatcatttctggagaacttttatttcaaagggagatactagaaagagccccaaaggataattcattgtactctgttttaaaaatctggcatattgataatcagatggatagatatcaaggaaatcaagacagagttttgaggcaggtcacagtcatcagtcgtgaaacattgactgatgagatgggttccaagtacagtgcatttgggaaaatgttcaatcggtgcacagaccttgctcctttaagtcaaaaattccataagtttgattcatgtgaaaatagcttgaagtctaattcagacttactaaattataacaggagctatgcaagaaagaaccccactaagagatttagatgtgggagaccacctaagtataatgcttcctgttctgtgcctgagaaggaaggcttcattcatactggaatggagccctatggagatagtcaatgtgaaaaagttctcagtcataagcaagcccatgttcagtataagaaatttcaagccagagagaaacccaatgtttgtagtatgtgtgggaaagcctttatcaagaagtcacagctcattatacatcaaagaattcatactggagagaaaccatatgtatgtggagattgtaggaaagccttcagtgagaaatcacacctcattgtgcatcagaggattcatactggggagaaaccctatgaatgtactaagtatggaagagcattctcccggaagtcacctttcactgttcatcagagagtccatactggagagaaaccctatgagtgttttgagtgtccaaaagctttctcccagaagtcacatctaattatacatcagagagttcataccagagagaagccctttgaatgcagtgaatgcaggaaagccttctgtgagatgtctcacctttttatacaccagataactcatactgggaagaagccctatgaatgtactgaatgtgggaagaccttccctcggaaaacacagctcattatacatcagagaacgcatactggagagaagccctataagtgtggtgaatgtgggaaaactttctgccaacagtcccacctcataggacatcaaagaattcatacaggagaaaaaccttatgtgtgtactgactgtgggaaggccttttcccagaagtcacacctcactggccatcaaagacttcatactggagagaaaccttatatgtgtactgaatgtggaaaatccttctctcagaaatcacctcttatcatacaccagagaattcatacaggggagaaaccttatcagtgtggtgaatgtggcaaaaccttctcccagaaatcactcctcattattcatctgagagttcacacaggggagaaaccctatgagtgtactgagtgtgggagggccttttccctgaagtcacatctcattctacatcagagaggtcatactggagagaaaccctatgaatgtagtgaatgtggaaaggccttctgtggaaagtctccactcattatacatcagaaaactcatcctagggagaaaacccctgaatgtgctgagtctggaatgacttttttctggaaatcacagatgattacatatcagagaagacacactggggagaaaccctccagatgcagtgactgtgggaaggcattctgccagcatgtatactttactgggcatcagaatccatataggaaagacaccttgtatatatgctga

SEQ ID NO: 92090 - DNA, 437 bp, Homo sapiens
  misc_feature (1)...(437): n = a,t,c or g
nggcggccnnnnnactcagttnactacgacgtncganccncaannncngantngacccacgcgtccggcgaatgctcccactccatcccctacacactcatatttgagtgctcccactccatcccctacacacagaggaacccccacatgtgaacactcccaccccaccccaccccctacacacatgggagggctcccactccatcccctacacacacataggcatacctatccctccccaccgaagcccaaagcttgctggcctttccatcaattaaaactgagagctgggtgtccactcccctagggtcctgctgtcacaggcgggtggagggaggcaggagaacagaacagatcagaaaaggcgggagcctggggctggatggcctgattcatgatgggctttaggcaactcgagagtttggataacaaactgn

SEQ ID NO: 92091 - DNA, 376 bp, Homo sapiens
ctgactcgtggggatcgggagcgaccctcctttgtttatttggggttgttctaggaggggggggtgttgcttgttcccgctgttccaacgaaaaataacctttgggtatgccgagtttgaaacttgatctggaagctgtgcgtaaccgaaaggaggcttgtaattcttgataactatgacttggctagtgaatagaagcaaacaaatacatctgtaatcgcatcattcaattcaaacctggacaggacaaatattttacactgggtttaccaacagggagtacacctttatgatgctatcccaaactaattgaatataataaaaatggacacctttcttttaaatatgtgaagaccttttctatggatgaatatgt

SEQ ID NO: 92092 - DNA, 455 bp, Homo sapiens
  misc_feature (1)...(455): n = a,t,c or g
gaacgtttccgggtgannnnaacctgagnaccatgaganaccctgaanaccattacgcaagcttgcacgaggaaaatatttaattgtatgaattaccacaccttatttatccatttccctactggtgaacacttaggttcttcccagcattttgcggcaatgaacatactaaacagatgtgcttttgtgcacatgtgtgaagttctctagaggtaagtatatggaagtgaaatttctgggtcctagggtttgagcatcttcaccccaactagatattgccaaattgctttccaaagtcattgtacttgttcatgctcctactaacagtttctgagtgctatttctgcacatctccaacaggctggatgttgttcatgttcaacctgactcataatcggtgacatgtaatttaacacaccaatgaaacatattacatctatcagaagccaatagcn

SEQ ID NO: 92093 - DNA, 2945 bp, Homo sapiens
gcctattcttaacacagcagccacagtgatgatgttaaaatcttcctctttggagagtttgaggtccgcagaacccacagagcatcctcctgtggaatccaatcttagagttccagacatcactggccttaggaaggggaggaggcgaggggagcccgccgcggaggccgagcgagcccccagcccagcctggcgactggggaccccggcacatgagggggacgcccccggggaagacttgggtgcacagccaggcgagaaggattcatgggtcttgagtcagacagagcaccagccttggggaccctggaccactatcatggagactgagagcgagcagaactccaattccaccaatgggagttctagctcagggggcagctctcggccccagatagctcaaatgtcactttatgaacgacaagcagtgcaggctctgcaagcactgcagcggcagcccaatgcagctcagtatttccaccagttcatgctccagcagcagctcagtaatgcccagctgcatagcctggctgccgtccagcaggccacaattgctgccagtcggcaggccagctccccaaacaccagcactacacagcagcagactaccaccacccaggcctcgatcaatctggccaccacatcggccgcccagctcatcagccgatcccagagtgtgagctctcccagtgctaccaccttgacccaatctgtgctactggggaacaccacctccccacccctcaaccagtctcaggcccagatgtatctacggccacagctgggaaacctattgcaggtaaaccgaaccctgggtcggaatgtgcctctagcctcccaactcatcctgatgcctaatggggcggtggctgcagtccagcaggaggtgccatctgctcagtctcctggagttcatgcagatgcagatcaggttcagaacttggcagtaaggaatcaacaggcctcagctcaaggacctcagatgcaaggctccactcagaaggccattcctccaggagcctcccctgtctctagcctctcccaggcctctagccaggccctagcggtggcacaggcttcctctggggccacaaaccagtccctcaaccttagtcaagctggtggaggcagtgggaatagcatcccagggtccatgggtccaggtggaggtgggcaggcacatggtggtttgggtcagttgccttcctcaggaatgggtggtgggagctgtcccagaaagggtacaggagtggtgcagcccttgcctgcagcccaaacagtgactgtgagccagggcagccagacagaggcagaaagtgcagcagccaagaaggcagaagcagatgggagtggccagcagaatgtgggcatgaacctgacacggacagccacacctgcgcccagccagacacttattagctcagccacctacacacagatccagccccattcactgattcagcaacagcaacagatccacctccagcagaaacaggtggtgatccagcagcagattgccatccaccaccagcagcagttccagcaccggcagtcccagctccttcacacagctacacacctccagttggcgcagcagcagcagcagcaacaacagcaacagcagcaacagcagcagccgcaagccaccaccctcactgcccctcagccaccacaggtcccacctactcagcaggtcccaccttcccagtcccagcagcaagcccaaaccctggtcgttcagcccatgcttcagtcttcacccttgtctcttccacctgatgcagcccctaagccaccaattcccatccaatccaaaccacctgtagcacctatcaagccgcctcagttaggggccgctaagatgtcagctgcccagcaaccaccaccccatatccctgtgcaagttgtaggcactcgacagccaggtacagcccaggcacaggctttggggttggcacagctggcagctgctgtacctacttcccgggggagtgccaggtacagtgcagtctggtcaggcccatttggcatccatcgccaccttcatcccaggctcctggtgcactgcaggagtgccctcccacattggccccatgggatgacccttgctccgtgtgcaggggacagcacatgtggtaaagggtggggctaccacctcctcacctgttgtagcccaggtccctgctgccttctatatgcagtctgtgcacttgccgggtaaaccccagacattggctgtcaaaccgcaaggcttgactctgaggaggagagagatgatgtctccacattgggttcaatgcttcctgccaaggcaatctccagttagcagaaagcccaaaagtcatggacgagaagagcagtctttggagaaaaagctgaaatcagtggctaaatgtgaatgctaaatactccaagcagtgaactagtagccttgacccccgccccttcagtaccgcctcctacactagccatggtgtctagacaaatgggtgactcaaaacccccacaggccatcgtgaagccccaagattctcacccacatcattgaaggctttgttatccaggaaggagcagaacctttccccggtgggttgttctcaagttactgaaggagtctgaagaagccactacagactggccttccgacagggctggactggagaatcagtcagggtgggccctttggggaagtgggacagcccaatctgctggaggttagataaagaagggcgaaatctcctgaagtgcgagtactgtgggaaagtacgcccccgcaagaagcaagttttcgtggctcctaaagaaggttctgctccatggaacttgcgctaaagaggtacaatgtgagcctgttagccatcaagttcccggctgaagaaggaaaaaaaaatgaaaggaagtttcaaagaaagccaactatggctcgccgttcgcaggcatgtatt

SEQ ID NO: 92094 - DNA, 2011 bp, Homo sapiens; identical to SEQ ID NO: 63371
  misc_feature (1)...(2011): n = a,t,c or g

SEQ ID NO: 92095 - DNA, 418 bp, Homo sapiens
cttctcatggttcatgcccatcacatgggggtatcagcagaatgggcagagacgaggatccttttggttccctgctttaagtgaacctcagccttcttcatggtagtgaagatgctggtagattccacaacataatcagcgcccaaatcaccccatttaattttggtgaaatcttgcacctgtaagagggtgatgggatttccaatgatgacaggtttccagttctcagccttgacagtgccctagaacttgccatgggtggaatcgtgctggaacatttaggccgcgtagtgaaggtcactgaagggtcagtgatggcaacaatattcactttgccagagttaaaaggagctctggtgaccaggcaccactatggccaaatccatttagtctggccttcactttcaccatgatgtct

SEQ ID NO: 92096 - DNA, 388 bp, Homo sapiens
  misc_feature (1)...(388): n = a,t,c or g
ctaagaactcaagaggcctngccnnnccgaanncccgggcgacccgcgtgcggcgccgacagaatccggacatggcgactaggttatcaagtgcaggctgggttgcttgggaggctgaaacctctctccatagaggagaagaggtggacccccaaaggctcatgaattcgaatcaagatcattgccctgcggttgccacaccgatgcctataccctgagggactgatcctgagggttgtttccagtgtcttgggacatgaaggctggaattgtggaaaggtgggagggagttactaactgagcggggacctgcatcccactttacatccccagngggagaagcaatttgttaaatcctaaactaacctttgcaagataaagcctcagg

SEQ ID NO: 92097 - DNA, 1780 bp, Homo sapiens
cccgtgcggtggaattcccaggaattaacaagcatgccaaggagtacagctgtaagtgtgggagcggcaggagccacagagccgtttgctgagaagggctgcggtcggaggaggcagccgagacagaggcagacagtgtgagagctgcagcagctgctgctgaataaaatcatattttacctgcctacagccccgagtgttctttcaactacctgccacccatccaacaactcccctcggacctcagtatgggctggaacctgacacttggcatgacagtgccagagtaagccttccaaattaaccccaggaatggcttcaacagaggaacagtacgatcttaagattgtgaaagtggaggaagaccctatctgggaccaagaaacccaccttcgagggaacaacttttctggccaagaagcctcccgacaactttttaggcagttttgttaccaagagactcctggtccccgagaagctctgagccggctccgagaactctgtcatcagtggctaaggccagaaatccacaccaaagagcaaatcttggagctgctggtgctggagcaattcctgactatcctgcctgaggagctccaggcctgggtgcgggagcaccatccggagagtggggaggaggctgtggctgtagttgaagatctggaacaagagcttagtgagccagggaaccaggtgagaggagaaagatggacttctagacattaaatactaaatgaaaggtggggtttggtgacacagcaggaaccaacagacatacagcttcagcctatggtgacacagctcagatatgaatctttttgcctccaccaatttcaagaacaaggtaaggattttgacaggtcccttcaggagatctctggtgggtctatatagggcgatagttaagaccatttgggggatagcaaactccaaagagatgtatctttggattctaagtacagagaaacttgtaaacgagacagcaaggcagaaaagcagcaggcacattccactggagagagacgccacaggtgcaatgaatgtgggaaaagcttcactaagagttcagtactcattgagcaccagagaatccacactggggagaagccatatgaatgtgaagaatgtgggaaggccttcagccggaggtcaagcctgaatgaacatcggcggagccacactggagagaaaccctatcaatgtaaggagtgtgggaaagccttcagtgccagcaatggcctcactcgacacagaagaatccacacaggggaaaaaccatatgaatgcaaagtgtgtgggaaggctttcctcctcagctcatgccttgttcagcatcagaggatacacactggagagaagcgctatcagtgtcgtgagtgtggcaaagccttcattcagaatgcagggcttttccagcatctccgagtccacactggtgagaaaccctatcagtgcagtcagtgcagtaaactctttagtaagcggacacttcttaagaaacatcagaaaatccacactggagagagaccataagggtgatgagtttgggaaagccttcagtcatcattgcaaccttattaggcattttagaatccatactgttccagcagaactggactaattctgtggaccctcagacccctaaatggggccgtcttggaaatcaaaacctgaatcagaatatttcaaaagagaggaaataaaagttcagcttaaaactgttctgccctaaacctttggctttgaagtttatttttaaagcgttaaagaatacataaaa

SEQ ID NO: 92098 - DNA, 372 bp, Homo sapiens
  misc_feature (1)...(372): n = a,t,c or g
gtttgggacgctgggttctgcttttccagaatcctgccctttccaaaaggaagacggtatgattaagttccagattcaagggatacatgtgcaggaaagggtgacattcaaggatgtggctgttgtcttcaccaaggaagagctggcactattggataaagcccagataaacctgtaccaagatgtgatgctggaaaacttcaggaacctcatgttagtgagtgagtaactgagcatcagaccactggacctgtttcctcaaatcatcatttcaaaccagatagaatattccagttagaccacaaagagaaactttggccactggaaagaaaactcctaagagatgcatgtgcaggagacgggattaanaan

SEQ ID NO: 92099 - DNA, 1788 bp, Homo sapiens
ttttgaatcgcgctgccggaattcggcacgagcaagacctgacttatggagcacttgtaacctgagatatttcagttgaaggaagaaatagctcttctcctaagatggaatctgtggtttgggaatgtggttgatcaacttgatatgttggccaaatgtgccccatgtaataaaatgaaaagaagagacaagatgatgtcattttcccatattgtgaaaccaaaaacaaacgccttttgtgagaccaagctaacaaacctctgacggtgcgaagagtatttaactgtttgaagaatttaacagtaagatacagaagaagtaccttcgagctgagacctgcaggtgtataaatatctaaaatacatattgaataggcctgatcatctgaatctccttcagacccaggaaggatggctatgacttggattgtcttctctctttggcccttgactgtgttcatggggcatataggtgggcacagtttgttttcttgtgaacctattaccttgaggatgtgccaagatttgccttataatactaccttcatgcctaatcttctgaatcattatgaccaacagacagcagctttggcaatggagccattccaccctatggtgaatctggattgttctcgggatttccggccttttctttgtgcactctacgctcctatttgtatggaatatggacgtgtcacacttccctgtcgtaggctgtgtcagcgggcttacagtgagtgttcgaagctcatggagatgtttggtgttccttggcctgaagatatggaatgcagtaggttcccagattgtgatgagccatatcctcgacttgtggatctgaatttggctggagaaccaactgaaggagccccagtggcagtgcagagagactatggtttttggtgtccccgagagttaaaaattgatcctgatctgggttattcttttctgcatgtgcgtgattgttcacctccttgtccaaatatgtacttcagaagagaagaactgtcatttgctcgctatttcataggattgatttcaatcatttgcctctcggccacattgtttacttttgtaacctttttgattgatgtcacaagattccggtatcctgaaaggcccattaaatgttatgcagtctggcacatgatggtatccttaattttcttcaattggatttttgcttgaagatcgagtagcctgcaatgcaatccatccctgcacaatataaggcttccacagtgacacaaggatctcataataaagcctgtaccatgctttttatgatactctatttttttactatggctggcagtgtatggtgggtaattcttaccatcacatggtttttagcagctgtgccaaagtggggtagtgaagctattgagaagaaagcattgctgtttcacgccagtgcatggggcatccccggaactctaaccatcatccttttagcgatgaataaaattgaaggtgacaatattagtggcgtgtgttttgttggcctctacgatgttgatgcattgagatattttgttcttgctcccctctgcctgtatgtggtagttggggtttctctcctcttagctggcattatatccctaaacagagttcgaattgagattccattataaaaggagaaccaagataaattagtgaagtttatgatccggatcggcgttttcagcattctttatctcgtaccactcttggttgtaattggatgctacttttatgagcaagcttaccgtggcatctgggaaacaacgtggatacaagaacgctgcag

SEQ ID NO: 92100 - DNA, 357 bp, Homo sapiens
ggcacgaggtggggcagaggctgcagcaggaaccaggcatggaggtagatgcgggggaggctgcagcaagagccgggcgtggaggtagatggggcagaggctgcagcaggaacaggcgtggcagtagatggggctgaggctgcagcaggaacaggcgtggcagtagatggggcagaggctgcagcagaactgtgcaggagggaagtcactcactcttcactctcacgggcttcccctggctgctcagtagggtcctttggaagctgctgaaaactgcaaatgcttagcccacccaggctccgtgtgacacagccaggagtgagctccacagctctgtgtggtggacatccagcctcc

SEQ ID NO: 92101 - DNA, 420 bp, Homo sapiens
ggcacgagaggatcctgcactcttcctccctcagtaagtaaatgccagtccctaggaagagagaaccaaaatgtctaccggaccagatgtcaaggctacagtgggggacatttccagtgatggcaatttaaacgtggctcaagaggaatgctccaggaaagggatagtggatgaattcttcccgctgttgtcaaactaatgtatatggactcaaccacagggatatccccagagctcctatggaacactagcaaattttgtgtttttgttcagtccgacatgggctggccctcatcttgcagctctgtaatttttcaatttacacccaacaaatgaacttgagcattgccatcccagctatggtgaacaacacagccccacctagccagcccaatgcctccacagaacggccctccactg

SEQ ID NO: 92102 - DNA, 1079 bp, Homo sapiens
acgccaagcttggcacgaggaacagcccaagttgcaattttattcaacgcttgattggctttaaaaatagattccaggctgggcatggtggctcacacctgaaatcccagtgctttgggaggctgtggtgggaggattgcttgaagccaggagttccaggccagccttggcaacatggcaagaccctgtctgtacaaaaaaagaaaaaataaataacagctgggtgcaggggtccacacttgtaatcccagcactttgggaggcagaggcgggcagatcacctgacatcaggagttcaagagcagcttggccaacatcctgaaatcccgtctctaccaaaaatataaaatttagccttttggtactccaagcagcaccatggcggttgttaagaacaagtgccttatgaaaggtggcaaaaagggagttaagaagaaagtagttggtccattctctaagaaagatcagtatgatgtgaaagcacctgctatgttcaatataagaaatactggaaagacttggtcgccaggacccaaggaacccaaattgcatctgatggtctcaagggtcttctgtttgaagtgagtcttgctgacttgcagaatgatgaagttgcatttagaaaattcaagctgattactgaagatgttcaggacaaaaactgcctgactaacttctatggcatggatcttacctgtgacaaaatatgttccatggttgaaaaatgttcaacaatgattgaagctcatgttgatgtcaagactaccgatggttacttctttcatctgttttgtgttggttttactaaaaaacacaacaatcagatactgaagacctcttatgcttagcaccaacagtctgccaaatccagaagaagatgatggaaatcatgacctgagaggtgcagacaaatgacttgaaagaagtggtcaataaattgattccagacaacattggaaaagatacagaaaaggttttccaatttatcctctccatgatgtcttcattagaaaagtaaaaatgctggagaaccctgggtttgaaaggcatggagcttcgtggtggaggtagtagttctg

SEQ ID NO: 92103 - DNA, 399 bp, Homo sapiens
ttatttggttataggatatacttaaccctagggttcccataaggatgtggaacatgaaccatagcttgatagtagtacagtgtcaggcgtttgttacctttgacagtctttgcaacaacccatgtagcatctaacgtagctaattgggagcatctttttgggccttcctccagccccagataactgctcaaatgacaagattcacatcaggcaggtgtaggagctgtcctggcttaaaagtcttattcctgacagcaaccaatatctcttggaaaaacttcataggcatagattccagggtgtctctaggggacttgctctgctacaagagtgactattgaagtaagaccaaagttatggctatctatcaggggtgtacggatctccctgttcaaatat

SEQ ID NO: 92104 - DNA, 402 bp, Homo sapiens
atttagatgcaaacaaatgtatatgctcattgtttgcatagaagcttctttgggcaaggtaggatcagtgagccccatttccggtggacaagacaggaagagtgactcacttacagtttgaccaactcatttttctggagtcttcttaagatgccattggacattctcttctgtctgaatttctgtcaggttgaattagtatcagtgtatatgcactggacatcagaagctgggcagcaaaaggcggcacaaagcacaaagtagacatgccttatgtggataagaactacaattttcatatcttaaacagtttgtttagtgtttatgttaaagagctgggtacccacaccaccaccagtctttagaaaactcacttcctgtttagtgcacaggtaaaatata

SEQ ID NO: 92105 - DNA, 417 bp, Homo sapiens
  misc_feature (1)...(417): n = a,t,c or g
cataaattatatatttaatattaattatattctggattataattatataatattcctttaaagtgacaaaaatatttcttgaactattaagcaaatatagcaatagaatatataactatattctattataatgtattttataatatacaatagattaaatcaattattaatgactctccaaaatagaaagcactagccctagatggttccaccagtaaattttccccaacatttaaacaagaaatgataccaattctctacaatatcttccaaaaaatagaagctgagtaaatactttctaactcattctacaaggctaacataaccctaatgccaaaatcaggtaaagacattaaggaaagaaaaagtacagactaatatctcttgtaaatatagatttaaaagcacacaatacan

SEQ ID NO: 92106 - DNA, 386 bp, Homo sapiens
cggacgcgtgggaaatatcagagaaaaaatattaaaattgaaaataataaaataaaataaaaagatcaaaaaaactgaaaagttttgttccagactgactaaaaaagagagaaaagatacaaataaataaaatcagaaatgagaaaagagatagaagaatctgaccacaaaaatagaaagcatcattaaagactactacaaacaactatataccaataaattagaaaacctataagaaatgaataaattcctggattcatacaacaaacaggcatagaaaaaaacatacctcaaataataaagaccatacataacaaacctacagctaatattgtaccgaatggaaaaaatttaatggcatttcctctaagacctgaaacaagaca

SEQ ID NO: 92107 - DNA, 745 bp, Homo sapiens
gcgaaacatactgtcaatataactttatatattttttactttaaattatatttatttacagccagtagttgcatgttaactttatcgaatgatgaactcagatctgccaagttgaacttcagtagtgaatggtggattttagggtgaaaatggctttgtgtgcaggctccattcttttggcaagtgttgcagtgggggtaaccagttgttgacgccatggggcaggcagctcagtaccctgaacagggtcctggaagttgctgtagcgtttgaggggagcactcctatggtgtggttggaatgctgtttttggttataaggcctctgaactcgactttctggtcctgtggtaaattccacgaactgtctaaaacctttagtaaattttgttttttgttgtaactcaattgagtagattaaggtgttcgccactaagcttcttgtgaaacattgacatactggatcttgaaagcaatctgctctatgatttgctggccgtgattatccacctagcgtctaaggcccatctggctatactcactttcggactgagccgttcaaaaaaaaaccttcctgtctactctcttgttcctacaaatcccattcttattatagtgtgactcttattactagggggctggtccccaatcaccctcccctccctcacccggggtatcccctctcgtctcttctttgcacgcgaccgtccttctccctctgtacgacaaggcgatatctcgggcgc

SEQ ID NO: 92108 - DNA, 384 bp, Homo sapiens
ttcttgcctggttttggttttgctttgtgtggagtatctttttccatacctacactttcagtccatatgtgtgtttacgggtgaagtgagttttttgcaggcagcatacagttgggtaatggggttttttgtttttttgtttattttaatccattcagtctttctataacttttaggtggggaatttaatccgtttacattcaaggctgttattgacaggtgaagacttgctcttgtcattttgtgagttgttttctgattgctttgtatatcctttgttttttcctctcttaatgtttatcactgtgattttgtgattttctgtggagataagttttctttatcttcctcctttgtgtatctataacactagtacattttatg

SEQ ID NO: 92109 - DNA, 879 bp, Homo sapiens
actgcttcttcgaatttgcaattcaatatgagaatcacctaggagctggtaaactgaggccgaactcctgactttatatttactgcccaatgctttacttaaccattttacctctcccccactgatgttcgccgaccgttgactattctctacaaaccacaaagacattggaacactatacctattattcggcgcatgagctggagtcctaggcacagctctaagcctccttattcgagccgagctgggccagccaggcaaccttctaggtaacgaccacatctacaacgttatcgtcacagcccatgcatttgtaataatcttcttcatagtaatacccatcataatcggaggctttggcaactgactagttcccctaataatcggtgcccccgatatggcgtttccccgcataaacaacataagcttctgactcttacctccctctctcctactcctgctcgcatctgctatagtggaggccggagcaggaacaggttgaacagtctaccctcccttagcagggaactactcccaccctggagcctccgtagacctaaccatcttctccttacacctagcaggtgtctcctctatcttaggggccatcaatttcatcacaacaattatcaatataaaaccccctgccataacccaataccaaacgcccctcttcgtctgatccgtcctaatcacagcagtccatgttttccttgttccctcccatgcctagctgctggcatcactatactactaacagaccgcaacctcaacaccaccttcttcgaccccgccggaggaggagaccccaccctaccacacattcgaagaacccgtatacataaaatctagacaaaaaaggaaggaatcgaacccccc

SEQ ID NO: 92110 - DNA, 654 bp, Homo sapiens
cagaaacatccacgataaagtttgaccaaatatttgggcactgtggcctagccaatttgcttcatgtaattaaccatcatacttctccttccttattcataccactgctagatggtgttttgaattaaattttatatcaatatgcctcaagtgaaaaattcatggtctttttatgtgtatatggtttagttctgccctttaaaccaaagaatgtgatgataattatttctttcctttctcttagattttacgagtagagacatctctttaggccatattttcttaatatttcatcattaatttattcatttgttcagtctttcaacaagtatttattgatgatttaggcactgaggataacacagtgatatgaataaaagatcaggcccaggaaaaagaccttaagctagagagcaacacaagcgttttgctgtaattgtgaaaacaaataaggaaaatgccaagtgcaaaagacattagatttacaagcctttaagagatgagccaaaattttaaagagggatattttatgagcaaattcaataaatgaaaatttacaagttttacaaatcacgatatctgcaggtatgttcctgaataaaattgaagatgagttaggacagttgtttattgaaacactttttaatgtcaacc

SEQ ID NO: 92111 - DNA, 2410 bp, Homo sapiens
caatgttagcctcaagcaagaggatgaacagttcttcacgttctcaaatccttctaaggtggaagtcagacaaggctcagagtggaccctacaatgttgagaaggaaatccttacttcaagattcttgcgtgacactgagacctgtcgacagaattttaggaattttccatacccagacctggctggtcctcgaaaggcattgagtcaactccgagagctctgccttaagtggctgagacctgagattcactcaaaggaacaaattttggagctgctggtgctggagcaattcctgaccatcctgcctggtgaggttaggacttgggtaaagtcccagtatccagagagcagcgaggaagcagtgactctggtggaggatttgactcagattctagaagaggaagctcctcaaaactctaccctttcccaagataccccagaggaagaccccagaggaaaacatgctttccagacaggatggctaaatgacttggtgaccaaagaatcgatgacattcaaagatgtggctgtagacatcacccaggaggactgggagttaatgcgtcctgtgcagaaggaattatacaagactgtgacgttacagaactattggaacatggtttctctgggacttacagtgtacagaccaactgtgattcccatattggaagaaccatggatggtgataaaagaaattttagaaggccctagtccagaatgggaaactaaagcccaagcatgtactccagtggaggataatgtctaacctcacaaaggaagaaacccataccatcaaattagaagactcatatgactacgatgatagactagagaggcgaggaaaaggtggcttctggaaaattcacactgatgaaagaggtttcagtttgaagtcagtcctttcacaagaatatgatcctacagaagaatgtcttagtaaatatgatatatatagaaataattttgaaaagcattcaaacctaattatacaatatagatacccaattagataataaaactttctatgtataatgaaggcagggcaaccttcaatcatgtctcatatggtattgtacataggaaaatacttcctggagagaagccttacaagtgtaatgtgtgtgggaaaaaatttaggaaatacccatccctcctgaaacaccaaagtacccatgccaaagagaaatcgtatgaatgtgaagaatgtgggaaagagtttaggcatatctcatcccttattgcacatcagagaatgcacactggagaaaaaccatatgaatgccaccagtgtggtaaagccttcagccagcgtgcacaccttactatacatcagagaattcatactggagagaaaccctataagtgtgatgactgtgggaaagacttcagtcagcgtgcacaccttaccatccatcaaaggacacatactggagagaaaccatataaatgcttggaatgtggtaaaaccttcagtcatagttcatcactgattaatcatcagagagttcatactggagaaaaaccttatatatgcaatgaatgtgggaagactttcagtcagagtacacaccttcttcagcatcaaaaaatacatactgggaagaaaccatataaatgcaatgaatgttggaaagtgtttagtcagagtacttaccttattcgacatcagagaattcattctggagagaagtgttataaatgtaatgaatgtggaaaagcctttgctcattcctcaacccttattcaacatcaaaccactcacactggagagaaatcctatatatgtaatatatgtgggaaagccttcagccagagtgcaaatcttactcaacatcatagaacacatactggagagaaaccatataaatgcagtgtgtgtgggaaagcattcagccagagtgtgcaccttactcaacatcagaggattcataatggagaaaaaccctttaaatgcaatatatgtgggaaagcatatagacaaggcgcaaatcttactcagcatcaaaggattcatactggagaaaaaccctataaatgtaatgaatgtgggaaagctttcatttattcctcatcacttaatcaacatcagagaactcatactggagagagaccctataaatgtaatgaatgtgataaggattttagccagagaacatgccttattcaacaccagagaattcacacaggagagaaaccctatgcatgtcgtatatgtggtaaaaccttcacccagagtacaaaccttattcagcatcaacgtgttcatacagaaagaaaccctgtgaagggtattcaaaaacataactcatcaactctctatttcaagtacacttatcctttggtatactcgggggattggttccaggaccacccatgtatacgaaaatctacccatactcaagttgcacg

SEQ ID NO: 92112 - DNA, 415 bp, Homo sapiens
  misc_feature (1)...(415): n = a,t,c or g
gggtctaaacaatccaactaaaagacagatattatttaactacatgctatcttcaaaaaactcactttaaatatgattatgtaggtggttagaggtaaactgatgaaaaaccacacctacaaatattactcaaaagaaagctgggatggttatattaatatcaaagtacagacatcagacaaatcaaagaaaattaccagggataaagagagacattacataaaagagtcaattcaacaagaagatataacaatcctaaacttcaatacacctgacaatgaagctttgaaatagatacaacaacaatgaaatagataaaaccacaattaacttttgagacaatactctcttacaaatcaatacaactcatacacagaaaatcaacaggaatatagaagaactcacaaatacaatn

SEQ ID NO: 92113 - DNA, 357 bp, Homo sapiens
gtaagggctgggttccatccaactaagggtagcggtgagacccgagtgcaaattccccgagccttcggggcaggaaggagagctttcaccaattctgttctgcaggtctggagtgggctgatgagcgtcgtgtgggtctccggaagctcgtcgcaggccatctgagtgactccggagcgagtggagtcatctgaggccactgctattttccaagagaagagccaggaggaagaaagaatggctgttgggcttcttaagccatgtaccaggagttggtgaccttcagagatgtggctgtagacttctcccaagaggaatgggattgtctggattcttctcaaagacatctgtacagag

SEQ ID NO: 92114 - DNA, 340 bp, Homo sapiens
gtgttttgtaggtactctttatcaaattgaagagggctgcctgaattcctagttagctaagatttttaatcatgaatatgtgttggattctgtgaaatgctttctctgcatctgttgatatgatcatatgactttcttctttagcctattgatgtgtaatacattaattgattttgggatattgaaatagccctgtaataagtacgttttattgtggtgtgtaattatttgtatacatttttaaatttgatttgctaatattttttgagattatttttgcatccatattcataagagattggctggaggttttcttttagtgatgtctttatctgggttc

SEQ ID NO: 92115 - DNA, 1214 bp, Homo sapiens
  misc_feature (1)...(1214): n = a,t,c or g
cacactatcaacactagtcaagggagtgactggagttatttctggtagcagtagccactggcatcctagaaacacatggacatttgtagcatgaattgacctattggtagtgcaatagctatacatgatttttattcttggcaaaagaaaatgcttcaaaaaaaaagtgatcaaacctgcacattgatcctgtaatagcaaatggaaggctatttctctgtactagcatttcagctttatgtgggaaagttacccgttctcctgcaagtacaatcaacccttgatgacttaagtattaattattctgggtgtagctcacccaagttttcttcctacatcttttggctaattccaccacacctcagcatcacagtcagatgggaaaaggggcaggtggattctcatgtcatgccttcttgtaccttattttcaagttttgtggtggaagaggtttaattatctgctcaagaatctggtatatatagccaggagcggtggctcatgcctgtaatcccaggactttgggcaaggcgagaggatcacctggaggcaggaagttaagaacaacctgcccaacatggcaaaaccccatctgtattaaaagacccaaagtagctggggttggggggggcacctggaatccggctactggggaggctgcggtatcagaaaacgtgaaccgcggagggggaggcggcatgggctaaggcctgccgctacgcccgacctgggagccggaaccgaatccgtggaataggaaacgggataacggggggcgggggccggcgcccggaaaccgcgtatcgtggatcgcgggacgcgcaaacggacnaccgcgccaccggggaagcggaatcgggcacggcgggggcggcctacggggggcggcggacccgggcgctggcggaagcggtgtggggagaacctccagaggcggacagcgggggctgcggggtgatggggcgggccgggatcatgcggcaacccgggggaacggcgcagagcgcggaactcgcggcaaatcgggagaggcacgcgatacggtgcgagccggaggacacccgcgccgacagcggtttatcgtccttattgcgggaaagggggtaacctccgccccacgcagaaatcgggggcagagcggcggctcacgcggcggtagggaggactgcggggaacgcggggggaatcggcggagagagcaggatcccgcggcc

SEQ ID NO: 92116 - DNA, 1545 bp, Homo sapiens
ctgcaggtgaacttgctgtccaaatttttgctgattgcaaaatcttgctatgagcagagaaacttcgcgacagccatgcagatcctgagcgggctggagcacctggccgtgaggcagtcccctgcctggagaattctgcctgcaaagatagcagaggtcatggaggagctgaaagccgtggagagctcggcctcaagcccagccacagctgtccacgggtgggacggctcctgcatgtctttgctggacacgcagacacggggccctgctctggtcttcctgaagagcgacagcctgtgtctgatggaagggcggcgcttccgggcgcagcccaccctgccctcggcccacctcctggccatgcacatccagcagctggagacaggcggcttcaccatgaccaacggggcccacaggtggagcaagctcaggaacatcgcaaaggtggtgagccaggtgcacgcgttccaggagaacccttacaccttcagccccgaccccaagctccagtcgtacctcaagcagaggattgcccgcttcagcggtgccgacatttccacactcgccgcagatagcagggccaacttccaccaggtctccagcgagaagcactcacggaagattcaggacaagctacggaggatgaaggctacattccagtagccgagctcgggcctggtgtggaattccagatccgaatccgactgtggggggcgggctgggaggtgggagccgcgtctcaggcccggccgttatcaaggcccctccgcccccgaaccctggggagctggaccaggaggtggaggctcaggggaccccatggggacaggcagagctggtctcctcccagcagacggagccaggacgggcacaagagtcttggaggtttgcgtgtttctgctagaattaaaaagttaaatttaaaaatgaaaatgaaagacagcttcccaggagttttgtgcctgtctgcgcctctcacacacagataagtggctcttacccagctctcagtgactcccccacaaaacagcaacagcctccaccgccaactcaacaaacttcagagtagctcctccctgagcaggtttctgagccagcctcggttggctgagcaacgaagggccaaagctgacctctgagtggccaactgcagctcccagggactccgagacctccggtccgagaccctgcctgggttcaccccccacaacccagacccagaaccgctctccccttccctgcccagtgcccctcctccccagcccagacccccaggtgcccaaggcctgctgctggagcaggcaccttgggctgggcctgctcccccaggggcccaggggccccccagcttagaacagcccttggtgaggtgggtcatgcccggggcaaaggccctgcttcctggaaaggacactcagagcagctccaagacagaggctctgtggcgggggtccctgagagtgcccccacccatctcatgccccagggaccgccactgcccaccgcctccagcagacatgcatgtgcgcccgcagccctgcctcc

SEQ ID NO: 92117 - DNA, 1426 bp, Homo sapiens
ctttttcctgtatttcccgttcgggggagtaggttgaagtctcctaagatgcccggtgggctgcgggcaccgggagctgtgaagggaacgtgagggggcggcgtagtggagacccacggcaggcctgaagaagagcggcggccgagcccgccttccctgcaccatgctcatagaggatgtggatgccctcaagtcctggctggccaagttactggagccgatatgtgatgctgatccttcagccttagccaactatgttgtagcactggtcaagaaggacaaacctgagaaagaattaaaagccttttgtgctgatcaacttgatgtctttttacaaaaagaaacttcaggttttgtggacaaactatttgaaagtctctatactaagaactaccttccacttttggaaccagtaaaagcctgagccaaaaccactagttccaagaaaaagaagaaattaaagaagaggtatttcaggagccagcagaggaagaacgagatggcagaaaaaagaaatatcctagtccccagaagactcgttcagaatctagtgaacgaaggacacgtgagaaaaaaagagaagacgggaaatggagagactatgaccggtactatgagcggaatgaattgtaccgtgagaagtatgactggagaagaggcaggagtaagagtcggagtaagagtcgaggcctgagtcgcagtagaagccgaagtagggggcgcagcaaagaccgggatccaaataggaatgttgagcacagggaaagatcgaagtttaagagtgaaaggaatgacctggagagttcctatgtgcctgtgtctgcaccacctccaaactcttctgagcagtattcctctggggcacagtctattcccagcactgttactgtgatcgcacctgctcaccactctgaaaacacaactgagagttggtctaattactataacaatcatagctcttccaattcttttggtcgaaacctaccaccaaagaggcgatgcagagattatgatgaaagaggattttgtgtacttggtgacctttgtcagtttgatcatggaaatgatcccctagttgttgatgaagttgctctgccaagtatgattcctttcccaccccctcctcctgggcttcctcctccaccacctcctggaatgttaatgcctccaatgccaggtccaggcccaggcccgggcccaggtccaggcccaggcccgggcccaggtccaggtcctggccatagtatgagacttcctgttccccaaggacatggtcagcctccaccatccgttgtgcttcccataccaagtaagtatatatttgttgaatttttctctagcgttctgtttagaagaacctcatcccttttagctaacttgacactcgtttaaagtgtttgagaaatagagtaataatataatttgg

SEQ ID NO: 92118 - DNA, 998 bp, Homo sapiens
  misc_feature (1)...(998): n = a,t,c or g
aaaaatgaaaacgacacatttattttcccttttattcaacaccctccccacccagtctccccgcccccaagggtccgacacgaaaggtccaggccctcctcgggcgcgacagggagccgatccttaaaagcaaaccctacaaataaataagcggggtcgggggcgggggtctctgcagtccagggcctacggtccaacggcagtcaggtcgaatcaattcaccagcagcgaatgctcctccgaggggtcccttccgcagcagcagagaaggctgcaggccgagccgctcccgcggcggaacttgccggaggtggggctgtcctggcactgtgcgatgtaggcctgcagctcgctctcctctgcgcctgcgccgccgggatgcttgatggtgtcgtaggcgccggtgatgagcgcgatgaagaggctgagcaccatgtagatgaagaggctgatgaaggagtaaaggtagagctgggagaagagccacaccaggctgctgcggccctgctgcgcctgcatggcggcgaacgtcacaaacatgtcgtccccattgatgagcgagaacaggcactcagacaccatggagagtgagcggaactgccagaggggcggcggggtcagagggagccaaggcatggccaggaaccgggggctggggtcaggctggggtcccatgcaaatggctaggagctggtggctggggccccacatgaatggccgggtcccgggctgcggtcaccatgtgaatggtcgggttccaggctagggcccctgtgaatggccgggtcccaggctggggtcccacgtgaatggccgggacccaggctggggtcccacgtgaatggccgggtcccaggctggggtcactatgtgaatggccaggtcccaggcaagggtaacatgtgaatggccgggaccacgggtcaatgacagggccacagggccgncganttccnccgcnttcgctacgatctcaagtnatcagttnnnnngagcgc

SEQ ID NO: 92119 - DNA, 469 bp, Homo sapiens
  misc_feature (1)...(469): n = a,t,c or g
atcgagaccttgggcacngtgcnggaattcgagcaacactaccatcgttcccagcactgcggatccgggccctagcggcgggcccagtatcggaggtggtggcggcggaggaggcggcggcatcgaggtaatacgtgactaatctccccgggcgctagctctgagcatatgcggactctcttcggtttcctaggcaagatcgacgaaccacacctcttcccgccggataattcacctttgccaatcgcaatctcgttaaattccatgatccagactcagcagttgtcgcaccatgtctgacaaacactgtattccttgacagagctttgataacgtaccatatgcataaggagttattcctgataaggctaaggcttgtctctgttggcaccagctaatgcaatggcaggtcttctgcttggtgttgggctcctgcctactcctaacccacttactcagactggcgctg

SEQ ID NO: 92120 - DNA, 573 bp, Homo sapiens
  misc_feature (1)...(573): n = a,t,c or g
aggcgcgnnnacttgatcacagctcgaaggacacgtcagagnggagcaacncatccattgatcactgacgtactgcatggccagcccctgctccgtatcctgtcattagccttggagcaaggtcagccctctttttgggcaaggttaaattcttgccttccctcttgttgccgttgcttctgttcctggaggagctcctggcacagtgatggggtctcaggcctccaccttactgcacgatgaagagtttgaggagatcaagaaggagactggcttttcccacagtcaaatcacacgcctgtacagccggttcagcaacctggacaaaggagagaacaggacgatttccaggggattccagaacttgccatcaacccagtgggggactggatcatcaatgccttccttccagagggagaggaccaggtaaacttccgtggattcctgcaaactctggctcatttccaaaccattgaggataatgaanagagcanaagtgtgaatggaccttgaccactcaacagccgaagcaacaaactggcagttgctttcgactatatgatttggataaan

SEQ ID NO: 92121 - DNA, 456 bp, Homo sapiens
  misc_feature (1)...(456): n = a,t,c or g
atttttatatttgacatcaaaagcacaagaaacaatacaaaaatagataaattgagcctcctccaagtgaaaaattttatgcatcaaagaacattatcaagaaagtaaggtaaaaagctgaatatgtgtcctctaagatcaagaatgagataagcatggctactcttgccatttttattaaatatgctactgaagtcctagccagagtacttacacaagaaaaagaaaagctatccaaattggtaagaaagaagtaaaactgtctctgtttgtagaagatataatctcatatataaaaaattctataagttccatcaaaaaaaatctcttagagttaataacaaattcagttactttgcaggatacaaaactgacatacaaaaatcagttttgtttcaatgcactaacaacaaactatccaagaaagggattaagaaacattnttatttacaaata

SEQ ID NO: 92122 - DNA, 415 bp, Homo sapiens
cggacgcgtgggttttgcaccaaaatcaacttgtactaatttgctgtaacatgtacaaataggatctagttcaaggagctaagaaagatatgacatcgctttgaaaatagcccctatcagagcaacacgaattctgccaaaattgaagcaagaacaaacatcaaatttattgggaagcttgggtgaaagaatggtgagatcattaatgccttctgtaaagcttatggggacaataccccaaagaaaccagtcgtttacaaatcaataacttgtttaaggaaggacatgattatggagaagatgaagctgcagtggaagacaatccacatcaatttgccaggaaaacaatgaccttggttgtgcactaattgaagaacatcagtaattaacagcagaaaccacagccaacaccata

SEQ ID NO: 92123 - DNA, 415 bp, Homo sapiens
agaataaaaaaacacagcaaaggataagccaaaattctgccccagaactggcctggaacctgtctcccaccctggctgccccgcccttcagctccaagagcaaaccatttattttctatgatttttaaaaattggctcatctcataaatgttccagagtcggaacaagctgtgccatggcgaaacaaaaactgctgaacaaataaaacaaggcaggctgtgaggctggggaaagtgctagatgtgggcccccaaccaggtccatgggttttggcaagtctgttgagtctgggcctctgtttcttcctctctaatcggaggggtgggagaatgggatttttggggtcccttccagttctgtgatctaaacaagttgcacagagaggggaagaatgtagagctgccagttcagaagc

SEQ ID NO: 92124 - DNA, 1811 bp, Homo sapiens
ttttttaaagtaaggaagaggtttttatttggccggtagcattggcagactcatgtcttaaagagccaagctcccccaaaaagaaattcctagcccttttaagggtgtacaactcctaaggggtcccacgtgaaagggtcatgatagatcaagtaagcatgaggaatgtgactggaggctacaatatatcagctaacagaacaaaaagtttttacagtgctttctcatacaatgtctgggatttacagatagtaccagtagttttttatcggttaataagaaaaaggatggcttaatagtgccaataacacaactgtctgcccatttcattagggtaactgaatgtaggctctctgcccacatatccagtatagtccagcgagagccatccagtcctgatgagatcctggacaagcccccattatatcaggagctggatcagtgggcaccaactctcaggcttcccaaggccatcggtctctgatagtggttcccccgcatatataacaagaagtaacattaagggaatgagctacattttctgctaattggagaaacaaattttttatctttttcagaagttctggtgctggcagatttaactcctcataaaaggtttgaaacactggtttgggagagtgcttgtggacctccccttgaactaaaatggcaacttgggggtttaaccctgtccctttgatccccagggttacacattctccctttttccaatggggatctaggggattggtaattattagttctagtgggttacagtgactggcagcacaggaggggttggcttcccctttctgaagatgaaccaagtcctttttgttctttttccaagtagcctaaataacacatggccaaaaggcacaattttcacaaacccctgactcatgacaaacatatttattttctactctgtagctcctttcccagttaagagaaccacatcctgttcctagcttgttactattaatggctgcacaagcgtcaaatcttaaagttacttgtttggggattcctttttcttctgttctagttattatttcacttgtatcacctaggaaaaggccagttcttaatcttatttcaaaactggtggttgtagggggctcagatgggttataacacacatcaggtcagtcatttcctgggctacataccttgtactgagtggcattatacaaacaagtctcttttaacattcccatatattcataataactatagaacagaaagattgttttaatttgctgtcctaacttcggtgacctgataaatacactgggaacagtccccattttgagtaaggttagttgaagcccttactgtataagtccaaaatttaagaaaaatgaatctcatgatgagcttcctcaggcttcggccgtgcgtggaccagtcagcttccgggtgtgactggagcagggcttgtcgtcttcttcagggtcactctgcaggggttgtctgggcttggtcttgcctcccaggtttcaggcgctgcaggttttacatggctgtggtggatccaggctgggattccttctaccttcacagcggtgggagtgctcagaacgacagtctggggtcctttccacagtggacacaaagaggctacgttccagttcttgatccacactcgatcacctctacactttgacatctctgtgaagtccacctggagatcttcaaagggggctgctccataagcttgtatgccgggcggaacggctggaccttgcctcgctttatgctgtcggcaggtaacacacccctgcgtcaccgttttggcaagagctgac

SEQ ID NO: 92125 - DNA, 577 bp, Homo sapiens
gccattccagaccttcccctaaaggcgaagtaggtggcactgtttcttttataagtttttggagattagcatatattccttcccgtttctcggcctttttaaaactagactgtgatggttgattttgctgatcattagactcctgattattaaagttttctatgtcatcctgaagctcctcctcagtgtggaagggctccagtgctgttttaattgcaggccacgcagaccaagcaagaagggaatatcgtggccctcttgttgtgctcgttttaagtctgatccgaccttgtcccagtcttttacattcatggttccatattccgggaaccaaagagaatacttttttaccagatagaacaaagatgggagattttgggtactcacaattacccctccgcggcgcagtaactgccggacaaggcttcagtaattagcaaacttactctcagcctgacccatagtttccggaggttaccctggaattttccgagcgccctacttacctgtagagcttgaagtgaaaacgtactcgggcgtcctttgtcagtcatcctccactttccactctctggca

SEQ ID NO: 92126 - DNA, 484 bp, Homo sapiens
  misc_feature (1)...(484): n = a,t,c or g
aggtganagngaagaatttgaaacccctnnnctgtagacattagtcagngcggtggaattcgaagaagcatttgagaaagtcatacaccgtttcatgacaaaacactaaccaaacaatgaatagaaggaaattacctcaatgaaataaagggccatgtgtgaaaagcccacaactgacatcatactcagtggtgaaaactgaatcctttctctttaagatgatgcacaagggaaggattccttttctcaccacttctattcaacattgtattaaaaattttacccagaccaagcaggcaagaaaaacaaaaagcatccaaataggaaaggaataaatataatgatcttttcataggtgacatgatcttgtacgtagaaaaccctaatgattccacacacacacataaaactgctagaactaataaacaaatttagcaaagttgcaggacacaaaatcaacacacaaaagtcagttacatttcta

SEQ ID NO: 92127 - DNA, 385 bp, Homo sapiens
gttccccagtggtaagccgcaatctagctgacgtggccccaaccccacattccttcctgccctgcaatgtctgaagaaaccctacagagcaaattggcggctgcaaagaaaaagctgccttggggtgcggtgcaggggtccagagccatgtcggacctgttactgttactactggacctgactctgttactgctgctgatgctgctgggctttgccgggtactcagggcagttggctggggtggcagtgagtgccggctcaccccccatccctacaagttccatgtggagccctatggtgagactgggtggcttctcaccagagctgcagcatctcccccaaactctgctccatcgctgtccactaggataaccctgcatggttc

SEQ ID NO: 92128 - DNA, 848 bp, Homo sapiens
cggccgccgcccacgctgcccccgtccaagccgaagccggtgcagggcctctgcccgcacgggaagccccgggacaagggccgaagctgcaagcggagctcgggccacggttccggcgagaacggctcccagcggccggtcaccgtggacagctccaaggccaggacctccctggatgccctgaagatcagcatccaccagctcaagtggaaggagttcccatttggccggcgcttgccttgtgacatctactggcatggagtttcatttcacgacaatgacatattctccggtcaagtgaacaagtttccaggcatgacggagatggtgcgtaaaattactctgagcagagcagtgagaaccatgcagaatctctttcctgaggagtacaacttctaccctcgctcatggattctgcctgacgagttccagctctttgttgctcaggttcaaatggtgaaagacgatgacccctcctgggaagcccacttttatcgtgaaacctgatggtggttgtcagggtgatgggaatcttacctcattaaagaccccagtgacatccgcctgggcagggaccctccagagcaggccagcggtggtccagggagtacatctgcaaacctctccttattcgacaagctcaagtttgatatttcgtctgtatgttctttacttcaagtccttaggaccccttagagatttatatagccaaagacggactctctaggttttgtaccgagccatatcaggagcccacccccaaaaacctggcaccgcatctttatgcacttaaccaactatttcactgaacatccacagcggcaacttcatccactcggacagtgcgg

SEQ ID NO: 92129 - DNA, 357 bp, Homo sapiens
  misc_feature (1)...(357): n = a,t,c or g
acaaacaatccaaacagaaaataacaaaacatatgaagtgatttcaccaaagaggacatgccgatggcacataagcacgagaagacatccagcctctccagccattgagtcactgccaattaagggagatgcagactcagactgctgtgagctagcactacacacctattaacacagatacaatagaaaatagtgaaaataacaaatgctggtgaggatactgagaagctgggtctcattcatcactggtggggaggtaaaagggtacaaccgttctggaaaagagtttggcagaaaagaacgctgaacttaagggtttagatgtagattctttggtcactgagcatattcaagtgn

SEQ ID NO: 92130 - DNA, 481 bp, Homo sapiens
  misc_feature (1)...(481): n = a,t,c or g
agacgaaaaaanncctgagatcatagtccactgcgnggaattctctctgttttcttttgtcactcgtacttgttatagtatctaagaaaccacaaaggccatgaagatttatttctatgttttcttatcagagttttataattttcttataaatttgggtctgtgatctgttttgagttcatttttgtgtatggngtaaggtaggggtctgaatccattcttttgcctgttgataacaagtcggtctagcaccatttgttgaaaggactgttctttccctgattatattggtagcctgtagtattggtttttatatactattacaattttgggaaaattcagtacagaattacttggagcatgttgatttgtctgagaaaactgtgaataccagtttcatgattttagggtaactacaaaatgtatattatattctatcctttgtcagatgtgttaatttaatcgctttatataaggtaag

SEQ ID NO: 92131 - DNA, 615 bp, Homo sapiens
cggacgcgtgggttttgatttcttcttcttgtccttattcaccagttgggccctgaattacattgttgaaaataagtagggataacaggcatctttttcccctgctttccaagagaaaacatataaaatttcatcaataactacaatgtttgatataggaattttgtagatatgctctcctagatttggtttgacagtgttttgtgtaggatttttacatttgtattaatgcgtgaaatttacatgttaattttcctatctcagtgtccttcacggatttatgctagtttcacaaaataatttggaatcttctttttctttcttacggtagagttttgtgtccttgtcttgaatgtttggtagaacttctcaataaagtcatctggggctgagttttctttgtgggaaagttcttttatggtcaattcggtttctgtaatgatcagaggactattcatgttttctatttcttgaactaaaatttaattttctaggaatttatctattgcatctaaattttaaaatctgttgtcataaatttttttggtacctacatctttttaatgtgttaatctgttacgatgttttttatttctgaatttagtttgtgacttt

SEQ ID NO: 92132 - DNA, 461 bp, Homo sapiens
  misc_feature (1)...(461): n = a,t,c or g
nattgagnaccgtgaggaactgcatacgccaagcttggcacgaggctcacacacatatataactattggaaaaacgattttaatacccttggcacattgtccttgngtgatataaaatccaatgacatgtggcatttggaaaaggtcacttctcccatcaggattcattagcctgtttcagcctctacgccggcaggacaggtcccagctgcttgtcccctgcagtgaggccagttggacaggtggagcctacagggaccctccctggagagcaaagggcctccccagggtgccggccagggaatccctgctttggccaagctctttcccacacatgcctggggagtagggaagggtggtttccagaaaaaatgaaacctctggccaggcaaccatggctttcaggtctggagtgcatgggaaacggaaagtcaggaccaaaccctcagtgtttttcctaa

SEQ ID NO: 92133 - DNA, 449 bp, Homo sapiens
tcccgttcgtcccacgcgtcccaatacttaattttctgtgatgtttcataatcctctacgaattttatttctttgtcctatttatgtaacttattaaccttattctgtcagtgtcaactgaaaatgaaatatctctagtttggccaagtataaaggcaaaaaatgcaatgttttacattacaggtacaattgttaaatgtattctaattattgaatctagggcaaaccggaggacaacatttatttttacgctgttagctgaagttatgccactgtaactaaatcatacattataaagtaataaactatatatctgatttcatttttctcctcaccactttcatcatttagtggacagtctgtctgtctgtcttatagccacaaataaggtgctttctgactcctcctacaattaagatccattgctaattaacacagtgctcctcttg

SEQ ID NO: 92134 - DNA, 1136 bp, Homo sapiens
aaggaaatacagtgagataagtcagcatcatgccttgctataactgcacctactcccataactggcatacctatcagattttggtggctgcaccaaaacaccaggaagaaaaggatggggcacggctgcacagttatgtgatacttggaatgtcttatgtattgatgatgtgtttgtgtacataaaccctattcactgatgcactgtatggcatatttagaggtcacttggctctaatcaactggaaaaagaatcacaatcctctgaatttacaaaggtgcttctataagcagccattaaaagaacaaaaacatgtaaattaagcatctaactgaagaaattggaaaatataaataaactggagagaagcaacagtggatttttaaatgagcaatataagttgttataaagttccaggccagacatgaaaattgatgtcaaaatctgaaattgcaactactggaatacaaagctatatagacagtatgtgataacaatgaaatacttcattctaggaatacatggtttatcgaataccaggaaacttattaatttaatttaactcaaaaagagaaaaactatataataatctgtatgtattttgaaaagtttaagacgatgtttagttttcatttccaatttcattaaatgaattcactagaataggaataaaatgattaaacaatatgtatttaatttgctagccaatgtcattcttaatggtgaaaagctaggaatactgctcgtaaagccagggctagaaataatgcctgcagtcacaactactacttaacattgttctgaggtcctagccttgtaagtaattagaaagaaaactaaaattaatgaagaaatatagatattaaaaagacagtcacaaaaattactataggattatataattgcatacctggaaaacagaagcagcttttttaaaaagctaaagtgtaactatagtcaagtaggtgtccactgataaaaattatataaaaaggccaggcacagtggctcaagccttaatcccagcactttgggagggtgaggcggcggataacgaagtcaggagatcgagatcattctggctaacagggtgaaacctcggctcttactaaaataccaaaccttatcccggcccg

SEQ ID NO: 92135 - DNA, 413 bp, Homo sapiens
  misc_feature (1)...(413): n = a,t,c or g
ccatattctctttaacatatgggtcaactgggatattttatacaatgctggtgggagtgtaaacggctaatatcattttaggaaaacaatttgacaatctcctgcaaagtagaccatttatacatcttatgacacagcgattccaatctcagaatatacctaaaagaatgtcctccaaatgtcaccaagaaacatgtgcaagaatgtttattctagcaccattcacagccacaataaaagggaaacaactcacatgtccattggtagaagaaaggatagattatactgtggtatagtcacaaatattatataaaagtgaaaaggaacctgtaagttacaattacacacaacatgggtgaatcttaatatcttaatgtttgagattatactgtggtatagtcacaaatattatn

SEQ ID NO: 92136 - DNA, 439 bp, Homo sapiens
  misc_feature (1)...(439): n = a,t,c or g
ntagattagaaatgccctcgcaccngacgtaccggnccggaanccccgggaaagaaacatggaatttaaactgcatcacagaccaaatgacttaacagacatttatagaacatttcatccaacagctgcacagtacacattcttttcatcagcatgtggaatattctccaggattgactatatgttaggacacaaaacaaatgtcaaaaagtttatccaaaatttttaaaaatcaaaatcttatcaagtattttatctgaccacaatggaataaaactagaaatcaataacaacaggaacattcaaaagtatacaatacataaaaattaaacaacatgctcctaaatgaccaatgggtgaaggaagaaatgaaggatgctatttaaaaatttactgatacaaatggaaatagaaatacaatatacgaaaacttatgggg

SEQ ID NO: 92137 - DNA, 406 bp, Homo sapiens
  misc_feature (1)...(406): n = a,t,c or g
tataaactcttgctgaattgacccctttatcattatacagtgaccttctttgtcttttgtaggttttgtcttaaaatctattttgtctgaggtaagtgttgctactcttcctctttattggtttccattggcatgaaatgtccttttctttattaatttatttttagtatatgagtgtttttataggtgaagtgtatttcttgtaggcaacaaatcattgggtcttgttttttgaatccattcagctattctgtcttgattggaaagtttggtccgtttacattcaatattattattcataagtaaagacttactttttccagttcgttatttgttttctgggtgtttatagatttctcttccttcttttgtttctttcttttactgaaggngattttctctggag

SEQ ID NO: 92138 - DNA, 415 bp, Homo sapiens
aaaataaggaaattagcgacatgccaccaagataaagtttctttcacaaaaaggaagatcggaaggaaggaaggagggaagataacaccatactacaagaccgcccattttaaaacggcaggagtgagtgcttattaataataccatttagaaatcggactatactgcccagtcccaatacactgagtggctggctggatgaaaaaacacgacccagtgatctgctccctgcaaagaaacacacttcacctataaagacacacatacactgaaaataaagggatggaaaaagatattccatgcgaatggaaaccaaaaagagcaggagtagctatacttatatcagacaaaatagatttcaagacaaaaagtataagaagatatagaaggtcattgtataatgataaaaggattt

SEQ ID NO: 92139 - DNA, 414 bp, Homo sapiens
atggagacagcggctcctgtaaacagcagatagaaagccaggcttttgaactggccctggaggaaggtctcagtgcccacgccgatcaacactgcagcagtggtgatgcccaggagccggcaggtgtattccagcccagtccagaacacctggagctgcatggtgccaggggtgaggacaaagtcctggcagggcaggcagcaaagtcttcggccctgagatgctcccgaacacccttgtgtaggtaggaggctgctggctgtggctgcacaccggggccctgccttcccaaaccagtcctggccaccgcagcctggccgaggtgtgaatagggctcaccttctgtgctctcagcccgtgcccttgccaggcactcagcttaatcattaccttggaagaatgctcctgacgaaa

SEQ ID NO: 92140 - DNA, 413 bp, Homo sapiens
tttcgttttaaatgatacatttctaacaaattctcaggtgatgccaacgttcacagaccacacttagagtatcaaaggccttcctgctctcagtaggtccaaagctacccaaaccttgctctgaatgcactatagacatgtctgtacccgagtcaacacgctggaggccctgccctcagccagacgggccagagataagcaccatgccagttgcacctgagcatctttcagctttcatcagtttatgcctaatcctgctcagtaggtgccacccccatgttgcccacgaggactggcaggctcacagcaagtagccagccaggctgggatgctgcagcgaaagtgaactttcccgagtgagaatggcttgagtttggggcaaggctggagccagctactgagggatgtgaagc

SEQ ID NO: 92141 - DNA, 1045 bp, Homo sapiens
  misc_feature (1)...(1045): n = a,t,c or g
agctgcagaatctccgggacgttccacgcgtacggacggagccgggctcaccaggtcgctgctgcgagggagtttttgtgctggggcctgggtggcggctggaggcctgagttgggctcgcggcgggggtcggcagggggccgggtggcggaatgatggaggaggaggaactggagttcgtggaggagctggaagccgtgctgcagctcacgcccgaggtgcagctggccatcgagcaggtgtttccaagccaggaccctctagatcgagcagatttcaatgctgttgagtatatcaataccctgttcccaaccgagcaatctctggcgaacatagacgaagtcgtgaacaaaattaggctgaaaataaggagactggatgacaatattcgaactgttgtaagaggtcagacgaacgtggggcaggatggacggcaagtaagtaactcattcctccatattacctatgctcccctggtttctcccggcaaccagatgaccaaaacgtcgatgtgccctcttgcagagcactttccgattgatccgtttcatacatggcaggacaagacagggcaggcgcccacagcagccacgtgctgtccctcagtgtcccttggaccaggaccgtgaactgtggcaccgctcacccgaggccagatgagaacactggggcttacttgtctttctccttcgtgtcgggcatctcttgtgccctcttttattttgtgggctgtggctaaatgaggttgctgcattcgtcagctgagttgttggggttttgatattttgtggctgtaaaagatagtaacctgacatagttaccatttcctcgtacctcgctttgccagcaggcaggtgactcaagattcattaaaaaattttacaagttggccgggcacagcgggcacatnggtcacgcctgtaatcccagctactcaggaggctgaggcatgagagtcacttgaacccaggagccagaggttgcagtgaggcgagattgcaccgctgcactccagcatggacgacaggggtgagactgtctcaaa

SEQ ID NO: 92142 - DNA, 5109 bp, Homo sapiens
atggggaaaaaacagagcagaaaaactggaaactctaaaaagcagagcacctctcctcctccaaaggatcgcagttcctcaccagcaatggaacaaaggtggacagagaatgactttgacgagttgagagaagaaggcttcagacgatcaaactacgagctacaggaggaaattcaaaccaaaggcaaagaagttaaaaactttgaaaaaaatttagatgaatgtataactagaataaccaatagagagaagtgcttaaaggagctgatgaagctgaaagccaagcctcgagaactatgtgaagaatgcagaagcctcaggagccaatgcgatcaagtggaagagagggtatcagtgatggaaaatgaaatgaatgaaatgaagcgagaaaggaagtttagagaaaaaagaataaaaagaaacgaacaaagactccaagaaatatgggactatgtgaaaagaccaaatctacgtctgattggtgtacctaaaagtgatggggagaatggaaccaagttggaaaacactctgcaggatattatccaagagaacttccccaatctagcaaggcaggccaacattcagattcaggaaatacagagaacgccacaaagatactcctcgagaagagcaactccaagacacataattgtcagattcaccaaagttaaaatgaaggaaaaaatgttaagagcagccagagagaaagactttaaaccaacaacgatcaaaagagacaaagaaggccattacataatggtaaagggatcaattcaacaagaagaactaactatcctaaatatatatgcacccaatacaggagcacccagattcataaagcaagtcctgagtgacctacaaagagacttagactcccacacattaataatgggagactttaacaccccactgtcaacattagacagatcaacgagacagaaagtcaacaaggatacccaggaattgaactcagctctgcaccaagcagacctaatagacatctacagaactctccaccccaaatcaacagaatatacatttttttcagcaccacaccacacctattccaaaattgaccacatacttggaagtaaagctctcctcagcaaatgtaaaagaacagaaattataacaaactatctctcagaccacagtgcaatcaaaccagaactcaggattaagaaactcactcaaaactgctcaactacatggaaactgaacaacctgctcctgaatgactactgggtacataacgaaatgaaggcagaaataaagatgttctttgaaaccaacgagaacaaagacacaacataccagaatctctgggacacattcaaagcagtgtgtagagggaaatttatagcactaaatgcccacaagagaaagcaggaaagatccaaaattgacacccctaacatcacaattaaaagaactagaaaagcaagagcaaacacattcaaaagctagcagaaggcaagaaataacttaaaatcagagcagaactgaaggaaatagagacaaaagaaaaccctttcaaaaaattaatgaattccaggagctggtttttttgaaaggatcaaccaaatttgatagacccgctagcaagactaataaagaagaaaagagagaagattcaaatagacggcaataaaaaatgataaaggggatatcacccaccggatccccacagaaatacaaactacccatccagagaatacttataaacacctctacgccaaataaacttagaaaatctaggagaaataaggattaattcctcgacacatacaccctccccaagactaaacccaggaagaagttgaatctctgaatagaccaaataacagggatctgcaattgtggcaataatcaatagctttaccaacccaaaaagagtcccaggaccagatggattcgacgagccgaatttctaccagaggtacaaggaggagcttgtacccattccttctgaaactattccaattaatagaaaaagagggaatcctccctaactcattttatgaggccagcatcatcctgataccaaagcctggcagagacacaacaacaacaaaaaaagaattttagaccaatatccctgatgaacatcgatgcaaaaatcctcaataaaatactggcaaacccgaatccagcagcaccatcaaaaagcttatccaccatgatcaagtgggcttcatccctggggatgcaaggctcctttcaatatacacaaatcaataaattgtaatccagcatataaacaagagccaaagacaaaaaccacatgattatctccaataggatgcaggaaaagggccttttgacaaaattcaacaacgcttcatgctaaaaactctcaataaattaggtattgatgggacgtatttcaaaataataagaagagctatctatgacaaacccacagccaatatcatactgaatgggcaaaaactggaagcattccctttgataactggcacaagacagggatgccctctctcacctcaccactcctattcaacatagtattctgccccatagtgttctggccagggcaatcaggcaagagaaggaaataaagggtattcaattaggaaaagaggaagtcaaattgtccctgtttgcagacgacatgattgtttatctagaaaaccccatcgtctcagcccaaaaatctccttaagctgataagcaacttcagcaaagtctcaggatacaaaaatcaatgtgcaaaattcacaagcattcttatacaccaataacagactaacagagaaacagagaaccaaatcatgagtgaactcccattcacaattgcttcaaagagaataaaatacctaggaatccaccttacaagggacgtgaaggacctcttcaaggagaactacaaaccactgctcaatgaaataaaagaggattacaaacaaatggaagaacattccatgctcatgggtaggaagaatcaatatcgtgaaaatggccatactgcccaaggtaatttacagattcaatgccatccccatcaagctaccaatgactttcttcacagaattggaaaaaaactactttcaagttcatatggaaccaaaaaaagagcccgtattgccaagtcaatcctaagccaaaagaataaagttggaggcatcaggctacctgacttcaaactgtactacaaggctacagtaaccaaaacagcatggcactggtaccaaaacagcatggtactggtaccaaaacagagatatagatcaatggaacagaacagagccctcagaaataatgccgcatatctacaactatctgatctttgacaaacctttgcttgagaaaaacaagcaatggggaaaaggattccctatttaataaatggtgctgggaaaactggatagccatatgtagaaagctgaaactggatcccttccttacaccttatacaaaaatcaattcaagatggattaaaaaaaaagatttaaacgttagacctaaaaccataaaaaccctagaagaaaacctaggcattaccattcaggacataggcgtgggcaaggacttcatgtccaaaacaccaaaagcaatggcaacaaaagccaaaattgacaaatgggatctaattaaactaaagagcttctgcacagcaaaagaaactaccatcagagtgaacaggcaacctacaaaatgggagaaaattttcgcaacctactcatctgacaaagggctaatatccagaatctacaatgaactcaaacaaatttacaagaaaaaaaaaaaaacaaccccatcaaaaagtgggcaaaggacatgaacagacacttctcaaaagaagacatttatgcagccgaaaaaacacatgaaaaaaatgctcatcatcactggccatcagagaaatgcaaatcaaaaccactatgagatatcatctcacaccagttagaatggcaatcatgaaaaaagtcaggaaacaacaggagctggtattttgaaaagatcaacaaaattgatagactgctagcaagactaataaagaaaaaaagagagaagaatcaaatagacgcaataaaaaatgataaaggggatatcaccactgatcccacagaaatacaaactaccaccagagaatactataaacacctctatgcaaataaactagaaaatctagaagaaatggataaattcctcgacacatacaacctcccaagactaaagcaggaagaagttgaatctctgaatagaccaataagaggctctgaaattgtggcaataatcaatagcttaccaaccaaaaaaagtccaggaccagatggattcacagccgaattctaccacaggtacaaagaggagctggtaccattgcttctgaaactattccaatcaatagaaaaagaggtaatcctccctaactcattttatgaggccagcatcatcctgataccaaagcctgacagagacacagcaaaaaaagagaattttagaccaatatccttgatgaacatcgatgcaaaaatcctcaataaaatactggcaaaccgaatccagcagcacatcaaaaagcttatccaccatgatcaagtgggcttcatccctgggatgcaaggctggttcaacatacgcaaatcagtaaatgtaatccagcatataaacagaaccaaagacaaaaaccacatgatcatctcaatagatgcagaaaagtcctttgataaaattcaacaacacttcatgctaaaaactctcaataaattaggtattgatgggtcatatctcaaaataataagagctacctatgacaaacccacagccaatatcatactgaatgggcaaaaactggaagcattccctttgaaaactggcacaagacacggatgccccctctcaccactcctattcaacatagtgttggaagttctggccagagcaatcaggcaggagaaggaaataaagggtattcaattaggaaaagaggaagtcaaattgtccctgttcatagatgacatgattgtatatctagaaaaccccatcatctcagcccaaaatctccttaagctgataagcaacttcagcagtctcaggatacaaaatcaatgtacaaaaatcacaagcattcttgtacaccaataa

SEQ ID NO: 92143 - DNA, 1479 bp, Homo sapiens
  misc_feature (1)...(1479): n = a,t,c or g
tttcgtgggaagggtgctggggagcagggctggtccacagcaggtctcgtgcagcaggtacctgtggttccgccttctcatctccctgagactgctccgacccttccctcccaggctctgtctgatggcccctctccctctgcaggcgttcggatgggcagcctggggctgttcctgcagtgcgccatctccctggtcttctctctggtcatggaccggctggtgcagcgattcggcactcgagcagtctatttggccagtgtggcagctttccctgtggctgccggtgccacatgcctgtcccacagtgtggccgtggtgacagcttcagccggccctcaccgggttcaccttctcagccctgcagatcctgccctacacactggcctccctctaccaccgggagaagcaggtgttcctgcccaaattccgaggggacactggaggtgctagcagtgaggacagcctgatgaccagcttcctgccaggccctaagcctggagctcccttccctaatggacacgtgggtgctggaggcagtggcctgctcccacctccacccgcgctctgcggggcctctgcctgtgatgtctccgtacgtgtggtggtgggtgagcccaccgaggccagggtggttccgggccggggcatctgcctggacctcgccatcctggatagtgccttcctgctgtcccaggtggccccatccctgtttatgggctccattgtccagctcagccagtctgtcactgcctatatggtgtctgccgcaggcctgggtctggtcgccatttactttgctacacaggtagtatttgacaagagcgacttggccaaatactcagcgtagaaaacttccagcacattggggtggagggcctgcctcactgggtcccagctccccgctcctgttagccccatgggctngccgggctggccgccagtttctgttgctgccaaagtaatgtggctntctgctgccaccntgtgctgctgaggtgcgtatgcacagctgggngctgngncgtccctntcctctctncccagtntctagggctgnctgactggaggncttncaagtggntttcagtctnngacttatacagngaggccagttgggtttccatgcactgggaatgcggggactttgcagttggattaacccaggntcaggggtaanaagttagcctcctagtngngacaacacntagtgaagggtttttngggngctnaataaactgagtnacctgngtntccantttntaaagncntttaatctgnaagtnttnttaanttnaggtntntnaatngggggtttttaggtgnaanatnnnnnnggggtttgananttnangtatttttaggnnangagccttnggnanaannnnccaggccnnagcnaagatnttntttntgnccccattanntaaanggtttngntngccttttacatannngaanngntttnattttaatttt

SEQ ID NO: 92144 - DNA, 2385 bp, Homo sapiens
accactgcggtaccgctccggaatttccgggtcgacgatttcgtgggcacgcaccgcgcgcagaccttctgcgaacaatgctccggccgggcggctggcggctcggagaccgacggaggggccgggggagcgcagcccagaggaagccgctctgtgacccacctctgaatcccacaaaactgcaccagagagccgggtgcaagatgaaccagcaccctgtcggctcaagatgcaccagaccctctgcctgaaccccgagagcctgaaaatgtctgcgtgcagtgactttgtggagcacatctggaaacccgggtcctgcaagaactgcttctgcctgcggagcgaccaccagctggtggcgggccctccccagcccagagcgggcagcctgccccctccaccgcgcctgcctcccaggcctgagaactgccgcctggaagatgaaggtgtgaacagctcaccttactccaagcccacaattgccgtgaagcccaccatgatgagctccgaggcctctgatgtgtggacagaggccaacctgagtgccgaagtctcgcaggtcatctggagacgagcccctggcaagctccccctcccgaagcaggaggatgcccccgtcgtctacctgggcagcttccgaggtgtacagaagcctgctggtccctctacctcccctgatggcaattctcgctgtcccccagcttacaccatggtcggcctgcacaaccttgagccccgcggcgagaggaacattgccttccacccggtgagcttcccggaggagaaggctgtgcacaaagaaaaaccctcatttccttaccaagaccggccctccacccaggagagcttccgccagaaactggctgcctttgctgggaccacatctggctgtcaccagggccctgggcccctgcgggaatccctgccctcggaggatgacagtgatcaaaggtgctcgccctccggggacagcgagggtggagagtactgctccatcctggactgctgccctgggagccctgttgccaaggctgcctcccagactgcaggttcccggggcaggcatggtggcagggactgctcacccacgtgctgggagcaggggaagtgttccgggcccgcagagcaggagaagcggggcccgagcttccccaaggagtgctgtagccagggccccactgcccacccatcctgcctgggccccaagaaactgtccctcacctcggaggctgccatttcttccgacggcctctcttgtggcagcggcagcggcagcggcgccagtagccccttcgtcccccacctcgagagtgattactgctccctcatgaaggaacctgccccagagaagcagcaggaccctggctgcccaggggtgacccctagcagatgccttgggctgacgggggagccccagcccccggcccacccccgggaggctacacagcctgaacccatctatgctgagagcaccaagaggaagaaggcagctccggtgccttccaagtcacaggccaagatagaacatgcagctgctgcccagggccaaggccaggtatgcacaggtaatgcctgggcccagaaagcagcatctggctggggccgggacagcccagacccaactccccaggtgtcagccaccatcacagtcatggcggcccacccggaagaggaccatcggacgatctacctgagcagccctgactctgcagtgggggtgcagtggccacgagggcctgtgagccagaactccgaggtaggtgaagaggagacttcggctgggcaggggctgagctccagggaaagccatgctcacagtgccagcgagagcaagcccaaggagaggcccgccattccccccaagttgtccaagagtagccctgtagggtccccggtgtcaccgtctgctggagggcccccagtgtcaccgctggctgaccttagtgatgggagctctggcggcagcagcattgggccccagcctccatcccaaggtcctgctgaccccgctccttcctgccggaccaacggtgtcgctatcagtgacccatccaggtgtccccagcctgccgcctcgtcagcctcggaacagaggcggcccaggttccaggcaggcacctggagtcgtcagtgccggatagaggaagaagaggaggtggagcaggaattgctgagtcacagctggggaagagagaccaaaaatggccccacggaccattcaaactccacgacctggcaccgtctccaccccacagatggctcctctgggcagaacagcaaagttgggaccgggatgagcaaatccgcctcttttgcctttgagttccccaaggacagaagtgggattgagacattctcacctcctcctccgcctccaaagtcgcg

SEQ ID NO: 92145 - DNA, 375 bp, Homo sapiens
tctaatctgttgtgaaaatagggttttatcatttttgaagctttaaccacataaaatatatgtgcattaatcactgtgctctcttctcttttagaaaaaattatgcaatgcagaggaagccaacctatttaagacaacaggagagaacagcaactctgctccacatcattacttttgacaaatattcaggaagtcttaaagtatttagctcaaaaaaagacatctctgttatgtaagtaaaactatttgtaccattatttttcattcactttctatgtagtatattatttgtacataaaagaggctatctttaaggttttatggatttataaaacgtaacagtgtgttcataatttgttgattcattccttttat

SEQ ID NO: 92146 - DNA, 4887 bp, Homo sapiens; identical to SEQ ID NO: 63183

SEQ ID NO: 92147 - DNA, 606 bp, Homo sapiens
tttggaaagaaagaagtaaatgtctttatttgcagatgacatgataatgtagaaaatctcaaggaagacacacacggacatttttttaaaaaatgataaaactaacagattgaatttagacaggtcacaggatataagatcaataaacaaaaatcaatggtatttctatatactagcaccaaaaagtctgaaaacaaaattcagcaagcaattccattcgtaatagcaaagtaatatgaacattttaacaaaaggagtgtaagatgtatatactgaaaataacaaaatattgctaagagaaatcaaggaatatctaaataaatggacacaaactccatgttcacagactggaagacttcatattgtcaagatggcaattctcaacttgatctgtaaattaaacacaatatatatttaaaacctcagaaggcttttctgtagtaactgacaatctgatcataaaagtgacatgggaatgcaaagtatctagaaaagtcaaaagaattttgaaaaataacaaagttggaggtgttacattacctgatttaatgacttacaaatactttaaagccagagtcatcaataacacacaatcatggacaggca

SEQ ID NO: 92148 - DNA, 379 bp, Homo sapiens
tgctccagtgtttcatgcatatatatttataattgttatagcctgtttctgaattgaccttcttattatatagcgaccatttttatctattcttatattttttgttttggaatctttggtgtattttgtattttctgtagctactcctgctcttttttggtttctattggcatggaataatctttttccattcctttattttcagtcttagagtgtctttataggtgaagcgtgtttcttgtaggcaacagatcttgttaaaaaaaaacagggtcttgttttttttaacccattcaatcactcttaaactccatttatgttcagtattattactgataagtaaggacttttgccatttcgttatttgttttctggtagt

SEQ ID NO: 92149 - DNA, 708 bp, Homo sapiens
ggcacgagacccgcatcacaggtgtgatcagctggatccagcaagtggtgacctgaggaactgcccccctgcaaagcagggcccacctcctggactcagagagcccagggcaactgccaagcagggggacaagtattctggcggggggtgggggagagagcaggccctgtggtggcaggaggtggcatcttgtctcgtccctgatgtctgctccagtgatggcaggaggatggagaagtgccagcagctgggggtcaagacgtcccctgaggacccaggcccacacccagcccttctgcctcccaattctctctcctccgtccccttcctccactgctgcctaatgcaaggcagtggctcagcagcaagaatgctggttctacatcccgaggagtgtctgaggtgcgccccactctgtacagaggctgtttgggcagccttgcctccagagagcagattccagcttcggaagcccctggtctaacttgggatctgggaatggaaggtgctcccatcggaggggaccctcagagccctggagactgccaggtgggcctgctgccactgtaagccaaaaggtggggaagtcctgactccagggtccttgccccacccctgcctgccacctgggccctcacagcccagaccctcactgggaggtgagctcagctgccctttggaataaagctgcctgatccaaaaaaaaaa

SEQ ID NO: 92150 - DNA, 482 bp, Homo sapiens
  misc_feature (1)...(482): n = a,t,c or g
gagagccccctttgagaccatattgagtgtcgtggaattcggaggcctctcctctggtagcttccccttgtcttgctgaggaggctgagggggaggaggagggtcactcggggtgcagcagcctcagtggggcacagttgcaggggatgtggcagtgcctcctggaaagcccatggtccctgccccctctgcaggcatgctcgcagcactgggtgcccctaggctgagttctggacgggcccctgcgttccctggttccctgtacatgggaccctgtctgggtgctggggctgtgggcctgccctcctggaacctccacgccgggtccttgccccgccacactctgacatccccagggcagcctaagtgagccttttaaatgtaagttagaacatccctctgggcttcaaaccccgcccccacccccaccctccgncccttccaaccccggtaactcctcctttgactctgaatcaaagcca

SEQ ID NO: 92151 - DNA, 1136 bp, Homo sapiens
gcctcctcctcagctcgcctggcttctcacttaggcgtgtgctttcgctttgcagcaaaagctgctgcttttcgcatctaaattcttgctctgaaggtgccaagaacctggaaaccggctgggagtggggtctcaccagcctttggagaccctcctgagccgtctggcaaccagtgacgatacagagctgcacggaacgtcatgaaggaccaacgcctggttttccatagtaaagttaggtcatctggttatgcgtcagcaccacatgtaactatgttttcaccaaagaccaacatcaagagtgaggggaaaggatcttcaaggagcaggagcagctgcgcacgggaggcataccccgtggagtgcgctgtgcccaccaagcccggcccccaggtcgctgccgcccccacctgcacacgtgtatgctgcatccagtactcaggagatgggcagtggctggcctgtgggttggccaaccatctgttactcgtttttgatgccagcctgactgggacacctgctgtgttttcaggtcacgacggggcagtgaatgccgtgtgctggagccaggaccggaggtggctgctctctgcggcccgggacgggaccctgcgaatgtggtcggctcgtggggcagagctcgcactgcttctgatataaacagaagagcaagtccaagctgatttgcaggctctccacgacgggtgcagtagacatgaccagtttatcggcagtcaacgacttttattcccacatcgtactcgcagctggccggaacaggaccgtggaagtgtttgacctcaacgccggctgcagtgcagcggtgatagtggaagcccactcacggcctgtccatcaaatctgccaaaataaaggttcatcatttacaacccaacagcctcaggcttataaccttttcctgaccacggccattggcgatgggatgagactgtgggacctgagaaccctgaggtgtgagcgccactttgaagggcatccaacccgcggctatccatgtggaatcgctttcagtccttgtggacgattcgcggcttgtggggccgaggacagacacgcttacgtgtatgaaatgggctcaagcacgttttctcaccggctggctgggcacacagaca

SEQ ID NO: 92152 - DNA, 684 bp, Homo sapiens
actgtggtggaattcggcaggtggtgacttgagaactctgtgcctggtttctgaggactgtttcaccatgcagtggctaatgaggttccggaccctctggggcatccacaaatccttccacaacatccaccctgccccttcacagctgcgctgccggtctttatcagaatttggagccccaagatggaatgactatgaagtaccggaggaatttaactttgcaagttatgtactggactactgggctcaaaaggagaaggagggcaagagaggtccaaatccagctttttggtgggtgaatggccaaggggatgaagtaaagtggagcttcagagagatgggagacctaacccgccgtgtagccaacgtcttcacacagacctgtggcctacaacagggagaccatctggccttgatgctgcctcgagttcctgagtggtggcttggggctcgggcctgtatgccaacaggggataatcttgatttcctgcgaccatcctggtgaaggcaaaagacattccctatcgactacagtctggcaacgcccaagggcacttgggccatagaatgcccttgcctcagaggtggactccatagcttctcagtgcccctctctgaaaaccaagctcctggtgtctgatcacagaccgggagggtgggctgaactttccgtggctggttaaa

SEQ ID NO: 92153 - DNA, 1016 bp, Homo sapiens
  misc_feature (1)...(1016): n = a,t,c or g
ccaagttgatttanagaaagcggcctgagcgatagtccagccggagcttgcaggaggtggtagacgntgggagactgagtttaaagtcatacttttggttggaacaagggccccaggcattgcccatcatgttccggaaccactgcacagtcttgcacacgtctaggtggaagccggtgcagagagctgccttgatggagctactacacttccccaagactgccgaggggtcccttgtggtggtgcaccaggcacagcacngtcccctaggagtttctcacgcttgcacacacattctgactccaccagcacacagccacagcggcgnnccagggctgggtccctcatctccaggacaaacatggtgcctgtggggggacaatgggcaccaggatatcaaatttctgggtctcatggagggttccccatttctcaaaggcagccccgatgcccaggcagtcttcccaattgtgggtgaacctcttggcggctgagcacccgaacaggcctcaatgagatcatccacaaaactctccacaaactcacaggtgcagggcaggtcacggatggcattttggacatagtgtttgtaaaaggagtcccagggcctcctgggaggggaagtcagtaagccagttgtaagaggtgacagggacaacacggacttcctcctcctcctcctcactgctggaatcaaaggccggttcatgctgcatgttctgtcgcaggagctcaaagacgagaaaaaggcaaaagaggccagtgttccacaggtttcccagcatccagcccagaggcccttcctggccatcggcctggaacggccaccccatgtctttcttccccagcactaactggtcactggatgtgtctcctgtccagaagttctctgccttctgcctctgctcagcggctcgctttctctcttcaaactccatctctagcaggcgcatctcctcactcattcgcttctccagctgccgactcctggataatgtgtccaggtccatccgatc

SEQ ID NO: 92154 - DNA, 377 bp, Homo sapiens
aattaataagaacagaatctgctctttcttaaggccctataaattaacctcaatgacttaatgcaaatttcaaggacaagcttcatgtttgatgcatgggccacacagtgagttcatttatttacccaatgccataaccagagacatttgacatttgctctgtaaaatttctaacttcacgatgtaaacagtttttcccgagaccatcagaacaagactccatattatgaggctctgacccctcttaatgcctaccttttgcacttgacaggataatgctgtaattaaattttcacaatcagtaactgctgtggttaacacgccagaacttggcatcataaatcctatagtcaaaacaaggtgaaactccgtctttt

SEQ ID NO: 92155 - DNA, 392 bp, Homo sapiens
cagaagtatgttgaagtccagatatttgaaattttcctggctatctcattattattgaattccagtttaatcctttgtggacagagaacatagcctgcgtgattttaaactattcaaatttattgagttgtgttttgcggcccaaaatatgggctatcttgacaaacacaccaggtgcacttgaaaataatgcgtattctgccatttttggtgaagtgttctataaatatcaagccaagctggttgataatattgatcaaaacttctatgtctttactcattttctggactaattgctctagtagctgctaggtagagatgttaatatttgcagtgatgtttggggaactatctcttctgcactttcattctgtgaggtacttgcttcatgg

SEQ ID NO: 92156 - DNA, 400 bp, Homo sapiens
cggacgcgtggggttttagtagattatttataattttccatatacagaattgtcatttgcaaagagagacagttttacttcttcatttccattctgactgcctttaaattaattctttttcctaattgtcctggctagaaatcccagtacagtgttgaatagacgtggcaggagtggacatccttgacttttcctgatctttgggagaaacccacagtgttagctgtgggctttttgtagatgtgctttaatgtaaataaggtaacactgaatatattaccttctaaaaaagctttgaggaatttagcttactttgatataagtagttgcttctgctgattaatcatataattctgtacgttcatgtagcagtttaatgggactgttatttggctaaatt

SEQ ID NO: 92157 - DNA, 476 bp, Homo sapiens
  misc_feature (1)...(476): n = a,t,c or g
gaggccccncctctagntagagtagtcgaccgnannnncnncngnnntnagntanagancgacccacgcgtccgattttggaaattaccacttgccttatccgttgtttgcaaaaactttctcccattctggaggcgggggctttactctatcgattccttagctgtgcataagtttttagtttgatgtaatagaatttgtctatttgtgcttttatttgtgcatttgaggtcttattcaaaaaattattgtccagaccaatggcatgggagcttttccttagttttcacctggtagtttaatagttgggatcttacatttgccttcaatccattttcatttaatttttctaaatggagaaagatgaggtctagtttcaccccactgtctgcatgtggatatttagttttccagagccatttattgaagagactgtcctttccctgatgtgtattttctggcgccattgcagaaag

SEQ ID NO: 92158 - DNA, 611 bp, Homo sapiens
tcatttgattgtattcatgtgagtgtatttccagactttctattcttttctgtttgctcattttaaaaaatgggttatttgtccttttactattacgttgtaaaagttcttatggatacaagtcccttaacagatatatgttttacaattattttcccctattctgttgggtgtcttttcactttcttcatcgtggttttttgaagactaggtgtttttagttttgataaactctaattctttttttgtttgatgattatgctttttatgtcctgtctaagaaaccatggccaaggtcacaatgatttaccctatgttttcttctaataactatagagttttagctcttacatttaggtttatgattcattttgagttaatttttatgtatggtgtgaggtagtggaccgcattcatactggcgccctaataccatatgttgaatcattcccgcattgaatggtcttgacacccttgttgtaaatccgttgcccatacaaaagctagggatgcatggccgagcgaagacatggacatttcatacccaaaggcttctggtgagccacttgggccaggttggaaagaatttttggcccttcggaagcgggagg

SEQ ID NO: 92159 - DNA, 369 bp, Homo sapiens
  misc_feature (1)...(369): n = a,t,c or g
aagacattgttttttggactctgcaaatattacatttcaaagatgagtgaaaaaaaattggaaacaactgcacagcagcggaaatgtcctgaatggatgaatgtgcacaataaaagatgtgctgtataaaaaagaaaggtatgatgttcattgactattctttcgggcgagaaatttaatttatatttgactgtgcaaagagtcagttgttacttgtaaacttcaagtcattgtttaggtcagagttgctgttgtctaaatgcaccacgacctatttgttgaaagggtaaactggaataaactttaattgggtttacaaaatgagaattcttactgtataatntttctttttttttctccccccctccc

SEQ ID NO: 92160 - DNA, 396 bp, Homo sapiens
attggttatatcctattgctggattgttctctttaacattgtataattaccttctttgttgctttttacagctttgacttaagatcttttgatatatctactcctccttgcttttggtttccatttgtgtagaatatctttttccatcccttcatttttagtctgtatatatctttataggtgaagtgagtttcttgtaggcagtatatagttgggtcatcgttttttatcagttcatccagtctgcatcttgtaagtgggagaatataatcggtttatattcaaggctatttttcacaggggaggaattactcctctcattttgttaatctttttctggttgctttatatattctttattcctctcttactggtaatcatcgcaacttggtggtt

SEQ ID NO: 92161 - DNA, 483 bp, Homo sapiens
  misc_feature (1)...(483): n = a,t,c or g
nattgagnccattgagagcgatccgacngaccnaccggnctggaattcgcgggccgagccacgcgtcctaattagtttaacaacataaatattcttagtgaggatatcttctgaattatcataatagagtagtgggtatgtttttctgttacataaaaaaatcgaggactttctttggtaagttatacttcataccagttttagtcatttagcacattagagagtaccagtgagctatacattatgtacactatagatatgttaaaaagtacattctattcatgataaaactaataaactaggaatagaaggaaacttgctccatctgataacatctatgaaaaaacccggagctaatacatagttaatggcaaaatattggatgctttctgcctaatattaggagcaacataagggtggcctctgctgccacttttttttaacattgtactagagtttctagccagagcaattaggcaggag

SEQ ID NO: 92162 - DNA, 1576 bp, Homo sapiens
aacccctctcgtatcatcctcatcctcatcactgtttgttttgctgggcgccgtggctgctgagaagctcattcacacagaagacccatttaatgatgaacatcaggagaggcaagaggtggaaatgttggctaagaagtttgaaatgaaatatggtgggaaaccccgtaaacaccggaaggatcggctacaagatttaattgatataggctttggctatgatgagacagatccatttattgataactcagaggcttatgatgaattagttcccgcttctctaacaacaaaatatggaggcttttatatcaacactggcactctacagtttcgccaagcttcagatactgaagaagatgatattacagacaaccaaaagcacaagccacccaaggtccccaaaataaaagaagatgatattgagatgaagaagcggaagcggaaagaggaaggggaaaaggagaagaagccaaggaaaaaagttcccaaacaactgggagttgtggctctaaattcacacaagtctgaaaaaaaagaagaaacgttataaagattctctttctctagctgccatgattagaaaattccagaaagagaaggatgcattaaagaaggagtctaaccccaaagtcccagtgaccttgtcaaccccttctctgaataaacccccatgtgctgctgcagcactggggaatgacgtcccggacttaaatctgagcagcggtgatccagaccttcccatttttgttagcacaaatgaacatgagctgtttcaggaagctgaaaatgccctagagatgctagatgattttgacttcgacagattactggatgctgcttctgatggtagccccctatctgagtcggggggtgaaaatggaaccaccacccagccaacctacacttctcaggttatgcccaaagtggtacctacactcccagagggtctacctgtacttcttgaaaaacgtatcgaagaccttcgtgtagctgccaaactttttgatgaagaaggaaggaaaaaattctttacacaggatatgaataatattcttctggacattgagttacagctacaagaactaggccctgtcattcgcagtggtgtctactcccaccttgaagcttttgtgcccatgccaataaagaaacactagtaaaacgtctgaagaagttacatcctcaatgtcccaggatgatcgtttgaagagaacctctgcaaaaactgaaactggctgttagcaatgtcatggcctgaacagctatttaaataccaggggggactgccagggttcgtagtcaagctaagtgtgcccaatttgcagacagatgaagaacgagaaaaaaatggatctgaagaggatgatgatgagaaaccaggaaaacgtgtcataggaccaagaaagaaattccactgggatgacactatcagaactttgttatgtaaccttgttgagatcaaattgggatgctatgagttagaaccaaataaaagccagtctgctgaagattatcttaagtcttttatggagacagaagtgaagcccctgtggcctaagggctggatgcaggcaag

SEQ ID NO: 92163 - DNA, 378 bp, Homo sapiens
ataaggtgaatgcctaggtgattagagccgaagaaggacgtggcaagctgcgaaaagctatgataaggagcaaacatccgttatagtcatagatatccgaatgaggaaactcacttaatagagatattaagtatccattaccgaataaataagtaataggaagggaacccgccgaactgaaacatctaagtaggtggaggaaaagaaagaaacatcgattcccaaagtagcggcgagcgaaatgggaggagcccaaaccatataaggaaacttaaatggggtaaggactatcaacaaagtgacgaggtattgaagaagaagtagtctgggaagctacaccaaagacggtaaaagtccggtatttaaaacaagaagacg

SEQ ID NO: 92164 - DNA, 430 bp, Homo sapiens
attttccttgctgtatctggttctatcataggaatatttcaaatttgatttacccatttgcacgttaagcatttgggtcattttcagttggtgttttcagaggtcatatgccattgtattctcatgcctgtgtcctgagagctccagcgtctctgagagaggtctgtgtgtgcattccacgtgtgtatacagacatatgtatgtctacaggtgtatgcatgtatgtgtgtgtattacatatgtatgtttgtctatagtgtatatggatgtgggttatgtacatgtgtgtgcatggatgtgtacatatgtgtgtgtgtgcaggagtttctcttgggtgcaaagcagccgtgagggtgtggggttgtaagttcacaggatgtggtgtgtccctgtggctcatgtcttcagcagtcactcattagtcactgtg

SEQ ID NO: 92165 - DNA, 394 bp, Homo sapiens
  misc_feature (1)...(394): n = a,t,c or g
cagggtaagtttgtgtgttttttctcttgggttaataacacgcatgcactgatgtggggaaatgcaaagccgtgcgcagccgggttcaggagccacgactggagcacagccctgccgcccctcggggcccggccctgtgccctttcccgcctccttcctgctcctccccactgtcactcctggacctctccctaccctttcctccctgtcctccccctcttcctctcctctcccagcccttttctctcaccattcaatctctctttctctcccccaccctccctcttcgtttttctctctctcccaccctctctctgtctctttgcctgtcttcatgctttgccttgtctttgatggtttggcctgggacatccttccccttgttaatacttan

SEQ ID NO: 92166 - DNA, 394 bp, Homo sapiens
tgcttttaaacatgagttctctgattgggtagtgcttgtgtgagtattgaaaaatctctacaattgaggctttggaaggttatcagttttacaccttcttgtcctattcagatgcctttaatttttgttctgttttattttgttttgccttcttgtaacagttagaatcttcattggattgttgaatagaaatggtgacagtggacgtccttgttttgttcctgatgttagagggaaagctttcagtcttttactgttggtatgatgtttgttcaggctgaggaagttcccttatgttcctggtttactaaggctttttttctttttctttttaaatcattagtggggttgaattaaatttttcaagtgctttttctgtatatattgatataaa

SEQ ID NO: 92167 - DNA, 414 bp, Homo sapiens
agggccggctctgctttcccagcacgctgcctcaccaagaaagaatccagagaaggactggtggacttggaatgttaagtcatggcccatttgatgatgttcagggatgtggctgtagatttctctcaggaggagtgggagtgcctggacctggaacagagggatttatatagagatgtgatgttggagaactacagcaacatggtctcactgggtttttgcatttatcagccagaagcgttctctttattggagaaagggaaagagccctggaagattttgagggatgagacaagaggaccttgcccagacatgcagtcgaggtgtcagaccaagaagttattaccaaaaaatggcatttttgagagagaaatagcccaattggaaataatgagaatttgtaaaaaccacaaa

SEQ ID NO: 92168 - DNA, 408 bp, Homo sapiens
atgatgttgaaaatattttcttgtgcttattttccatcgatataacttctttgatgaagtatctgctcaagtcttttacccattttttacttaaactctgttttccttctgttgagttttgagaggtctttatatactctgaatactagtctttgtcagataagtgatttctcaacattttctccaagtctgtggggtgtatttttattctcttcacagtgtattttgcagagcatgggttttaaattttatgaatccaatttgtcatgttttttagtggatcaggcatttgacatcatatctaagaactttttgtctaacttcagttcatgagaattttcttctggtttcttttttaaagaatatgctttgaattctaacatttacgtgtaaaatccatttttagtt

SEQ ID NO: 92169 - DNA, 416 bp, Homo sapiens
  misc_feature (1)...(416): n = a,t,c or g
tttatcattgtataatgtccttatttgtcttttttaaaccattcttgacataatgcctattttatttaaaataagtatagctactcctgcttggttttggtttccatttgcatagaatctttttctatctcttcgctttcagtctatgcgtccctttagagatgaagtgggttttttgtaggcaggatatagctggaccttattttattttaattcattcagccatattcaaagtgtcactgatagtgacacactgtctgtgtgtcttttcattgaataatttaatccatttgcatttaatgttattattgatagggaaggatttactactgtcattttggttcttggttctgggtggtttggagnttcttttttccctttttcctctcttactggcttcatttggggctaagggg

SEQ ID NO: 92170 - DNA, 403 bp, Homo sapiens
cccacgcgttcgcggacgcgtgggcggtttcgtgggtagcccgccgggaggggtcagagatggcgctgacccccgagtccccgagcagcttccctgggctggccgccaccggcagctctgtgccggagccgcctggcggccccaacgcaaccctgaacagctcctgggacagcccgaccgagcccagctccctggaggacctggaggccacgggcaccattgggactctgctgtcagacatgggcgtggtgggcgtggaggacaacgcctacacgctggaggtcaacagccgctacatgcgtgcggtgggcataatgtagatacacttggcactgtgatgctgacccactgctgtacctgtcaacatccccttatcgtggacacctacggcaccaaggagtgg

SEQ ID NO: 92171 - DNA, 932 bp, Homo sapiens
gatacttctgatgtaaaggaactaattccagagttctactacctaccagagatgtttgtcaacagtaatggatataatcttggagtcagagaagatgaagtagtggtaaatgatgttgatcttcccccttgggcaaaaaaacctgaagactttgtgcggatcaacaggatggccctagaaagtgaatttgtttcttgccaacttcatcagtggatcgaccttatatttggctataagcagcgaggaccagaagcagttcgtgctctgaatgtttttcactacttgacttatgaaggctctgtgaacctggatagtatcactgatcctgtgctcagggaggccatggaggcacagatacagaactttggacagacgccatctcagttgcttattgagccacatcccgcctcggaactctgccatgcacctgtgtttccttccacagagtccgctcatgtttaaagatcagatggcaacagggtgtggataatgggtgctggaagtttcctttcaaatttttccagttaaccctgtgggcaggccaacactctgccccactttgaaccattcccccgcagtggtgacagtgacttgcagccgactctttgcagtgaatagatggcacaacacagtaggcctcagaggagctccaggatactccttggatcaagcccaccatcttcccattgaaatggatccattaataggtatgttaataaaaaagaataaattttcatggatactatccatatattcatatatagttatttttcataagagagttgaacaatattttttctaccacaagagtaaaatgctaataatatcaaattatcatcaaggagctgtgtaaatcataatatgccatctaagaactttttggtattaaagcaatcgtttcttgatatttttggaggtcatttaagttggtt

SEQ ID NO: 92172 - DNA, 399 bp, Homo sapiens
cccacgcgtccgacaaaactcactcaagaagaaataggtgactgcttgccttatacttattagagaattgaacttgtagtggaaaaccctgcaataataattctggtctgagttgcttcactgttgaattctataaaacattaaagactaaatcccatttgatacagtcttccataaaatggtgtcatcttatgaaaccagcattaccctgatattcaatccataagaagactttacaagaaaactgtagactgataacccttatgaacatagatgtaaaatttctaaataaaagtttagcaactcaaatccaacagtatatttaaagaatactgcatcatgactaagtggggtgtatcctagaagtgtgggatttgtttaacatttgaaaaatcaatc

SEQ ID NO: 92173 - DNA, 906 bp, Homo sapiens
atttatccagtgaagtaaaatgcaagcacaacactagaatgaatgtgtagtcttaagcttagcccctaaaaaccaacgaggaagggaggaaattatttagacagcaggataggggagatggaatggtcactagaacctccacaaccagttaaaaatggtcatttccaatttaaatatatctctcaacgatttattgctttgttgttaacgtcaactattacttaagtagctgatgtgggggataggggagatggaacgatcactagaacctctacaaccagttaaaaatggtcatttccaatttaaacatatctcaacaatttattgctttgttgttaatgtcaactattacttaagtagctgatgtggtttttttaaaactttagcatactgtgtttctttctaggacataaacttctttttttattttattttctttttgaggcagggtctcactcgatcacccaggctggagtgcagtggttgaatctcggctcgctgcaacctccgcctcctgggctcaagccatcctcccgtctcgccttcagagtggccgggactggggcacgcaccaccacgcccaactaatttttgtatttttttgtggagaatggggttatgacacgatgcccaggctgctctcagaatgctgggctcaggacatccacccttgttgggcttcccaaaacgctgggattacaggggtcgaccaactggccccggctcctaaaaatacacttgtaacgacaacctttgttccctttttccacttttaagaacaatattacgcccacctttgggctgcatttggcccaatgtgactcagaccttgcctccacccggtcgcgcgtcggcatctcaaacaagggtgcgggccggagactcttatgctactccgtctcttcg

SEQ ID NO: 92174 - DNA, 1774 bp, Homo sapiens
cccacgcgtccgggcctcctagcagccaatgtgaatgcgacaagttcccgatccaggcgtcccgctctccccggccccactcgccaggtcctaccacgatgcctgactcgtttgcggctttgggaccggttgtaggtggcttgaccgtcactagtagacgtttctgagtgtgtcgcggtcaccatggggaggttccctgctcaagctctcttctcttgtctgctgccatgtgagacgtgcctttgaccttctgccatgattgtgaggcctccccagccacgtgaaactatatggctgcaaattgcacatcctcatggagtctaggagaatcctgcaacagacctgggttggagctgccacggtctatggcatcctcagaaactcaacttggaaatcacgacgtggaccctgagatttctcacgtgaacttcaggatgttcagctgcccgaaggagtcggaccccatccaggctctgaggaaactcactgagctgtgccatctgtggctgaggcccgacctccacaccaaagagcagatcctggacatgctggtgatggagcagttcatgatctccatgccccaggagctccaggtcttagtcaaggtgaacggtgtgcagagctgcaaagacctggaggacctgctacgaaataacagaagacccaagaaatggtctgtggtcaattttcttggcaaggaatatcttatgcaggaatcagatgtcgagatggctgaaatccctgccagtgtcagagatgatccgagaggcgtgtccagccagcgggcctcctctgtgaatgagatgcgtccgggggaaggccaggccagccaagagctgcagaccctgcccagggtccctgcactgtccagaaggcaggaagaggacttcctgctgccagagactactgtcatgaaaagtgccccaaaggctctgagacccaagccaaccttggagaaggatctgaacgtagacagggaagaaaacacgggacttacatccccagagcctcagcttccaaacagtcccagggtggtgggagcaaaggaggggaaggaaccccaaaaaagagcctctgtggaaaatgtggatgctgacacaccttctgcctgcgttgtggagagagaagcttcgactcacagcgggagcagaggagacgctctgaatctgagaggtctcaaaagaagcaaaccagacgccacctccatttcccaagaagagcctcaaggagaagccacacctgtgggcaacagagaatccccgggacaagctgagatcaatccagttcattccccaggccctgcgggcccagtcagtcaccccagtggccaagaagtcaaggaactgctgccctttgcatgtgaggtgtgcggcaagaggtttaagtatcgcggcaagttagccgtccacacgagatcacacacaggcgagagactctttcagtgtaatctctgcgggaagcgcttcatgcagcgcataggcctgcaatttcaccagcgaacccacactggcgagaggccctacacgtgtgacatctgccagaagcagttcacccagaagtcctacttgaagtgtcacaagagaagccacacaggggagaagcccttcgaatgtaaagactgcaagaaagttttcacctacaaggcaaatctgaaggagcaccagcgcatccactctggagagaaaccccacaaatgttccaagtgtccaagagccttcggtcggccggcgaccttaagacgccaccagaaaacacatcgagaagccacttcaca

SEQ ID NO: 92175 - DNA, 400 bp, Homo sapiens
ttcaaacattacaatcacactgacataaatgaaaaagtatgacaatacattttgttggtaaggctgtgggcaaataggcaatcatatattgctggcaggaatctaaattcatacaagccttctggagtaaaattcagcaatatttagcataaatatctatacacatacttttcgacccagcatttctttttctaggaggctaccctggaggcacacagagtgtatttctcacaggagtattggttagcagtgttttctacaatatgaaaatgctacacacaaggttacttattgcagcattgtttataatagtacaatactggaaacaatcaaaagaccactacatataagagtgtgtgtgcatttgtacaaaagaaacacaggcatgataaactaaaga

SEQ ID NO: 92176 - DNA, 456 bp, Homo sapiens
tgggcgcgggtttttgatacccctgagaacgctccgaccatgcttacggcaagcttggcccgaggcgcagctggctgggatggctggagtctataataccctcttcctgtttgcagctacctttctggacctaggggggagcattggaactccctagggggaaagagctcgtgcccactccccttgcccactcttgtgtccagcagatttaaaatctccaaggtcattgtggtgggggacctgtcggtggggaaaacttgcctcattaataggtaagggggtgctggagctgaactgggcagggtggggccaagcctagccaggtgggctggttccagatcacagcatttggtaccctctcagggtctgcaaagactcctttgataagaattacaaggcccccattggagcggacttcgagatggaacgatttgaggtgctgggcattccctttcg

SEQ ID NO: 92177 - DNA, 895 bp, Homo sapiens
  misc_feature (1)...(895): n = a,t,c or g
ttttttttttttctgaatgcaatgactgttttttactcttaaggaaaataaacatcttttagaaacagctcgatacacacaatcttcagtgtgaagcaatatactaataagaacactagtcgtcttaacatttacagtcttcatatatattatatatatgtatatgtatacatatatatacactatataacgaggccagatataatacacacgtttaccattttacagtcatatgtacaggaagttgctagggcggccctgggctgggggctgcgtcaggcctatcgaagcgtggacagagctgaggacacggacggacaggcggacggactggcagggactggcccgggccggtggtggctgcgtggacaagtggcgtcgcggtagccacgtgcgggcaaaggcttcctttctcccccgcctagtccacggagctaggagccgccctccgcctcttccagtactgtttcgacccccacccccaagcccagggctcctagctgcacgccacgaccgactggggtggcggcagcacccacgtggaatgtgtgccacgtcgtcttgagattccagagggaaagtgtccccaggacaaagccgtctcccaccctcgccggaggctgagcgccccggggagtctggccgctccgcgggctccccctccgcaagcctggcccctggggtgggcaagaacgccctgtgccgtccggttccgggagcaggcggctccggaacgggttttcctcccaacccggggccgcaagtttgagccctaggcggccggatccacgatccgggacacggatcaaggatcggctccggaccagcgctgggagcagctcccggctcgagtcgggtaattccgagnnnnnnggagggncctagaggtctcaga

SEQ ID NO: 92178 - DNA, 811 bp, Homo sapiens
gctcgactttttttttttttgagaatttaaaatcttatttattgttttgcaaacaataacttagacatttcttaatattttaaaaaccccaacacaaagtaataaatttggcttcttttccccacaaaaatgggaaatacctttcagtaaaggaaattttaaattatttttacacaccagttggttgttggaatttatagctctttaacatatgacatcagcaaaaataattagcattaactgattaatacataaaacaatttacaatcatatggtaagcaggaaacaaaaaccgaccagaaaacaccgttttatagtaattttcaaacagataaattattacagtatactttatccccaacatctctgagcccattaatagagtacttctatacatataaagatataataaaaggatacggtatttattgcaacagcaaattaaaggttgttaaaatatatgtaacttaaatacccccccaacattgatatagtggcttcttattccttaaacatagaaattccactcttcattgtagaaagataaagttctttcatcaaaaggcacattcttatcttcgaggatgattggcatcaaacaacgtgttgtcatcatcctcatcatcctgttctaaaggtgtcaattccatattttctatgttagtgtccaaaactccatatctcctagtctttcggtttcttcttctcatcctgaccgtcctgaccacgaagtacaccagcaccgcgccgctcaccaccatcaacacggtcagggcccgctgggtcatgggcttgtcgccagggttggggc

SEQ ID NO: 92179 - DNA, 468 bp, Homo sapiens
  misc_feature (1)...(468): n = a,t,c or g
cttgatagcgnaccatagtccangtggtggaattcaatggacctaacatacagaacgttttagccaacagcagcagaatacaatttcatctcaagtatacatggaacatattccaggataggtcacatcttaagtcacaaaacaagttttaacaaatttaagaagattgaaataatacctggtatcttcttaggccacagtggaaagaactagaaatcggtaacataaagaaaatagaaaaattcacaaattcataaaaacaatacactcttgaacaactggataaaagaggaaatccagagagaattttaaaatatcttgagacaaaaataaaattctaactttctaaaatttacaggaatcagcaaaagcagttccataagggaaatgtatagcattaaacacctatgtttaaaaagaagaaagatctcggtcaggcgaggtggctcacacacctgttatcccagn

SEQ ID NO: 92180 - DNA, 919 bp, Homo sapiens
  misc_feature (1)...(919): n = a,t,c or g
tttttttttttgctcacaagatgagttataaaagttattaaaaggtaggaacttacagtgctccacaggcacagtggcctggtaatagagtacaggtttaaggatatacaaggagggtctttgatcccatcagccagtggagccgacataatgtataaccttctttagagataatgttgaaagcctaaattggagaccctggccaaacggctcttctggcctctttcccagtgatgacaggctgtcctgctgcttctacacacagtaggtactcaattgtttgagaaggaggcaaggcagccaaagctgagcccggggagtcgtccatggcgccaccccgcccccgccccgcaggcctgcggttctggagacctccgggacctgcccgtgctctctagaatcttcctgaacgccaggtctgagagaacgctgcggctctggaacccgttcgcggtctctcaggttttggacacgacgatctagtggatcttttgcgggacaggaggtaagtctgttcgtcccccactcgggttttcggcttcctaccttcaaccggacagggactgctaacatcctgaaggcccgcccggatcagggcctcagacgcccagggtcccttcggtgcgggaggccgctgggagcccctgtagcagacaagccctctgggacgctaaggagggcccgccccccccgcaggggcctggctatctcctccttacacgccctacaccgccacccgcttctgagtcccccagggttttcgcctccccgccgctggacgccactcagcccgccgctcgaggggcgcccccttgagaaggacgcagtcgcacgcccctacagggttaaagcgccgaagccaagaacgaaatgtcgacgcnnanttncnggccnntgcgacngncgtcaggtttccatt

SEQ ID NO: 92181 - DNA, 3305 bp, Homo sapiens
gggctctcctgggcctgcagcagccagcacagagcttgatcctttcccggagttcagttatgggtgtgagaggtttgcaaggatttgtgggaagtacctgcccacatatatgtacagtagtaaatttcaaagaactggcagagcaccaccgaagcaagtatcctggatgtacccctaccattgtggttgatgccatgtgttgtctcagatattggtatactccagaatcttggatctgcggtggccagtggcgagaatacttttctgctttgcgagattttgttaaaacttttacggcagctgggatcaagttgatattcttctttgatggcatggtggagcaggataagagagatgaatgggtgaaacgaaggctcaagaacaacagggagatatccaggatttttcattacatcaagtcacacaaggagcagccaggcagaaatatgttcttcatcccctcagggctagctgtgtttacacgatttgctctaaagacactgggccaggaaactttgtgttccttgcaggaagcagattatgaggtagcttcctatggcctccagcataactgtcttgggattctgggggaagacactgattacctaatctatgacacttgtccctacttttcaattagcgagctctgcctagagagcctggacaccgtcatgctctgcagagagaagctctgtgagagtctgggcctctgtgtggccgaccttcctcttctggcctgcctccttggcaacgacataatcccagagggcatgtttgaaagctttaggtacaaatgcttatcgtcctacacctctgtaaaagagaactttgacaaaaaaggtaacatcatattagctgtgtcagaccatatatcgaaagttctttacttgtatcaaggtgagaaaaaattagaagagatattacctctgggaccaaacaaagctcttttttataaaggaatggcatcatatcttttaccaggacaaaaatctccatggtttttccaaaaacccaaaggtgtaataactttggacaaacaagtaatatccacgagttcagacgccgaatccagggaagaagttcccatgtgttcagatgctgaatccaggcaagaagttcccatgtgtacaggccctgaatccaggcgagaagttcccgtgtatacatattctgaacccaggcaagaagttcccacgtgttcagaccctgaacccaggcaagaagttcccacgtgtacaggccctgaatccaggcgagaagttcccatgtgttcagaccctgaacccaggcaagaagttcccatgtgtacaggccctgaacccaggcaagaagttcccatgtgtacaggccctgaagccaggcaagaagttcccatgtgtacagactctgaacccaggcaagaagttcccatgtgtacagactctgaacccaggcaagaagttcccatgtatacaggctctgaacccaggcaagaagttcccatgtatacaggccctgaatccaggcaagaagttcccatgtatacaggccctgaatccaggcaagaagttttaatacggacagaccctgaatctaggcaagaaattatgtgtacaggccatgaatccaaacaggaagttcccatatgtacagatcctatatccaagcaagaagactccatgtgtacacacgctgaaatcaatcaaaaattacctgtagcaacagattttgaatttaagctagaagctctcatgtgtacaaaccctgaaattaaacaagaagaccccacaaatgtggggcctgaagtaaagcaacaagtaaccatggtttcagacactgaaatcttaaaggttgctagaacacatcacgtccaagcagaaagctacctggtgtacaacatcatgagcagtggagagattgaatgcagcaacaccctagaagatgagcttgaccaggccttacccagccaggccttcatttaccgtcccattcgacagcgggtctactcactcttactggaggactgtcaagatgtcaccagcacctgcctagctgtcaaggagtggtttgtgtatcctgggaacccactgaggcacccggacctcgtcaggccgctgcagatgaccattccagggggaacgcctagtttgaaaatattatggctgaaccaagagccagaaatacaggttcggcgcttggacacactcctagcctgtttcaatctttcctcctcaagagaagagctgcaggctgtcgaaagcccatttcaagctttgtgctgcctcttgatctacctctttgtccaggtggacacgctttgcctggaggatttgcatgcgtttattgcgcaggccttgtgcctccaaggaaaatccacctcgcagcttgtaaatctacagcctgattacatcaaccccagagccgtgcagctgggctcccttctcgtccgcggcctcaccactctggttttagtcaacagcgcatgtggcttcccctggaagacgagtgatttcatgccctggaatgtatttgacgggaagctttttcatcagaagtacttgcaatctgaaaagggttatgctgtggaggttcttttagaacaaaatagatctcggctcaccaaattccacaacctgaaggcagtcgtctgcaaggcctgcatgaaggagaacagacgcatcactggccgagcccactggggctcacaccacgcagggaggtggggaagacagggctccagctaccacaggacgggctctgggtatagccgttccagtcagggacagccgtggagagaccagggaccaggaagcagacagtatgagcatgaccagtggagaaggtactagtcaacctccagaaagagtatggagagaaaaagaggcacacctggacgcagagccctgccagcgccctcctctgctgttgcagctgcaaggagaccatgcctgtgggagccaggcctcgcttgcatgaagaaggaacgatgcctttttcaatggtgtctccctcccattgtgcagaagagcttttgttggcttctctcccgagcttgtgcctgattctgtggcccaaaacaatcattgttaacatcttcatgtgtttcattctgatctttcattcatatatatgatgcctagctaatttcattttaaaataaatgggaatctgttgtattctgattttttattagcaacactagattatgaggggttatctcctgttattaaaaagtcagaaaacactatacagtagtcctcccttatctgcgggggagacatcccaagaccctcagtggatgcctgagactggatagtatggaatcc

SEQ ID NO: 92182 - DNA, 1714 bp, Homo sapiens
acctggctcgccggaaggacgacgcccagcagcgcagttgggcactatatgaggatgagggtgtcatccgctgctacctagaggagctgctgcatattctgactgatgcagaccctgaagtttgcaagaaaatgtgcaagagaaacgagttcgagtctgtcctggccttggtggcctattaccaaatggaacaccgagcatcactgcggctgctgctcctcaagtgctttggcgccatgtgcagcctggatgcagccatcatctccacgcttgtgtcatccgtgctgcctgtagagctggcgagggacatgcagacagacacgcaggaccaccagaaactctgttactctgccctcatcctggccatggtcttctccatgggagaggcagtgccctatgcacactatgagcacctgggcacgcctttcgcccagttcctactgaacatcgtcgaggatgggctgcccttggacaccacagagcagctgccggacctctgcgtgaacctgcttctggctctcaacctgcacctgccagctgctgaccagaatgtcatcatggctgccctgagcaaacacgccaatgtcaagatcttctccgagaagctgttgttgctcctgaacagaggggatgaccctgtgcgcatcttcaaacatgagccacagccaccacactctgtcctcaagttcctgcaggacgtgtttggcagcccggccacagctgccatcttctaccacacagacatgatggctctcattgacatcactgtgcggcacatcgcagacctgtcaccaggagacaagctgcgcatggagtacctctccctgatgcatgctatagtccgcaccacaccctacctgcagcaccgccaccggctacccgacctgcaggccatactgcgacgcatcctgaatgaggaggagacctcaccccagtgccagatggaccgcatgattgtccgagagatgtgcaaggaattcctggtgctgggggaggctcccagctagcaccttgctgtcctcccttccctgcagctccagtcagtgtgcaggggactcaggggcttggccctaagaatgttttgcactgacagtgggaggggataaggtggcagaaggaacctgagcaggacccccacctgaagtagaacttaagagaggggccaagtgtaggattggggaccatggtctgggagctgttctggggcagggggaatatgcaagctaaagcccctctataccctggtaggcttcctcttcagcatgcccccctcttcaccccacacccatgtgtacactcagagtcctgctgccgctccaggctggaccagacccccatccccacccctcctggtctgtatcctgggcctcagcaagccatgcccctggggtgaggggaggcatctcccaccagctctattctttgccttagctttgcagagagtgctgctcatgtcctcccctccacccgcacatgggggtcgctgcccttcactcctacccccagaggccttggccaagctgctgctttgaaagcgggatcttggagacaggccatccatcctggagcctcatggaacaggatgatggcactgagaaagccaatgaccgaatctcttttctctgtaaaaatgtagactgaaaagccatgtgtattttcctatgtgctgtagctctcctttggaaataaatcacaggcatctggaaaaaaaaaa

SEQ ID NO: 92183 - DNA, 1112 bp, Homo sapiens
aggtcggttctggacctccgagcggccgaatacatgggtggggacggttttgataacaatgtaccactgtttattgcttgggacagttcagcaatgacagggttgctatttctgtgagctggcttagggggaagggatagggggctgcttggcagggaccatatgagtgaggcttggggtagcagtaagtgttagtgctggcaggagcagcaggcagagtcctgggtgctggggaaggggtgacagagagattaacagtctttgcaaggcttgtggcagcagtggtggcagcgggtgctgtggtgatggaggtggagatgatgaaccttgccgtgccgccagaggaagtggcatcctttgcttgcccttcacttgcttcatgagaagaggacaagggtcttttgggaggaagtaaaggtggcttgggtacattctctcgatcagactctgcttcttaattagactgacttccaggtgagcctagtcggttctttaggtcctcttctggaatatcttttctaagacttgctaatcttactggctcttcctctacttggactggactagatgatctggcattccctatgggggtggtatggccattctttaacatggcatcgcttggctttcctggatcctcaccaccttgctcagggtcttccaacagaacccctcttttaaccagcttttctcttggctttcgcatagatattttccgttctaaaacttctgaagtctctttaaatttatcactacttttttttttcctccatttccagggcttgaagatcttgccaaagcctgagaacttgctcttccttttggtaggaggtgttgtgtctcctgcttccacactgtccaggaccatgcctggctctgtagtgggctggtctgcttcctctactgttccaaggttctctggagaagtcaaatggatcttccatgccactattaaccagtttagggaggtgagatactgtttccagatctccgccgccgcctcctcagcctccacagcagcctctcccggaaatcctacctggcccgttggccgccaggcagcagccggagcccttggcccccggggagggggaaaaagggagccggctgga

SEQ ID NO: 92184 - DNA, 1558 bp, Homo sapiens
atctaaaggaccttcataaagcatgtgggtgctatataaaaggatatgtctaggcccaagtaaatataagtacaacaaagcagctgttgatcaggtatggcttagtaatacttcccttcggaagtaccttgcattttaccagcattttatttcttttaggttgttggtatggagcaaaagacgagacaccttctaagcagaccctttctatacaacaggagtccccactcaggacacattggacaggtgtatgtaccaagaaggtccacctctggggaatgtgtggccctctcctgggagatatcttacaccagggaacacaacacaatcagaaattgaatgggtttggggcatatgaaaaaaaattggatgacgatgcaaaccatcatcaagaccagaagcagcacattggagagaaatcgtacagaagcaatgccaagggaacatcttttgtaaagaactgtaaattccatatgtcacatgagccatttatctttcatgaggttgggaaagactttttgtccagctctgagattactccaacaagaggacattcacaattaagggaagtcaaactttgaaactaagcatgggataccccttcagggtggaaaaactcattacatctgtggagagtccacaataccgtttagcaacaaacactcacttgtccttcaccagagacttctccctagagaaggaccttatgtatgcagtgattctgggaaattcactagcaaaagtaatagttttaataatcatcagggagttcgcactggaaaaagaccttatcagtgtggacaatgtgatgaatcattttggtataaggcccacctcactgaacaccagagagttcacactggagaaagaccttatgagtgtggagaatgtgataaatcttttagtcataagcacagtcttgttgaccatcagcgagttcacactggagaaagaccttatgaatgtgacgaatgtgggaaatcttttagccataagcgcagccttgttcaccaccagcgagttcacactggagaaagaccttatcagtgtggagaatgtgggaaatcgtttaatcacaagtgcaacctcattcagcatcagcgagttcacactggagaaagaccttttgagtgtacggcatgtgggaagttatttaggagcaactcccacctaaaggaacaccagagagttcacactggagaaagaccctatgagtgtaaagaatgtaggaaatcatttaggtacaagtcacacctcactgaacaccagagagttcacactggagaaaggccatatgagtgtagagaatgtgggaaatgttttcatcaaaagggcagtctcattcaacatcagcagatccactctggagaaaggccacatgagtgtggagaatgtgggaaatgttttcatcaaaagggcagtctcattcgacatcagcagattcactctggagaaaggccacatgagtgtggagaatgtggaaagtgttttcgtcaaaagggaaacctcattaaacatcaacgagttcacacgggagaaagacatcatgaatgttgaa

SEQ ID NO: 92185 - DNA, 454 bp, Homo sapiens
  misc_feature (1)...(454): n = a,t,c or g
ntttgaaaactgatggacagtcgtgaccaccagcacgccaagcttggcacgagggactttggggaagggtcctgagggtatgaaagaagtaaaagggtctgtggttaaatgggctgggggcagagtggggtggagaaatgggggggcgccgagctcccctaaaacgccgccttctcagcagaccctcaagaatcgtcccatcaagacgccagagctgcttcagcggcgaccaccttctccctctaacacattcttcccttcttcacaaacggcccatgtcaaactaaggctcaagggggagccgcctgcccctggcgctgcccccggcctcccagggttgctcttcaaggggcggcggcggcaagcggcggcggctcctccgctgggggctcgggcaatttccggcccccacgcttccttcaaggcttgctgcagatggccatcaccgctggct

SEQ ID NO: 92186 - DNA, 933 bp, Homo sapiens
  misc_feature (1)...(933): n = a,t,c or g
ggcacgagctgtttccttcggctttcctcctcctgctccaccatgtggagccgacggcagggccgcctcaggcccacggtctgcggggtggaggagctacggcgccgccggcgggagcgggagcactgcggaaggcgcggagggagcagcagctggtcagcaagaggctgctgagaaacgacgccccagaggaagctggagagggatgtgtggctgcgatcctcggggaaaccgaggtgagggggcaaggtgcagcagttcctgcggcaagcccagcgggggacagaggaaaaggagagagagggggctctggtcagccttcgtcgaggcttgcagcaccctgaaacacagcaaaccttcatccggtcagtgtggatggctggagggcagcatgcggaccctggtcgggctcctgaccagcaaccaggccctgctgcagcttgaggcggctcggtgcctgcatgagctctctcactccgagcagtccactgttgctgaggcctgcctgccagccacttcttacctcctcacctacctctccagtcacagctcagacttcatagtaagccctgtcccttcctatcttgttcttggtttagattttaaaattgtgcttttgggaccagtttgagctggcaggtaggaggaagaaaacatgtttgcccttatgcctacagccatggctacacccatcatctccccaccctcttgtggagccgcaaggatagctgctccagcgtccccatcacctcccctccncatactccccacacggcagcctgggcatgaaacaggccaagcccagtgcttttnttggcctgttntcaggngctgtgtctgtattacactgggtaacctgnttcgtggagagtgaggctgtgagaaggcagtttctgccacaggggcattgtttncagccttggctgcctgcat

SEQ ID NO: 92187 - DNA, 1402 bp, Homo sapiens
  misc_feature (1)...(1402): n = a,t,c or g
cccacgcgtccggccacgcgtccgggcgctcctcctcttcgctgccggtgggcaccgccgctcgctcgcacttctgcgcccattggagcttcggagatccctgcggtcccgcgggacggcgcggcagcagctgacctcgcagacaggatcttgctctcttgcccagactggaatacagtggtgtgaacacggctcactgcagcctcaacctcctggactcagagatgtcggcttatttataggaattgcttgaagccagagtcatggtggatgtcggaaagtggcccatcttcactctactctcccctcaagagatcgcgtctattcggaaggcgtgtgtcttcggcacctcagccagtgaagcactgtacgttactgacaatgatgaggtctttgtatttggactgaactatagtaactgtctaggaactggagataaccagagtacacttgtacccaaaaagctagaaggcttatgtggaaagaagattaaaagcctcagttacgggagtggaccacatgttcttctcagcaccgaagatggagtggtttatgcctggggccacaatggatatagccagcttgggaatgggacgaccaaccaaggcattgctcccgtccaggtctgtaccaatctcttgatcaagcaagtggtggaagtagcttgtggctcacatcattcaatggctctggcagctgatggagaggtgtttgcttggggttataacaactgtggccaagtgggatcaggttctacagcaaatcaaccaactcctcgaaaagttacaaactgtttacatattaagagggtagttggcattgcctgtggtcagacttcatccatggctgttctggacaatggcgaggtatatggctggggttacaatggcaacggtcagcctgggcttgggaaacaatggcaaccagctgaccccctgtgagagtggcagctttgcacagcgtgtgtgtgaaccagattgtcctgccggttacncaccatactctagcactaacagatgaaggcttgctgtatgcccttgggagcttacacatatggggcagcttgggaactggcaataaaaataaccttgcttaagcccaagcacacatcatggtggagaaaagaaagggtggtagaagattgcagccctgtcactcttgcccacacgtctgcagccaagacgcagggtgggcacgtgtacatgtggggccagtgccgggggtcagtccgtgatcctcccgcacctcacccacttctcctgcaccgacgacgtgtttgcctgctttgccactccggccgtctcgtggcgnctcctgtctgtgggtaagaaagtgcagggccacttcacccagggaggaatggtactaccaactgaccagttttcctgtgtctttgctggtt

SEQ ID NO: 92188 - DNA, 413 bp, Homo sapiens
cctggatcctgacgctgggcagctggaggagccagtggcaggcggcctgggtgaccgccctgaacgaggaggccgagaggaaagggggcccacctttcctgtcctttgaggaggacccgcggcagcaggcactggagctggtggtgcaggaggtctccagcgtgctcaggtcggcggaggagaaggtggtggtctgtcacgtggggggccaggctattcagttcttggtcagcgagacgcctgccttgggtgctggatgccggctgtacgacatgcggctctcccctttccatttacagctggagttccacatgaaggagaagagagaggacctccagattagctggtctttcatcagtgtgccggaaatggccgttaatatccagaccaaagcactgggggaggaccaggtg

SEQ ID NO: 92189 - DNA, 2299 bp, Homo sapiens
agacagagaggaagaaaatcacaggagtggacaaggcctttcttgtgcctccttgtgttccatgctcccttggagcacaagaagagatctttggacagggcagtgaaacttacaaaacagattctctgttttctgccaggctgtgcggatatagccatgaacaagacaggtcaccagcaggtaacatgggtaggaagtgtccaggagggtgtgatcgggtgggtcccgtgagaggatgacattcgagtaaaggaagttagggaaggagggagccacgttggtatctggctcaagaacatttctttccatagcatggatagtcctcctagtgggcgcggttttggccgttgtgtagcgctcccattggcctctttttctggggtcttccaaggttaatggtatttgcacaagcatgggaatgtacgcgttcttggttgggttggcgacttcttgggaggcacgtgggtaaaggtgtgtcttgggaagccttgtggattcccgggccatgatgttgcaccgtggcacccaagaagtcccatgggtttcacgggtgttgtgcaggtcccaaggacgcttggatggtccaagggggtgcaggtgctggagcagcgctgagctctggccgaaggccttggagcagtgcgggcaggcgtagggccgctcgcccgtgtggatgcgcaggtggtgttgcaagttggagctctgcccgaaggctttgccgcagtgggggcagcggtaggggcgctcggccgtgtgtgtgcgctggtgctgcagcagcgccgagctctgcccgaaggccttgccgcactgcggacacgggtagggccgctcgcccgtgtgcgtgcgcaggtgtttgagcagcgcagagccctggccgaagcccttggcgcacaccgggcacttgtggggccgcgggccgccgtgcgtgcgcaggtgctgtgccaggagcgagccgtgcccgaaggccttgccacacaccgggcagtggtgcggcttctccccgctgtggctgctgcgatgtttcagcagcgtggagcgccagccgaaggccttgccgcaggccgcgcactggtacggccgcgccccagtgtggatgccacggtgctgagccagggtggcaccgtggctgaaggacttcccgcagtcggggcagcggtacggcttctcgccgctgtgcgtgcggcgatgctggctcagcccggagctgtcggcggaaggcttcgcccgcaatccgggcaggagaagggccggggcgggctggcgggggcggggagcaccgcggggctggtggccaagacctggggggtggcagtgaggccagaggagatggggtccacttttggatcgccggggctgagggtgtcgctgttaggatcgagaatcaggggtacggggccaatcacatctggatcgaggtcgaaactcgaagacatggggtcgggatcttggggttccgagcccggagcttcggcgtcggggtccagatcctccgagacgggctccagatcttcatagctggggtccacgtcttccgggacagtgttgaggtcttcaggatcaggctctgggtcttcagaaaccgggtccaaatcttcaggattggggtctaggtcctcggagtcttagtcgagctcttcataaacgggtctcacgcctttgtggcctgggttcctgaccaggactgagcgccagcatttcaggcgtggatgtgcccgcagcttctggggcaagacctcaatctgcttatcctggaagacccgatggatgctgcggttaaaggcagacccagtgaacatggaggtgactgggtacgtgaggtccaacacaggttccagcaccgaagtcatgctcccgttcgtgaacaacaatgtgtcaagtcgttcccaccgggaagtatcaggggtccaacctagccatttgttccttggtataagccaggtaatgtccacgggggaatgcaaaggaccataggcccccgggtacaagtgggcaagcaggtccaagccggggtttgctataggtcgggggttgttcggggggacattgggcatgtaaacataatggcagggcaatgcaatgaagcaaggatgtggtgacctggaatgacgtggcaacacaatgatggccagggtggtggaatataaccaggcaacaatgattggcagtgacaggggaggaataatgacacagctatgcacgggcagccaattgcggccaatgtccatgtctggcagcaaacttagttcggtgaaggggcagatgcaggtagcagggcctgcttcgctgattgacagccatg

SEQ ID NO: 92190 - DNA, 418 bp, Homo sapiens
atgaaatgaaatgatgagatgagatgatttatgatgagatgaaatgacataatgaaatgaaatgatgaaatggaataatgaggtggaaatgatgagatgagatgcaatgagttgaaatgagatgaaatgatgaaatgatgaattgagatgagatgagatgaaataatgaaattaggtgaaataatgaaatgagatgaaataatgaaatgaaattgaaatgagatgagaagaaatgagatgaaatgttgaaaggaggaaatgatgagatgaggagatgaaatgatgagatgaaatgaattgagatgaaatgatgagatgaaaaatgatatgaaaaatgatataaaaaatatgagatgaaatgaaatgagatgatatgaaatgacttaatgaaataaatgaaattagatgaaatgaaatg

SEQ ID NO: 92191 - DNA, 399 bp, Homo sapiens
cgggcctgccatgaacctggcccagctgttgcctccgctcccgcccactgtgagcccctccctgatttgaagccagctcttccttttgcttccttgttatctttccacccaagccccagctgctgcccctaagcctctttcactggatatccccaggactgggcacccttggcacgccctgacaatcctgcctgggctgagaaagtccccgcgtcctgcttctccctaggcctctgcttcctgctggtccatcttctccctctccatccccctggccctctctggcccccagacttgcagctgtccaacactgaggcccatgctcaggtctctggtccctgcttgcccctgagtgccagcctcacacagcaccttcagaggccctcggcccccccacac

SEQ ID NO: 92192 - DNA, 404 bp, Homo sapiens
tccagagagaaactcctgccacgtgtgtgaggctgactgaaccccgcaccccgcatgctctcctggctaagcggattcagggctggccaacaaacccagacaggtacggccagagcactgctcccaggaatttggagttgatacctggggaccacaacacgcacatctgggaactggagctgaaaaacagatcaagtcagggctggagagagacagagagagaataagagtgagtggggggagggaggcagagacagagaaggagagacagacgggggcgtgggggacagaggcagagggagaggaagacagagagggacagggagagagatagagacactcagagagatagggaagcgggagagagagggacaaagggagaggatgacagagagagggagaag

SEQ ID NO: 92193 - DNA, 389 bp, Homo sapiens
gcgccggggcattgcaggtggtgagaacaggttgggtaggggcccaccctcacgtgtgcaggaagtcggggtggttggggatggctgcagccaggcatgtgacaggtgggtggagtcacaagctggaaaggccagctggggctagctagggtaggggtgggcactggaggaggccttgaatgtcagcctgggagagttggattccacagggccccatcggagcgggggtgggcagggcaggatgaggtgagtggggaggacacacctcagagggtggggctgtggagtctgcgcagccctgagcacacagttatgcaaatatgccagctttgaggctctggggctctttattggtatgaagaagccaggactggggcaacagaggagtt

SEQ ID NO: 92194 - DNA, 421 bp, Homo sapiens
ggaggcaggaggtcatcacggtgaggacgggagtgaggactttatcacggtgaggacgggagtgaggacgggatcacggtgaggacgggagtgaggacgggatcacggtgaggacgggagtgaggacgggatcacggtgaggacgggagtcaggacgggatcacggtgaggacgggagtcaggacgggatcacggtgaggacgggagtcaggacgggatcacggtgatgactggggtccactgaaggggacttcttctttgatgtctgaattctcaagagaatgtcagagcccagtttaagtgctagagagcaactactagaaggacattctgacttcgatggcccgtcccagtgttaagatgccgaacacattttcagctatgtgcaaaaccgaatcaagagcgtttgtggagatgtgaa

SEQ ID NO: 92195 - DNA, 732 bp, Homo sapiens
ccggcggccgagggagcgccggtgcctttgctcagagggacctgttgagtcaacagctgcggggtgggcaagaactgggtggccacggcgtgcaagtggttgatcagctggacacaccgcggctccctgggtgtccagctctcaaaccgggagaggtattgcaagacttctttggcgcatgtttgaaatcccgagtggaacgcatccaagtcggactgaatgggcgatttcagagatcgctccccattctgtaaagcaattatcttctgatgctgttgctcggttaaggcggttaaagcttttaagtgtttcaaagttaattccaagactacagctttctccagatgtcccagagttgtcaatttcagatgttcaggcagtaaatctttcagctgagcaatgcattcattaattcggtctcttcttttcttttctattaatctgtgcggtaatttgtaggtatcccttggtgtcgtctcgtttcatgctccttttgggtttacacatatacaaagaggaatagtccagtctgcaaaacagaaatcagcatcaggcacccattcggggaggggctctgccctcgccagctccataccactttctggagaagaaaaaaatcaaaccaaagcctagacagatattcgcaagggtgcgtgcaccttaccctataaaatctctatgttccagtaactgtctctcttgcaaatgaggaattccttcgtccatgttcaa

SEQ ID NO: 92196 - DNA, 398 bp, Homo sapiens
ccttaccatcaccaccaccaatgacaatgacatcccagtcccgacctcaccatcaccaccaccaatgacaacatcacagccctgacctcaccatcaccaccaccaacgacaacgacatcacagctccgacctcaccatcaccaccaccaatgaggatgctacagccccgacctcaccatcaccaccaccaatgacaacgacatcacagccccgacctcaccatcaccaccaccaatgacaacgacatcacagccccgacctcaccatcaccaccaccaatgacaacatcacagccctgacctcatcatcaccaccaccaatgacaatgacatcacagccccgacctcaccatcaccaccaccaatgacgatgctacagccccaacctcaccatcaccg

SEQ ID NO: 92197 - DNA, 398 bp, Homo sapiens
  misc_feature (1)...(398): n = a,t,c or g
tcgaagagaaaataatcaaaccttactattacagaaaaccactaaaccgtaatgataaataatgagaggaagaaaggaagaaaagatatacaaaacaaccagaaaacaattaacaaaatgacagaagtaagtcctacctataaatgataatcttaaatgtaaatggattaaattccctcacttaaagtatataaactggctgaatagattttttaaatgacccaactatatactgcctacaagaagctcacatcatctataaggacacatatagagtgaaagtaaagggatgaaaaacatactccacgtaaacagaaaccaaattgagcaggagtgctatacttacatcagacaaagcaggctttaagtcaaaaactctganaagaagcccagtgtgg

SEQ ID NO: 92198 - DNA, 2009 bp, Homo sapiens
atcagcggctgctttggattctcataggagcgcgaaccctactgtgaactgcgcatgcctgtcccctcagttcccaggtgccatgaggaagcctcgtcggaagtcccggcagaatgccgagggccggcgttccccgtccccctacagtctcaagtgctcacccacccgggagaccctgacatatgcccaggcccagcggattgtcgaggtagacattgatggacgcctgcatcgtatcagcatctatgacccactcaaaatcattactgaagatgagctaactgcccaggatatcaccgaatgcaatagtaacaaggaaaacagtgaacagcctcagttccctggcaagtccaagaaaccctcatccaagggcaaaaagaaggaatcctgctccaagcatgcatctggtacttccttccacctcccacagcccagcttccgtatggtggactcaggcatccagccagaagcacccccgctgcctgctgcctactaccgctacattgagaagccacctgaagacctggatgcagaggtagagtatgacatggatgaggaggaccttgcctggctggacatggtgaatgaaaaacggcgagtagatgggcacggtttggtgtctgcagatacctttgagctgctggtagaccggcttgagaaagagtcatacttggagagtcgcagcagtggggcccaacagtcactcatcgatgaagacgctttctgctgtgtgtgcctggatgatgaatgtcacaatagcaatgttattctcttctgtgacatctgcaacctggctgtacaccaggagtgctatggcgtcccatacatccctgagggccagtggctatgccgctgctgcctgcagtctccctcccggcctgtggattgcatcctttgccccaataagggtggcgccttcaaacagaccagtgatgggcactgggcccatgtggtgtgtgccatctggatccctgaagtctgctttgctaacaccgtgttcttggaacctattgagggcattgacaatatcccgcctgcccgctggaaactaacctgctatatctgcaagcagaaagggctaggtgcagccatccagtgccataaggtgaactgctacacagcattccatgtgacatgtgcacagcgggctgggctcttcatgaagattgagcccatgcgcgaaaccagcctcaatggcaccatctttacagtgcgcaagactgcctactgtgaggcccactcgccaccaggtgcggccactgctaggaggaagggcgactcccctagaagcatcagtgagactggcgatgaggaagggctgaaggagggtgatggagaggaggaagaagaggaagaggtggaggaagaagagcaggaagctcaaggcggggtgagtggctccctcaagggagtgcccaagaaaagcaagatgagtttgaagcagaagatcaagaaggagccagaggaagcaggccaagacacaccctccactctccccatgcttgctgtcccacagataccctcttacaggttgaacaagatctgtagtggtctctcctttcagaggaaaaaccagtttatgcagcggcttcacaattaattggctgttgaagcggcgggcacggaatggtgtccctcttatccggcgcttgcactcccatctgcagtcccaaagaaacgatgagcagagagagcaggatgagaagactcgtgcagtgaaggaggagctgaagtattggcagaagctccggcatgacttggagcgggcgcggctgctgattgagctgattcggaagagagagaagctccmaacgagagcaggtccaagtcccagcaggctgcctattggagcttgggagcctgatgcccattcccatgttctgttgaggacaacactggacctgctgcaggagaaggatcctgcacacatcttcgcagaaccagtcaacttgagtgaggcaagttccccctactttccaagtagtaaattcttcttgaactggaacagg

SEQ ID NO: 92199 - DNA, 757 bp, Homo sapiens
tacactgcactcttgttgcacacagacctcccctgcagtgcatccctttgggtcgccccgggagagccagggctgcgggcagttcccacaccaactcagaccgcatctgtccactgcctagcggggcacctctctgccaatcccgaagggctgctctcgcgtcctcacgggaaaggtagtttccaggttgggcgccaacagcgccaggctttgagcgtgggctctgcgcatgcctcatccactggctacctctgcgtttgtgcgtttccgcctttccttttgtttgtctcacgttttgcgtgggaggcggtcccgggatttcaggggtctaccggctctcttatggcgaatgcaacccgaagagagagtgagctgtatcttcagagttgtctccgtctttccaagaacagaacaaaatgaacaagggtattgtgctcacaaaccagaggtgatcttcaggctggaacaaggagaagaaccatggagactggaggaagaattcccaagccagagctttccagaagtctggacagctgatcacctgaaagagaggagccaagaaaatcaatctaaacatttgtgggaagttgtattcatcaataatgaaatgctgactaaggaacaaggcccctgaggtgttcatgcactgatcctggaccttggattaaacccttgcagtgctggaagaagaggactctgcactgcctgccacaccaggactggaagatcaatggccttcccttcttccaaactacct

SEQ ID NO: 92200 - DNA, 860 bp, Homo sapiens
tacggccagtgaatcgcgcggccatttaggtgacgctatctgtgacagcgggcgagagcttcgcccctcccccctgcgtgactagacctagcctaagctcgagaagcctgtcgagcgaaaacagatttcccgggtcgacgatttcgtctgtggccgagttgctgttgccgggtgatagttggagcggagacttagcataatggcagaacctgtttctccactgaagcactttgtgctggctaagaaggcgattactgcaatctttgaccagttactggagtttgttactgaaggatcacattttgttgaagcaacatataagaatccggaacttgatcgaatagccactgaagatgatctggtagaaatgcaaggatataaagacaagctttccatcattggtgaggtgctatctcggagacacatgaaggtggcattttttggcaggacaagcagtgggaagagctctgttatcaatgcaatgttgtgggataaagttctccctagtgggattggccatataaccaattgcttcctaagcgttgaaggaactgatggagataaagcctatcttatgacagaaggatcagatgaaaaaaagagtgtgaagacagttaatcaactggcccatgcccttcacatggacaaagatttgaaagctggctgtcttgtacgtgtgttttggccaaaagcaaaatgtgccctcttgagagatgacctggtgttagtagacggtccaggcacagatgtcactacagagctggatagctggattgataagttttgcacgaaatcgtcgacccgggaaatcacgaattctggatcagatacgtaacgcgtgtgcacgcactgcgtggttc

SEQ ID NO: 92201 - DNA, 537 bp, Homo sapiens
ctggtcttgaattcccgggtcgaggatttcgtcccaccggagggggcagggcgcactctccctttcgccctgaggccgctggcggcctgttggcttctccacaggcgcgctcgccgttcaagcgcgctttgtccccgccccagatcctggggggtgagcggtggagaaggggcgggcgcccgcgagccgtgaatcacctcctcctcttgctgcctcagcgccgccgccacctttccattcagtcgcccaacatggctggagcgcggcggagaataagaccacagcttgccaaagagaagattgaaggatgccatatttgtacatctgtcacaccaggagagcctcaggtctttctagggaaagataaggcttttacttttgactatgtatttgacattgactcccagcaagagcagatctacattcaatgtatagaaaaactaattgaaggttgctttgaaggatacaatgctacagtttttgcttatggacaaacctggagctggtaaaacatacacaatgggaacaggatttgat

SEQ ID NO: 92202 - DNA, 1712 bp, Homo sapiens
cataatcttgagagaagcgaaaaaacttaacagaaatatgtgtttattacattaactaaaatgaacaaaacggtttatcaggcacgggggctaacttgcaatccgccttctttgggaggcgaaggggggaggattacttttaccccggagcccaccaccaacctgggtttgttagtgaaaccccatctttataaaaaaaacaaaaattacctggatgggggggcccatgcctataatcccacctacttggaaggctgaggggggagcatcacttgaaaccaggaggggggggttgcagggaaccaaaattgccccactggactccatcctgggcaacaaagggcggggagaaagacggttacaaccccactggcaatggcttacataatgggtttctcacagcatcctcccttgacagttacagtaaagatggagcaaagtccttgaaaggagatgtgcctgcctctgaggtgacactgaaagactcgacattcagccagtttagcccgatctccagtgctgaagagtttgatgacgacgagaagattgaggtggatgacccccctgacaaggaggacatgcgatcaagcttcaggtcgaatgtgttgacggggtcggctccccagcaggactacgataagctgaaggcactcggaggggaaaactccagcaaaactggactctctacgtcaggcaatgtggagaaaaacaaagctgttaagagagaaacagaagccagttctataaacctgagtgtttatgaaccttttaaagtcagaaaagcagaggataaattgaaggaaagctctgacaaggtgctggaaaacagagtcctagatgggaagctgagctccgagaagaatgacaccagcctccccagcgttgcgccatcaaagacaaagtcgtcctccaagctctcgtcctgcatcgctgccatcgcggctctcagcgctaaaaaggcggcttcagactcctgcaaagaaccagtggccaattcgagggaatcctccccgttaccaaaagaagtaaatgacagtccgagagccgctgacaagtctcctgaatcccagaatctcatcgacgggaccaaaaaaccatccctgaagcaaccggatagtcccagaagcatctcaagtgagaacagcagcaaaggatccccgtcctctcccgcagggtccacaccagcaatccccaaagtccgcataaaaaccattaagacatcttctggggaaatcaagagaacagtgaccagggtattgccagaagtggatcttgactctggaaagaaaccttccgagcagacagcgtccgtgatggcctctgtgacatcccttctgtcgtctccagcatcagccgctgccctttcctctccccccagggtgcctctccagtctgcagtggtgaccaatgcagttttccctgcagagcccacccctaaacaggtcacaatcaagcctgtggctactgctttcctcccagtgtctgctgtgaagacagcaggatcccaagtcattaatttgaagcttgctaacaacaccacggtgaaagccacggtcatacctgctgcctctgtccagagtgccagcggcatcatcattaaagctgccaatgctatacaggagcaagctgtcatgatgccagcatccagcctggccaatgccaaacttgtgccaaagactgtgcaccttgccaaccttaaccttctggcttag

SEQ ID NO: 92203 - DNA, 422 bp, Homo sapiens
tttcgtgcagggcccgcgagtccggggtcgccgcagcccgggaggagtgtctggtctccggcctgcctgtgctgtccccgcgccctgtccagtggactcccgagacccttggaacccaggacaccattggagaaactgggcattttaccaaggatttgactggaatggcatgcttcctttaaagatgaaagttgacttttagagccaattaaagccctttggggaatctggcctcataccttgtccacacagagttcctgtacaaggttcctgacctgtggcttcgccaaagggatctgtgacccagggtaactgtgctttaggaaaaggaagtaatcagaggtttcatggactgctagacaccggctctgtgctgacattgattccaggaggcccgaaatgttactgtggccctctagtcc

SEQ ID NO: 92204 - DNA, 403 bp, Homo sapiens
tcgcccacgcgtccgctcaattataaaagtcctttgtatgttagatacacccttttattgtaacatatatcgtaaatattttctcccaatttgtactttgcttatggtagattttcatttgtttctcatgcaaaagttttaattttatagataaatttattaacctttcattataggaattcacctatattttcctctagtacttatatattggttttcttttttattggtacatctctgatccatttggaatttattcttgtatttggtgtgagaaatagatctaatttgtgtttttccagtggccatccattgttccactatcatttattaatgtcttcatctttgccctagtaatttgagatactgcttttatcatatcccagatttatgtgtatagtcg

SEQ ID NO: 92205 - DNA, 690 bp, Homo sapiens
ggaggcaggaggaagaggaagaggaggaagaaaaatctgaggttatcaatgacgagcaagccctcgcagggagcctggtagcaggggccggaagcacagtagagacggacctgtttaagaggcagcaggcgatgccctccacaggtatggcagagcagtctaagaggcctcgccttgaagtgggtcaccaaggggtagttttccagcacccaggggcggacgcaggcgttcctctccagcaactaatgccgaccgcacaaggaggaatgccccccacgccgcaggccgcgcagctcgctggacagaggcagagtcagcagcagtatgacccctccacggggcctcccgtgcagaacgctgccagcttgcacaccccactgccgcagctgcccgggaggctgcccccagccggtgttcccactgcagccctctcctctgcgctgcagtttgcacagcagccgcaagtggtagaggcccagacacagctccaaatcccggtgaagactcagcagcccaatgttcccatccctgcaccgcccagcagccaactccccatccctccctcgcaggctggacagctggccctccacgttcccacacctggaaaggtgcaggtgcaggcctctcagctttcctccctggcccagatggtagcatggaaaaggcttcctggggaccctgccccggcgc

SEQ ID NO: 92206 - DNA, 409 bp, Homo sapiens
cggacgcgtgggttatggattactttagttaattatttttgaagtttcaatctgggattcacatttaacaatctttttttttttttttaaaaacgggttttttggtgcttaaggcggaaggccggggcccattggaacctaatggagccttgacccccagggcaagggggacccccccctttcacttccggggggggggggaaaaccggggggcccccccccccccggccaataagggaaaaaataattttaaaattgggaaaaaaaagggtttaatggggtgccccgggcgggtcaaaaccccaagggttaaggggaccccccgcccttaaccccccaaggggtggagaatacgggcagaaccccccttcccaaccaagtatatttttgggaaatccttgggggggat

SEQ ID NO: 92207 - DNA, 683 bp, Homo sapiens
actgggtccaccgttgtggacatgaagagtcctcgggcgagcggggtccaacagcagaaattggggtgttatgtgttgaccctcagggtggaggtggccccacttggacctccagcagctggagacccagggcaacaggggcttgttcatcactgccccggtgagctaacctccggtttgtgaggatggtgccgtcggcctggtgtggcattgtggccccggcatgacctcgtggccccgtcttggcatgtggctgcttcaggaagggtggagggggcggtggctgtgggagatgaggacaggcagagacgggccccacctgggactgctgtggtctggaacgggcgtctaaactgcctgcagtctgcagcctctgcgtgtctttatggaaccgagaaccaactttgatttgtataaaagctgtacccagtgcggcctacgcatgtccgtcacggtctcacagcggtgagccgctgcctgtctgattcagccttagcccggctcttcctcctccttctgcacaacccgcccgtcttcgacagcctgcgctgcacgggggcatcgtgccgggcttgctctgcgttccttgtggatttcctgcttctcagatcacagtcatccatttctacactcttgaaactctcaaacctttgaataataaaaacacaccaagtctttaagct

SEQ ID NO: 92208 - DNA, 285 bp, Homo sapiens
ttttttttttttaatgtgtgcaaaagcccaaaggttcctaagcctggctgcaaagaagaatcaacagggacactttttaaaaacactcttatcagcctggggcaacacagtgagactccatctcttaaaaaaaaaattagctgggtatagtggtatgtgcctgtagtcccaggtactcaggaggctgaggcaggaggattgcctgagcccaggaggtggaaactgcagagagtcatgatcatgtccttacactccagcctggataacagagcgagaccctgtctc

SEQ ID NO: 92209 - DNA, 378 bp, Homo sapiens
attatagctaatatatgaatttgacaaagttgaaggatacaatattaacacaaaattagttatatttctatacacactacaaaaggaaaatcaagaaaacgattcaatttacaatagcaccaaacacaataaaataactagaaatgaatttaacaaagggaggggaagacttgaacattgaaaactatgtaacaccgctgaaagaaattaaataaaatttaagaaaataaaaagacattccatgttcattgattagaagacttgatattgttaaaatgacagtaatctccaaatagatctacagatttaatgccatgcttatcaaaatcccaatgtgatgtttttacagaaatggaaaagctaatcctaaaatttgtg

SEQ ID NO: 92210 - DNA, 394 bp, Homo sapiens
  misc_feature (1)...(394): n = a,t,c or g
gggtcgacccacgcgtccgtggtnnnnnnaacctgcaaacctgataaacttgtttattcattctagtagggcttttttgtgggttccttaggattttttaagatacaggatcatgtcatctgtgaataaggatgctttacttcttcctttagaatctgaatgctattaattaatttgccttattgtgctagctatagcttccagtacaatgttgaatagcagtgtgagactgaatattctttccttgttcctgatcttagggggataatattcagtccttcaccagtaattatcatgttagctggtaggttttcataggtgtccttataagggtgagaatgcctcctctattcctaagttatttgagagttttattaaggaaatagtgttgatt

SEQ ID NO: 92211 - DNA, 854 bp, Homo sapiens
ttttactttctggtacctttaatttgtggatgtgtctgcattttgctggcaaccaccctttacctcatctctgcaaagcagggaggaaaaaaaaattagtattgccattttgcagatgggagggcatgaattaatatgttgtatgatcacatgataaacagacctagaggttataatagtcccagttactgccccatttgtaaattgatccccatttttgccctaaggataactcataattttttcctgaacctgatttcattgatccctctattttaaaaatagggaaaaaacaatcgttttagctatatattaaaagagtaagaagcttgtacctattatgagaaagtcctacttactgttaatgaaaaaagtggtttgaaagattatactcgccgctggctcacgcctgtaatcccagcactttgggagtccaaggcaggcggatcgcgaggtcaggagatcgagaccatcctaacacactgaaaccccgtctctactaaaaataccaaaaaaaatttacccggtcgtgctggcggccgtctgtattcccatctattggggaggctgaggcaggacaatggcggaaaccccgcgtggcggaagttgcagtgagccaaaatggcgccactgcacttcaccctgggcgacagagctagacttcgtttcagaaaaccacaccaaagaatttctccccagaaaccagtgctccttgcctaattattgccaaaataattttaaaagcattttttcggaggctgagggggggttgtttaacctggaggggaaattcacgaccttaactccccatgcctcaacctggggaaaagggaaactgctcaatttttaaaaag

SEQ ID NO: 92212 - DNA, 394 bp, Homo sapiens
gacccacgcgtccgctcaaagtcacttttgtgtgatatcataattgggacaacagctttcttttgatttcgtattttcttggtatattttccccaactcttttcttagtcctcctttttttcattatattttaggtatgtctcttgtaaacagcagatggctggatttttttcttttactttaagaagtctgtcttttaactgactacattatttatatgaaatagaattctagtatattttgactcagttttcccaacttatttcgtattttctttttactgcatccactttttaactggcatcaacccccttcttttgggttggttgtgttttacgcacctcctcctcttttcctcactccactggtttgcaagttatacatttgatttctt

SEQ ID NO: 92213 - DNA, 414 bp, Homo sapiens
  misc_feature (1)...(414): n = a,t,c or g
ctttcacctcttgtttatatgtatttctaggtattttgtatgtgcttggctattgtaaatgggattgcattcctgacttggttctcagcttgaatgtaatagtaagtttttacctataaaaattactttaaatataaatgacttaatccaatcaaaagacataaggcggatgaaaaaataaaaaaagtaagttcaactatattctgtctacaggtgactcgctttatctttaaggacacacagaggctgaaaatgaagtgatgaagaaagatatttcatgaaaattgtacccaaaagggaacagaagggactatcttaataacagacaaaatagactttaagtcaaaaacttcagttaattatatcaagaattaggattccattaattagaggatataacagttataactatgn

SEQ ID NO: 92214 - DNA, 397 bp, Homo sapiens
  misc_feature (1)...(397): n = a,t,c or g
aaagcttttaattttgatgatgtcctgtttatcaaatatttcttttattgcttacacttttggtgttatatctaagaaaccattgtctaatttcaggtcacaagatttgctcctatgttttcttctaggagttttgtagttttagctcctacattagatctatggtgtctttcgaggtatgtttttgtacatggtgtgaagtaggggccaaaattctttttcatgtggctatccagttgtctcagcatcattttttgaaagagactattctttgttccattgaattgtcttggaactcttgatgaagatcagttgaccataaatatgagtttatttctagactctcagttctgttccattgatctatatatcctaatgccagnaacacactatcttg

SEQ ID NO: 92215 - DNA, 481 bp, Homo sapiens
gggccgcgaggtcctcgcgcttggtaaggtgcgcacgtactccatgcggtccagcgccacgagcagcaggaacaggccgggcacacacacagacagcagcagcgtcagcgccttgcgcgccacggggtccgccgcgccgcgccgcgccgccttgtagttctggaagatgaagtagagcttgatctccagcacgaagatgtaaaggaaccacaggatcatggcgtagccgcgcttggccgtgcgcacctcggcgcccacccacacggccacgtagcgcagcaccagcaggaagcacacgtcgcccaccagcacgatgatgcacacgccgatcttgcgcgggccctggttctgctccaccaggtacgcgtccatgacggccatgctgcccatgatcaccagcgtggtcaggcacacgtggcgccggtccgggggcggcagcaccatggtcggccgccgggccccggcctgggcgcgcgcggtc

SEQ ID NO: 92216 - DNA, 399 bp, Homo sapiens
tcctggctgagctcctcttgccctgcagccaatgcccccaagtccaccctgtctctgtctgtcttggtgcccagtggcctgtgagctccccaaggtaggccctgaagctcatgcaccctctgccctccccgggctgggcaggatagatgctggggaagggacccagcataggctcatcctgaccccatgccgtcttcctgcaggaagccaggcaagtgagtccctccttgcccgagcccgctgctatgggttcctgggccagaagaagacggccatgttcgacttcaacacagtgctgcgggctgagccggggaacgtgcaggcactgtgtggacgggcgttggtgcacctggccctagaccagctgcaggaaccgcaacactcctgacctgggcctgg

SEQ ID NO: 92217 - DNA, 670 bp, Homo sapiens
gaattcgccacgaggaaattttaattatatcttcaaagtaaaagtataatttatattattggagatttattattagtcagttgtttgaaagattcagcatgaaatgcatttgaaatgtaacagaaagagctttcccacgcagctgccaagatggcagaggggcagtcctggtgcttgatagctgagtaaaactcctgggctacctggaggctatcatgacccagcagagaaagtagtggtcatgtcctgtgaggacatcaacatttctggcagtttctacagaaacaagttaaagtatctagccttcctctgcaagcggacaagcaccaacccttcccaaggaccctaccatttatgggtccccagccacatcttttggcagaccacctgcggtaggctgccccacaagaccaagcaaggctaggctgccctagatcacctcaaggtgtttgatagaatccccctgccatatgacaagaaaaagcagatggcggtttctgccaccctcgaggttgtacgtccgaagccttgaagaaagtttgcctacctggggcactgggctcagaaggttgactggaaataccaggcaatgacagccaccatgggggagaagaggaaggtctattatcagaagatctgttaccagaagaaaaacagctcatgaggctat

SEQ ID NO: 92218 - DNA, 398 bp, Homo sapiens
aattcccgggtcgacgatttcgtccggcgctgagcgcccccagccgcgccgggcagcctggcgcctcgctgagtcggagcaacccccggcaggagctttcaggctctggtcaagcctcgggacccgggaagctatccctgccctcgggggctcgagcctggaggggggcttgcagaaaaggaaagggggctggcctaaaggcaagaagagaaaccccccgagggaccttgctgttccgtgttcctacgacagggtacatgatattcctgaatgagcagagaagtcagctgagggccacacaccccgatctgcctttcacagaaatcatgaagatgctggctgttcagtgggcccagctgtctcaggataaaaagggggagatgaactcactgacctcg

SEQ ID NO: 92219 - DNA, 864 bp, Homo sapiens
atgagacttggtgctgctgcaggcctctcagatgcacagatgagtgtgacccaaggttgcttaatgaaatcacagaagggtggttgctcacctgggggagaagaccaggaacgggcccaggcgacgcacagtgactcggaccggccgaactcagtagcacgccggcagccttccaatcgaatctcccgcgtccttttccgccggaaagccaatcagaagaaggcgccgcagagggtggagcttagcgaggaaatcctacaagcatctggaaacgaccattttcgtcaaactgcgggtagagtctttctccccgacaggtggatcagtagtacagtccgtaaaattggttttggagcttcgctgagcctcctgggcgtagggttcccgggaaagtgtggagtgagccgcagcgccctggggtctggcggggtgactgaaagagggaatggaagctggatgaagagggttgagggagctttggaagccagacccggcgctgtcctaggggctagcactacccacgggcggagggaggaagggggcggtggcaggaggcaggaggggggtggagcgcggagtgggttttcgggtgccggagaagaaagggggcgttatttgaaagaagggaccgggacctggcgggatttaggggcgatgtggacccggggcgacctgtgtaatggatgggttgtgcgagcaacacagttttggggtgacccaagaacggagtatcatagggagtggttaggctccagatggaggtgggtgcaaggagcacagtctttggacctggacccagcggtctgcgacgacgtgctccgctcactgctgagtgatctagtgcaagttcccgcacctctctga

SEQ ID NO: 92220 - DNA, 511 bp, Homo sapiens
tcgcgccggaagtaccgggtcgacgatttcgtgccccagccgccgcgccggtgccgccgctgccagtggagttgcctccccgcttccctagggtggttcggctccaccaaacatgtcggctcctgtcgggccccggggccgcctggctcccatcccggcggcctctcagccgcctctgcagcccgagatgcctgacctcagccacctcacggaggaggagaggaaaatcatcctggccgtcatggataggcagaagaaagaagaggagaaggagcagtccgtgctcaagtggtttccctttagtggaatcactgaactggtaaataacgttcttcagccccagcaaaaacaacaaaatgaaaaggagccccagacaaaactgcatcagcagtttgaaatgtataaagagcaggtaaagaagatgggagaagaatcacagcaacagcaagaacagaagggtgatgcgccaacctgtggtatctgccacaaaacaaagtttgctgatggatgt

SEQ ID NO: 92221 - DNA, 387 bp, Homo sapiens
  misc_feature (1)...(387): n = a,t,c or g
ggacagagtctggatccgggcctgagggaggccaagtctgtggcgcggcaagaggaggcctggagaaaatccaaggctggaatgggggcggagcctagggcggggcggatggagcagggcgcgggaagggcctgaggggtgaaggcggggtctggggagagactggtcagggaaatggggcgggactaggaagatgggaggaggctttgagtgtgagggcagggcctggcaatggggcagggccaggagtatgggccgagcctagagctggggcgggacctatggtgagggcagggcttgtgacgggggcgtggtctaaagggcgaggagaggtctggagagagagtgtgggtctggaaggaaagagggggtactgggtagtcaagn

SEQ ID NO: 92222 - DNA, 376 bp, Homo sapiens
  misc_feature (1)...(376): n = a,t,c or g
tagatattgattttcttccacttttggtcattatgaatagcattgattaacattgatgtgcatgaattctgtggacatgtttttatttttcttggggatatgcctagaaaggcaattactgaattatgtggtaaatgtaaatataaccttttgaggaattgctagactttttcagagtgagtgaataattttctattctcaccaacaatgtatgagggtttcaatgtctccacaaccttgcccacccttgtctttcacataaccaaaaaagntattttttattttaatttataaacacactccaacagacccaaaaaaggaaggtttccttccacatattggagggaaaagtgaataaattaaataataacttacn

SEQ ID NO: 92223 - DNA, 415 bp, Homo sapiens
cccacgcgtccgaaaaaaataaatgaagtgattgcagcttgagttgattttatgaacaggcacaagtatgctgccttatgctttctgatcttgcaagcactactctctagggccttatacatgggaggacatgatagacatgtatacaaaaaaaaaagactattctatattgattgccataagtaaatgcttttatcattctcaggagggatggttttgaagcatagatatgctgtaaaaggatggcagcaaaaaggttttcaactcatttgtattccttgattaactcagtttgacagaatagaaagtcactggtttgtaaagaaggtaaggaagcctgtggacaagagtccaatgacctagtatagatagagaatgaagaacattttagttaccatattattacggagatctt

SEQ ID NO: 92224 - DNA, 774 bp, Homo sapiens
aatatacccaccacgcgtccggtcttttttaattcataggtttctcctctagttccttttcttctcctgcttttgaatttaattttaaagaaaccagttatctttcctgagccatttcttactgtatagattttgatatttgaatccctgtggtagtctctcgtgttgttctgttcttgggatgtcattggcaatggctacatctcggtatggtttttttgtatttgtcctgttatgagtgatactgaatatctcatcatatatttaaaggccatttttatatctctcttggtacaatgttcatgtcttttactcatttttctattgaacgtttgatatatttcccttaacattttttgcaagctctttaaatgctagggagattagccctttgtttatgatataagttgcaaatattttctactggctttgactttgcttatcaggtttttgccatggaaagcttttaaaaaactttatttggctgggcgcggtggctcacgcctgtaatcccagcactttgggaggccgagatgggcggatcacgtggtcaggagattgaaaccatcctggctaacacggtgaaaccccgtctctacttaaaatacaaaaaattagccgggtgaggtggtgggcgcctgtagtcccaactgctcgtgaggctgaggcacgacaatggtgtgaacaccaaggggcagagcctgcagtgcgccgagatcgtgccactgcactccagcctgggtgacagagcgagactctgtctcaaaaaaaaaa

SEQ ID NO: 92225 - DNA, 365 bp, Homo sapiens
aaatttatgtggtctgccactatgggcatcatttccaacatcattttgtcccttcttaaaatgtaaactgctgatttctttgggacattatccccataaactattgctgaagcatcagtgatttcaccattctttttacccaagcttaaccataaagttgatgtttgttcttgcttcagttttaacagaactcatattgccctgataggggctctttttcaaactgatgtcttacccttcttagcgcctcaaactagatcctgttcagacatggtataatcagttagtgtgagtttattttggtgaaaaatggaaaaccatgcatagttgtttttgataatgaacattttccatgaaccttttgg

SEQ ID NO: 92226 - DNA, 391 bp, Homo sapiens
ggcctttagtagttgcagaaaagataaaagattcaaggcataccactataaaaaaatcatcaaaccacaaaggaaaacagcaggagaggaggagagaacaaacgaattacagattaacaaaaaaagcaattaacagaatggcaatagtaagtccttacctatcaatgattactttgaatgcaaatggattaaattatccaatcaaaagtggattggattaaaagtggcgaatggattaaaaaataagacctaactatatgctgcttataaaagacttgcttcacctctaaggacacacacagactgaaaagatagaaaaagatgttctatgcaactagaaaccaaaagagcaggggtagctatccatatgtcagacaaaatagactttaag

SEQ ID NO: 92227 - DNA, 390 bp, Homo sapiens
ggaggaggggttctgggggtgatccgctcagggcgtgctgacgcaccgtgtcccctgtggccctcaaggggcccccccggaggcctccccctcacatcctggatcaagtgaaaagcctcaaccagtccctccgcctcgggcacctcttgtgccgcagccgaaaccctgactttctcctccacatcatccagcggcaggtgagtgccgaggctccaggaggtaaagatggtggtcttgggaggcccggaaccttccggaggccttggtggccagaagagggcaggacacacctggatgcggggcccatgagctggctgctgcgtgtcgccctttccggctccgcggtcacccggggggctggcggcaggtgttgggcctggaaggtgctga

SEQ ID NO: 92228 - DNA, 415 bp, Homo sapiens
gtttatgcttcagtgtttcttttacttatttattgcttcctatcccacagcttactttgtttcttgagctgttgtaagaggttgttttttgaattttggtttctgactgtatatttccagtgtttaaaaacaaaactgatttttatgtgttgttcttatacctcataaccttgatgaattcacttactggttgtaggagattaggattttgtttgtttttatagatttggggggattttatgtgtgaacaatatgtcatccatgaataaggacagttttatttctttttattcaatctctatgccttttatttcttttgcttgccttgttccattggctgacttcccgtttataaggttgaatagtaatggtaagagtctatagcctttcctcattcccactcttggggaaagct

SEQ ID NO: 92229 - DNA, 1208 bp, Homo sapiens
cggacgcgtggaacaaaattagctgggtgtaccggcacatgtctgtaatcccagctactcaggaggctgaggcaggagaatcacttgaacctgggaggcagaggttgcaatgagctgagattgtgccactgcactccactgggcaacagggagagactccatctcaacaacaaaaacaacaacaacaacaaaaaggcaaaaacaaacccctggaaattaactggtaataaagagggggaaaggaactggttggaaactttccttaaaaaaaaaagtcaaaaccctgatttgccaacatgtagacctcagcttaatgtagacttgcagaaagccattaatttagggtagtattgatttatatttgactggtaattaagagcatacatgctgcttctttattatctgggtgacacaaattcatgtggcctgaggaagggtggaaatagtaggggggaaatgtttgtaagctttgaaaaagattttttttctgtctgcaagactgcattgaaagcactgtacctaatcaccaccacaccaccaccaccactcctaaaaaaagaaaaaaagagatgctttcacattcacctttccagagcaaattctctgtcactaagcctgcattgcactgaaggtatctttaactcctgcttctgtacaagaggctcatgaacacagctaaaattgagaccatgagcaaagtgcaccaaaccacacacgaggtttgtaaacacacgaggagtgccacatcatgctagatttcagtgagcgcaatggcaggcacacgagaagatgttggggtgggaagaaaatatcccaccttgctgtttagaaccactgtgcctgtgagcgctgagacggcagaagagaagccatcccacgcagcacttgcaaggcgatccgagcaccctgtcactcttgtaaactagaaagggcttcttttacttgtgtgaccttaccattcttgaaaataaaaagggagaagagaagggaactaaagtgcaagctaaaagagaaaagctccaagaagacaagcctaccttcaaaaaagaagaggtaaatatgattgaaaagtaatgatcgtaaagcaacagaaaaagcagtcagtgttccaagatatctcaggtctgatgatctcaaaattgtaacctcatatccagtgtatttcaagccatgactcacagtccactgaatagtgagatcagcttaga

SEQ ID NO: 92230 - DNA, 413 bp, Homo sapiens
tttcgtggaggggatgagtcattttgccacaggcacgcatgtgctggtgaaggggcgtgcgtggggaccatgggtcacatctcggctgtccccttctttaggaaggggtggaggtggcaggagtggggcgggttgcaggctcagaggcacaggaggcccgcactcgctctgaggctgaggaataaatggtgtggtgctggaaagggaaccctcaaacctgccgacctgggaatagcccttcagggggcctgtcagatagctcgcccttgggacgggcggtggcgggaggccaggaggcctttggtgcaggaggggaagaaaggcagggaggggcgtctcaagggcaaagaagggcatctcagcacccccgggtggtttgcccttttggggcggtccatccgttgctgcattgt

SEQ ID NO: 92231 - DNA, 2218 bp, Homo sapiens
cccacgcgtccggcggggcagaggagggaggcagcgggtgagagttcagagttcagcagcagcagcccgagcccatgattcccatatgccctgtagtttctttcacctatgtgcccagccggctgggggaagatgccaaaatggcgaccggcaactactttggattcacccacagcggggcggcggcggcggcggctgcggcccaatatagccagcagccagcttcgggtgtagcctattctcatccaactacagttgctagctacactgtccatcaggctccagtagctgctcacacagttactgctgcctatgcaccagcagccgccacagttgcagttgccaggcctgctccagtagctgttgcagctgctgcaacagctgctgcttatggaggctaccccactgcacacacagcaactgactatggttatactcagaggcaacaagaagcaccaccaccaccacccccagctactacacaaaactaccaggatttcatactcatatgtaaggtccacagctcctgctgtagcttatgatagtaagcaatactaccaacaaccaacacagcaactgctgctgctgttagctgctgctgccccagccttcagcctttctgttgctgaaaccttactatcagaacagcccccaaagcaaggttacagccaaggtgcaactcagtatactcaagcccagcaactcgacaagtgacagccataaaaccagccacaccaagtccagctaccactactttctccatctatcctgtatcctccaccgtacagccagtagcagctgcggctactgtggtgccatcctatactcagagtgctacttacagtaccacagcagttacatattctggtacgtcttattcaggttatgaagcagcagtgtattcagctgcatcttcctactatcaacagcagcagcagcaacagaagcaggcagcagcagcagctgctgctgctgctgcaacagctgcctggacagggaccacctttactaaaaaagcaccattccaaaataaacaactgaaaccaaaacagcctcccaaaccaccacagattcactattgtgatgtttgtaagatcagctgtgctggaccacagacttataaagaacatttagaaggacagaaacataaaaaaaagaagctgcattgaaagcctcacaaaataccagcagcagcaacagttctactcgtgggactcaaaatcagctacgttgtgagctctgcgatgtgtcttgtacaggagcagatgcgtatgctgcccacattcgtggtgctaagcatcagaaagtggttaagttacacacaaaacttggtaaacccattccatcaacagaaccaaatgttgttagccaagctacttcttcaacagctgtatctgcttcaaagccgactgcctctccttcaagcattgcagcaaacaattgtactgtgaatacgtcatcaattgcaacgtcttcaatgaagggtcttacgactacaggaaactcgtctcttaatagcacatctaacactaaagtatcagcagtgcctacaaatatggctgccaagaaaacatctacccccaaaataaattttgttggtggtaataagctgcagtcaacaggaaataaagcagaagacataaaaggaaccgaatgtgttaaaagtactcctgtcacttctgctgtgcagattcctgaagtaaagcaagacacagtgtcagaaccagtcacacctgcatctcttgctgctttacagagtgatgtgcagccagtgggccatgattatgtggaagaggtacgaaatgatgaaggaaaagtaattcggttccattgtaaattatgcgagtgcagctttaatgatcccaatgctaaggagatgcacttaaaagggcgaagacacagacttcaatataaaaaaaaagtaaatccagatttgcaagtagaagtaaagcctagtattcgagcaagaaagattcaagaagagaaaatgaggaagcaaatgcagaaggaggagtactggcgaagacgagaagaagaggagcgttggagaatggaaatgagtgctggaattacatgtatgagccaccacgactggccttattgtgaaaataattttgaccccatggatctcctgaaagggtctccgggaccacttggtgtccctgaattgcacctggagaacccctgctacagcttaataaaatctctaccaatttaa

SEQ ID NO: 92232 - DNA, 1241 bp, Homo sapiens
tatcgaccatttcgtgccattttgggcgcttcgctgatggtgtcggtgtttgcgtttcccgcctgagcgcaactagcggcgggtcgtgggcacctccaggtgaacgggatgggtctttggatgtacctccgtgccctgacgtttcaaccgcgtgacttaatgtcattttcctgataagaaaacaagctcagagagatgtggtgacttgctcaaatagtgacagaacttcctcggccatatggaggggtcatataatacccttgtgtcttcagtttgaggtacctcccataattttaaggggagagcttgtttcatatccatatcccactgtattcctgctaatctgctaatgcagtaaattggaggaaaactgttaccaggataacctgtaatgggcaaggagccacaaagaagaaaacatttcttttaatttttaaacttggtttgaaagaccagcatgttttggaaatttgatcttcactcatcatcccacatagacacacttctagaaagagaagatgtaacactgaaggagttaatggatgaggaagatgttttacaggaatgtaaagctcagaaccgcaaacttatagagtttctgttaaaagcagaatgtctcgaagatttagtctcattcatttatagaagaaccacctcaagacatggatgaaaagatcagatacaagtatccaaatatatcttgtgagttgctcacttctgatgtctcccagatgaatgatagactgggagaagatgaatccttgctaatgaaattatatagcttcctcctaaacgattcccctttgaatccactacttgccagtttcttcagcaaggtgctaagtattcttatcagcagaaaaccagaacagattgtggatttcttaaagaagaagcatgattttgtagaccttattataaagcacataggaacttctgctatcatggatttgttgctcaggctcctgacgtgtatcgaacctccacagcccaggcaagatgtgctgaattgttcaaagtccagagaaacctgtaacattctacttaaaatgtgatggatatttccaagtatgttaatctacattggggcttgaacaagagccactcattgctatgattacttctacaatgtgttttacagtggttaaatgaggagaaaattatccagaggcttgtggaaatagttcatccatcgcaagaagaagatgtaagttcacttgtgtgactgtaaacttgattag

SEQ ID NO: 92233 - DNA, 441 bp, Homo sapiens
actggctctctcaggggattccagggcaggcggctgggagggcgtttctgaggaagtgctgttttaggcgaggtctaagttacaggcaggagctggcaatgaggagtcagggagacagacctccagccattgggcctctccgctctggggtgaggggagggagggggaggacccgagggggcagagcatttaagacatggagtgggtagggcgttgtgacaccctggctctcaggggatgggaggacaactcgatgaagttcgtggccccaagacatgcggagaacccgcgtctgcagggctggtggcgtccaccacagggcatggtcctggtgtcctcgccccacaaggctcccccagggtggcccgaccctgctgcgcgggagggagagagccacaacaagttgtatgggcccaagagacatgggtacattttgctctg

SEQ ID NO: 92234 - DNA, 424 bp, Homo sapiens
acgaagaacgcaacagggacccactgttgccaaggaggcactaataattccttcagagaggaaaaagagagactggcctcctagatcccactctctcaaaaggcgagattatcaggagccgctcacgctgatgctggaaagcagtgctctgtacacaccgtgcgcgacatcatgtaactgcagctgtactcggcgagctgcggcggatcctacctgccgcctggcgctgccatgacctgcgagccagaggacagcgaggagggaggacacgcgggaaggaataaactggactacatggaaatcaacactagaagagagggaggaggagctggagctatcctacctcatcagtgttttgtcttctgttgggatgaactatgttaaaactaatgcatggttaagatgaaaggcagaaggaagggtt

SEQ ID NO: 92235 - DNA, 411 bp, Homo sapiens
aaaaaagataagctaaacccaaaataagcagaaggaaggaaataaagattacagcccaaatatataaaatagaaaatagaaaaacaatagagaagatcaatgaaaaaaaaatgggttctttgaaaagataaacaaattgacaaacctctaagtagatagataaaaagaaaacgaagactaaagttaccaaaatcaggaataaagggacgttactaatgaccttaagaaataaaaaggattaaaatggaatactgtgaacaatgaatgccaaaaattggataacttagatgatatggacaaattcctagaaacattaactatcaaaatggactcaagaagcaagaacatctggagagacaaataacaactaatgagattgagttagtaatcaaaatacttccagcaaagaga

SEQ ID NO: 92236 - DNA, 353 bp, Homo sapiens
ggataagagctggaacccagactcgcgccctggatgccatcctttatcatccacagcaatcccatatgggtgggagcactgctttggctttaagagctgtgcccaggagtgaacaaccatccctacctctgtgagagtggacactgctgcaggggagactggctgctgcacctactactatgagctctgggggttctggctgctctggactgtcctcatcctctttagctgctgttgcgccttccggcaccgactagctaaactcaggctgcaacaacaccagcggcagcgtgaaaacaacttgatggcctataatggggcatgccatggggctggacctttccctaccggtt

SEQ ID NO: 92237 - DNA, 406 bp, Homo sapiens
  misc_feature (1)...(406): n = a,t,c or g
ttacaatttacagctaatacaaatggtgctgctatgagcattctcatacatgtttttggatgaatatatacccgcgtttcttacaggtatatacctagcagtggaattgcagggtcataagtgtgcttatgctcaattttagtagataatactaagacatttcccagaatttcccaacattgacacactcaccagaagtatttgcattccagctgctccagcatccctaccagcacttagtaatatctgtcattttaattataggaaatctgggggattttataatttcatacatttggaggtagagccattctcttagcccccaaaagcttacactacactttttgacattcaatgtcaggatgtgctctctataaacttggaagtcgtatacatgtaaaccctn

SEQ ID NO: 92238 - DNA, 373 bp, Homo sapiens
ggcatactggagttgaaggctgtgagtcagtcattaaggcacatgaagaaattaatgaagaccatccagtggaaattcatgaatatttgtcaatgcttgagaattacactggtgctgtggataatatgctaaagaccatgatgtctgtttcttgaaatgagttgttgcagaagttggacccacttaaacaagtgaaagtggatttagtttctatgtacacattaaatttaaagttttgagtttatttggcaactcaaggagttaatactaagaaacagctagtaaagcaggaaggaattggaaagaatcagaatatatatgaacacagtcaaggaaataacagaaaaaggctggcaagctggacagaggtaca

SEQ ID NO: 92239 - DNA, 739 bp, Homo sapiens
  misc_feature (1)...(739): n = a,t,c or g
atctcaattcatggcccttgaagccatgttgaccacctttctgacctttggatagacagggaataccagatgggctgcgttttcccctcggattttctttccagccttttccctttccactctcttctttgccccgaggcgcagcttggtggactccatcacgaggttccccgacctctgacttatggttggctttggcccatgtggtcactgggaagctctgccaggaatgacttgaggctggggcagatactctctcggcttcctctctgctggaggctgcagcttctttaagtggcatggcatcactgcccaattgatgctgggctccagtagccactgtctaccttacccttcaggcctgaaggagcgtagggtgggcatctgatacggattggatgtttgttccctccaaatcttacgataaaaagtgattcctaatgttaaaggcggtgtctgatgggaagtatagggccatggcgacagacgggtccctcatgaatggcttagcacactcccccttggtcatggaggaggtcttgctctattagataatgcccgaactggttacttaaaaagaggctggtaattccaccctccctggcccttatttattcctttggcaggggggaccacacaaccctcttatcctttggccccggagtggaaaaattttgggggggggcccccnaaaaaaggggggggtgccccggtttttttacccacagcggggaaaaaa

SEQ ID NO: 92240 - DNA, 2375 bp, Homo sapiens
ccctctcatttgtccacagtcggactatggggaagaggagctgttcatcttccagcgaaaccaaacctccctgattccagacctgtcggaggagctggctgaagatcctgccgatggcgacaagtccagggcctgggtcgctgcagctgaagagtcccttcccgagccagttctggtgcctgcagaattggccacagaacctgggtgcagacagaacacaaggacaaaggatgcatcctctcaggaaggaagagaccctggcaggccttttgaaagctctggtgaagtcagcgctcttcttgggatggccgaggagccccccaggtggctggaaggcgaccttggaagcctgtctttcaacaccaaaggatcccagggtcctccctgggacccacaggccgaagccactctctcctgccatgaaggagacccaaaggcagagcccctcagcactgcctcacaagaatctgtgaaccgccgggccctccgacaggagagaaggaagatgatagagacggacatcctccagaaagtcacccgggatgcctgcgcccgaccagcagtgacaaagggagtcaaggtggacgcgagagaccacagtggagccacagcccggatgctggccaagcagtacggacacatgaagatcgtggccttgatggacacttactcgccctctctgcccaagagcctctatcggagcccagaaaagtacgaagatctgagctcttctgacgagtcctgccctgctcctcagagacagaggccttgccggaagaagggtgtcagcatccacgagggaccgcgagccctggccaggatcacaggcattggcctgggcggcagagccccacggcctcgctatgagcaggctcctccccgtggctatgtcaccttcaacagcagtggcgagaaccccctggaagaagagggcctctgctgccgggatgtcacctcccccatcaatgagcgggacgtggagagcagcagcagcagcagcagtcgggaggaacatgctttctgtgccaacctggggcccgtccagagcagcagcagcagcgagggcctggccagagcccaggggctcagcagcgaagcttctgtggagagcaacgaggactcggatcatgcctgtaaaagctcagctcgcaaacaagctaaaagttacatgaagaccaagaatcctgacagccagtggcctccccgcgctgcaactgacagggaaggctttctcgctgagtccagcccccagactcagagggccccctactcaggaccccaggaccttgccgcactgctggagcagatcgggtgtctgaagtacctgcaggtgtttgaggagcaggacgtggacctccgcatctttctgaccctcactgagagcgacctgaaggaaattggcatcacgctgtttgggcccaagaggaagatgacgtccgccattgcccgctggcacagcagtgcccgcccacccggggatgccctggagctggcctacgccgaccggctggaggctgagatgcaggagctcgccatccagctgcacaagcgctgcgaggaggtagaggccacgcggggccaggtgtgtcaggagcaggagctgcgcgccgtggtggagagctgcctgctggagcaggaccgcgcccgcgaggacctccaggcccggctgcgggagacgtgggccctggcccgggatgctgccctcgtcctggaccagctgcgagcctgtcaagctgagctgtcatctcgagtgaggcaggaccagccccctggtgcagccactctgggcctagccgtccccccagctgactccaagggctggcaagcgtccctgcaggccatgagcctccccgagctctcgggagccctggaggaccgtgtccgtgagatggggcaagcactgtgcttagtgacccagagcctggagaagctgcaggtgctgaacgggaagaagtggcgggagacctagcctgcgggccgaatctgacgttgggtgattggtccaccctgaagctgtgtgccagggagtgaggaggacagtgagcaggtagctgccatgtgcagcccaggcccagtgggggccagaggatcaggccccgggagcagccggcagacagaggcaagacgggggctgcggccctggctcggcagctcgggccagcactgaggcgggacgagggcctcacccagaacctcatggtgaggcccagagttcatgggctgccctggcccataccaggcagggccctggggggaaagtgtatccatatacacgcacaggtgccaactgaggtgggaccttaggaatgaggactggggcacctggaaaatgccattttttggaaaataaaatttaagaacagctaaaaaaaaaa

SEQ ID NO: 92241 - DNA, 709 bp, Homo sapiens
gcggccgcgctgagctcactccgggccctgcggaaagaattcgtaccgttcctgttgaacttcctgagggagcagagcagccgcgtcctcccgcaggggcccccgacccccgccaagaccccgggcgcctcggcagccttgccagggaggccgggaggcccgccgcggggtagccgcggggcgcgcagccagcttttccctccgaccgaggcccagagcaccgctgccgaggcccctctggcccgccgcgggggcaggaggcggggcccggggccggcccgcgagcgtggaggccgcggcctggaggagggggtcagcggggagagcctgcccggagccgggggccggaggcttaggggctctggcagccccagccgccccagcctcacgctgtctgatccgccaaacctcagcaacctggaggagttccctcccgtaggctcggttccccccggccctacagggtgagactcagctctcatgcaggagatgggtaccacgaaggctctggggagtcagtcattcgagctcggcgctccgcagtggagcgccaggatgggtagaaggctgggggtgatggtgagggtttttgtggggttttttggcaagaggtctagctgttgcggtggtggaggggagatgtttgaagataggaatttgagaaaaacctgtggctactctcagcaggacgaaaccttctcgcacgaag

SEQ ID NO: 92242 - DNA, 613 bp, Homo sapiens
aatacagtggggggaagatggttatgtcgctggtgccgtcgaagaagaactcggtcatgggggggatataagggtactgcggggccggcatgtcctccagatcctggatgggaatcatgagagccccgttctggtcctgtgccagcttcttctccttcagcatggcatccaggatgtcaggggggtagagcgtcaggccccgggccaggtgtgtgcggtaccaggtgaggtgctgaggcttcaggatggctggcttggtgctgtccgagtggcaggtccccatcaggtccaggaacagtgggtcctggtggtggatgagacaggccacacgccgaaagcagatgatggggtgagtgggctggaaggcacagtgcagggtcatacgggccttgcccaccagcgtcccaaaggcaggcctgatggtaaagacactctccaagcagtcgatggcaaactggaagtgggccgtgcagtccgattggttctcaatccacaggggctgctcggagcgctccccaaggttgacccagctgaagttgacacagtagtgctgcagggacacagcagggcctctacagaaaccaacgactttaagcagggtcttggaggcaca

SEQ ID NO: 92243 - DNA, 393 bp, Homo sapiens
atacagctcctcacagagtttataggtcggcaagctttgctgacattaaataaaaatttacagtgaaaaagtaaaagtggctcttctcatctctgaacatcacaggtagaggagacataattgggcacctgaaatggctggactgtagggaactgctccagtttccccatcaagaggaataggcagacacacagcaccgaatccaataaactgaaggccggccactcctttggttacaactaactgattcactgaaactcctgttaaaactgactgtgggtgtggagccaacagcaaaggtgttgtggtggtcatgaaggtgataaactgcccaacaaaagcaaaccacctcctatatgcaaatcggcaccaccaagaactcccgtgccactg

SEQ ID NO: 92244 - DNA, 778 bp, Homo sapiens
attcataagagggttccctgtgatatgagcatccccagggcatttaaaatatgattcaatttttaaaaattctatttgtacccagctttcttcagaaacacaactttggttttaaacaaggtgcatctgtttccagaaaatgctttcccatggatctgtgtgtagaagggttgtattgcatctggagatcacactcagctcaagtcaagattctctttgaacgcaccaagcttaggagctaaactgtcttggctgtgtgcttgtgtttgatcctgttgggaatgaagctaattgtttaagaatttacatcctggtaaggctgttagcactttaaattgatttggtatttttaaaaacttatttaagatttacttatactgaggaacctggctttccctgaactaaaaagaagaaattgtatttccagattttacctggcttatcatctgcacaaaatctactctaggagcattcttttatgtaacaattgcagtgggttttacatattgtctttgtagcaatatgatgtgtttttttttaactattttttttttagagacagggcctggccctgctgcccaggctggagtgcagcctggctcactatagtgatcctagctcactatagacgacctgggcttgagcgatcctgctgcctcagcctctcaagtagctgggaccacaggcgtgtgccaccatgcccagcaaatttttaaatttttcaatgggtttcactgcatttcccaggctggttttgaactcctagactcaagggata

SEQ ID NO: 92245 - DNA, 1924 bp, Homo sapiens
tttcgtctggtggtggtcgttttggttctgtgtggtgtttcaccaacttcggcctatggctctgtttgacgtcaccgaagtgacggaacggaaaagcgcgagaagcggctcggttcccaccacggagaggcgggagtgagtcaactgacaagcgctggggacagtggcgtccttgtcttgcctttgtctctcccgccccgctcttccctggctgggctggcggaggccttgctgatgaacctgactgagggtcccctggcgatggcagaaatggaccctacacagggccgtgtggtctttgaggacgtggccatatatttctcccaggaggagtgggggcaccttgatgaggctcagagattgctgtaccgtgatgtgatgctggagaatttggcccttttgtcctcactaggttcttggcatggagctgaggatgaggaggcaccttcacagcaaggtttttctgtaggagtgtcagaggttacaacttcaaagccctgtctgtccagccagaaggtccaccctagtgagacatgtggcccacccttgaaagacattctgtgcctggttgagcacaatggaattcatcctgagcaacacatatatatttgtgaggcagagctttttcagcacccaaagcagcaaattggagaaaatctttccagaggggatgattggataccttcatttgggaagaaccacagagttcacatggcagaggagatcttcacatgcatggagggctggaaggacttaccagccacctcatgccttctccagcaccagggccctcaaagcgagtggaagccatacagggacacagaggacagagaagcctttcagactggacaaaatgattacaaatgtagtgaatgtgggaaaaccttcacctgcagctattcatttgttgagcaccagaaaatccacacaggagaaaggtcttatgaatgtaacaaatgtgggaaattctttaagtacagtgccaattttatgaaacatcatacagttcacactactgaaaggacttatgagtgcagagaatgtggaaaatcctttatgtacaactaccgactcatgagacataagcgagttcacactggagaaaggccttatgagtgcaacacatgtgggaaattctttcggtacagctccacatttgttagacatcagagagttcacaccggagaaaggccgtatgagtgcagggaatgtgggaaattctttatggacagctccacactcattaaacatcagagagttcacaccggagaaagaccttataagtgcaatgattgtgggaaattttttaggtatatctccacactcattagacatcagagaattcacactggagaaaggccttatgagtgcagtgtatgtggggaattgtttaggtacaactccagccttgttaaacattggagaaatcacactggagaaaggccttataaatgcagtgaatgtgggaaatcatttaggtaccactgcaggctcattagacaccagagagtccacacgggagaaaggccttatgagtgcagcgaatgcgggaaattctttcgttacaactccaacctcattaaacattggagaaatcacactggagaaaggccttacgagtgcagagagtgtgggaaagcctttagccacaagcatatacttgttgagcaccagaaaatccacagtggagaaagaccttatgagtgcagcgaatgccagaaggcctttattagaaagtctcacctggttcatcaccagaaaatccacagtgaagagaggcttgtgtgctccatgaatgtggggaattctttagctaaaactccaacctcattaaacatcagagatttcacaatggagaaagtttaccattgactattgtaattgggtagtaatgttatataaattccacatttttatgcaacta

SEQ ID NO: 92246 - DNA, 399 bp, Homo sapiens
ctttttctttttcttgccttattgcacggggcaggacctccagtaccaggttgagccaaagtggtgatcatggctgacaagaagaaagtgctcaatagttgcatttatgttaacagtagggttttaaaaaatatatagtccttatcagattgaagaagttcctttaaaaatgtattcttaattgttggagagtttttatcatgaataagtgttgaattttatcaaatgtttttctgcatcaaagggcatgattgggtgatatttctcctttattctgttattatggaaaattacattgattgattttttttcaaatgttaaatccactttgtatttctggaataagttctacttggtcttgaggcatcatctttttaatatatctctggatttgactat

SEQ ID NO: 92247 - DNA, 399 bp, Homo sapiens
  misc_feature (1)...(399): n = a,t,c or g
cggacgcgngggggaaaatatagatttttccaaagcaagcagaagccaggaggtaagaacagaaataaatggaattgagaagaacacttcagaaaatcagtcaaactgaagctgatttttataaagattaatatgtttgataaagataaccatctaactagactgaccaagaaaaacaagggagagagagaacacagataccagaatcaaagaggctacatcattacaaatcactacagacattacaaggatataaaataatattataagcaactcactgtctataaatttagaagcttaggtgaaatcgacaaacacttgaaagtcataaattgccaaagcttacttgaaataaataacctgaatactcctgtattagttgacaaaattgaattcatt

SEQ ID NO: 92248 - DNA, 397 bp, Homo sapiens
ctggattttccaaacacataagggagtgctttgtgacattgggatgttcattttgctgagacctaatacaatgatgatgttatacttgagatgcaaggaataacttccattttggttcaggtctccacttccacctggttgaatataaactcaatcacggcatcttcttcaaacccaaggatttccattattcatattgttatctaagtctttattagcctccaaatttactttgcttatgtctgccttttttctaggcatcctgcaaatttcagctccttcagtagcatctatttgttgctgaaccaatgatcttggcttgcacttgtttcttggaaggtcattttgcttctgagctctgagattgctgcctaacccaaagtgcactggacctcct

SEQ ID NO: 92249 - DNA, 401 bp, Homo sapiens
aagccacatctggtacagcagctgtaattggactcaccacctagttaagcttaacgataatcttctgttattctggaagctctgtctgtcttctgcacagaccagataagaatcgaatgggggtgtagtgggaatccccacccctgcatctttcaagtcctcgacggtggcagtaatctctgaaatccctctaagaatgcagtattggttttggtttactgttttcccaggtagatgcagttctagtagcttccacttggtctttcccaccataatagccctcactccacaggtcaggaaatcagtgtggggattctgctagccattccattccattaattgccttctggaagagaggagacaaccacaggatgggttcagggacccgctctgagttgggc

SEQ ID NO: 92250 - DNA, 391 bp, Homo sapiens
  misc_feature (1)...(391): n = a,t,c or g
ttatttctgtatatcactatatttagttggtacagaaagatacttggaggttaaaaaatagcagtggactatcaaaagcttaatcaggaagagacttctattgcagtcactgatccaagttgtgatttccttattgaagcaaattgacaaagtcccaaaacctcaaaagcccgtggtccctaatatacaactattaatttgcaaaatgctttttcagctatcccaatgagaagacaaaaacaagaagcagtttgcttttacctagaggaggcaacagtacatcttcaccattttgcttcaaagttatgtcaactctggctctgccataacttagtacataggagactttctcatcttatcattttgcagggtatcctgtgagtctgttatn

SEQ ID NO: 92251 - DNA, 394 bp, Homo sapiens
cggacgcgtgggcagactgtgagatgattttttgtgtgcatcatttttttcttgaccagctttttgaaaattaagaaatggatagtcatgttttcttcaggatctcaagtattgtcagcatccgtaaatcccttccactctgggaaatactactgctccctgcttcccatggcttccacatcagtccaggactttttctacacaaattattctggctctgcctccttgaccttggtattcttagcattatttttcccatttttttgcaatggagtttttaatggaggccattgatttctgatcacagacttgaagagctatgatccacatttccaagctgcttggggtccctggtttacagtgtctccagcattctgtacctagagccacatct

SEQ ID NO: 92252 - DNA, 413 bp, Homo sapiens
tttccctcagctttgtctgacggaagctgctgggcttctgcttccagctggaggagggggaggcattgccaatagtggccaggcatccagtgctggtagcctgcatctgtgccccacccgcagcaccctgagcccactatttctgccgtaggcagcccaaccagcggccgagatgtaggccatcaagtatgtggtggtgggagatggagctgtagggaaaacttaccaactcatcagtgatcagctatacaacctggagaatatatccctattgtctttgacaatcactatgccagtgttatgttaaatgggaaaccggtgaatctgggtgtatgagatacaagtggacaagaagattacacaggtggacagattatgacccccacccccgttcctatccacaaacagatgat

SEQ ID NO: 92253 - DNA, 443 bp, Homo sapiens
  misc_feature (1)...(443): n = a,t,c or g
cgcaagcatcgaccgcccctgaaannnnacccgagggccatgggttttcctccccaaaggccacaaccgtttatctttccttccacctcacccttcgcctcaatggctgctcgcttcctctcctcgcttctcactcagcccccagcccctgaccttccccaaggctcagagctcagaccctgacagacatggtccctctgctggcccccctgcctcagttcccctcctctgtgcctgccgttcctgtagttgccacttccttggtctccagattcttcagccctcctccccggcctgctttctctccagggcctggctctgcctcgcttctctgtattaacccatgtcttggtgcttctttctcttggggattccttccgacacccccaggctttggggtgctcctgatcccatgaatgcctggatgcccggggtctctgcct

SEQ ID NO: 92254 - DNA, 404 bp, Homo sapiens
gcggatgcctaggctcacggaggcgatgataggacgtgataagctgcgataagcttcgggtaggtgcaaataacctttgatccggagatttccgaatgggacaacctagccgtctgaaggacggttactcttaccaatgtaagagagctaacgcagggaactgaaacatcttagtacctgcaggaagagaaaataaatgaatgattcccccagtagtggcgagcgaacggggaacagcccaaaccagtggcgtcgcaaggcgttgctggggttgtaggaccgcgacattgtattgaaatggtgagtggaagtatctggaaagttacatcacagaaggtgataatcctgtacacgaagccaaatcaagcatagcggtatcctgagtaacgcgggacacgaggaat

SEQ ID NO: 92255 - DNA, 400 bp, Homo sapiens
  misc_feature (1)...(400): n = a,t,c or g
ccccaccccagcctggcttggacactctgaggatgggcccaagcagccacctaccaggactcttggcccggggccacacccagtgctgctagcagccccaccttctcctgaagtagccaggtgtgctctgcctccagggcctgcaatggccccccaacaccatctgctctccctgcagatgctgcagctgctccaagcaggcccctagttgctggtggctctggcccagctcttctgagtctcttgttcacctggggagatccccaccccaccgagttgtggctcagcctccaccagggtgtggagctccagcctttacccatgcagcccctcctcagaggccccgaactccacttcctctgggtctcagcccttccaggaggcctctctgaccaccccn

SEQ ID NO: 92256 - DNA, 1473 bp, Homo sapiens
ttttttttttttgagacggggtctggctgtgttgccctgactggagttcagaggagcaaacacagctctctccacaacctcttgggcccaagtgatactcccacctctgccttacaaaatacagggattactggtgtgagccactgtgtctggccagaaaaggcatttttgagaaagcaaatcgtataccttattaacaaaatagaatatatatatattgcttatctgaaatgcttgaaaccagaattgttttgcattttttgaatatttgtatacacataatgagaccttggggatgggacccaagtctgaacgtggaattcacctgtgtttcgtgtatatgcctcatacacataattttgtgcatgaaacagagtttttgtataagaagatacactgcagctgaagagggctgggtttttttttctcttagggtcgctgcataaactgttgtatgcctggtgctttgcgacttgtcacacgaggtcacgtgtggaattttccacttctggcatcacgtcagtgctcagaaattttctgatctcagagcatttcaattagggatgctcaaacgcaactgtttctacttccccatttcaggtgtgagatgtaacccaccttgaccataaattggcttttcatagtgctcagatgtttcataattcttcccccaaaataatgaagtttgcagtttaacaactttttttttgaggggggggggtctggctctgtagcgcaggctggagtgcagcggtgccatcttgactcattgcagcctccgcctgccaggattcaagcaattctcctgcctcaggctcccgagtagctgggattacagacacccaccacgacgcccgactaatttttgtatttttagtagaggagacggggtttctccatgttggccaggctggtctcaaactgacctcaagtgatctgcccacctcggcctcccaaagtaaaaagtactagaattataggcatgagccattgcgcccagccaatttaataatttttttagacgtattattttgggctgggctgtggctaatcttgaagcagtgacttcctattttttggctcagacccatttgggaagctgtgaacctgagataaggaagtctgaaagtactagccggcagccgaccgtttctattcctttcgaagttaaggagacagcaaaggagctcccaggaattagggatccagttataaattgcacttaactcaaaatagtgccaatgagaatgtgaaggaatcttctggaaatgaaaccccacagctcaacaaaagcaagtttggtttatttgaatggtttcattaaataagtctacaaaggtaacaaactgaagcacaaagcgcaatcttacaagaagcgcaacacccagagttagtgcaaaatgtacaattaacggctgctgagaaacccccaaagtttgaatttttatttttatttttaacagtgtacattgt

SEQ ID NO: 92257 - DNA, 430 bp, Homo sapiens
catcgttagatacttggattgtcccttagatgtggggggaaaagctgttaggaagtaggaggtgaaaaaggaccctggagaaagcctcaaataagtagctttgggcacaaaccttaacctgcaccttgggagaggaacaggaaaccttcttttctaggattggggtgaggactaaatcaggggcagcagctgcttcccaggaaggaccagccctgctatgggagtagttattacccccagaaccggacaagcacactgatgctgtcattccactgtatttctggatttccgctgtatttcaggatttctgctgtatgtctgtattctagtaaatttgataattctaaatatggaggttcatggagctcttctctaaagtcccttcttatctctggagacttttataatcacctcatttggagaggagcag

SEQ ID NO: 92258 - DNA, 400 bp, Homo sapiens
tatgtggaaggacagacgcgcctgcttccacttcgccttatgccatgactgtgcgtttcctgaggcctccccagccatgcgtcctggacggcctgcataactgcccggcccgggcccctcaggagcagaacagccttggtgaggtggacaagaggggacctcgcgagcacacgcgcgccagcgacagcagccccgccccggcctgtggggagccccaggaggatctgccctggagactggtagtaatgcaggaacagtctgcagggattctctcttgctgcctcaattgctaggggaagagactgggccttagcaggtctaccagccacagtctctgctcgtttccaagagcagcagaaaatgagcacattgcagtcgaatccagcgggcattttctacg

SEQ ID NO: 92259 - DNA, 433 bp, Homo sapiens
tttcgtgggtttgtggggggctggggggtgggcagcgtttagtggatccttcccaaggaccgactctagaatgagatctggggcctggggtcgtgcaggagccttggtgggggctttcgagccaagtccggagggtttggagttctacggagtgagcttggagcgggctcgggcctgggcgcttctggccagggcaggggaactatgggggccttggttgggttttcttggccgtcgctcactggagtccacgcaggggaagctggacagcctctccactactgctttccccaaggtggggggccgccgcacttttagggcagggcgcttgggggctcccagggctaagagcaagagggagtccatgtggccttcacactgagaagccagcactggccgaagtgagtaccccagggtgggccgctgttcctat

SEQ ID NO: 92260 - DNA, 784 bp, Homo sapiens
ctctagtccagcgtggtggaattcctatttttcctgattataaaagtagtaagtgttcattataataaagcaatatgtaagtgaatatcaagtaaagtaaaagtcccctataataccatcttctatcttcagttcccaatgttaaggttgttttgtttcaacaaatgagacagtacccatcctatcctgtaacttgtttttgttttcatttacaatatgtattgcagccatctttatgatgtcttttgtaacaactgcatagtactgtgctatatgtatattcaaccagtctctataaggatgaacacttaggttactgccaagttttactattacaacaatgttcaatgaacatcattgggaataacatttatttagttaacatttatctggtacttttctatgtgccagacaccatattaaatattttatgtggtttattttattcaatgttaaaagctctactggataaataatactcccattctaaatataaggaaatggaggcactggaggctgaagtttgtctgattatttcctttgaatcaacccctagaaatcaaattgttgggccaaacggtacccaaatttaaagtttgaatatacagtcagtcaaactaacctcccgaaatgtgggagcaatttcacaccaaaaaggtggctttttccccccaccctttgtcaagacttgtacctttatgacatttttaaaaatcctttggctgtctggttaggttaaaaaaataccccttgaacgggccgggccccggtgggttcacagcct

SEQ ID NO: 92261 - DNA, 1404 bp, Homo sapiens
tttcaattaaaactttgaattttattttaaaatggactgggaagctatcatgtaagacaccctgcagtgacttgtagtgccaatcatcactctctatttaaatttattctgtttcaattttgcatatttggtttcttaaacaggagcacatatatggcatatcccatcccaggtcttgagttatacattgagaggtatattttccaggcacaattatttttctggcacaattatttttctaacagaattcagttacaaatgtctttgatgaaacctgcaaatatacttgaggaggttgtaatttaccactggcaaactcttcacctgctttgctaattccttaacacctgcttcctcttccttgctgagcagtttggcacatgacaaaaaatcttcatacttcgcataaggaataactggttctggaagttctcggaggtacagcttaagaagtgatgccaccgtgtgtacatctgtgttgctgtcaaatgatggcttctccccacagtcaaaggcatcttggagctccttaacaagattagcctggcctggcagtcgaaagagaccctcttctttcagccccctttgtcggataaagtccacgcactgctccaccaacatcggagccagacggttcccatatctcttctcataacgaacagtatcctccagtttctgtccaaaaatgcctcctccgaaaggtccccatatgactcggcggattgacttcacccagtcttccatatcattctgggtgcttgccatgaggaggtagctttcatgatttgctgtcatccgatctcgatcgcctcctggaactacttcaaaaaggaacttccctgggttctcttcattgcagggatgctcagaaactttatttccaggcagaaaaatagtacccaagggcttggtttcatcttcatctttgaaataatagagctgatcccccttgagcacaaaccagcgagtatgccaagtcttgacaaagcctccttgcttcctcagccacccacacttgatggcattctgccgcccttggccttgttgggggttctccgtggagtcattgttctcctccattatcaagctgatggactttccttgctgggagctcaagacagatgccggacagggctgctgctccgaaggaaaaggctcccaggaccagcagtaagaaaacgcaaagaaaaaaaggtggtagtgaggctcctttactttccacaacaaggggaagtgttgaactctatgcactgggctgctccgcagcgcgggtttcggaggaaataggcggccgagagagctgcgcctgcgatgggaagttggggggattcccccagccacccagccacccccgccaggctcctctctggtccccgccgcagccttgacagctcccctggtctc

SEQ ID NO: 92262 - DNA, 1203 bp, Homo sapiens
ggaaggattgcttgaggccaggaggttgagattacagtgagctatgattgcaccactgcactctagcctggacaacaagcaagaccctgtctcttggcagggggagagggggaatactgagaccatttttaacctatcaagatgacaaaaattaaaaaatataacaatgtattctgttggtgagacaggatatagtcggctgactgatgaccctgcaaaaagatatgtccatgtcctaatctctggaaactgtgaatgttacttaatttggaaagagggtctttgcagatgaaattaaattaagaagtttgagatgagtagttcatcctggattgtctgggtgggttgggtcctaaatccagtgacaagcaaccttaaaagagacacaaggagactggcagacagaggaagaagaggcagcaatgtgaccccggaggtggaaatctcagtgatggggccaggaatgtcaaggaatggtcaaggaatggctacagccaccagaaaaagaggcaaagagaggcttctcccctagaatctctacgagcgctccagccctgctgatgtctagatttttggagttctggcctccagaatgtgagagagtaaactattgtttaaagctaccaagtttgtggtaacttgttagagcagccacaggaatgaatgtacagggaatcaggcagtctcatacactgatggtgggaaaacaaaccggcacaacccttatggtgggaaatttgacaacatgtacaaaaactacctacacatttcccttgtgacccagccattccactgttaggaatctgccctgaagatacaactccacctattaaaaaatacagccattagaatggatgatgtttaccgctacttgctgacaaagaaaaatgttcacttgtgttaaatgagaaagacaggtctcagaacagcaacaatgttctagccgattctgttttttaatactcagtatatgtagaggagattaaagggatttatcgtgagatgctcatagggggcaactgttatttcagatttcttttttaaaatttttaattgacaagtaataattgtatatatttgtacaacaattgtatgtattgtatgtacaattgtatattgatgtatatatttgtacaataattgtataatttatatggtaaaatgtgatatttgtatgcataaatacatgatggaatgatcaaa

SEQ ID NO: 92263 - DNA, 422 bp, Homo sapiens
tgcttcccccaaccctcgacgacgaaaaggacttcggcccccggccgggcggctccgggggaaaaaagagagagcgaccgccgccccgcgctcagggccactctagagggagaagctgccccgaggctggcagagcgcccagccgcggtggagaccggaagccttctggagcccaaggctgtgcacgtcccctgtgctgattctctgcctaggaaaggaccatgcagctggagatcaaagtagccctgaacttcatcatcttctacttgtacaacaagctgctctggcgcctctgaaaaagaaataagaagcccactggtaccctgacaaaccactgaagggctctggcttccacaccgagagatggtggaccccgttggggagctggccgctaagcgaagtggcctgacagtggaagatgt

SEQ ID NO: 92264 - DNA, 472 bp, Homo sapiens
ccacgcgtccgggaatgccttggcactaggagccgatgaaagacgtgataagctgcgaaaagcttcggggaggtgcaaatagcctttgatccggagatatctgaatggggaaacctgcacgagagaacctcgtgtactgttaagtaaatacatagcttaacagagggaacgctgtgaactgaaacatctaagtagcagtaggagaagaaagaaaactcgattgccaaagtagcggcgagcgaaatggcaacaggccaaaccgaggaacctagttcttcggggttgaggactgcatcaagtgatggtagattgttagtcgaaatgttttgggaaagcatgccaaagatggtgaaagcccagtagacaaaaacgagaagcccgctgcagtatccagagtaccacgggacacgagaaaccctgtgggaagccggagggaccacccttttcaagcctaatactcctagtgaccgat

SEQ ID NO: 92265 - DNA, 723 bp, Homo sapiens
tttgcttcttgcttcatttattttcatcaccatagtgttccattgtataaatatgcagtaatttatttatgctctctttagttggtcgacagtcttgtttccggtattacggatggtgctcctcggaacacgcttgtatgtgtctcctggtgcacgagagtgggcaggcctccatgtatttatctcactgaaatttctggagcataggttatatacacatgttcaactttcctaggaaaagtgacactgttccaaataatgtggatcacattatactcccaccagcatggatgaggctcatattgcttcctatccttgccaacatttgacattgtccaactttaaaatttttgccaatctgatgggcaagaaattctccctcaccgcagttttaatttgcaacctcccctgattactagtgagagagaggttttttgttgtttatgtgcccacaataccgaactctgagagaaggctcatgtcaactttgtcctcaccaagacactaaacagggctggcacatgagcggtgctcaaaaaaatataaattgcacgaatgaaggaaccagagctaggcttctagttcttgcgttatccttcagtgcactttattgtggcgtttctcccaggtttcctgggggtacaatatttacgtcattctcaccgcatttcaccggcaggcacaaaccttttaaaaaactctgacaatgccttatttcctttt

SEQ ID NO: 92266 - DNA, 409 bp, Homo sapiens
agcccctcataaaatcgagatgaattaaaaaggagatattaccagagaatatgacattagaaagagaaggggattttctgaataacttcaccaataagttagagaatttgggcttaaaaatgagcaaattattagaaaaacatagattactaaaattgacacaagaagcagtaaatcagaatggtactatctttattaatgaaattgagcttattactaaaaacccaacaaaataaactccagaaccaaatgtgtttactggtgaattcttcccaacaaaggtagaagtgaaaaccttttatgttgtttataagggtagtaaacctgatacccaaaactaacattttttaataccaaaacccaacaggaaatataagagagaataataattacaagaaagaatactaat

SEQ ID NO: 92267 - DNA, 361 bp, Homo sapiens
gcggatgccttggctctcggaggcgatgaaggacgtgataagctgcgataagtcacggggaggtgcaaataacctttgatccgtgaatctccgaatgggacaacccgatatcctgaagggatatcaccttacatagtaaggagctaacgcagggaactgaaacatcttagtacctgcaggaaaagaaaataacaatgattcccccagtagtggcgagcgaacggggaagagcccaaaccacacatgttacggcatgtgtggggttgtaggaccacggcgttgcaggaaatcttgtgagaagaacagcctggaaagactgaccatagacggtgacagtccggtattcgaagcaagacgaagc

SEQ ID NO: 92268 - DNA, 449 bp, Homo sapiens
  misc_feature (1)...(449): n = a,t,c or g
tcgacccacgcgtccgggaagctcgggcaccctccctctccggggctcctgctcccacccctccggcccccccaccgtcgcgctcctccaggctgggcctgtggccgcggtgctttttaattttcccccagctcagaatcttgctgcttgagatgtttganagcaanaacacaacccaaacgatgtggaaggtgtcaaatctgctctacggtaagggaagaacgtatatctaggacctggcaaaaggagccagtacaggccaatcagaagatgacactgaaactacagatttggaaggcagagatcgcagcacagcgctaaaaagatgatgtgactccaggaaccaacgaagaccgctataagtttggctcgacaactatggtggaataaattgtcaacagagtaaaaggcattctcatcaaggatctgtcaacatcagaaaacacaga

SEQ ID NO: 92269 - DNA, 399 bp, Homo sapiens
cccacgcgtccggtaaagtttctcagctttcacgttattttcagtattgtgtaagctgaaccaattgagatgtctgtggtgttggctataatatctcttgttaattgtcaatcctcctcaattagggcatagaaacgatttttttttctcaaaaattggtatggatgtccctcctctgttgacttcatcttcaacattgtattatctcttcttagaataaggtatccatttgtaaatgactgattcttcaggtcatttttcccatagacttttcataaagaataatttatttcaccattttttgtaccccagcttcaccgtaaatttgatgtttgttcttgcttcaggtttgacagaattcatgttgctgccatagagggtctcttttcaaactgatgt

SEQ ID NO: 92270 - DNA, 854 bp, Homo sapiens
gccgggacgacccacgcgtccgcccacgcgtacgagataacctcgggccgatcgcacgccatgaagctgaccgacagcgtgttgcggagcttccgcgtcgctaaggtgttttgcgaaaactcggacaagattaactgcttcgatttcagccccaacggcgagacggtcatctcgagtagcgacgacgactccatcgtgctctatgactgccaggagggcaaaccaaagagaaccctgtacagtaagaaatatggtgtggacctcatcagatacactcatgcagcaaacacagttgtttacagctctaacaaaatagacgatactattcgttacttgtccttgcatgacaacaaatacatcagatactttcctggacatagcaaaagggtggtggccttgtccatgtcacctgtggatgacactttcatttctgggtctcttgataagaccattcgactctgggatctccggtctcctaactgccagggcctcatgcatctgcaggggaagccagtttgttcttttgatccagaagggttaattttcgctgcaggtgtcaactctgaaatggtcaagctttatgaccttcgttcttttgataaggggccatttgctacctttaagatgcagtacgatcgaacttgtgagtggacaggacttaaattcagcaatgatggcaagctcatcctcattttccaccaacggcagcttcattcgtctggattgatgcatttcaaagggagtggtgatgcacacatttggggggtttatggccaacagcaaagctttcacaatgggagggcttcatttactccagactctcagtttattatgatggtcagagatgcagatcc

SEQ ID NO: 92271 - DNA, 983 bp, Homo sapiens
cttcatgcgtctctgatgaaaatatttttggcagttaagcaaataaggaaggtagcctctagccatcagtgcttttacagttgtacactctaactccagggaaaggcaactgccttcaaagaaaggaagagatgtctggtgttggcttttaacataatggctttcccacgctgaaagtgatgcttttgacgcacgtgaaactgagaaggtcagaaaaaggcatgtatatatatactttttgtaatatacacacacatagtccttttgtttggtaatgtttagtaactagcaagtaataagagaattgctttcctcttgaatgctttggtgtagctaccaacaggaaagaaagtgggcgtgaggctagaggagaagcagaaagaggatgaaatgaggacttactgataaagcattctaagcattacacacataagtatgtgtgtaaaattaagcagattcccaatgcgttttcatggaagtaaaattcatctgtgaaaaccaagttcagaactcccactctaacatgtcaatgtcaacctcaactctccaagggttccacaattcctttcctcatcgcctcctagggaaaaaattctttgttttaatctgcctttgacagctatacaaattatgcgatgtgtatttcagcacatttgtgttcccagtgtacttggatcacatgatgaagggagagaaaacgcaggttaacggtgaaaggaaagagactggatcagtgcctctccttaggaccaccagcggcctgttcctcccggggccctgtccatctctacaggtacaaacttgagtttggtagtcagtcattccatgactgaaacgaatagaaggttttcggcctagaacggattgaccccttatgcccaccaatgggatatgttcccctgccttcccatgtatttactgcctggtcaagaatctttggcttttacccatgatccacggttttgcgttggggcgagactttc

SEQ ID NO: 92272 - DNA, 3314 bp, Homo sapiens
cggtaacgacaacaaccaggcggcgacaaagagtccccggaagggggcggcggccgctgcccgccttaatcgactgaagaagaaggagtacgtgatggggctggagagtcgagtccggggtctggcagccgagaaccaggagctgcgggccgagaatcgggagctgggcaaacgcgtacaggcactgcaggaggagagtcgctacctacgggcagtcttagccaacgagactggactggctcgcttgctgagccggctgagcggcgtgggactgcggctgaccacctcgctcttcagagactcgcccgccggtgaccacgactacgctctgccggtgggaaagcagaagcaggacctgctggaagaggacgactcggcgggaggagtctgtctccatgtggacaaggataaggtgtcggtggagttctgctcggcgtgcgcccggaaggcggtccgtcttctcttaaaattttcttttttaggtgatttccttcctgccaggctccgttgtaggggttacagaacagtcgttcccgcctcacaacctgtggatacagctgttggggcagaagagacgggaccagctgctggccacatttcctgctttattttaaaaggtagtataagaaatgaggaaaaagaggtaatatcagggcttctgctgttttttatttttaacatgttcataattaaaaagtattttccagcagtccaaagatgtaagttatcttacacataaaatgttttattttgttatttggttatgaaaatggaatccttgttcttgcacaactgtaaatgttttgttgctagataatacgatttgagacctgaattggtctttggtttccagtgcatcacagcatattttgtaaaatcatctactactggcacttgagcatgaatggggtagtagcccaactcacaaattggagtgatgaaccctgctttataccttaagggcaggagcaagccccttcacaaatgcagctgcatggggtttttaagtgcctactgaattatatatatatatacatatatatatatatatataaaccaaaagtagttggaaagattatttgaaatgactaatttgtgctatctttatgaaatatgttaaatgtagcttttttgaaacagaagccttgaattgaaatttaactaatacttgaacattttgtatatatttctttgtatataattttgtgcagtaccaatgacaaaaatatggtgtcataataaaaccaggtttgttgatcttttagttatgggctcaaagaatttattcatctctaacatgatattggaaaataatggatgaaaataggaaaaatgattgttaatgctgactgtgggtcttaaaaggttctggaaagcagtaagttcatttttctaaaaactataacattctgttggagtattttcttccttacgtcaatacttttcctgcattatttgaaattgtgggctggggagaaacagtagtcaaagctttctgaattgagatactttgaaattccaagtgtagatttttagaatgtcattttataaatggcagtttttggaattacttgataagaacttttgaaaatggaaggattagtatggcctatttttaaagctgctttgttaggttccttatgttttattaactgtcttttctcagtttccatttcattttttttttttctagttttggtgacttagggattttgtcattttttacatcaacttcatggtcttgtttttacatggtaattgcatgtacttaggatctatctaataggggctttaaataaatttggtcatatttatgtgtaagcacattttactgtaaatgtttgggtttctgaatttaaacagatctgtttatttcagtatgtagtaaacaatatcttaaagtgtccgattcactacttgttaattaaaaaagttatgattaatgtgaaactgttgtcttactatttttagaaaattgtgttctggatgattagcacatggataaaggagatttctggaatataaaatggattgtttttgaaatttctaggtttggctctatttactgtaatggttgaaaacaatttagtatttgggtgacccttttgtttttcttctaaatgtgcctctggtaaaatacagaactagactaaagatgtagctttttaatatttgtcttttgatggtggcaggagttcatacattaattgaactaacacatcatattttgacctactatttctatcatattgacttactgtttctgcacttctttgaccagacttatcttaaaaagtccacttttgttaaaatgtagtcacacctctgatataatccaacaagaagtgttcaaaatattttaaatatttgtgcattttataatcactaaattaatctctctctcttctctttgaacagcttagcagtgtctgcaaaaacgaatcttttcctacaacctgttaactgactggactgttggtaacaaagtaattgtgagaaccatgtcggtcaaaaatttggcatctgctgaaaaaaatgaatgccattttcaagttcccaaattacttctatactgatttcactttccagaaatggagatatgaaaagattctctggaatccttgaaagacttaatagagatacatgagactaagttaatcttggaacaaaattatactttttttgtctttcatgggagtgatactcagttattgcatatctttacaaaattgtaacctttggagaattacagtatttcatcaagaaattagagtttttacataatcaagagcatattctatggaattaacatttagtggactagaattacataagcaggccatcagtgatcacaaggcatatgagtttgtatttatttcctggaacatgagagctaatttggagtacagacagacaccctgctgagtagaatataaaagttaatgtaaagttctgaactataaagagtagtccttttaaatagatgcattgatttgtatatctttgaaaaagttgattatgattaaatgtgtgggtagttaattacaatttagggtaacaaccaggatgtatggattcttgaggttttggcttcttgagctttctcttgagtacttgatactgttttctgaatattttgaggtttctaattaatggtatgctagtttctactgttttatataaaaatttatctagtgttgtataaggactttagtattgtggatgatgggagaggctttttgtggcatatggttgttttaattgaaatattttttcagtttattacaagtgtgaaaaaacactcaaaaaaaaaa

SEQ ID NO: 92273 - DNA, 407 bp, Homo sapiens
agggggtcggggagaactcatataattatacaagtctttccgcgagggaaggataatggtacagatcttctgtttgctgcctgcacatgagtaattgcccctggtaatttctttgctctgaaggatctatctgcattaacagagccatgattacttgattttgttcatgttctcatggcctatctttctccatccttttatcttcagcctaattatatactaattacaggcgaaatgagtttctgaaacacagcgtgtattgggatcatgtttttgtatccattctgccaatatctttaaattgccatatacgtccatttacattatatgaaggtgctcggataacagggctcaatcctgccattttattttctggtgactgttgtttccctctgatctttaaaaca

SEQ ID NO: 92274 - DNA, 382 bp, Homo sapiens
ctgacacttggtgtgacacatgtggatttcaatttttttaagcagcatgataaatatactctacaagagaatattttaataatattttgctgtaacaagaagtcataaaaagaaccaagtagaaatgctatatatgaaaaatataaaagtagaatgttaaaaatgacagcaacaggatggctatttagagatgcccggtggtcattccccacctcctcgcctcaccacaccccaagaaaggcaatgactaaacagctaaggtttaactaacatcatattgaacagtgaaaagctgaacgctttttctctaagaactggaacaggacaaggatgcccactcttaaccactcttatttaacatagtactggaagtcctagccag

SEQ ID NO: 92275 - DNA, 388 bp, Homo sapiens
ggtcgacccacgcgtccggtaacctcaaatcaaaaaaacacacaatggatacacaaataataaaaagcaagaaattagaatcataccgtcagagaaaatcacattcactaaaaggaagactgaaaggaaggtaagaaggaagagaagactacaaaacaaccagaaaacaaatagcaaaacggaaagaataagtccctgcctatcaataataacattgattgtaaatggactctctaatcaaaagacatagaatggctaaatggatgaaaaaataagattccataatctgttgcctacaagaaacccacgtcacgtataaagacccacagactgaaaataaagggatggaaaaaaaaagacattccatgacaatgaaaactcaaaaaca

SEQ ID NO: 92276 - DNA, 350 bp, Homo sapiens
aattcctgccctggctcaggtttttagtcatgctgggcgttagctgctgggcggtccaccccttcggagcccccagctcaggtttttagccttgctgggccttcagctgctgggcggtccaccccttcggagcccccagctcaggtttttagccttgctgggccttcagctgctgggcggtccaccccttcggagcccccagctcaggtttttagccttgctgggccttcagctgctgggcggaccaccccttcggagcccccagctcaggtttttagccttgctgggccttcagctgctgggcgagccaccccttcggagcccccagctcaggtttttagccttgctgg

SEQ ID NO: 92277 - DNA, 784 bp, Homo sapiens
ccggctcgacgggaggcaggagatgactgtagctatgaggcttggactggttcgtgtctgccctggaagtgctgtgacaaacacacctctggggcacactcacactgatggtgatgggcagctatgcacaggaaatttggatgccactttgtttgcaaggcctgggacttcagtgttcacgttcggaggcctttgggaacaaacctttggggtacaggtcatgcagcagcatgcatcctggcatgcgcattgtctgtgtcatgagggacacaagccatcaagccagtcggcacatgtgcagagggtgcctctgctagtgggagtcctttgagaatgtggcgtccatattaggagggccacagggtggtggtgactgggccagggttttgtggtatcctaaggactgtgttatgggcatatggcggggacagagcacccttcaatgcccttacacccacactgctgaccaccgtgtcgcaattgtatccaacaggcaacgctcccttgtgcagggtccatcccatgtccccttttaggatggtcctctaattaagtcctgacgcttctggtttttgatgagggcccggggggggcaactgtgtattagaacataaggaaaagggcccccgtggacccagcgggtcttagttttataaaagggtatagggttggatagggggggacaccccaagggggatatgtgtcagagtgcgccccccccccccccctcccgttggaggggtgtaatgtattgtgagggagattgtctccccgctttatttct

SEQ ID NO: 92278 - DNA, 1505 bp, Homo sapiens
atagacccccgtccggagcagagcaccaagatcgttctggcaggaacagccagtgggaggttccagctgagcgctccccagagcatcatcagcatcatgctattacaatcccaaaccatgggggtttctcacagctttacaccaaagggcatcactatccctcaaagagagaaacctggacacatgtaccaaaacgaagattacctgcagaacgggctgccaacagaaaccaccgttcttgggtttggcattactggatccctctcaattatctctggaaaacaatcaactaagccctttgacctgagcagcttgacctcaaatgcagtgagttctgttactgcaggagcaggcctcttcctccttgctgacagcatggtagccctgaggactgcctctcaacattgtggctcagaaatggattatctatcctcattgccttattcggagtactattatccaatatatgaaatcaaagattgtctcctgaccagtgtcagtttaacaggtgtcctagtggtgatgctcatcttcactgtgctggagctcttattagctgcatacagttctgtcttttggtggaaacagctctactccaacaaccctgggagttcattttcctcgacccagtcacaagatcatatccaacaggtcaaaaagagttcttcacggtcttggatataagtaactcttggcctcagaggaaggaaaagcaactcaacactcatggtcaagtgtgattagactttcctgaaatctctgccattttagatactgtgaaacaaactaaaaaaaaaaaagcttttgttttgtatttgtttactatgagtcgttatttaatttctcttgaaaataatttcctcaaagcccaagtcagtaaaatgttatcagccagtcttccaaaatggtcataaactttataaactgctttgggtaaactgagcagaaggtgatacacagaagggaaaatgtgcactcatgctagtgtgaatttggtaagtcgcgtgactctgcaggctgtttctgtattattttcacactcatattgcttaaatattacatattagggattgtaagaaaactttaattaaaaattaaagactatatataattaaactactctgccctggacactctctgagaaacagatctactgggccctttttcatgagccattaggtggaagacagcaaagagatcttctcaagtgcttaggattacctctcaacacacagcaagcatgtccctgcctcccatgaatcttaccatgtaaatccaaatctctgcaatcctgtggcaccaaccagtggtgctcattctattggttaaaaatggccttcttggctgggcgcggtggctcactcctgtaatcccagcactttggtaggccgaggtggacggatcacccgaggtcaggagttgagaccagccggccaacaaggtgaaaccctgtctttctaaaaatacaaaaaattagccaggcctggtgtgcgcacctgtagttc

SEQ ID NO: 92279 - DNA, 766 bp, Homo sapiens
  misc_feature (1)...(766): n = a,t,c or g
tttcgtcttggtaagaaagatggtagcgatttatagttataatgacttgagtagataagcgctaatatccatgtgataaaggaaaggcaggaaatggacaaaggcatttagtgacctgcggatgaaatgaagtgccttctgtctgtacggctcctccagcattggcatgtactaacgaatgtgcccagcgaactggcattgagcacttctgtctcactatccagctgcatttttagcagctgttctgagactcacccttgcaggcttttggccaagcatcagccccatataaagaagagagatttgttgaggggggctccttgctgcactgatggcaatggcctacagatacagaaagaccggtctcagaaccattttgtagctaaggagacagatacagccattgtgaaacatcaagccatattattatagtgaaaagagacaaaaaaaaataggccaccactgggtgttttggaacatttgaataatcaagcaaaatggattaaattaactatcaagtaaaatnttctttgaaaaatcagttaccaatatggcaggaaataatattattctgaattccatggtttatgtggatccaaatatttgtaaaatctagtcattactaaatccataaataatgaataattttttttttggaatttcaaataaatttttcaaggaaaaggtaaaattatttctgggtgagattaaagtgaatattggaaaattatattttgggagagggtttctaacaaggccccggcct

SEQ ID NO: 92280 - DNA, 475 bp, Homo sapiens
gtacacggctcggaattcctgggtcgacgctttcgtctcggccgcggctctgtgcccttgctgctgagggctatttcctgttttattcctggaccgggagccgggctggggcttacacgggggctcccgcgtggccgtctcggcgcctgcgtgacctccccgccggcgggatgtggcgactacgtcgggccgctgtggcctggtaagtgcaggctctaatctggccccgttaattctggggcctcttgagagaggggctgtcttatctctatctccaaaaatgtgcaggtgactctcaggccaggccgacggcagttggagaattctcagatgttcttgaggacccagaatgacaggagccctggctgggcttacgtttggagccggcttcaatactggcccttttctctggccctacccaacccgaaaattctggacgcctctcaatcttggcccggctctattggccttttgc

SEQ ID NO: 92281 - DNA, 454 bp, Homo sapiens
tttcgtgggcagccaacaagggtactattcaatctgtacatcaaagtaattttgctagatgattaggctggaagcagtaggctcatgctcccttgcccagtttccagacatacgccagtttccagatctgaaactgaatgactgaaggagaggccagatccccaggaggaaggacctggcaatgctatggcagtacatagtaatggttccctcttccttcccacaaaggaacctacagtcatttacttcaagtaatatacactgggaaaagagaaatagccaaacatcatagactcttggacacaaggtcccagttgacaatgatacatgtagattcagcatcatctgccactcctcttagagggaggacatatggggtcaagtaataaatggagtcctaagatctagctcacagtgggcacactgggtccataacccacctagtgatcatttg

SEQ ID NO: 92282 - DNA, 781 bp, Homo sapiens
ttttttttttatttttaagtgagacaaagtttattaagaaagcaaaggaataaaagaatggctattccataggcagaggagcctctaatttctaattctgattgtttttcttaattttctttctgatgatactctcgattttaccatacaatattggccatttaataaagaagttcagggacagacaataaaatataaagtagagcaatgtgtctgatctccagcactgtcaacattttgagaagaacagttttttttttttgctgtggggatgtttcctttatattgtaggatgtttagcagcctctcttgcctctaaaacatttctcccaccttgttcagcacagagctcagaagggctgagggacccaccacagagtcatctaaggagtccagagaagaacacacccgtagaaaggccaggccaaaggactgatgacgcgtgaagggtcgggagcaggtcaggcgaagtcgatcccataactctcctgaggctggagccaggaaatcaactcaaggaaaaaagagaaacaaaatcaggggggaatggaaatgcataaatgggagagacagaggaagaaaaggtcaatactaaggaaaagagctatagagagtaacctccaacaaaagaaggaggtcttcagtaaatgtccccttaggcttgggtgttcagggtatggtaatgccaagcaggccagtcagggccttctcatattcagtctcttgccttctcatcactcctctgtcacagttccacacgaaatcgtcgacccgggaattc

SEQ ID NO: 92283 - DNA, 463 bp, Homo sapiens
cgaattccctggacgacgatttcgtggagagagcaggacctggaatgccacagaccccagatcattttctcttatataaggtgggcttcagagtttagcttgctctctaacctcagagtcaccaaggaggaatcaggaagcaatttcaccactcttctttctggcttgacctaggatgcctctctcctcctccctcctcagaacttctcccacctcctgggaattcctcccacctcctcagaactcctcccacatcctcagaactcctcctgcctcctcagaactcctcctacctcctcagaattcctccccctcctcaaaactccccccattagaattcctcccacctcctcagaactcctcccacctcctcagaactcctcccacctcctcagaactcctcctccctcctcagaattcctcctgcctcctcagaactcctcccccctcctcagaactcctg

SEQ ID NO: 92284 - DNA, 1844 bp, Homo sapiens
ccaagatgcggcggacgtgtccgttactcaccggcccccgctgagccctaagtctggggccgaagtcgaagccggcgatgccgcggagcgccgggcgctcggaagaagagctgccgcctctagatccagaagagatccggaaacgcctggaacacaccgagcgccagttccgtaaccgccgcaagatactgatccggggcctcccgggggacgtgaccaaccaggaagtacatgacctgctcagtgactatgagctcaaatactgttttgtggacaaatacaaagggacagccttcgtgaccctgctgaatggggagcaggccgaggccgcaatcaatgctttccaccagagccgcctgcgggagcgtgaactgtcggtgcagctgcagcccacggatgccctgctgtgtgtggccaacctgccccccagcctcacacagcagcagttcgaggagctggtgcggcccttcggcagcctggagcgctgcttcctggtctacagtgagcgcactggccaatccaagggctatggctttgctgagtacatgaagaaggactcggctgcccgtgccaagtcggacctgctgggcaagccgctgggaccacgcaccctctacgtgcactggacggatgccgggcaactgacgcctgcccttctccactcccgctgcctctgtgtggaccgcctgccacctggcttcaacgatgtggacgctctgtgccgggcgctgtcagctgtccacagccccaccttctgccagctggcgtgcggccaggatgggcagctgaagggcttcgcggtgctggagtatgagacggctgagatggcggaggaggcacagcagcaggcggacggcctgtccctggggggcagccacctgcgagtctccttctgcgcccctgggccccccggccgcagtatgctggccgctctcatcgctgcccaggccacggccctcaatcgggggaagggactcctccccgagcccaacatcctgcagctgctcaacaacctgggcccatccgcgtccctccagctgctgctcaaccccctgctccatggcagtgcgggggggaagcagggcctcctgggtgcccccccagccatgccgctgctcaatgggccagccctgtccacggcgctgttgcagctcgccctgcagacccagggccagaagaagcccggcatcctgggagactcacccctgggcgccctccagcctggggcccagccagccaaccccctcctcggggagctgcctgcaggtaacgcagaccctgcccacacggtgtcccccagccacttccccttccttccctgctacgtggcctcgggagggggcctgcccccggagctgccgccccggcgagggaagccaccacccctgctgccatccgtgcttggccctgctgggggtgaccgggaggccctgggcttgggtcccccagcggcccagctcactcctccccccgcccctgtggggctccgaggctctggcctcagaggcctccagaaagacagtgggcctctgccgacgccccctggggtctcactgctgggggagccccccaaggactaccggattcccctgaatccctacctgaacctacacagcctgctcccggccagcaacctggcgggtaaggaggcccggggctggggaggcgccgggagaagccgccgcccagctgagggccccccaactaaccccccagcccctggaggtggcagcagcagcagcaaagccttccagctcaagtcccgcctgctcagccccctcagcagcgcccgcctgccccccgaaccaggactgtctgacagctacagcttcgactacccctcg

SEQ ID NO: 92285 - DNA, 799 bp, Homo sapiens
tttcgtggaggagcagggtgtggattgatgggataagcgacactttatcagaaccgtctggctgtgcctggcagatagatgaggctctgacctgagtgagttaggggcagggttttaggagcaaatgtgggcccctacagtactgtgagattagggcaaagctgcctcctggaggttttttgtgtggggggcttcggcggggtgggcagcatgccttcattaaactgtggactgcacacatgtatcccctccgctggggcatgttcagttggtgcctgtgtggaggactcaggagggctcctctcactgcagttactgataaggggctggtgtgtggtttgagggcaggactgctctgagaacctgaagcctgctggcagcttttgctgagtttgtagttgcattttatgaagatgggccgtgagtgaccacagtgaatatagtgacaaaagcagtgggtatggtgggcaaggaggccagagtagctacttcctgaagcccagtgaggatggagatcccgcagggacagtgccctgtgggggctgggatggatgaacctttgaaatcggaactgcccccgaaagccagggatgtgcgtgtgctacagaaatacattgtttcagcgaaactgagcattctgtagctgtgctgtcacatcagattccagaaggacagtagagaaaaaatggaaaatatcttactaattttttatgttgatcatgtgtggataatattttggatatattgggtcaaagaaaatgttattaaaattaattttacgtattcctttttataaggg

SEQ ID NO: 92286 - DNA, 424 bp, Homo sapiens
  misc_feature (1)...(424): n = a,t,c or g
aattccacgttcgacgatttcgtgtnaaagaagaatgttctgtcgtatctcgcagcttacgcttatgatatcagagcccgagtctgatggcgaggctggaatcgaggcggtgggcagcgcggctgacgagaaaggcggattggtatctgatgcctatggggaggatgacttttctcgtctagggggtgatgaagatgttcaaatcacttgcaaaatcacgtcaccctccgtgccagacaaccagacaacaagctccagcctgtaaggacgactccagcaacccgccaggcagagacaaacggcgcacagcatacagtgccaattgtgcctcctctttagaccctcctgatggtggaaaccatgacattcgagcaaacattttagttcatcttgagtagtagaactgatcttatggcccaggaga

SEQ ID NO: 92287 - DNA, 745 bp, Homo sapiens
gatcaccgcctggcagggacgccagcacgggctcccagccacagggcagctcccaccctgcgaactccagctcttcccaggccgctccagaggccaggctgcacaaacaccttggctagtctccccacctggcacaggccctgttcactccaaccactgccttctctgagcacacaccaagttggagcccacagccaagcagcgggcggccacgggggattcctgcctcctgagtcctcaactctcttggcccggagctcacaccggcatttcagattttctccttccccctgttacccccgccttgccaaccacctccctgtggacctaaagccaccaccttccgggcacaccgtagttcctttttcgtctctacctcccccagggtgaggccgccagggtccccatcgatcatcgatccaactcgaccgccccccaaagtccaggccacgggtctagccacctcccagatgtcctggccgccgctccccctcacctgctcttcctctctggtcccccaagtcatccctccagtggccgacttggggaatcaccgtttagggccccgccgcagccgtcagaccctcggctgcgcctcccgcccccaactttgcagacgcgcggggagagaggcggggctgcagcgcctccgcgcttgcgcctgcgcactcggcgctgccgggctgaagtcccgccttctggaggcttcgtcgcgctgctactggggcacgccgatgagcgagcg

SEQ ID NO: 92288 - DNA, 892 bp, Homo sapiens
tttcgtgccgaggtgcatctgctgatgcccggccctcctgccccttgccttgccaggatgctggcggaaaagtactcagtgtccctgcagaccatcccgccggtccatccagctccccgccagcccaacagctctccttcctgcgcagtggcctcctgaacatcctctacctgcacatgcctgactgcccggagtccctgctccagtggctgttccagctgctgacatggcctccagaaacatctttgggagcctttggtcttctgtgggatctcattgtggatggaatcttccttcagcctgatgaagacaagcacctgtggtgcccctcactgcaagaagtcagggatgcattccacagcctgggtgcccacagtcctgccctgtaccctctggggcccttttggcacggtggcagggtgcttccaggcgaggctggcctgaatgagaatgaggagcaggacgctccccaagagattgccttggacatcagcctgggccccatctacaagtttctggcgctgtgtgcccaggcccagccgggggcctacactgacgaaaacctcatgggactgattgagctgctgtgccgcaccacactggacgtggggctccgcctgctgcccaaagttgacctccagcagcttctcctcttggtcctggagaacatacggaggggccaaggaagctccacgaactgtgctgcaccctgaggctggtgactgacccccaaccacacctgctgggcctcgtgcagttctttcccagacaagaactccccggagcaggggggtttcaaggccagctaaaaacctggggcatagcctccaaagggcgggcccgggggaaaaacctccctctgaggggccccacaataaacccgccggccccc

SEQ ID NO: 92289 - DNA, 351 bp, Homo sapiens
ttttttttttttatggagaacctgtctctacaaaaaattttattaaaatattagccagacatgggggcacatgcctgttgtctcaactactcaggaggctgaaataggaggatggcttgagcctgggagggggagggcgcagtgagccatgattgcgccattgcactccagcctgacagacaggaaactcctgaaatgcccctcgcacgtgcaagacgttttccgcggtggcggcgacagggcgcacagtgggaccgcagcacgagctcggagcacccccagagtcggggactcctgcccccgcccctgccggccggccttcccggggcctaggagaacagcaccgccggg

SEQ ID NO: 92290 - DNA, 581 bp, Homo sapiens
ctataaatatctacacacacacacacacacacacaaataaataaataacagaacttagtgaaacagtgtaattattagagaaaaagtatgtgcatatacatgagaatggtgtccctacagaaaatcaaagtacatgaaacaatatgcaaataaaacatgaaaactgtaaacaaatttcaaactgagctaaaaagaatttaaaaaataacaaatcattagaaatgggaaatttctgaatgagggtaactgaaaaaaaggaagacatgacacaactaaggagtaattagaaatgcaaggaaaaaatcccatcaaatacaaagaaactaaaactaaactagaagaaacataaaggtgaataaaacagaacaataataccagaacctgaaggcagaagaaaaatcttaaaatcaaaaagaaacaaacccatgcttgagactctccttgctggtccagagccacagtgctgctgtgtactggcaggaggaattctgctataattggtcctggcagtgttcacctttcctgcaagtgttccacagcccagggacacaatgtggtcaggagcactgccaggaacacca

SEQ ID NO: 92291 - DNA, 473 bp, Homo sapiens
  misc_feature (1)...(473): n = a,t,c or g
gtgtgcgnnnnnctgggtatctaagtggaccaggggtgcgtagatggactggggacatctgggtggatgaggaatgctgggtggactcggggtgtccagacattgagggatctgggtggataaggagtgctgggtggactcggggtgtctagacattgagggatctgggtggataaggagtgctgggtggactcggggtgtccagacattgagggatctggattctggagacctccaggaaaaaaggatggagctgctgggggaagctttaaatggggagttgcttgggagatttcaggagcacacagcgggcaggatctttctacccacccctgaacatgagaccattctcccatggtatggaggaatagaggggatagcagagggcaggtgggggaaacagtcctcaggccggccttgggacctcatggccaggaaggatgagagcaggtaaacagagcatcagctgcagg

SEQ ID NO: 92292 - DNA, 910 bp, Homo sapiens
gcggccgcggctcccgagctcctcgggctctgggtcccggcgcccctccggccgcgagtcccacgcgccacccccgggcgccctcgacggtggatctagcggcggcgaggaggcgggtcccggccccggcgaaccccagtcccggcccccggccccgggcccagcttcggcatggatgtgaggttctaccccgcggcggccggggaccctgccagcctggacttcgcgcagtgcctggggtactacggctacagcaagtttggaaataataataactatatgaatatggctgaggcgaacaatgcgttcttcgctgccagtgagcagacattccacacaccaagccttggggacgaggaattcgaaattccaccaatcacgcctcctccagagtcagaccctgccctaggcatgccggatgtactgctaccctttcaagccctcagcgatccattgccttcccagggaagtgaattcacaccccagtttccccctcaaagcctggacctcccttccattacaatctcaagaaatctcgtggaacaagatggcgtgcttcatagcagtgggttgcatatggatcagagccacacacaagtgtcccagtaccggcaggatccctccctgatcatgcggtccatcgtccacatgacctgatgctgcgcgttctggggtcatgcctcctgcccagctcaccaccatcaaccagtctcagctcagcgcccagttggggttgaatttgggaggtgccagtatgcctcacacatctccttcacctccagcaagcaaatcagccactccctccccttccagctccatcaatgaagaggatgctgatgaagccaacagagccattggagagaaaagagctgctccagactctggcaagaagcccaagactccaaaaaaa

SEQ ID NO: 92293 - DNA, 420 bp, Homo sapiens
  misc_feature (1)...(420): n = a,t,c or g
aatgtcagacttcctaatatttcctactaagatgagtatgaaatgatatctcaatgtggtctagatctgcctttttctgatcagtgaagaaactgaccatcccttctatttagtttgtttttgttttgcctttagccacatgttccttcttaagcaaaatgcctctttgtatcttttggtaatttttttcaattgagtgattggtcttctcattacttcataacaattctttatatattctcaatactattcttttgtcagatgtgtttgttgtgaaaatatttgcccagtttatcacttgcttctcaccttattgagggtgtcatttgaataagtttcataattttaagtatttgaattaaatttttatttaatttttattgttagctttacttgaggcctatttagccaatccttacn

SEQ ID NO: 92294 - DNA, 451 bp, Homo sapiens
tccagtgtggtggaattccagaaggacccagccatgattagaagcttaacacattcagctctaccccctatcctctcagaaggggagaggggctccaggttgagttaataatccatcatgcctacaggatgaagcctcctccataaaaatccctgaactggcagtagctgccaaactggaataggagaagctgggcctggaggagctgagagagttcttgccactgttggtgttggcgagtggcagggagccaggacttgagggttggggtgtgttgtgatgccagagctggcggtgcagaaggtggtggtctaccccctgttgcttctcagtgtggtggatcacttcagctaatttggtgaggttggaaaccagaagcatgttggtgtgctattggggtcatggcaaaagaaaatacttgatatgtccaagagttttcagtcccttttta

SEQ ID NO: 92295 - DNA, 456 bp, Homo sapiens
ttcgtaaatgaaaggtggtaggtcagaggtgaggtcagagggagacaggacacaaatgaccaaaatcaggattgaaagatcattcaccactacaaatcctacgacatttaaacagtagaaagagaatattatgagaaacattataggagcaaattcaccaacttgcaagacacaattaccaaaacatgacatgagaatagggaatctgaatacttctgtacttttttaagaaattgaatttgtaattaagaatttttccacaaagaaagctctgagcagatagcttcactagtgagttcagtcagccatttaaggaagaaatattatcatttctactccaactgtttcagaaaatagagagcatacttccagactcatggtttgaggccaggccagcattaccttcctaccaaatacaaaaatagttaatgaaagatatatacagacaagcatccc

SEQ ID NO: 92296 - DNA, 456 bp, Homo sapiens
gtcatcacagcaacatgaattctgctaaagttgaagcaagaacaaatatcgaatttatggtgaagcttggtggaagaatagtgaaatcattgatgctttatgaaaagtttatggagacaatgtccccaaagaaatcaacagtttacaaatggatcactcattttaagaagggacaagacaacgtcaaagcccattgcagcagatcaatttgcgaggaaaaatttaatcttgtttatgccctaaatgaagaagaccgatgattaatagcagaaacaatagccaacatcatcgatatctcagttggttcagcttattcaattccgactgaaaaattgaagtttaacaaacttcctactgatgagtgtcaaaaccattgcactcagattagctgcagacaagaacagagctttcagtggaaattgtaaacaagtgggatcaagattctgaagcatgtct

SEQ ID NO: 92297 - DNA, 434 bp, Homo sapiens
  misc_feature (1)...(434): n = a,t,c or g
ccccttcacattataatcacgagaaatacttgagctttgaaaagttttctagacagngncattattttgaaagattgactagcgttatttttctctttgtatgtaaattttcgtttcatgattatcaatggttttgatatttagcctagctaaccattgcatttgtgaccattgaattgctcagagcaaatttatcattaattgtgatatcagtttgacatagatttcttacatgtttcaaaataggatattgattgggtacagacagagaagcatgtgtttgagcaggcatccaatcatcctttccttgttgggctgcattcttgctttcagacagaaagcaggtaagattgaaagatagtagaatgattactgggcttcatatttttggtcatattacacagttagaacctttctgccctaattcatgaagg

SEQ ID NO: 92298 - DNA, 404 bp, Homo sapiens
  misc_feature (1)...(404): n = a,t,c or g
cggacgcgtgggctgttggttagaatatatagatctgtcccatgcttaagaggagaggaacacaaagaacgggaatattangaggtggggataataggagctgccctagtgtctggatgccacaatattccgggccttgaaacaataaaccacattcttttgaaatgcacatggtacgttaatcaagatagaccatgtgtgggtccataggacaagtttcagaggttttcaaaagattgaaatcatatagaggatgttctttgagaacagtggaattcaattggaaaccaataatattaagatctagaaaaactgcagatatttggaatttaattagtatacttctaaataatctatatgtcaaagaagaaaacattttgaactgaatgaaaatgaaaatacag

SEQ ID NO: 92299 - DNA, 3457 bp, Homo sapiens; identical to SEQ ID NO: 63366

SEQ ID NO: 92300 - DNA, 926 bp, Homo sapiens; identical to SEQ ID NO: 63399

SEQ ID NO: 92301 - DNA, 377 bp, Homo sapiens
cccctgtggagtaattcggcatcaaatgaccctgtgcctcacctctgaggaaaccaaagctttttgtccctgctacactttgcccaatccgtgtgaaagactactttttggccgtacttgatcactgaagaatgaactggacacaggatgaaatcaacttcctctacaacagtggaccttttttatttatgagacagggttttgctctgttgcccaggctggagtgcagtgccgtgatcacagctcactgcatccttgacctcctgggctcaagcgatcctcctgccccaccctcctgagtacttgggattacaggacagcgctaccatgcctgcctaattatctatctttatgtacagaccgtcccacagcgtgtt

SEQ ID NO: 92302 - DNA, 760 bp, Homo sapiens
gccgtggaattccgccggttgagttcagatggaagagaacagtaagaaggaccatcgggctttgctcatccagggagaggaggatgaactggaggtgtttggttaccgggaccacaatgtacggaaagccttctgccttgtcgcatccgtgctgacctgtgggggccttctgctggtgttctactggagaccccagtggagagtgtgggccaactgcatcccatgccccttgcaagaagcagacactgttttgctgaggacaacagacgaatttcaaagatatatgaggaagaaggtattctgcctctacttatacacactgaagtttcctgtaagcaagaagtgggaagaatccctggtggctgaccgccactctgtcataaaccaagccttaataaagccagaattaaaactgcggtgcatggaagtgcagaaaatcaggtatgtttggaacgacctggagaagcggcttcagaaagttgggttgctagaagacagcaattcctgctctgacatccatcagacatttggattgggtctgaccagtgaagagcaagaggtcagaagattagtgtgtgggcccaacgccattgaggttgaaatccaacccatatggaagctgcttgttaaacaggttttaaatccattctatgtgttccaagccttcaccctaactttgtggctgtctcaggttacatagaatactctgcggccttcatcattttgactgctgtctccattggcttaagttgggatgacg

SEQ ID NO: 92303 - DNA, 981 bp, Homo sapiens
cgtagtcccgtgtggtggaattcggaacagggaagaaacctaaaggctgcaggctgccaggtgtgcttggagagcccccttcttccgccgggcctcgcaagcagcgtaggactgtggagaagggcggtgggcaaggagggaactcgagagcagcctccatgggcacacaggagggctggtgcctgctgctctgcctggctctatctggagcagcagaaaccaagccccacccagcagaggggcagtggcgggcagtggacgtggtcctagactgcttcctggcgaaggacggtgcgcaccgtggagctctcgccagcagtgaggacagggcaagggcctcccttgtgctgaagcaggtgccagtgctggacgatggctccctggaggacttcaccgatttccaagggggcacactggcccaagatgacccacctattatctttgaggcctcagtggacctggtccagattccccaggccgaggccttgctccatgctgactgcagtgggaaggaggtgacctgtgagatctcccgctactttctccagatgacagagaccactgttaagacagcagcttggttcatggccaacatgcaggtctctggagggggacctagcatctccttggtgatgaagactcccagggtcgccaagaatgaggcgctctggcacccgacgctgaacttgccactgagcccccaggggactgtgcgaactgcagtggagttccaggtgatgacacagacccaatccctgagcttcctgctggggtcctcagcctccttggactgtggcttctccatggcaccgggcttggacctcatcagtgtggagtggcgactgcagcacaagggcaggggacgaggggacctacatttgccagatcaccacctctctgtaccgagctcagcagatcatccagctcaacaaccaagccagtttaatggtaggaatttgtattttttgcctttgttcagaa

SEQ ID NO: 92304 - DNA, 394 bp, Homo sapiens
  misc_feature (1)...(394): n = a,t,c or g
ctcaccatggcctggacccctctcctcctccagcttctcaccctctgctcaggtgactgcctgtggaatgccaaaggtcctgggcacagtctgcgctgacccaggaagcctcgatgtcagggaccgtgggacagaaggtcaccctctcctgtagtgggtacagcaacaacgttgggagtgatactgtggcctggcacggacagatttttcatggtgctcccaaaagagtgatgtttggaaattccctgtcttcggggatgcctgaccggttctctgcctcaaattctgggacctcagtctccctcactctctcgggcctctagcctgaggacgacggngattattgctattcatcttgcgtccacagccttcaagctcaagggttcgggggagg

SEQ ID NO: 92305 - DNA, 421 bp, Homo sapiens
tgcccctttctgcagcgtggtggaattccaaaaccattctaggagaacacctgttatttccacaaaatgataaataaaaagtagaagctattacgtctcttttttcagagcaaagaactgcagacctgggcctagtctatttacatgactgtctgggggtacctgctgcagtcaccagggatgggtggcagcttggtcagcagcgaatagcctgcagcattctcctgtggttataaaggatttacccctcaatcccaaacctttcctcaagggattaacagaaaagccagtgacagtgaaacttaagtggcgaatggattacaaaggctaactggtatctgtagatgaaccacatctacagatgtatctataagaacatgtagcttgcaaatacagaagaatacatagttggggtattgtc

SEQ ID NO: 92306 - DNA, 430 bp, Homo sapiens
ctctagtgtggtggaattcggagacgcgtcccactgtcgtattgaggtggcctcagggtgaagaatcaggacccacctggtgcaacgaataaacccagactctcagcatcgcgaggagaaaaagacttgcaacaccgaggcgacacaagtaactctgtgcacatactaaagtctcaaaactcaggcacggcccctggagttcccagtacatcaacatcagcctgtggatcatgtcctcatcaaaagctggaaggaggagaaactctaaccaccctgggaaggaccttacctggtgctcctaacactgaaaccacattccagatagcagaaaaaggatggacccatctcaccccagtcaagaaagcatcaccacctccggagtcatgggccgttatcccaggggaaaaccctaccaaactaacgctaagaa

SEQ ID NO: 92307 - DNA, 1792 bp, Homo sapiens
cgcgagtgactgccccgcctgcccctagcggtccctggcgtcccggttcctgtcgcgctcacctgcgccggtagcgaagaaatcgccccgggacatggactcagtggtctttgaggatgtggctgtggacttcaccctggaggagtgggctttgctggattctgctcagagggacctctacagagatgtgatgctggagacctttcagaacctggcctcagtagatgatgaaactcaatttaaggccagtgggtcagtttctcagcaggatatttatggagagaaaatacccaaggaatctaaaatagccacgttcaccagaaatgtttcctgggcctctgttttaggaaaaatttgggacagtcttagcatcgaagatcaaaccacaaaccaggggagaaatctcagtagaaatcatggggtggagagactctgtgaaagtaatgatcaatgtggagaagccctcagccagattccacatcttaatctgtacaagaaaattccacctggagtaaaacagtatgaatacaacacgtacggaaaagtcttcatgcatcgccgcacatccctcaagagtcccatcacagttcacactggacacaaaccatatcagtgccaggaatgtgggcaggcctacagttgtcgttcacacctaagaatgcatgtgagaacccacaatggagagagaccctatgtgtgtaaattatgtgggaaaacctttcctcgtacttcctccctcaatcggcatgtaaggattcacactgctgagaaaacctacgaatgtaagcaatgtgggaaagcctttattgacttctcaagtcttactagtcatctcagaagtcacaccagagaggaagccatataagtgtaaggaatgtggggaaagctttcagttattcctcaacgtttcgaagacacacaataacacacactggcgagaagccatataaatgtaaggaatgtgcggaagcctttagttattcctcaacttttcgaagacatatgatttcacacactggagagaagccacataaatgtaaagaatgtggggaggccttcagttattcttcggcttttcgaagacacatgataacacacactggagagaaaccctacgaatgcaaacaatgtgggaaaaccttcatttatctccagtcctttcgaagacatgaaaggattcacactggagagaaaccctacgaatgcaaacagtgtgggaagaccttcatttatccccagtcctttcgaagacatgaaaggactcatggtggagagaaaccctatgaatgcaaccagtgcgggaaagcattcagtcacccctcctcctttcgaggacacatgagggtgcacactggagagaaaccctatgagtgcaagcaatgtgggaaaactttcaattggcccatatctttacgaaaacatatgagaacacatactagagagaaaccctatgaatgtaagcagtgtgggaaagccttcagcttgtctgcttgctttcgagaacatgtgagaatgcaccctgaagacaaatcctatgaatgcaagctatgtgggaaagctttctattgccacatatccttacaaaaacatatgagaaggcataccgcagagaaactctataaatgcaagcagtgtgggaaagctttcagttggcctgaacttttgcaacaacatgtgagaacgcacactgtagagaagccctatgaatgtaaggaatgtgggaaggtcttcaaatggccatcatctttaccaatacatatgagactgcacactggagagaaaccttatcaat

SEQ ID NO: 92308 - DNA, 539 bp, Homo sapiens
tcgtgtctatccacgcatccgaacacaagccaggtgagtcttcatgctggtgtttaaaagtttcctccacatcagtatagccacgctgatgtctactctgttgaagccaggtgcgcagtgatctactgactaatggattctccaattgttaagcctatgttacaggacaaaggccgtcgctttgtaaaagcttgaagtgcagtttgctgctgagtacagaagacctttgcaaacagagaggggagattttctctgtaaggttgcaaacaagagcaggtcctggaagataagattccccgccatgttatcctccgtggtgttttggggactaattgccctcattggcacttccaggggctcataccccttcagtcactcaatgaagcctcacctacatccacgcctgtaccacggctgctatggggacatcatgaccatgaagacctctggggccacttgtgatgcaaacagtgtgatgaactgcgggattcgcggtctgaatgtttgtgagatgatttaggccatacaacttacagatc

SEQ ID NO: 92309 - DNA, 390 bp, Homo sapiens
gggcttcagagccaaacaaaccttgatcaaatcccagctccgcatctccctggcatggaacttggacgagttctttcctccctgggccgtgtcgtcctcatgggtaaagtggaaataataacagttcccaaagcaccagttattgtgagggttaaaggcagcagtcacaacaaagaatgagctcagagcctgcatgcgttccataaatgcaagtattccataaatgccctctgtgctgctgtctccccagctcctagaagtgtggcggctggaagcctccatcccctccaccctaggaatgtgaagggcccgcctcggtggcagtgtagggtcgggggaaagctggtgggcttcctgacctggatccactgctcctttcagagacaaggg

SEQ ID NO: 92310 - DNA, 1210 bp, Homo sapiens
ttaaataatgagaattagttcatgttaggagtgcatggatctatgattccacccaacactcccccctcaagatcttacggggtagatgccattcgaagcaaagggagtgtgatggttgatcctggtataacatcaggagctttaaatcccaaaaatgtggggttgctcatcttggcccagtagtttgccgctgttgctaagtttgggaacattcgtggtgacagctccccaataatggggtggcaaagtacacccccaaactcaaaatatttccccaatgcctttttaaccattgttttttttctcctcaaagactgggatctcagacacaatggcccgtagagcaatggagccatccatgcactgatctagaaacattctcacagcattaataggttgtcatctgtgctttcttggcaactaacttgacttgcgtacgttgtgtagaggggattcaaagtctccaaatagaaatgtgaacattaattctccaacccacggtcttgagctgatccaacctatggctgattctgcattgcagctgattagcagatcagcactctcaccatgtgaaagtcttccaatagatgccatcattgccttgaatcgtctctgaacttggagactgctggtgcaaatcttatcacttgatccagccgcaacgcctatcaaaaggtcacagcagtggcggagaactgatgacttctcaagggcaataaagttaggcatatctttgaatctgctagcataaggagtacccctttcctcgttctcattcccaaccacagtattagacctcttgctcacaccaacactcagtaatgcctggtgtaacccatcaaatatgaaacacaagaatactaaacttggggtcacagggtggaaatgagatttatgtgctgggtctagcatagacttggctgcttttttaatgtccttaatatccccaatgctgggttggggttccaatgcatccagtggatactgtcttgtttttcccagatagctcaaatcttccttgaaggtcagggagcccactcctgtccattgcgtcatctcctgggctgctggcctgtgagtcctttcttagatgagacattgtgggaaattggttccgacttaattctttaattttgttaagaatcataggtctaaaagatcttttgtaagatctgtcacagacccaaacaaaaagactgtgagaattaac

SEQ ID NO: 92311 - DNA, 1417 bp, Homo sapiens
atgggagcacccaagcccctgcgcgggaagatgccgattggtcagtgccgccggacgctgcggggagctcgtgcgcgcggcgcttttggggcggagcctgccaccggccgccagggggcgcgccgagaccacactttcatggaggcggtgaaggcggaagcgtgggagggggccgcggtggcccaggacctgctggctctggggtatggaggtgtcccgggggcggcgtcgcggggcgcctcatgcccagacttcagggggctgtgcgtgcggctggcggcggagctggcgacgctgggcgccctcgagcagcagcgagaggcgggcgcggaggtgctgagcgccggcgacggccctggcgcggaggaggactttctgcggcagctcggcagcctgctgcgggagctgcactgcccggatcgcgcgctctgcggcggggatggcgcggctgcgcttcgggaacccggtgccggactgcgcctgctgcgctttctctgctcagagctccaagccacccgcctcctgtgcctccgctctctgctggatccgagtcctaggccaccccttggtgaaggggtagtggagggagccggcatggtccaagaactggaccttaccctccaagccctggggctgcccagacctgcaccagggacccccgccagccagctgctgcaggagttgcatgctaagatctcagagctgcagccttctctgcccccagggtccctgcagcccctcctcagctgctcgctagatgcacccagatgggaagcgttggagtctctgtcccaaagcctcagagatcagtaccgctgccgccgctgcctcctcctcaagcgccttgacctcactacatctgctttccactggagtgaccgggcagaggcccaaggagaggccatgagggcagtgctgatcccaattcgagaggttctgaccccagaatcggacatctccattgcacacgttctggctgcccgagccgacctgtcttgtctcgtcccagccaccagcgtggctgtccgcagagggacctgctgtgccatcaacaaggtgccttatgggcaacgttccagacccgggggggccgccccaaatgagctggagcctcccatgcccacctggaggagccgaagagaggatggaggcccccagtgttggggtcgcaagaagaagaagaagaagtaaagggggactggtggtcgggggcggggggtcctccatgagatgctaatgctatcggtaatctctggggagtccgtttaaggctttccttggtatttggcacccaagccccccatctcctattcctgagtccccaaatgccctgctcccattcacgtcaataccaagaaccatgttctccagagaataaatttaatttatgacaaaaaaaaaaaaaagtcgacgcggc

SEQ ID NO: 92312 - DNA, 3876 bp, Homo sapiens
gattctccggcacccgatgtgaggaggatatcgatgagtgcagaagctctccctgtgccaatggtgggcagtgccaggaccagcctggagccttccactgcaagtgtctcccaggtggtcagtgtgttccctcttcccctcttccctatggctgcaagagtcctccagtgccagtgctgacgaggttcttcctggaggtgggcaccctctcacccatcccccagcagtcaccacccctggcaccaggcccgaagcagctccatgggcagagccgtctttccctggaggccgtctctatttgggcacagaatgtgatggctggtagccccaattactcctttttctctgatccaggagaaaagtttaagagtagaaagccagaagatgtgtgcgtgttgggtggagtaaactccacaaacacatacaactgggtaaccgtcatccagatcaagaaacaagacacctttagcaccccagaagccccccccccccatgcccataatagtcactaccccctcaagagtatgcacattcaagccagcctgcctacatgcctggttctcctggtgctgctgagcacagccagagcaggccccttctcttcacggtccaatgtgacactgccagccccccggccccctccccagccagggggccacacagtgggggctggagtgggaagcccctcttctcagctttacgagcacacagtggaaggaggggagaagcaggtggtattcacccaccgcattaacctgcccccttccactggctgtggctgtcccccaggcaccgagcccccagtccttgcttcagaggtacaggccctgagggtccgtctagagatcctggaggagttggtgaaggggctcaaggaacagtgcactgggggatgttgtcctgcctctgcccaagctggcacaggtgagcaggtgatcacagaagagggtggagaggtggggtggggtgggcattgctagtccataaaggtccttggtatgaattagaagaaggcactccttcctcaccgtgaggggtgtggatgcagcccagaacacaacttggagagcagagctgggctacatgtcaaccaaagcatatgcgagggccctgagaggctgcatacattacacatactagcaactgggagcagacatggccttatgagatgaggctagcctggctaggggcctgacactaggagcactacataggctcagcctctctcccaggagagagactgagacttgcctctcccctcctactccaggtcagacagatgtgcggaccctctgcagtctccatggtgtgtttgatctgagccgctgcacctgttcctgtgagccaggctggggtgggcccacctgctcagaccccacagatgctgagatccctccctcttccccaccctcagcctcggggtcctgcccagatgactgcaatgatcagggtcgctgtgtccgtggtcgttgcgtgtgctttcccggctacactggccccagctgtggctggccatcctgtcccggggactgccaaggccgtgggcgctgcgtgcagggcgtgtgtgtgtgccgggcaggcttctcaggccccgactgcagccagcgctcctgccctcgaggttgcagccagaggggacgctgtgagggtgggcgctgcgtgtgtgacccaggctacactggtgacgactgtggcatgaggagctgccctcgcggttgcagtcagagggggcgctgtgagaatgggcgctgcgtgtgtaaccccggctacactggcgaggactgtggggtgaggagctgccctcggggctgcagccagcggggacgctgcaaggacgggcgctgcgtgtgtgaccccggctacactggcgaggactgtggtacgcggagctgcccctgggactgtggcgagggcgggcgctgcgtggacggccgctgcgtgtgctggcccgggtacacaggcgaggactgcagcacgcggacatgtccgagggactgccggggccgcgggcgctgcgaggacggcgaatgcatttgcgacacgggctacagcggggacgactgcggcgtgcgcagctgccctggcgactgcaaccaaaggggccgctgcgaggacggccgctgcgtgtgctggccggggtacactggaaccgattgcggctcgcgcgcctgcccacgcgactgtagaggtcgcgggcgctgcgagaacggcgtgtgtgtttgcaatgcgggctacagcggcgaggactgcggtgtgcgcagctgtcctggggactgtcgtggccggggccgctgtgagagtggccgctgcatgtgttggccggggtacacaggccgggactgcggcacgcgcgcctgtcctggcgactgtcgcgggcgcgggcgctgcgtggatggccgctgcgtgtgcaacccgggcttcaccggtgaggactgtgggagccgtcgctgtcccggggactgccgtgggcacggcctttgcgaggatggcgtgtgcgtgtgtgacgcaggctactcaggggaagactgcagcacgcgcagctgccccgggggctgccgaggccgcggccagtgcctagatgggcggtgtgtgtgcgaggacggctactctggcgaggattgcggtgtgaggcagtgcccgaatgactgcagccagcacggcgtgtgccaggacggtgtgtgcatctgttgggaaggctacgtgagtgaggactgcagcatccgcacctgcccctccaactgccacgggaggggccgctgtgaggaagggcgctgcctgtgcgacccaggctacaccggccctacctgtgccacccgcatgtgcccggctgactgccggggacgtgggcggtgtgtgcaaggagtgtgcctgtgccacgtgggctatggcggtgaggactgcgggcaggaagagcctccagccagcgcctgccctggaggctgcgggccccgggaactgtgccgggcaggccagtgtgtgtgtgtagagggcttccgaggccctgactgtgccatccagacatgcccaggggactgccgtggccgaggagagtgtcacgatggcagctgtgtctgcaaagatgggtatgctggcgaagactgcggagaaggtgtgccaaccattgagggcatgaggatgcatctcttggaggagacaacagttcggacagagtggaccccggctcctggccccgtggatgcctatgaaattcagttcatccccacggtggagggggcgagccccccattcacagcacgggttccaagctctgcctcagcctatgaccagagaggactggcccctggacaggagtaccaggtcactgtccgagcccttcgagggaccagctggggccttcctgcctccaagaccatcaccaccagtgtcgatgggccccaggacctccgagtggtggctgtgacaccgacaacactggagcttggctggctgcgtccccaggctgaggtggaccgatttgtggtgtcctacgtcagtgccggcaaccagagggtgaggctggaagtgccccctgaagcagacgggacgctgctgactgacctgatgccaggcgtagaatatgtggtgactgtcacagcggagcggggccgggcagtcagctacccagctgctgtcagggccaacacaggtatggctggccagaggttagggaagggccctggtttcccagccttggatcctcctcctcaggagcccaggctcagggctcacagactcctctgaatgcttctggcaggtgtgtggcagtctcgaggcacctgctgggggccttgctctgtcctgaggccactggggagacagagccctcagatgcctggagtccagggaattccaacaggctgtcaatatggtcgtcat

SEQ ID NO: 92313 - DNA, 2326 bp, Homo sapiens
  misc_feature (1)...(2326): n = a,t,c or g
ttttacttgtggtgtgggaaatttaacatggccaactcctaagcactaaaaaccagcagcaccaacactcagggactgtgaccttcacaacccacccagtgacttccaaatgctccttaggagaacagcacagctcagctgggtcactggtttgactgcttgctggcttgcaaccaacacaaagctccagattctgcatctgggagcctgatggcaggtgggtgggggatgggaaaggagctctagtgagtgtggccaaaacaagctcttcttcactgtccagagcttctctcttcaacgatccagccccagaacaacccagggtgcccgtgcccgcagcagagtgcagctggctgcagcctcagcctcacagggctgctcctcaactgtgctccacaaagacatccaccagctcctggcacaagcgacagaacctgtgcctgtgggtgcaggggaagctggcatgggagcactcctctggcagctccttgtggggcacaggcaggaagctgaggtcagggggagggggctcagcaggtagtatctgtcattgccagtgacacacttgccctcaaccgagaagagctccgcctcatcgttgcactggttgagcatgcagtggcacagggtcttgagcagttaactcatgctccagcagatccaggcaacacgatgggggccacaccaccatcttacaaagtcagtggagccatagatgacactctgctcctggtcccactccaggatgccagggatgaggactggaacctgacccagtagctgcggtcatccacctctgctgtgtccagcgtgtacagaccctccatgtccgctgccttgtgcgggtgctcaccgttcaggtcattggtgaatgctatggaggctgccacatccctggcaaagtccttgtagtggccactaatgacaaagcccaggctgaagatgatgcggctccacatgaacatctgcagcttggtctcctcactgggactgatggccatgacgatgcctccctgactaccatggcgccccatgtggctgccattctgaagttgctgtgtacctgggagggaccaaggctgggagggtgagagccatgcccacaaaacctcaggctacatccacctggtccagctcgccaagatgggagaggcaaccaggcctgccttgggagccagagacccttgcctcagtttccttatatttagagaagggcaagaaaatcatttctacaaaaaagtaaacacttatgcttaaagaggcacagagtttagtggctaccaaggagtatgagggctgcggcaggtttgggatcccccagctatgtgccaggcaaaccagggcaggtaacttcagacccagttttttgtttatgcaacgatgatgatggaaagtattgccattttcaaggggtccaaaagattataggaaataatgcttataaagcccttggaatcatcctggtaaagttagtacccaagaaattttggctgttactttttccatgttacacagtaagtttaggagagannnnnnnnnnnnnnnaacaattattttttcctcatttctctcagtaaccgcactaatgacttttaagtgccagcaagctgcaagtgctgccaatgagcccctgccctagaagggctacagttgggcaccatgtgctcaggggagggccccatggcaagtcagtggagggtgggaaagctggatggcccctggcaactcagccccagatagcaaggagggccttctcctcccaaggactcaaagtctcagaggccggagaaaggtgggggatggtctcccaggaaagcagaaatgctaagaaggccttgcagggcaaacctgaccgggccttcagggcacctgaacagggcttgggacttgccggcttccctcacttctctcccgagcacaagaaaaccttccaagcaggagccaaggtgggcttgaggctggtggaggcttgttactcactttaccaggggatttcaggcaccttgaacatggctttttcttgaagcagctgctcaggttggttcttgttgggtaggtccctcatcatctgcagctcctcgttccagtactggggcaatctcaggacgctgccacaggctccttcttcatcgaggccctcacctgctctgggttctcctggccctgagatgctgccctgaaaggcgagtcagaagcacatgggcgctgcttcagggctgctctagccagagctggttcacagctccctagagggagacttgggcactgggggcccggggacaatttctttgggcagaagcactgagtttgggctagccctcgtgcc

SEQ ID NO: 92314 - DNA, 414 bp, Homo sapiens
  misc_feature (1)...(414): n = a,t,c or g
tacttccccaagagcgagaaccagccccccaaggctcagccccctaatctgcatctcatgaacctgcagaacatgatggcggagcagactccctctcggcctcccaacctcccaggccagcagggcgtccagcgggggctcaacatgtccatgtgccaccctggacagatgtccttgctgggcaggacaggcgtgcccccacagcaggggatggtgccccatggcctgcaccagggggtcatgtcccctccacaaggcctcatgacccagcagaatttcatgctgatgaagcagcggggcgtggggggcgaggtctacagccagccgccccacatgctctccccgcagggctccctcatgggccccccgccccagcagaacctcatggtgtcccacccccttctgcagcgcagn

SEQ ID NO: 92315 - DNA, 390 bp, Homo sapiens
aatgatgaaagacaatgctttccttataaaatcaggaaaaagaaaagattgccactcacaaccgccaacgttttattgcaggtcctaaccagtgcaacaaggcaagaaaaaagatataaaatacaaaaattggaaagataaaagtaaccattcttaggtgacatatttgcttacatagaaaatactagggaatgaacaaaaaaactgctagaactaataagtttagtaagttatgaggatataaggtaaatttacaaaaactttatttctatatattaacagcaaacaattgaaaacaatgacaattttaaaaaacagttgcatttaccatagcatcaaaaggcatacttacttaggaaaacagttaacaaaaaatgtgcagaacctttg

SEQ ID NO: 92316 - DNA, 424 bp, Homo sapiens
cccacgcgtccgcccacgcgtccgcccacgcgtccggctaggcataaaatcaagaaggataggaagacatgaaaacctcggaaaactataaatcaaagacacctaacagatatctattcagtactttacccaacaacagcagaatacccattcttctcaagcacacacggaacattctgtaggacagaccatatggtaggccacaaggaaagcttcaatgaattgaaaaggatttaaataatataaagtatgtcttctgatcagaaataacagaagaaaatttaggaaattcataaatatatggaaattaaagaacacatttctaaataactaatgggtcaaataataaatcacaagggaaattaggaaatgttttgaaatgaataaacacaaaatacagaatactaacatttatatgatacaa

SEQ ID NO: 92317 - DNA, 444 bp, Homo sapiens
ccgggtcgacccacgcgtccgttggacttcattaaagcctagtatcagcatatacctttaagaggtatattcttaactataaaaggaaagtcaaagatgggagaagatattgcaacacatatagctaacaaacgactcatatccagaatgcagaaagagctacaataagaaaaagatgatgcaattttaaattgggcaaaatatttgataaatagttagcaaaagaggatatcaaaacagccagtgaacatttgaaaaggtacccaatatcactgcttatcagaagtggaatgtaaaaccgcaatgagataccactacatacacacactgtaatgactagcatttgaaagactgccagtaccaagtattggaaaggacattgaacaactggaactctcacacattgttagtgggagtgtaaattgatacaattatcttgggaag

SEQ ID NO: 92318 - DNA, 3077 bp, Homo sapiens
gcctctcccagccgcacatgggccagagcccctgctggcagaagacagggcctggggaaggtgaggctccctgacccgtccttgtccgaggccagaggcagccctgctcccacctgggcccagcctcacctcattcaagcatagggtggatggcacccaggtcaggacacctgggagggctgcccaagcccaggggttgttgaggggcccttgttccccagagcgagggccactccttcttcatctccctccacccagcccttctacccatgggctgagcccaagaaacacacttcatcttttattttttcttacaaaaggccttcatatcatcgtttgtcttacaaaaaccaaagtccttgtctctgagtttgaaaaacatcttcccagaataaatgggaaaggatctcttataaatatatatatatgttaaaaaagcaaaacatgttcataaagcatcttcctttccagtttcttttgttccttcgcttcctggggccaagactagagtcacacagccgcctacccgctctccctctgctctttccgggagcttccttcactggcccccagggtccgcctggagtgggagagcccagcagggcccaggcatgcgttaccagcacatggcagggcccgccgtgcccagggactgcacgttgcggagggcagggcggacactgtcctcataggcactcggttctggggacgttagggctcgtcagctgggccacagcatctcacagatgaggagaccgaggtccagagggaacagggcccagctgtggtcacacagccctgtctgcacacatccccgaggttgggactgagaacttacgtggtgtggcagcaggagggggctggccatctcactggctgagagcccggccccagctgccctgtctctctctggcttagatgtagggctttgcgtggaggggtgactggaggccaggccctgggaagcccatgagtggcacctcacactcagacccgctgggcagggcctctccaccgccctctgttgccttcgggcctggctccaaggggaccttcactccctccagttccaggggcccagcccctggccccacctgccctttgtcctgagccgctgctgccatggcccgcccccgccgcacacagtaggctgcccccaccgcagccagcgcggccaggagcaccgcggccagggcgggcgcaatgaggagcggcaggttgccctcgcgggcctgggtgactggggcgtggttggagtggacggctgggggtgtatgggcctccccgcaggcctcctcgccctccggcacccgcccgggccccaaaggcatgacacagacggagtaagtggcgttgggccgcagctgggtgaccgtgtactcagcgagcgaggcaggcagtcgcagcgtcaccagccgcttatcagggcccgataggttgcgataggtgagacggaggctcctgagctgcacggagctcccctggaggtagcgctgcagccccacgcgcagggaggtggggctcaccggctcgatgcccagggtcagggaccgtggtggcctcggcgtgactggtgtagggctgggccgtgtcccctgccccatctggctctcacagtacaggcccgtgaagccttcggggcacaagcacgccaggtggtgccgtgtccccaggtggcatgtgcccccattgaggcaggtggacggtgggcagtcctggggctgggggacaggccctacagtcggtggggcagtggagggcgggctgggggcctcagtggccggctctgtggggctaagccaggtaggagccaagctagaagacaaggctgtgggctcccgcaccacgggcctcgtggtgggcactgtggctgtggtggtggtggctgggcagccaaagtcggcgtagtcaagctccaggagcagccggccagcgttcttgggcgggaagtggcagcgcgtctcctcagggctggccagtgtaacgtggctctcgcgcacccaggggccaaaccagctcagggggcacacgcagttgaaggggttgcgggcagctgccagcagccgcaggcgggggaagaggcccgagaggtcgccaggcagggcctgcaggcttaggttgctcacatccagctcctgcagggcagccaggccggccaggtcctcgggccgcagctgggcaatgcgggtgttgccggccagccgcaggcgcgtcaggccccggaggcctcggatcacaggtggcactcgctccagctggttgtcggacacatccaggtcgtggaggttgcgcaagcggctgaagagcccctcgtccagctgctgcagccccagaccagccagccgcagcgcctccacgttggcagtgtccaggatgccgggctccagggccaggaggctgttgtggctgaggtccagcagcagcaggcggggcaggcgcagcgggggcagtgcccgcagctcgttgtcctgcagcttgagctccaggaggcggtcgagcgtgtcgaaggcaccaggctggatgtggcggatgcggttcttgcccaggtagaggcgctcgaggcgccgcaggccacggaaggtctcattggtgatttcatgcagcctgttggctgtcaggtccaggttgctgaggttggcgagtggctggaagaccccgctgggcaggctggcgatctggttctgtgacaggtccaggagctgcaggcccggcaggccggcaaagctgcctgcgtcgagcatggtgatgccgttctcaaagacgtacagccccaccgtgtcgggtggcacgtctcggggcaccgtggtcccctggcgggcagtgcagaagactgtctgtggctggctgcactggcagccggatgggcagccctgcaccccaggccccagggccagtagcaggagcagcggcagcagcagagggaccctggagcacatcttctgtcccgggaggcggcggcggcgcagggagccgggcggggcaggccgcggcctcagtctttcctggcgggtcgggcccgagggggtcctgggtcccgaagcaactgcgttcgagtccgcgtccacccgccccgggct

SEQ ID NO: 92319 - DNA, 612 bp, Homo sapiens
attaatttgtttcagaatattaattttgtatccagaaatagtttatcgtattctcttgtcagtttttgggttttcctgggaaagtttcttatctgagtttttatgctttttatttctcccatctaatatgaaataacaatgctaagcaattgtgataataatggatatctttgtcttgttgctgtccttcgtgggaatacttctgtagtctccccactagtcagcataatctggtatttggtattagttttttgttttttaaaactcatgtaaaggagatagccatatgatttttcttctttgagcattaatgctgaattatatcagcagaattgttaatgttggtgttggactggatttatgcaaaaaatctcacttggacatggcttattcctataatgcactggtaattttggctgctactttttttttgaatcggggattttcatatctgcattcaattattgcagttttcgcgagtgtttgagcaccagcattagctcattttcggacttcccattacagctcttctttcttttgggccattacatcccatggaggcggggccactggcttatgcccgcatcccacccttttggaggcccagcaact

SEQ ID NO: 92320 - DNA, 939 bp, Homo sapiens
tcccggtccgacccacgcgtccgaaaaacccagcccagtttatggcttgtttttcagcaaccctgagatgcttgacagccctagagcctgtttggttagaaggccgtcttattctcaatatgcattttattacccaatctgctcccgacattaaataaatctccaaaaattggattctggccctgaaaccccacaacaggacttaattaacctcaccttcaaggtgcacaataataaagaagagttgcaattacttgcctctgctgcgagagaaatcccagccatatctccagcacacaagaacttcaaaacgcctaagccagagtggtcaggcattccttcaggtcctcctcccccaggatcttgcttcaagtgctagaaatctggccactgggccaaggaatgcctgcagcccaggattcctcctaggccgtgtcccatctgtgtgggaccccactggaaatcggactgtccaacttgcccgggagctgttcccagagcccctggaactctgccccaaggctctctgactgactccttcccagatcttctcagcttagtggctgaagactgatgctgcctgatggcctcggaagcctcctggaccatcacagacactttgggtaactcttacagtggagggtaagtccgtccccttcttaatacagaggctacccactccacattaccttcttttcaagggcctgtttcccttgcctccataactgttgtgggtattgacggccaggcttctaaacctcttaaaactccccaactctggtgccaacttggacaatattcttttatgcactactttttagttattcccacctgcccagttcccttattaggttgaggcattttaactaaattatctgctttcctgactattcctaggctacagccacacctcattgccgccctttcccccagttcaaa

SEQ ID NO: 92321 - DNA, 405 bp, Homo sapiens
cgccggtgggcgcctaatatcaggtggagcacccgacacccattgagcgccaaccgtagtaccccgggcgggcccttatttgctccgacaacatgaaagaaacagacgtgaaccagcaaaaactcgccaaactgtaggcacaagtgcgcattgatgggaaaggaactgctacgaaagagaatatagcggttcatataacaggcacggcagatgacaaaaaacttcagttttccttaaagaaggtaggggaaaacagatatatctggtattgaataggcgaatatgtttacaaaccatggaacagtgattcactttaacaaccctaaagctcatgcatgtctggcagggaacactttaaccattacaggccatgctgagacaaatcaactgacagacatgctatcc

SEQ ID NO: 92322 - DNA, 633 bp, Homo sapiens
  misc_feature (1)...(633): n = a,t,c or g
tttatccttattggatgggtggaatctgatgggtagaaaggaaaagggtgtttcaggcaagaaattgggatactggcttataatgtcatacatggacactgtgacaggatttgtgaatgcctgaatcaccaggctcataggacacacagtctctgggggagcttatactggtggctggtctcaaacgaagtgtgctgagacttactggcttcattctcagggcccacctccctaacaattctcaagtggctactatatgctgtctgtagcatacagaagggaactaggacagccagttctgctggcaccagatggtggtggatttggttgtttaccttaanagttacattccagctggttgttgtggtgcacacctgccagcgcaggaagaacacttgcacaccagcaagttcaaagctaccctggggcgacccatgaagaaccctgtgctgacagagaagaaacgtcccagtgggatccattcagcgcaagcgttcccatgattgcccacggacgcgcgcggtcacacgccgcagagagccacgagtcgactttaggggcgagcaccgagggacggagggaaccacccctcgggtgtgacgccggccaggacgagaccagttctaggggacg

SEQ ID NO: 92323 - DNA, 692 bp, Homo sapiens
  misc_feature (1)...(692): n = a,t,c or g
ctttgagagtcagaagaaaaaaaccaagcacacacccccaacataaaaccatgaagaaattccagtttttatttcttatatttccccaggttcttggctcaaggaagatgtataattgtcttcagcataaactgaagttaatgaagtatgggactgtacttcattaaaaagaaacattttaaaagctcttgttcttaatttttattcaaatttctcaatcttctttggctaagtagccaagagttagatctattcgccatgagccaaatgactgcccttggatgttcaagatggaactccgttgaagtctgcaggggttgtgttcattagaattcccaggggttgtgtgttaccaagcccttgtcataaggtatatcaaattccctcatccctgaaatggaagtatcgttctggctgtcgtgctgccttctccgtatcttatttgttttcactttaatgttacaagaaaagacagcttttgtctttatttctggttagcagtcctcatgaatatgcattagcaggttccctttctagctactgttttgtaatttgctatttttaaatgaaatctgaagtgaaaataactcccaattctcactttaatatgtgtggattcttaatcttgattnttgaggtcctgagccagacaggagtgactttagaaggtgtgtgcctaggcacacccaaag

SEQ ID NO: 92324 - DNA, 1210 bp, Homo sapiens
  misc_feature (1)...(1210): n = a,t,c or g
ttactagcatcaagctgctcaccggctcctcctacaaggttgaggtgaagattaaacccagcatcatgggaataggtggcatggttgtcattaaaactggggaaaggcacacacagaaggaaccaaattctgggaatgcatcatggctcagccaaaaatattgctggggtcttgtctgggcacagatcttactctgcacacttgatttccctgtgccccttggggtgcaaaactggggtcctttagctgtgctagaggctagaatgagaatttcttggtgtgagcccatttaaaataatcatttattttacaatttaagcagctttttaacagcgtataaaaaaatgtatgaaagtaatttgtgctcaatggagaaaacctgggtaatatagagaagcacgaagggggaaatatgcctttcattcagaaagaacattttgacatgttactgagtttcaccaatttaagtttcatttctgttcttccttgatccagcccacagaatctgattgcccagtctcagtctggcactggtaaaacagctgcctttgtcttagccatgctcagccgagtggagccatcaaacagatacccccaggtgagggcttgcggggctgggtgtcctaggttgcctgccctggggagcgcagtgccatctggtgaggagtaacgagaggtctgaagcttctgacaccttaagctgtggctcaggcagagcaagttcctacaccaggccctgacctgggagaatgtgcttgaaagcagcagccttaaaccatggcttgcaaaggcctctgccaagccagggctacctgctgcaggcttcagtctatggctgaaaggtaggccagggtgggaggacatgcttccctgtgctattcaagggctaataacatcagcatactgggtgccttcaggtctgataccaaacggctctcctaaacgcatcctttatgatttttctggcagnagctgtgcctctccccaacatatgagctggggcttccaacaggaaaaagggttggtgcttgttgggcaaancttaccccaaaaggaagagttggcttttccgtgtgggggcgataaattggggtgggagggggaaaaattgaaaagggaacaccgcccggggggtgggcgtttaaatttttaaaaaacaaaacaccacatttctttttttgtatggcggcccccttgcccccataggtgt

SEQ ID NO: 92325 - DNA, 879 bp, Homo sapiens
  misc_feature (1)...(879): n = a,t,c or g
tacaccgccccgtatttcccgggtcaacccacgcgcccgtctttgattctgtcctctgcaccctttcatcatgaccttatcttgctgaatccaccatttccttccttctttctggtttctttcccttctctctgctccctttttgcattctttttcaccttcccaccctcagctgctcctccctttccaattagtgcattccctcatctccagattgtttcttttgagtcttcctctccttggcctctttgagcctatttatcatagctttcttagtctttacgctagcgggtgagcttatcctctcctttacgcattcttgtgtgtaattttgagcccaattccctatttgctacttcactgggctcctgaagcctgctccccattccttttggcgcatctagttctgcaaatcctctagctgtggcccccctgctgtctttggcaggaagcttggaagggggtggggacttctaggccacaaagccctgggaaattaagcagagcctctggatctcccttcctgacagctggacacagttctggcgataattggaccaccttanggatagagatgccccttgtccctccccatcccagaaatgccaaacacatagttttaacatctctcttcaaacagacaggtttttaggctggatggtggatgaattcgtttgatgcccccttcaccaatagatagagcaatatacggtggacccctagtgtccagaataaattaccgcatcccccaggggctggaaggcatcactcaaaatgggcggggcccccctaccaacgccgagaaagcaccttagcgacggacatccgaaccgctatgacgacgaccgaaaaggcccggcccgccccctgaccctcccc

SEQ ID NO: 92326 - DNA, 782 bp, Homo sapiens
cgacttcaggagcctgtgaggccacccaagatgacaggggcactctgctcagcaggagcctgtccggggctcacccctgccctcttcctttgaactttgtcctgggagggagggggctggaccacagaagtgaacctctcaggtcccaataactagagctattattgggaacagccccctccagccccctccctctcatggaggccttcagacaagcgcctcagtcggccccctggcttcaagatacatcaaggtccctgctacccgagccaaggacacctctcccacagtgcttccccaccctgctcccaacaagactccttctcacgggtggtcttgcacagctggagcccatagtgcagcaggtgctggctgaagagcccctggctccacactgccccactcctgaccagggtgatgcactggaggagggcttggacctcagctcctccctcagtgctcccgaccacttccagggactatccccaagctggccagcactcctgcgccccaagaggagtgtttggggtgcttcctcttggctgcagtgggacacaggtgtgccttcctaggaactgggccctgactacttccagcccaacactcccgggcctgtgaactgtgacctgtgtgccgggatgggttttgtgggtctgccccatccccgcactgctggatctggccaagtgggtgaaggctaaggccggtcagagttgagtttctgccttgtcccctctcctgggctagatgccacaccaggcccagtgactcatagggcaggg

SEQ ID NO: 92327 - DNA, 860 bp, Homo sapiens; identical to SEQ ID NO: 63271

SEQ ID NO: 92328 - DNA, 723 bp, Homo sapiens
tatgcccccgctgcaggaattcggcacgaggcacaacggttttggcacccatcgagtggaaagcttgctcaacttcaattttgaaccagttgagatgtctgtggtcttggctattgttctgttaatcgtcagtcctctttaatcagagcatgaacaagatcaatattttccttgcaaattgatgtggatggtctgccactgtggtcttcatctccaatgttgtcttgatccttcttaaaacgaggtatctatgtgtatactgctgacttctttagggcactgtcctcatacactttttgtaaagcatcatgattttcaccattcttccacccaaggttcactatagatttgatgcttgtttttgcttcagtttttgcagaattcatgttctgctaggagcccttttcaaactgattcttactgcctcaaactagatctattcaggcatgttctaacaagttagtatgagtttattttggagcaaaagaattttgaaatgcatgcatagttttgtcataatatgcattttccatgaactttttgaagaccactcctgcaataataaaacattgaacttcatttaaagctaaaattcccttctcttccacttctgactatgaggcagcaactgctatcagaccaaacctttcccaagaactatcaaggccatataaaatatatttttaaaaagagctttttgcatcctggctaaaacagagaaat

SEQ ID NO: 92329 - DNA, 993 bp, Homo sapiens
atcaaaataggcaaaggctgttgggaagggcaaattttttaacgccctgttttggctttgcctccgacaataaaagataaccccatcctacgaatatcaagaccaacttccatttccgcaataaaatcaccaaactccgttgccccggtaaacaacagcccagttcccattgcaaagtctgaagcccaacatggtgatgattctgctgcttgataaattttcaggtattcgtcagccgtaagtcttgatctccttacctctgattttgctgcgcgagtggcagcgacatggtttgttgttatatggccttcagctattgcctctcggaatgcatcgctcagtgttgatctgattaacttggctgacgccgccttgccctcgtctatgtatccattgagcattgccgcaatttcttttgtggtgatgtcttcaagtggagcatcaggcagacccctccttattgctttaattttgctcatgtaatttatgagtgtcttctgcttgattcctctgctggccaggattttttcgtagcgatcaagccatgaatgtaaccgtaacggaattatcactgttgattctcgctgtcagaggcttgtgtttgtgtcctgaaaataactcaatgttggcctgtatagcttctagtgattgcgattcgcctgtctctgcctaatccaaactctttaacccgtcccttggggtcccctggtaagcaagtaaatatcccattgtttccttaataataaaaggttaagggggtaaaatcccggcgctcatgacttcggccttccttccccatttctggatcctcttcaaaaaggccacctgttactgggtcgatttaagtcaacctttaccgctggattcgtgggaacaggatactctcttccatccttaaccggaggtggagaatatcctgcattcccgaacccatcgacgaactgtttcaaggcttcttggacgtcgctggcgtgcgttccactcctgaagtgt

SEQ ID NO: 92330 - DNA, 2077 bp, Homo sapiens
gcaatgcttaggccagcttggcacgagggccaggcctctggggcaggtgcctaccgcttgctgcagttcctggtggacacagctatgcctgcttcggtcattaccacccagggcctggctgtgccagacaccgcgcgtgaggcttgtgaccggctaatccagctgctgctgctgcacctgcaaaaactggttcatcaccggggagggtctcctggggaaggggtgctaggcccgcccccacctccccgcttggtgccctttttagatgcgctcaaaaaccatgttggagagctgtgtggagagacgttacgattggaacggaagcgcttcctctggcagcaccagctcttgggcctgctgtctgtctatacccggcctagctgtggacctgaggccttgggccatctgctgagccgagcccgaagccctgaagagttgagtttggccacccagttatatgcagggctagtggtcagcctctctggcctcctgcccctggctttccgaagctgtctggctcgggtgcatgcagggacattacagcctcccttcacggcccggttcctgcgcaacttggcactgctagtagggtgggaacagcagggtggcgagggccctgcagccctaggggcgcactttggggaatctgcctcagcccatctgtctgacctggctcctctcctgctacatcctgaggaggaagtagctgaagctgctgcctctctcctggccatttgtccctttccttctgaagccttatccccctcccagctcctgggactggtaagggctggggtgcaccgcttctttgcctctctgaggctgcatggacccccaggtgtggcctcagcctgtcagcttctcacccgcctgtctcagacatccccagctgggctcaaggctgtcctgcagctgctggttgaaggagccttacatcgaggcaacacagaactgtttggtgggcaagtagatggggacaatgagactctctcagttgtttcagcttctttggcttctgcctccctgttggacactaaccggaggcacactgcagctgtgccaggtcctggagggatttggtcagttttccatgctggagtcatcggccgtggcttaaagccacccaagtttgtccagtcacgaaatcagcaggaagtgatctataacacccagagcctcctcagcctcctggttcactgctgcagtgccccagggggcactgaatgtggggaatgctggggggcacccatcttgagtccagaggcagccaaagcagtggcagtgaccttggtggagagtgtgtgtcccgatgcagctggtgcagagctggcctggccccccgaggaacacgcccgggccaccgtggagcgggatctccgcattggccggcgcttccgcgaacagcccctgctctttgagctgttaaagctggtagcagctgcacccccagccctgtgctactgttccgtgctgcttcgggggctgctggccgccctcttgggccattgggaagcctctcgccaccctgacacgacccactccccctggcacctggaggcatcctgcaccttagtggctgtcatggctgagggaagcctcctgcctccggccctgggtaatatgcatgaagtatttagccaactggcacctttcgaggtgcgtctgctgctgctcagtgtctggggttttctccgggagcatgggcccttgcctcagaagttcatcttccaatcagagcggggtcgcttcattcgggacttctccagggagggtggaggtgagggtggaccccatctggctgtgctgcacagtgtcctccaccgcaacatcgaccgcctaggtcttttctctggccgtttccaggcaccttcaccgtccactctccttcgacaggggacgtagccttttcttgctctggaagcccagggaggttgagcagtgagagagggaagggactaacgtgctccggaagggtggaggtttctcttctaagtccttggtctaaagagcgctgtcacttttttctctcccacttttttttttctaaataaaatttgccaacttgagaaaaaaaaaa

SEQ ID NO: 92331 - DNA, 806 bp, Homo sapiens
gccggcggaattcccagggggcttggctccccgcggcacgggatttagcgttcgcgctccttcccttcccgtggtcgagccgacaccagagcctggtccgctgttctcagctgtttgccgtctgcgcaggacctcataggtgggcctgggaaacgcagtccattgtctctcctggccaagtgcactgccacagtcctggctttcacatggtggcctcaggatgctgtcatcccaggggcctcaggaaggcctctcttgagacatggagaggtcctgacctgagggctgcatcaagatcttgtcattccacatcgtggtttcctttgaggatgtggctgtacccctctcccaggaggagtgggactgtctgatccctgctcagaggggcctctacaaggatgtgatgatggggacctatgggaacctactctcattagcaggacttcaagcttccaaacctgatgtcatctccaggctggagcggggggactaaccatcacacccctcacatcctgagaactcaggggagctggagctggaggcacaagagagaaggctgtgattctaggattgaaaaagaggaaatgattccaaagcaggacatttctgaagaattggaatcccagagagcaaaatcagaagatcatgtaaggaatatttttaaggaaactgaagagatgagtaaaactgagggaaagttagagaattgctggagaaaatatgcagtagaaggagttaagaactcattcttccagaagagcaatttcagagaaattaccatgaggtatgtgaaaaccctctctaaa

SEQ ID NO: 92332 - DNA, 448 bp, Homo sapiens
gccaagcttggcacgaggcaactgagacgctgtcactagggtttttcaaataggtagagaatcttaaatatccagtaatgatgacaacctcacttactgggagcttactcgtggggctaaggaggatgcgtgatgatcccatttttattgtcacagctaccgaaggaagataccctcatcaacccaattttacaaatggagaaatagaagctcagggaagaatctgaagtagtctcaaaggaagtgacaggaaggatgtggagaaagctgagtgtcaaagtcagtattcaggaccggctttactgctacttagagatgaatgaagaaatcagagggaacgcagtgtgctgatgctaaagcggctgtcaccacccagctgtgtgacataggacatcttctttctctgtctcacttgaataatatgatgtgtcagaggagacatgattgt

SEQ ID NO: 92333 - DNA, 745 bp, Homo sapiens
  misc_feature (1)...(745): n = a,t,c or g
ggcgatttgaaaaattttctcccattctgcgagttgtctttttacttttttgataaagttcaatttattggttttttcttttgtttcttgggcttcgggtgttgtatccaagaaaccattaatttagtgttgctttaattcagtgttttgaagatttactcctatgtttccttctacgagttgtgtagttttagctctgaacttaggtatttgatctgttttgaattgatttttgtgtgttgtgtgaggtaggggtccaactttattttttcctcagggagtttcctaagcaatgggtgcttagcaaggcagtactgtgggcggggtgggagcggggcctctgcaggacagtggcctccctcccctcgttctgactcagccggaggaaggagcctcagtcccgcagcatccgaggttatgcagaggtacaggtggcttgttacctccactaccacctggcctgctgctcacttgctgggagggaggatgaagcggagtgctgggcaggggctgccaatgttggatgctcacttgctcccaaacaggtttngggtccacagtctcaatgcagaggagagtgggggatgaggaccttctctcatttaacccccacactagcccttctgaggccaggggtaactgttgccccttttataggtgaggattcagagagggttaagggatttgcactaattaacagttagcaggggggcagacccgggacagaagcattgttcccttcctt

SEQ ID NO: 92334 - DNA, 3309 bp, Homo sapiens
tgcatgtccccgcctcgcgcggcggcggcggcgggtgaggagcctgaggcggcggcgggggtggctccgcgcgcggtggtctcgggggcaaaataacatggcagccagacgaattacacaggagacttttgatgctgtattacaagaaaaagccaaacgatatcacatggatgccagtggtgaggctgtaagcgaaactcttcagtttaaagctcaagatctcttaagggcagtcccaagatccagagcagagatgtatgatgacgtccacagcgatggcagatactccctcagtggatctgtagctcactctagagatgccggaagagaaagcctgagaagtgacgtattttcagggccttccttcagatcaagcaacccttccatcagtgatgacagctactttcgcaaagaatgtggccgggatctggaattttctcactctaattctcgggaccaggtcattggccaccggaaattggggcatttccgttctcaggactggaaatttgcgctccgtggttcttgggaacaagactttggccatccagtttctcaagagtcctcttggtcacaggagtatagttttggtccctctgcagttttgggggactttggatcttccaggctgattgagaaagagtgtttggagaaggagagtcgggattatgacgtggaccatcctggggaggctgactctgtgttaggggcggcagtcaagtccaggccagaggtcgagctctaaacatcgttgaccaggaaggttccctcctaggaaagggggagactcagggcctgctcacagctaaggggggtgttgggaaacttgtcacattgagaaatgtgagcacaaaaaaaatacccaccgtgaatcgtattactcccaaaactcagggcactaaccaaatccagaaaaacactccaagtcctgatgtgaccctggggacaaacccagggacagaagatatccagttccccattcagaagatccctctggggctggatctgaagaatcttcggctccccagaagaaagatgagctttgacatcatagataagtctgatgttttttcaagatttgggatagaaataatcaaatgggcaggattccacaccataaaagatgatattaaattttcccaacttttccagactctctttgaacttgaaacagaaacctgtgctaaaatgcttgcctcattcaaatgttccttaaaaccagagcacagagatttttgcttttttactatcaaatttttaaagcactctgctttgaaaacacccagagttgataatgagtttttaaacatgcttttagacaaaggtgctgtgaagaccaaaaattgcttttttgaaatcataaagccttttgacaagtacataatgagacttcaagaccggcttctgaagagtgtcacacctttgcttatggcctgcaatgcctacgagctaagtgtcaagatgaagaccctcagtaaccccctggacttggctcttgccctagaaaccaccaactctctctgccggaagtctttggcccttttgggacagacattttccttggcctcttctttccggcaggagaaaatcttataagctgtcggcctgcaagatatagctccctcacctgctgcgtttccaaacttcgaagactccactttgtttgggcgagagtacatagaccacctgaaggcctggctagtcagcagcggatgtcccctccaggttaagaaagccgaaccagagccgatgcgagaggaggagaaaatgattcctcctacgaaacctgaaattcaggccaaggctccaagtagtctgagtgatgctgtcccccagcgagcagatcacagggtagtgggcaccatcgaccagcttgtgaaacgtgtcatcgaaggcagcctgtctcccaaagagagaactcttctcaaagaggaccctgcttactggtttttgtctgatgaaaatagtctggagtataaatattacaagctgaagttggcagaaatgcagcggatgagcgagaacttgcgaggagccgaccagaagccgacctcagcagactgtgcagtgagggccatgctgtactcccgggctgtccgcaacctcaagaagaaactccttcccgtggcagcggcgggggctcctccgtgctcaaggggctccgggggctggaaggcgaggagagccgaccaccgggacccagaccctcctattcctcagggcaccagggctgaaacaccacggccggcaggctccaggcctctcacaggcaaaaccatccctgccagacagaaatgatgctgccaaggactgcccgccagacccagttggaccttctcctcaggaccccagcttagaagcctcaggcccatcccccaagccagcaggagtggacatctctgaagcacctcagacctcttctccctgcccatctgctgacattgacatgaagacaatggagactgcagagaaactggctagatttgttgctcaggtgggaccagagatcgaacaattcagcatagaaaacagcaccgataaccctgacctgtggtttctacatgaccaaaatagttctgctttcaaattctatcgaaagaaagtgtttgaactatgtccatcaatttgtttcacgtcatctccgcacaaccttcacactggtggtggtgacaccacgggttctcaggagagccccgtggacctcatggaaggggaagcagagtttgaagacgagccccctccgcgggaggctgagctggagagcccagaggtgatgcctgaggaggaggacgaggacgatgaggatgggggagaggaggcccccgctcctggaggggcgggcaagtctgagggcagcacccctgccgacggccttcccggcgaggctgccgaggacgacctggctggagcacctgccttgtcacaggcctcctcaggtacctgcttccctcggaagaggatcagcagcaagtcattgaaggttggcatgattccagctcccaagagagtgtgtctcatccaggagccaaaaggtgagtgcccgcctgtcggcacagttgcctctagcacagttcttggttggtgggctgtgagagttagaagagacaggtggagacattttaatccaaaagagttttgtgcaccactccaaaatgtgagccgacactcatgtttcccagtggtctgaaggcattgctctaaggacatgtttccttgctaccctgtggcttctggcactctacttgctgctggacatttccctgattgcctggattcaggtcggggcatccccaactgtggaggggatgg

SEQ ID NO: 92335 - DNA, 1439 bp, Homo sapiens
ttttttttttttccttgtccagtgctgtttattgagtccatcatcagaggcaggaaagacgccactcatcacagagggcatgtgggctgcgggcaggggcttagggtcctgcagaggacaagtagctgggacagcccttcaccccgacaccccatgggccactgtgaggcaggctgaggagacaggacagggaatggccaggtgcagaatctgcacagccccctgccgggtcgcagatggccaccacccagcaggcccctggcactcacccacaggcagttccccaccccacttcccccttggaccctcccaaatcagggccggggagtgagacccagacctggccccgatggcaggaggcaccctagctgcttccagggccaggaggggtgggtgggatacagtgaggccaaacaaggcagaagcgggtgcagtagtccctggctactgcccagcttccgggactcccacagctgggctcagccttggtcctggcagtgctgggctcagaaatacagggctggctcgctgcggaagtccgagaggtcattctgactggcgggtgtgagcatggcctccacgggcgggggctctgcctccctcggggcctgctccagcgcctgctcctgccacttgctgaaggccacagagtgcttcggggtgtagctggacaggcctgagctaccctctggcagccgagagctctcgggtctcacgctgctcacaaacgtggcccggggcaggaagagtgcaaagggcttctcctctgagccggatccctcttcctcctcttcctcttcctcctcctcctcctcctcctcctcctggtggtccacctcttcctcctgctctagggagctctcggaagggtactcaaatgtggtctgcaggcttttgtcgttgaaggagatcttcatcttctttcttgaggagccagccttggtgaggcaggacttctgcagggccaggtagccgccaatcacctcgatctcatgcacggtggggtagcgcttcttcaacgtgggccccaggaggcaactagcctcctcctcctcggcctcccgtggccaaggctccctgttggcctgactgaagtgctggtcctgcagagtccctggcttcctcttgggcaccactgtgaaggtgttgctgccccggggctgaagctctgccacgcacccgggcctggcagggtgcagaggcctggcagggtgcgggaggtagggtagtttggctgcttggggggcctcctccgagtctacctcatcgatgaaggtgacaggcagccccggcctcacatattcccggctattcttggccaagccaggaaccctgaggccctcagcaggctcagcttcttccgaagcagccggcaggaaggggggcggtgaggacggcctcctcgtcccaagctaggcgtaatgatggtcacagatggt

SEQ ID NO: 92336 - DNA, 438 bp, Homo sapiens
  misc_feature (1)...(438): n = a,t,c or g
agcatatgctattnaggttataggacgnnnnnnnnnnnnnnnnnnnnnnnnnnnnnnnnnnnggcacgtggtttatgactggaagcatgcagccaactaagcgtgggtacttcagtgtaaaattaacactgagttacaaactgaagtggtaatgttaaaatccatggttctgtggttaggggaacaagtacaaagcttacagttgcaacagcaattgcactgtcattttaatcacactcatatttgtgtaaccaacttagaatataaccaaagagtatccatgggaccttgtaaaagcccatttgcagggagcttccacatccaacatcacctttgacataggtgaattacaaaaaaaaagttcttgatttaaataagcaaactcaagagtttcagccttctttataagcctggactgaattccagcaaggcctggag

SEQ ID NO: 92337 - DNA, 376 bp, Homo sapiens
cacagacacatgcacaccggcacacgtgcacacgaaacgtgcacagagacacatgcacgtgtaagtaaacatgcagacacatgcacatgtgtaaacaggtgcacacagacacacatgcacacatgtaaacatgcacgcagatgccctgaagatatgcgtgcagacacaggcagacgtgcacgcagtctcacagggacagctgttgcagctcagccttccctgatgtctctccgcagacatcctgcagtactacctggcctgctcgccccgcgccgccaacccctttcagcagaagctgtcgggcagccacaaggcactggtggagatgcaggatgtcgtggctgagcttctgaggaccgtcccctgggagcagccg

SEQ ID NO: 92338 - DNA, 921 bp, Homo sapiens
agacattttagtatattgtgtctcttcatttatttcaaattttttttaagtttctgcctcaattttgttgtttacccaaaattcattcaggagcaagttgtttaatttcaatgccattctgtgattttgtgagattttgctggtattgatatttatcttttttccattgaggcctgacagtatggttggcataattttcatttttaaaaaatgtatggataattgctttatggctaggaagaggtcaatcctatagtatattctgtgagcgatgagaagaatttatgttccttagatgatgtgtggtgtatactataaatgtctattagtttcaattgatcaagtgcgaaatcaaactccagaatttctttgttaagtttctgcctagataatctgacaaacactgttattggggagttgcgtttccctactattattgcgtggctacttgagtcttattgtaggtctagcagtacttgttgtataactctatgttccccaaagttgggtgcatctacatttaggatagttaagtcttcttgttgaattgaaccctttatcgttacgcaatacctttctttgttttattttactattaatgatttaaagctattttttcttaaaagagaaacaattccaggtatggtagcttgtgccagcactttcagactgaagcagtcggattgcctgagaccaggagtttgagaccagccgaggcaacacagcaacatactgtttgtacaaatttttttaaagaaactatacaggaggggtaatgtgcacaactgtggtcatatttactcaggagacataggtggcatgactgcttgacttccgaaatttgaggttacagtgagctgtgattccaccagtgtactctgtcccaggagataaagtaagatcctctgcattaaatgacat

SEQ ID NO: 92339 - DNA, 647 bp, Homo sapiens
ttttttttttttttatcagaacgttatttattttttatctgaaattcaaatgtattgggtatcctgtatttcctctgggaaccctctgggaaccctgggggatgagaaatctcccttgcagggaggggtcactcccagtgtctgcctcacaagaagagggggtcctccccagctacaggggactgggcagctggcccctggtatcagggtcactccacttggctctgctttcttgggtcttcagggctttgggacagcctgggggtgggagagtggcttctgcttcactggtactggccagaaggtgggcagggcatggaggagggggtgttaatatctggttcatttccaccctgctggctgtaaacctttagtcaagtgaggggacgcattctgacctaacatttgctgggctgtgagctgcaaagggaagggcctggcccgtgcgtgaggctggtgggaagtggcagtggggagggaggtgggtcccagggaacgtgggttaactttggggacacttctctttccccgtctctccccttctggtggggagccataatgtcttgcaggatctgggcttgatttttaaaatactgtctagcatttattttaacaattcacatgcagtaaaattcacttctcttttc

SEQ ID NO: 92340 - DNA, 366 bp, Homo sapiens
aactaacataccacccaggggctgaagtgaaataactcaaagacattctgtagcgtgttcccctcaggccatttttatgaaatgtcctgctccttactacttagatatctcagtaatgaaacaaagttaatgatcctgactgtcatcaggaatccataccacacacaggctaccctttgggttcactttgatttatcttttatttggataatctgggaggtttaaagtcaaatggagaatgatcattttaatacttttcctcttctagttatgtgaattcagagtcaatgcccggggcagtttggcaagctgtcagtaactgataacatgaccgaaaaacctgatacatcagctggtggtctactg

SEQ ID NO: 92341 - DNA, 2012 bp, Homo sapiens
gacgggcgatggctgtggtccttctgctaatgcaaacaacaaaacgggcacactagtcacccccgagggaggccaccatcactgtaactgttggccaaagctacaaaagaagcgagggaatccaaccgagcgcagcgacactgagaacagcttcccctgccttctgcggcggcagaagtgaagtgcctgaggaccggaaggatggtgcagtcctgctccgcctacggctgcaagaaccgctacgacaaggacaagcccgtttctttccacaagtttcctcttactcgacccagtctttgtaaagaatgggaggcagctgtcagaagaaaaaactttaaacccaccaagtatagcagtatttgttcagagcactttactccagactgctttaagagagagtgcaacaacaagttactgaaagagaatgctgtgcccacaatatttctttgtactgagccacatgacaagaaagaagatcttctggagccacaggaacagcttcccccacctcctttaccgcctcctgtttcccaggttgatgctgctattggattactaatgccgcctcttcagacccctgttaatctctcagttttctgtgaccacaactatactgtggaggatacaatgcaccagcggaaaaggattcatcagctagaacagcaagttgaaaaactcagaaagaagctcaagaccgcacagcagcgatgcagaaggcaagaacggcagcttgaaaaattaaaggaggttgttcacttccagaaagagaaagacgacgtatcagaaagaggttatgtgattctaccaaatgactactttgaaatagttgaagtaccagcataaaaaaatgaaatgtgtattgatttctaatggggcaataccacatatcctcctctagcctgtaaaggagtttcatttaaaaaaataacatttgattacttatataaaaacagttcagaatatttttttaaaaaaaattctatatatactgtaaaattataaatttttttgtttgtaatttcaggttttttacattttaacaaaatattttaaaagttataaactaacctcagacctctaatgtaagttggtttcaagattggggattttggggtttttttttagtatttatagaaataatgtaaaaataaaaagtaaagagaatgagaacagtgtggtaaaagggtgatttcagtttaaaacttaaaattagtactgttttattgagagaatttagttatattttaaatcagaagtatgggtcagatcatgggacataacttcttagaatatatatatacatatgtacatattctcatatgtaaagtcacaaggttcatttatctttctgaatcagttatcaaagataaattggcaagtcagtacttaagaaaaaagatttgattatcatcacagcagaaaaaagtcattgcatatctgatcaataacttcagattctaagagtggattttttttttttacatgggctcctattttttcccctactgtcttgcattataaaattagaagtgtattttcagtggaagaaacatttttcaataaataaagtaaggcattgtcatcaatgaagtaattaaaactgggacctgatctatgatacgctttttttctttcattacaccctagctgaaggacatccagttccccagctgtagttatgtatctgccttcaagtctctgacaaatgtgctgtgttagtagagtttgatttgtatcatatgataatcttgcacttgactgagttgggacaaggcttcacataaaaaattatttcttcacttttaacacaagttagaaattatatcccatttagttaaatgcgtgatttatattcagaacaacctactatgtagcgtttattttactgaatgtggagatttaaacactgaggtttctgttcaaactgtgagttctgttctttgtgagaaattttacatatattggaagtgaaaatatgttctgagtaaacaaatattgctatgggagttatc

SEQ ID NO: 92342 - DNA, 1355 bp, Homo sapiens
gcctgctcgccgtccgctccgtcagcccttagacctgttgcccagcatccctgcagttcgcggtacagtctctagtagagcgcgtgtatagaggcagagaggagtgaagtccacagttcctctcctccaagagcctgccgaccatgcccgcgggcgtgcccatgtccacctacctgaaaatgttcgcagccagtctcctggccatgtgcgcaggggcagaagtggtgcacaggtactaccgaccggacctgacaatacctgaaattccaccaaagcgtggagaactcaaaacggagcttttgggactgaaagaaagaaaacacaaacctcaagtttctcaacaggaggaacttaaataactatgccaagaattctgtgaataatataagtcttaaatatgtatttcttaatttattgcatcaaactacttgtccttaagcacttagtctaatgctaactgcaagaggaggtgctcagtggatgtttagccgatacgttgaaatttaattacggtttgattgatatttcttgaaaaccgccaaagcacatatcatcaaaccatttcatgaatatggtttggaagatgtttagtcttgaatataatgcgaaatagaatatttgtaagtctactatatgggttgtctttatttcatataaattaagaaattatttaaaactatgaactagtttcattaattgaatttgctaagtggagttatttctcattgctaaactgttttttttcaaattctagatctctgctaactttagtaaatgaacactaaagtggtgagctttgataatgcattttgtggatacaaaaccatcgcctcatcactttctagaatgaaaggctgggggcattgctcaccttttgcgtgaagaaaagacctgtcccttagagccagtttttgcttaaggggaggacagaccgtcgtcacccagtggaccacgtgaatgaatggatgcagtgcatgctttagaagcactgcatacctccttttacaggtacagagtaagtggtctggctactgagggaaagagtcatgatttgaatccgagtcttctgtaagacaatgacttcatgaaggtgaaaaatcagttttatggttattaaagtaaaaatttaccttgggtaaaaatgccatctttatttcattaagtactggttctaagtgacttccaataagatacattttcttcctgttttgaagttgatccccattgtgaaaaatatacattgtagtggtcatggaaatgcgccatccatactccctaaggcaggcttgttgccctagcatcaagcatgccagcagctttcaatggtcagcttctagaaggattgcctcggctat

SEQ ID NO: 92343 - DNA, 1014 bp, Homo sapiens
tttcgtccggaccccatactcttcctacggcgactgacacctcacacacgcgttgtggggggcggcgctctggctccggggctgtgcccagcgcgagcgtggccggcacccacttgctgcagagccggcactgcactggggtccttgggggcggctcctccagacgtctctgcgggttgtcgggtgctgccgagttgggttgggggacgctacaggtagtgggtccggagcagcggctggcccctcatctcactgcccttcctcggaccccaccgtcctctggaagcttgtgcagggcacctgccactgtgaccacctggacgcagatacctgctttcccacaacagcaaggaagaaccatggcccaggggtcactgtcattcggggacgtggctgtgggcttcacccggaaagagtggcagcagctggacctggagcagaggaccctgtaccaggatgtaatgctggagaactacagccacctgctctctgtgggtgaggaagacttccccgtggtcctcgggctgaactgtctgcttgcttggaaggcccagctggctcagcacaaatcctttaaccgtttctccccaagagggtgtcaagtcagcaaaccagctgtgatctccagtttggagcaggggaaggagccatggatggaggaggaagagataaggacgtggagcttcccagaagtttggcaagttgctacccagccagatagccaacagcaacacgaagaccaacatttgagccatacgtttctagacaagaaagactggaccggaaatgagcttcatgaatgtaacgaacttggaaaaaaactccatcagaacccaaacctccttccatcaaaacagcaggtccgcacacgtgacttgtgcagaaagagtttgatgtgtaacctggacttcactcctaacgcctacctggcgaggaggagatatcagtgcgacggccacgaaaactttttttctgttcgaaacttgaaacttcaccttaaggagcgaattcacg

SEQ ID NO: 92344 - DNA, 923 bp, Homo sapiens
gggttatacccctttcgctaggcgaatattggtcttgtctttttccaccctgaagttaggagtattattttcctaatagccaattgcaagctccttcctgtgtactgtcttataactcccttgcctaagctgctcttggtcaaaggaattgggagctcccaggctcctggcctggcagtcagccacctacagtggtagacaagtggccagcccaatatttttttcagtatctccactactgggtaggttcttcagcaagtcagagcctctgaggtctccccttgggcaacgctgtttacccctttcccttcctccatttgtttagccccctctccacccaactctagatctctatggaatttaggctccacattcgactgcccattcgtagctcataatccatttttataacaccttgctatctatatttacacctttaaagaacacgggaatttaagagggaagagtaactaggcttttgctaaacttgggctaataaaaccctctgtagagagatccttaatataggcatggggacaacaaggagtatcccaagggactcgccgctagggtgtcttttaagctattggagcaaattcaaatttggcttaaagaaaaagaaactcattttgtattgcaacaccatttgggttaaatacaagttagacgacgaatatatctggcctaaacatggttctatatactatagtgatattttacgattaggcttattttgtaaaagagaaggaaaatgggaagagatcccttatgtacaggcttttatggctctatactggatcacgttacttccaggcattagaatgccatgcataagggatccccacctagctgctccccatagaaagttcataagcctccccagagtctcttcagtcccccagtcctgagtgggggttctcgcc

SEQ ID NO: 92345 - DNA, 523 bp, Homo sapiens
cggcacgagtgcttttatcctgctttcttttagatttttaggcttatttggctgtccctttattttttacttcttaatggctgcttaattcattaatttcagcatttcttcttttctcatataactacttaaagctgttgtttcctttaaaaaataataaaataaagtttcccctaatacctgctttaatggcatagcaaagttttgatacgtcatattttagtgtttggttctgaatattatctgatttatattataacttcttctttgacccatgagttctttacagggttgtttttatactttcaaatgcattatctttaaaggtatcttcttattactgatttctaatttaattgcattttaatgagaaaaagtagttctcatattactgattctttgaaatttattggtaaaggctgggtgggcatggtaactcatgcctgtaatcctggcactttgggaggctgaggcgggtggatagcttgagtcagagagttcgagaccagcctgggcaacatga

SEQ ID NO: 92346 - DNA, 466 bp, Homo sapiens
gtctcttctgttccgcgtcctccacctcggtagcccctggtgactctgttacagcctctgttgacctatgatctgcagggagacgcacagccaggacatcctggaacctgggaaaggggactcttgacgtttaggtatgtggccatagaattctctctggaggagtagcagtgcctggacactgcacagcagaatttatagaggaatgttatgaaaacctggccttcctgggtattactgtctctaagccagacctgatcacctatctggagcaagaaaaagagccctggaatatgaagtgacatgagatggtggatgaacccccaggtatatgccctcattttgcttaagacctctggccagagcagggcatggaagattccttttaaaaagtaatactgagaagacatgaaaaatgtggacatgataatttactgttgagaaatggctgtaaaagtgtggatga

SEQ ID NO: 92347 - DNA, 867 bp, Homo sapiens
acatatactaatcaaaataccgaataccaaataaaaacaaaactggcaccgcacccgggctcctgtaatgaactattataaacaccaccacctgtgctcactggttctctcagtatgctagcaactgagttaattccaagtcaaaccatgggactgttttgttccaccccaacctcatagtgacctatcactccagcctcacccctacccagatgttgataggaccaggagaagcctttaggaagtgttagtatgtagtgtgggggcttcaaacccatgaaagattaaatgagctgcatgcaacttctggtacagtcatgattgctaaggcaatttgctaatctgccccgattgggcgtgtcctcagggcacatttgggaggttataatttgcaactatgtttattcagctacctccaatctttgcacagatccgaacccacaactccctgaagaacagaatactatgctttttagtcgggatgtctttatgaaagcagtactcctaactgacatggtgcaatatgattttcttttcttttcaatcccactgcagtgagaaggcaaccaaagtgcaggacatcaaaaacaacctgaaagaggcgattgaagtacgtgctggctccttgtgctgtctgtcttgtagcgccctcccagccagtgctgttccctgaccgctttgctaaatcattttcagaccattgtggccgccatgagcaacctggtgccccccgtggagctggccaaccccgagaaccagttcagagtggactacatcctgagtgtgatgaacgtgcctgactttgacttccctcccgtaagctacaccccgacttgtgtggccttagccccgcccacctgagcacac

SEQ ID NO: 92348 - DNA, 746 bp, Homo sapiens; identical to SEQ ID NO: 63397

SEQ ID NO: 92349 - DNA, 505 bp, Homo sapiens
  misc_feature (1)...(505): n = a,t,c or g
acaaatctcagctcggtacccggngatctcccactgggtccctcccacacagtggggattatgggagctgtcattcacaatgagatttgggtggggacacagccaaaccataccatagcctacaccgtattcaagacagcgcatcccatcaccccaaagctcgcttgagccctgctgcagctaaacccctccccagtctccagcccctggaaaccacagatgcagctttttccctttagttctgcctttttgagaatgtgatatgtgtagaatcaaactgcaagcagccattttctggttggtttacaacgtggaccaactgaacaccttcgcctccagccccgcagtggatctgagattctccctcactgcaggctccgttctccgttcctctcatccctgagtggcagtctgctgggcggaggaaccttcttctgttcatctactcagcccctgaagggcattgggtggctacaggattttggggattatgaataaagcccac

SEQ ID NO: 92350 - DNA, 481 bp, Homo sapiens
  misc_feature (1)...(481): n = a,t,c or g
tcgggagccatggtggaccggagccctctgctcacctcggtcatcatcttctacctggccatcggggcggcgatcttcgaagtgctggaggagccacactggaaggaggccaagaaaaactactacacacagaagctgcatctgctcaaggagttcccgtgcctgggtcaggagggcctggacaagatcctagaggtggtatctgatgctgcaggacagggtgtggccatcacagggaaccagaccttcaacaactggaactggcccaatgcaatgatttttgcagcgaccgtcattaccaccattggatatggcaatgtggcttccaagacccccggcgggcgcctcttctgtggtttctatgggctcttcggggtgccgttctgtctgacatggatcaatgcccttggcaagtttttcggggaactgccatgaaataagggccttcctttctcanaaattgtcccttgatggcaagcct

SEQ ID NO: 92351 - DNA, 1753 bp, Homo sapiens
aaaaccacagcttttaccatcataacatggctctggtaatatgtaggaagctttataaaagttttggttgattcagaaaaaggatcctgttgcagagtgagaggaagcatagggggaaactccattggaacagattttcacacaacgttttaaattgatataagtttaggcagttgtagttcataacttatgttgctcatgttgtgctgtgtcaggatgggataggaagcaagtcccatgcttagaggcatgggatgtgttggaacgggatttacacacactggaggagcagggcaagttggaattctaagatccatgaacccccaactgtatttcctccctgcatattttaccaatatattaaaaaacaatgtaacttttaaaaggcatcattcctgaggtttgtcttaatttctgattaagtaatcagaatattttctgctatttttgccaggaatcacaaagatgattaaagggttggaaaaaaagatctatgatggaaaattaaaggaactgggattattgagcctggagaagagaagactgaggggcaaaccattgatggttttcaagtatatgaagggttggcacagagagggtggcgaccagctgttctccatatgcactaagaatagaacaagaggaaactggcttagactagagtataagggagcatttcttggcaggggccattgttagaatacttcataaaaaaagaagtgtgaaaatctcagtatctctctctctttctaaaaaattagataaaaatttgtctatttaagatggttaaagatgttcttacccaaggaaaagtaacaaattatagaatttcccaaaagatgttttgatcctactagtagtatgcagtgaaaatctttagaactaaataatttggacaaggcttaatttaggcatttccctcttgacctcctaatggacagggattgaaaggggaagagcccaccaaatgctgagctcactgaaatatctctcccttatggcaatcctagcagtattaaagaaaaaaggaaactatttatttccaaatgagagtatgatggacagatattttagtatctcagtaatgtcctagtgtggcggtggttttcaatgtttcttcatggtaaaggtataagcctttcatttgttcaatggatgatgtttcagattttttttttttaagagatccttcaaggaacacagttcagagagattttcatcgggtgcattctctctgcttcgtgtgtgacaagttatcttggctgctgagaaagagtgccctgccccacaccggcagacctttccttcacctcatcagtatgattcagtttctcttatcaattggactctcccaggttccacagaacagtaatattttttgaacaataggtacaatagaaggtcttctgtcatttaacctggtaaaggcagggctggagggggaaaataaatcattaagcctttgagtaacggcagaatatatggctgtagatccatttttaatggttcatttcctttatggtcatataactgcacagctgaagatgaaaggggaaaataaatgaaaattttacttttcgatgccaatgatacattgcactaaactgatggaagaagttatccaaagtactgtataacatcttgtttattatttaatgttttctaaaataaaaaatgttagtggttttccaaatggcctaataaaaacaattatttgtaaataaaaacactgttagtaataccaaaaaaaaaa

SEQ ID NO: 92352 - DNA, 374 bp, Homo sapiens
ggggaccctccccctcgcttctcgttctactgccccaggagcccggcgggaccgggactcccgtccgtgccggagcgggcgccggcatgtggctgtgggaggaccagggcggcctcctgggccctttctccttcctgatgctaatgctgctgctggagacgcggaacccggtcaatgcctgcctcctaaccggcagcctgtttgttttactgggcgtattcagctttgagccggtgccctcttgcagggccctgcaggagctcaagccccgggaccgaatttctgccatcgcccaccgtggcgggaggcacgacccgcccgagaacacgctgggggccattcggaaggcagctaataatggagcaacaggcgtg

SEQ ID NO: 92353 - DNA, 1311 bp, Homo sapiens
tagacagagttcagaggcttgcatttatttaacttaggaaaagaatcgagcaaaacagacacgaacacgattctgtctgaaaccatcactaaccggctatagattctgactcactcaaggaatattggggatattttaagaaaattttcctggttttctgctttaccaaagtgtaagatatggctggggggcccctctcagcagatgcagaataaattaatcccaaagcaaagcggagcgcagggcagcctcgcgccacctaacctgtgtctcagcttccagcttccaccctgaagtgcgtgtggtcgtggagccgcgttgcgctaaccaggaaagctggaggcagaacgaggttggcccacgacacgtacagacatatgaccgacataacagtaaacgcacacgtgtctcgcacgcatggcgcagaggtcacccagactcatcccgtgcctctgcacgagcaggggaagtgacttggtggtggagtcccttggtttctaggctgttccacgatagcaggtgtgcgttgatggagcgctgagaagggcgactcagcatggtgactccacgtagtcattgtccagcccacggcgaaagcgcgctgtcagggagcggctgatgacaatcacccggggggccatgcagtcctccctcttgtggagaatgttccagatgagcatggctgccgccagcgtggccagaaggcaggcgccaatgttcaggtagcaggaccaggacaggttggtgtatgggccaattctgtagaaagtcacgagcccgatgaccaggacaaaactcgccagttggaatgcagcggccatggcctcctcccagcacggggcgtcgggtgacagcaggggcaggcccaccagccccaggaggaaggtgagctggcctgcggtgagcgcggccgtggccaccaggttgcaggcgcgcatcatgtcgaactgcagtttgacggtgcctcgggactcctggaagccggctgcctcggagccccagcccagcgcctcacagtcatgtgcgtccacctggccggctctggccccagggctcggccctccccgggtcctgtccaccagccagcaggacctccacagccccacgctgcgcctgcgcccatcctccagcgtctggcacacccagttggaggtgaaggccgccacgttgttgaggatgagtgagaccagggccaccagcacggccgcggccacgagtctctgcacggtcatcgctgacgccggtgccgccgcttatccggagagagccaagtcccagtaccgcggccgcaagcttattccctttagtgag

SEQ ID NO: 92354 - DNA, 845 bp, Homo sapiens; identical to SEQ ID NO: 63149

SEQ ID NO: 92355 - DNA, 262 bp, Homo sapiens
  misc_feature (1)...(262): n = a,t,c or g
tttcgtccgactggacttgctgtatgttgagaaacgacctggattttttggcaaaggagactgaggagaggagtgactatgcagtattcctgcctgatgcttagagcaggtgtctgcctgcctgccatccccatacacactcgcacatatgcactcatgcacatgcacacacatcgtgaactcctgttctgctgcttgggagactctggttctgagtgtgttttctgaaatctcatgagtctaaaatagaaagcacatgana

SEQ ID NO: 92356 - DNA, 414 bp, Homo sapiens
aaggaagggaaatttccaaggcaagattccaacccagcctgcctttcagagaggcgcaattgcaaagtgttcatgagaacggactgcgaatccttggttcgaatcattgctctgctgcttgctggctacatggtcttgggcgagtatcttaccttctctggtgtcagtttcctcatctgtagaataagtgtgctaatcataggatctcctcgccgggccatggtgatgattaaatcagaggtaccagtaactcgggcagaactgtgtctggcacttggcagcacctggatcaccttccttctctccaccttcgcggcacctgtaactgcaatgttgtcctctgccttttctcccgccctgtcccctcccacctcatcatgtccccggcctctctgcagatcctctggaccttcc

SEQ ID NO: 92357 - DNA, 567 bp, Homo sapiens
ggcacgaggaaacagagaactgatgaattcaccccaattctgggttctttttacctgtgaaaaaaaattttcagtaaggaagcatggagttttttgttgttcgtgttgggtatctgttctaatatcattatatttggacttcctcaaaagccaaaacataagaccgcatttttctacttggctctatggtctttgttcctaaggaagggaattaacacatactgaatgctagctatgtatcagatactactctctgtgtatgctaattaatttaaatatttctgtgttttacatccaatctacaaggagtttttattgctttgatgaaatccctccctcccccttctttcctctcatctctccctttctccttctcctcttaaatgattctctggctgaacaattttctattaatagtatatttgggaggcagtatgatgtaacagccagtaaggatatgggatttggagtcagacctggatttacagtaaggttttgtttttgatagggaaaaactgctttctatctcaataaataaaagccagggtcccacagaactggctttag

SEQ ID NO: 92358 - DNA, 1041 bp, Homo sapiens
atctttgtctccttctcttctctccccacaatccttgatgagttgttctcagacactgcttggcaaatctgaaccctagtcagtcttataagggctcctgtcctccttggaaggctttgttattgatacatgccaatgagaaaaaaacacattaacgagtagctgatggatactaagggagtattttactgaaaaaaatagaaaactacatttttacacgaaataaacttatgtctgcaatactcagccttaaattcacccctcacttcagaagaggtcccaggggcaggaataacacgcacagattgtttgttcacgacttccagccggtccaccagacctctggccaggtaatactgtacaaagtgcttccacgtgatttctcttccaggatctcgaaaatagaggtagaaaaatcccatgggcaacgcctgacccccaaaagggccagactgcgggaaatcctcgtcatcccaggggaagtccccccttctggcatccgcctccaccaggcaacgttatcctgcttccctcctctcctgcctccgtctcctccagactcagcattctctagttcaccagtctctttgggtggttttgaacacagccaccaggaaaataacgtcggtcttgcctgcagagtcagcttctgaacgtggatcccctggaagcactggaacaggaggccagatgagctttcctagcttcttctgcaatgcaacaccgcacattctcactggccataaccactggagcaagcagggtgaggtgtgagcttatcgccttaaataccccattagaaatatgattcaatagagtaaacaggagcaagctcactgcagaaatgcactgcaaatgtttatagctatagcctccaacagcaagaaaaaactcccccaaaaaacaaaaaacatggcttagaaactgaggcaatttatttagtaacttgaaatatcgcagcttcaaaaacaagactgtaagactaaaacataaaattgtgtaaaatttaaatactgaaatacactatgactcatctttggt

SEQ ID NO: 92359 - DNA, 270 bp, Homo sapiens
cttaacttattgataatatatgatattaatgaggaaaaaaacgaagaaatggtaagtatcataatgggcactgaatatcaaacaagatacattgaccattctaataagattcacaaacatgcaataatcttcatcctcctcctcctccatgggtagagcgtcaagggacccgaggatccgggaccttgacctggtaagaggacgagctctccgttcagggtttctcctggaagcaacactgttttatcagtgccttcgttgtataattca

SEQ ID NO: 92360 - DNA, 387 bp, Homo sapiens
ggcacgagaacatgtcagggtgctcacaggagtagtggggggaggttttgctagggacagattcttaaaccaacaaaagtgccttcatattttctgtctggaagacacaaagcccagaaggagcccagaagcaacagtttgagagaggcgctttctgccatcaagtggataatactagcggcctgcaaccatgggacaggccatgtgtatcaagatctgcaactttaaagctgctggaaacaatgaggagcacctgaccaaggccctcaactcccggcgcctctttgagaagacgaggcaccccttcacctaaccctgtacttccgcactccagagctgcatgtcagcctggactgaataagctgccgtcactgccctactgaccac

SEQ ID NO: 92361 - DNA, 383 bp, Homo sapiens
  misc_feature (1)...(383): n = a,t,c or g
catctttataaactatacaatctaccacactactcaaaattccccccctaacatataacctacaactcaaatcctatctcattatacccccattcacataaacctatcttaaccaataactatactctttctaaaactccaacaccctatcacccacacacaccaccccatatcaacaancccaanaccaaccaacacaaatnncncagcccccaccccaccttttacacaacccatcccgggaggctcagccacgccacagcatgtgaacgaggagagggcgtggagtttcaagctctgccagggtggatctttctcagtgcctgaaaccagctacacggagccctcaccccacagcccctagtttgcagggcacaaatgct

SEQ ID NO: 92362 - DNA, 427 bp, Homo sapiens
cccacgcgtccgcccacgcgtccgcgagatcttctctgtggcggagacagccaggttggcagctgacgggacagccggggtctattttgttgcgggttttcagcaaatccagggctggtctggaggcgcgaaaacttaaggcatacagaacgatggagtatatggcagaatccaccgaccgcagccctggacacatcttgtgctgtgagtgtggtgttccgataagtccaaatcactgccaatatttgtgaggtctgtttgctaatccatattggaaatctgccactgtatcttcaacatcgtatttacattaccacgataaagctttatcacctgtcctatcatctactagtggatctctttaacgatcaattacatctacttcccacgaataactataatcatactacctcattctcatactccc

SEQ ID NO: 92363 - DNA, 814 bp, Homo sapiens
cggacgcgtggggaaggtgtctgttggagccagcagaacagaaccaatttgaacaagaacctccagaggaacgacgaaccctgagaccacagctgctacagaccacaaacaccccatcagccaagagagacccttgcatccagcctctaccctgctgaacatctagatctaaggctcccaatcccatcctcatctctgccccttcttctcagaaggatggccgacacccagacacaggtggcccccacaccaaccatgaggatggcaactgcagaggacctgcccctccctccacccccagccctggaggacctgccactgccgccacccaaggaatccttctccaagttccatcagcagcggcaagctagtgagctccgccgcctctacaggcacatccaccctgagctccgcaagaatctggctgaggctgtggccgaggatctggctgaggtcctgggctctgaggaacccaccgagggtgacgttcagtgcatgcgctggatctttgagaactggagactggatgccattggagaacacgagaggccagctgccaaggagcccgtgctgtgtggtgacgtccaggccacctcccgcaagtttgaggaaggctcctttgccaacagcacagaccaggagccaaccaggccccagccaggtggaggagacgttcgtgcagcccgctggctatttgagacaaagccactggacgagctgacagggcaagccaaggaactggaggccactgtgagggagcctgcagccagcggagatgtgcagggtaccaggatgctctttgagacgcggccgc

SEQ ID NO: 92364 - DNA, 321 bp, Homo sapiens
ctgacgggacagctggggtctattttgttgcgggttttcagcaaatccagggctggtctgggggcgcgaaaacttaaggcatacagaacgatggagtatatggcagaatccaccgaccgcagccctggacacatcttgtgctgtgagtgtggtgttccgataagtccaaatcctgctcaatattagtgtggcctgtttgcgaagctcatttcacatctaccactgtattcctaaactattcattcatcccttctctaaaacatcttcatccgcttttataaccccctcacattatcttactttcttctctactatctctcg

SEQ ID NO: 92365 - DNA, 847 bp, Homo sapiens
ggcacgagccccgcgcctgcagcgtccgccggggcggcgcggcgggaggtggccgacaggctccgggcctcgcagcctcagcccccggcccagcgcgctttccgacggcggcgccgcgccgagccacccgcccgcccaaggtctctcgcgggcgggagaacggaaaactcccaacttcctgagttctaaagttcctgttgcttcagacaatggatgagcaatcacaaggaatgcaagggccacctgttcctcagttccaaccacagaaggccttacgaccggatatgggctataatacattagccaactttcgaatagaaaagaaaattggtcgcggacaattgtagtgaagtttatagagcagcctgtctcattggatggagtaccagtagctttaaaaaaagtgcagatatttgatttaatggatgccaaagcacgtgctgattgcatcaaagaaatagatcttcttaagcaactcaaccatccaaatgtaataaaatattatgcatcattcattgaagataatgaactaaacatagttttggaactagcagatgctggcgacctatccagaatgatcaagcattttaagaagcaaaagaggctaattcctgaaagaactgtttggaagtattttgttcagctttgcagtgcattggaacacatgcattctcgaagagtcatgcatagagatataaaaccagctaatgtgttcattacagccactggggtggtaaaacttggagatcttgggcttggccggtttttcagctcaaaaaccacagctgcacattctttagttggtacgccttattacatgtctccagagagaatacatgacaatggg

SEQ ID NO: 92366 - DNA, 1068 bp, Homo sapiens; identical to SEQ ID NO: 63069

SEQ ID NO: 92367 - DNA, 1573 bp, Homo sapiens
  misc_feature (1)...(1573): n = a,t,c or g
acccatctgattcgaattcggcacgagcccaaacccactccaccttactaccagacaaccttagccaaaccatttacccaaataaagtataggcgatagaaattgaaacctggcgcaatagatatagtaccgcaagggaaagatgaaaaattataaccaagcataatatagcaaggactaacccctataccttctgcataatgaattaactagaaataactttgcaaggagagccaaagctaagacccccgaaaccagacgagctacctaagaacagctaaaagagcacacccgtctatgtagcaaaatagtgggaagatttataggtagaggcgacaaacctaccgagcctggtgatagctggttgtccaagatagaatcttagttcaactttaaatttgcccacagaaccctctaaatccccttgtaaatttaactgttagtccaaagaggaacagctctttggacactaggaaaaaaccttgtagagagagtaaaaaatttaacacccatagtaggcctaaaagcagccaccaattaagaaagcgttcaagctcaacacccactacctaaaaaatcccaaacatataactgaactcctcacacccaattggaccaatctatcaccctatagaagaactaatgttagtataagtaacatgaaaacattctcctccgcataagcctgcgtcagattaaaacactgaactgacaattaacagcccaatatctacaatcaaccaacaagtcattattaccctcactgtcaacccaacacaggcatgctcataaggaaaggttaaaaaaagtaaaaggaactcggcaaatcttaccccgcctgtttaccaaaaacatcacctctagcatcaccagtattagaggcaccgcctgcccagtgacacatgtttaacggccgcggtaccctaaccgtgcaaaggtagcataatcacttgttccttaactagggacctgtatgaatggctccacgagggtacagctgtctcttacttttaaccagtgaaattgacctgcccgtgaagaggcgggcatgacacagcaagacgagaagaccctatggagctttaatttattaatgcaaacagtacctaacaaacccacaggccctaaactaccaaacctgnattaaaaatttcggttggggcgacctcggagcagaacccaacctccgagcagtacatgctaagacttcaccagtcagagcgaactactatactcaattgatccaataacttgaccaacggaacaagttaccctagggataacagcgcaatcctattctagagtccatatcaacaatagggtttacgacctcgatgttggatcaggacatcccaatggtgcagccgctattaaaggttcgtttgttcaacgattaaagtcctacgtgatctgagttcagaccggagtaatccaggtcggtttctatctacttcaaattcctccctgtacgaaaggacaagagaaataaggcctacttcacaaagcgccttcccccgtaaatgatatcatctcaacttagtattatacccacacccacccaagaacagggttt

SEQ ID NO: 92368 - DNA, 351 bp, Homo sapiens
ggcacgagcaataagctcctattccagacgtcatgggtcatttcacagaggaggacagggctactatcacaagcctgtggggcaaggtgaatgtggaagatgctggaggagaaaccctgggaaggctcctggttgactacccatggacccagaggttctttgatagttttggaatactgagatttttctacgcatcatgggcaaccccatatgtaagttacctggtttcatactactcctttgctgtccatctcgtctactctttaccatcctttgcgcgttctttccttattttgtctttgttcctagcctcttctcctcttctattacttatcctattagtaatctttt

SEQ ID NO: 92369 - DNA, 375 bp, Homo sapiens
ggcacgagctggaagatccccagcgctgcggtctcggagagcagtcctaacggcgcggcgtacgctagtggcctcccttgtggagtccgcggccctccctgggccgggctggcactcttgccttccccgaccctcatggcgctgctccgacgcccgacggtgtccagtgatctggacaatattgacacacgagctacgacgacagataagagtcgttgcgactatcacgagagctagaatagaagatatgcgccactccgctaccgctcttacccgccccgacgctactaccgctcagatcccgaaactccccgtgactactgtctgcaatcgacgcgccaaccccggcataccgccgtcggttctgtaaacgcg

SEQ ID NO: 92370 - DNA, 336 bp, Homo sapiens
caacaaactgaagcacctgtgggtcttcctcctgctggtggcgactcccagatgggtcctgtcgcagtcacagttacaagagtcgggcccaggagtggtgaggccttcggagaccctctccctcacattaccttctgctggggctggatccgccagtccccagggaaggggctggagtggattgggactttttgttatggaagggacaccttctacagcgcgtccctcaagagacgagtcaccatatccgcggacacgtcgaagacccaggtctatctgaacctgaattctgtgactgccacagacacggccatttattactgtgtgagagtggcg

SEQ ID NO: 92371 - DNA, 399 bp, Homo sapiens
cccacgcgtccgaacaagagacccaaatgattactatatgtacctgtgaatcacaaaggtctatccttagcccagatctgtcttccaagcttctctttcaatacatcctgctgccttttaaagatttccaattttcctagagtggcctcactttggaggttggaggtattttggggtttctcagcagacttctgtggcagtggggtcacctcaagttttggaacagcaatgaaaaatgaccagtgctatgataacatccagtttactcatgggacccgggaatagttccttttgtactatccgtcccagatttgttgccataatcatagacatgacttggggaggagagttgcttgtgctcccttttcataagcattctggaaagaaatcaaaacttgg

SEQ ID NO: 92372 - DNA, 654 bp, Homo sapiens
cgacccacgcgtccgctgttttcctgcgcaggagccgcagggccgtaggcagccatggcgcccagccggaatggcatggtcttgaagccccacttccacaaggactggcagcggcgcgtggccacgtggttcaaccagccggcccgtaagatccgcagacgtaaggcccggcaagccaaggcgcgccgcatcgccccgcgccccgcgtcgggtcccatccggcccatcgtgcgctgccccacggttcggtaccacacgaaggtgcgcgccggccgcggcttcagcctggaggagctcagggtggccggcattcacaagaaggtggcccggaccatcggcatttctgtggatccgaggaggcggaacaagtccacggagtccctgcaggccaacgtgcagcggctgaaggagtaccgctccaaactcatcctcttccccaggaagccctcggcccccaagaagggagacagttctgctgaagaactgaaactggccacccagctgaccggaccggtcatgcccgtccggaacgtctataagaaggagaaagctcgagtcatcactgaggaagagaagaatttcaaagccttcgctagtctcgtaatgcccgtacaaagaccggatcttcgacatacggcacaaagagccagggaa

SEQ ID NO: 92373 - DNA, 1640 bp, Homo sapiens
cccacgcgtccgggagaagagcccggacctgcagcttggccagagcggagggggctcgggagaggagtggacgccgctggccaggatggtgctggagagcgtggcccgtatcgtgaaggtgcagctccctgcatatctgaagcggctcccagtccctgaaagcattaccgggttcgctaggctcacagtttcagaatggcttcggttattgcctttccttggtgtactcgcacttcttggctaccttgcagttcgtccattcctcccgaagaagaaacaacagaaggatagcttgattaatcttaaaatacaaaaggaaaatccgaaagtagtgaatgaaataaacattgaagatttgtgtcttactaaagcagcttattgtaggtgttggcgttctaaaacgtttcctgcctgcgatggttcacataataaacacaatgaattgacaggagataatgtgggtccactaatactgaagaagaaagaagtataataataataacaatattttctcattctttgtgtatagaaaattttaaaatggtggtcttaattattactactggttgaacaattatttcttccaatttattttcttcctgcactactgtttgtatttgatcctttgtctattcagtcacttaattagaaattaaattgtcaagcctcttattctgacttcaaagaattaatgtatcttccaacaataaaatcacttctgattttaatctaggaaaacctaaattgtggctatggatccaaagctgtttgtttctttgaatatcaatattttcaacaggatcttgtatttaaaattcccacctacattgttaaatatgttattttttcatatctcttttggttttgataatctgaagtgtttttttctcgttttggccttccaaactgcatttggttaggtgaattaagaaaaatattgccatcaagaattacttgtgttttcacagagatagactctttgctttatagagattgttgtgtatttaatatgaatatcccagctttagaaaagaagtaaactggatacaaaaagttccattgaggaacagttatttacagtataaaagatttgtttactttacaaaaggcttgtgtctgtgtgtgtgtgtgtgtgtgtgtgtgtattttaaactgactcagtgacagctggggtggaatggcaagaacacttacaaccaaactcatgggctgctgcaatttgaagatcaattggtaataaacataagacattaattcatattaaaatagttcagtgttcaaaattgtgtttatgtggatatttttctctttttaacactataaaccattaaaatacagtcatcccttgtatacgctagggactggttccagggccacacatataccaaaatctgcccatactcaagtcccacagaaagtcttgcagaacccatatgtagaaaagttggccctccagttgaccctccgtacacatgagtttcacatcccatgcacaaatgctgatctgtgtgacctcacctgcatttgattgaaaaaagtatgcgcgtaattgtacccacccagttcaaacccgtgtgtaagggtcaactgtacaaaaaagtttgtgaaataaacgtactggagaatctttaaaaaaaaaa

SEQ ID NO: 92374 - DNA, 375 bp, Homo sapiens
  misc_feature (1)...(375): n = a,t,c or g
ggaggccctgagccatggtggctcccccagtccccagttctttctctgtgtaaatccagctttgcagggacggggatgtggtgcctttcccggaagagccggggtcctggggcgtggggagctggggctgggtcgtggggagctgggactggggtgtggggaggggcccagggtgagcaagctgaagcaggactggcacaggcctctggagggcctgggggaggctggacgccccggggtgcacccttgcttgtgcactcttctaagggtcagtctcagtttgcccatctgtaaatagggttgattgtccctgccctacgtggctgttgtgagcattcaatgagcactaccagtcctgggagactcttggtgttn

SEQ ID NO: 92375 - DNA, 443 bp, Homo sapiens
cggacgcgtgggaaattggatgtgcacagccgaccaggaatggatgcttcaaaataaaattaacaccaagatacaaacagaagtggcaatgttaaagactactgttctgtggctaggataacaaatacaaagcctgaagttgcagcagcaattgcattgtcattttaaccctattcatatttgggtaactaatttggaatataatcaaagtgaatatccaaggaactttgtaaaggcccatttacagggagttttacattcaatgttacttttgatattaatgattcacaaagtaaaatccttaacttgaataagcagactcaagtgcttcagccctctttaaaagcttgggcagaattccagcaaggtttagggagccttaacccttggacctacttcaaacagcacctcaatgtcttttttgtgattatcggaataatgtt

SEQ ID NO: 92376 - DNA, 382 bp, Homo sapiens
  misc_feature (1)...(382): n = a,t,c or g
cagccatggtctaagccgggcgcctcacctgtcagccgcaccggctccagcgctcgcctctcgcccttgcttctccagcgctccttgctcgcaaggcgggggaggcggcggcccagccacgatgatacatttcatattgctcttcagtcgacaagggaaattacggctacagaaatggtacatcactctccctgataaagagaggaagaagatcacccgggaaattgttcagattattctctcccgtggtcacaggacaagcagttttgttgactggaaggagctaaaacttgtttataaaaggtatgctagtttatatttttgctgtgcaatagaaaaatcaggacaatgagctcttgacgctagagaatgtgcatcgttn

SEQ ID NO: 92377 - DNA, 405 bp, Homo sapiens
cccacgcgggcgggacaagcatgctaagctccttaattggctggcatctacaaaaacgcttgtgtttttgcccagcgatatagagtatcagcatttctatcagtcctcaacaagcttgattgtgaaccgccagctgctcagctcaggggtagaagagctgagtagttatgaaagaggcagccaagggacacactggtgaggccatccactagatcagccagccctgacatgtatgccttaacagccataacatattaactccacagtcagggaagaaaaacgcatcatatgtaagtgtgacaagtattggtttaaatatgtataaatcaaagccatatattttgtttttcatcaagaaataaataaagagacaatccttacaagaaatttacatttagacgatgg

SEQ ID NO: 92378 - DNA, 3016 bp, Homo sapiens
cggccgctgcagcgggaggagccccccaggaggaggactgtgatccatgtgtccttcctggtgactaggatgtcgtcggaggaggacatagagcgtggagcagccgcagccgccgccaccaccccccgaggagcctggagccccggccccgagccccccagccgcagacaaaagacctcggggccggtctcgcaaagatgggcgcttcccctttccagagagccagaaagaaaccttcgaagtagggggaaaactgcagtggaagatgaggacagcatggatgggctggagacaacagaaacagaaacgattgtggaaacagaaatcaaagaacaatctgcagaagaggatgctgaagcagaagtggataacagcaaacagctaattccaactcttcagcgatctgtgtctgaggaatcggcaaactccctggtctctgttggtgtagaagccaaaatcagtgaacagctctgcgctttttgttactgtggggaaaaaagttccttaggacaaggagacttaaaacaattcagaataacgcctggatttatcttgccatggagaaaccaaccttctaacaagaaggacattgatgacaacagcaatggaacctatgagaaaatgcaaaactcagcaccacgaaaacaaagaggacagagaaaagaacgatctcctcagcagaatatagtatcttgtgtaagtgtaagcacccagacagcttcagatgatcaagctggtaaactgtgggatgaactcagtctggttgggcttccagatgccattgatatccaagccttatttgattctacaggcacttgttgggctcatcaccgttgtgtggagtggtcactaggagtatgccagatggaagaaccattgttagtgaacgtggacaaagctgttgtctcagggagcacagaacgatgtgcattttgtaagcaccttggagccactatcaaatgctgtgaagagaaatgtacccagatgtatcattatccttgtgctgcaggagccggcacctttcaggatttcagtcacatcttcctgctttgtccagaacacattgaccaagctcctgaaagattgaataccgaattggaaaaacagatttctaatgagactgatagtgaagaaatgaaaatgtcttctgaagtgaagcatatttgtggcgaagatcaaattgaagataaaatggaagtgacagaaaacattgaagtcgttacacaccagatcactgtgcagcaagagcaactgcagttgttagaggaacctgaaacagtggtatccagagaagaatcaaggcctccaaaattagtcatggaatctgtcactcttccactagaaaccttagtgtccccacatgaggaaagtatttcattatgtcctgaggaacagttggttatagaaaggctacaaggagaaaaggaacagaaagaaaattctgaactttctactggattgatggactctgaaatgactcctacaattgagggttgtgtgaaagatgtttcataccaaggaggcaaatctataaagttatcatctgagacagagtcatcattttcatcatcagcagacataagcaaggcagatgtgtcttcctccccaacaccttcttcagacttgccttcgcatgacatgctgcgtaattacccttcagctcttagttcctctgctggaaacatcatgccaacaacttacatctcagtcactccaaaaattggcatgggtaaaccagctattactaagagaaaattttctcctggtagacctcggtccaaacagggggcttggagtacccataatacagtgagcccaccttcctggtccccagacatttcagaaggtcgggaaatttttaaacccaggcagcttcctggcagtgccatttggagcatcaaagtgggccgtgggtctggatttccaggaaagcggagacctcgaggtgcaggactgtcggggcgaggtggccgaggcaggtcaaagctgaaaagtggaatcggagctgttgtattacctggggtgtctactgcagatatttcatcaaataaggatgatgaagaaaactctatgcacactacggttgtgttgttttctagcagtgacaaattcactttgaatcagtttgtggcagttttggccaaggagcagaaggaagattacttgcctgttctcagggtggtcagtgttaccatccatactgtgtcagtattaagatcactaaagtggttcttagcaaaggttggaggtgtcttgagtgcactgtgtgtgaggcctgtgggaaggcaactgacccaggaagactcctgctgtgtgatgactgtgacataagttatcacacctactgcctagaccctccattgcagacagttcccaaaggaggctggaagtgcaaatggtgtgtttggtgcagacactgtggagcaacatctgcaggtctaagatgtgaatggcagaacaattacacacagtgcgctccttgtgcaagcttatcttcctgtccagtctgctatcgaaactatagagaagaagatcttattctgcaatgtagacaatgtgatagatggatgcatgcagtttgtcagaacttaaatactgaggaagaagtggaaaatgtagcagacattggttttgattgtagcatgtgcagaccctatatgcctgcgtctaatgacccacccaagacttatacccaggatggtgtgtgtttgacctgaatcagggatgactcagttacagagcctcacagttacagttccaagaagaaaacggtcaaaaccaaaattgaaattgaagattataaatcagaatagcgtggccgtccttcagacccctccagacatccaatcagagcattcaagggatggtgaaatggatgatagtcgagaaggagaacttatggattgtgatggaaaatcagaatctagtcctgagcgggaagctgtggatgatgaaactaagggagtggaaggaacagatggtgtcaaaaagagaaaaaggaaaccatacagaccag

SEQ ID NO: 92379 - DNA, 2065 bp, Homo sapiens
tttcgtggtgcgcggtgagcggcctgggtcttgcaggctcggctggggcccgcagatagtagctgtagatccaaaatgacctctgatctgctcagtctgggccacaagaaaggcctggcatctcatcattcctttcttcttcagctctgctctcgtcaagagagttacccagaggaagaatggctgttgaccaaaccaaatacaagacggagtctcactctgttgcccaagctggagtgcagtggcatgatctcagctcactgcagcctctgctttccgggttcaagcgattctcttgcctcagcctcctgagtagctgggattacaggagaacggcctcaaggaagactaaccatctgcaatactagaagccatggctgagggatcagtgatgttcagtgatgtgtccatagacttctctcaggaggagtgggactgcctggaccctgttcagagggacttatacagagatgtgatgttggagaactacggcaatctggtttcaatgggactttacactcctaagcctcaagtgatctccttattggaacaagggaaagagccctggatggttggcagagagcttacaagaggcctgtgttcagatctggaatcgatgtgtgaaaccaagttattatctctaaagaaggaagtttatgaaatagaattatgccagagggagataatgggacttacaaagcatggccttgagtactccagttttggagatgttttggaatatagaagccaccttgcaaaacaactgggatatccaaatgggcattttagtcaagaaatattcactcctgaatacatgcccacatttattcaacagacattccttactctccatcaaataattaataatgaagacagaccctatgaatgtaagaaatgtggaaaggcctttagtcagaactcacaatttattcaacatcagagaattcatattggtgaaaaatcttatgaatgtaaagagtgtgggaaattctttagttgtggttcacatgttactcggcatctgaaaattcatactggcgaaaaaccctttgaatgtaaggaatgtggaaaggccttcagttgtagctcatacctttctcaacatcagagaatccataccggtaagaaaccctatgaatgtaaggaatgtgggaaggcctttagttattgctcaaatcttattgaccatcagcgaattcacactggtgaaaaaccttatgaatgtaaagtatgtgggaaagcctttactaagagctcacaactttttcagcatgcacgaattcatacaggtgagaaaccctatgaatgtaaggaatgtggcaaagcctttacccagagctcaaagcttgttcaacatcagagaattcatactggtgagaaaccctatgagtgcaaggaatgtggcaaagcctttagtagtggctcagcacttactaatcatcagagaattcacactggtgagaaaccctatgattgtaaggaatgtggaaaggcttttactcagagctcacagcttcgtcaacatcagagaattcacgctggtgagaaaccctttgaatgtcttgaatgtgggaaggcctttactcagaactccccacttgttccagcattcagagaattcatacagatgaaaaaccatattgaatgtaatgaatgtggaaaggcctttaataaatgctcaaaccttactcgacatctgagaattcacactggtgaaaagccctataactgtaaggaatgtgggaaggcttttagtagtggctcggatctcattcgtcatcagggaattcatactaataaataataaaaattaaagcccctgtcaccttcctcatattttaaaccaaaaatcatgtctaatagttaccctcttccgtagttttttttaaaactttgtatttaaattttgtatccaaatgtatttcattccaggttataaattcggagtctaaagtgacattccctctctcccccagtcatataccgatgccagctgttctataattctttcattcattgttttgttctactttcttggtgacacattatactcatgtttatattt

SEQ ID NO: 92380 - DNA, 605 bp, Homo sapiens
ctcgctgactcgcttcgcttccccgacgcgctgggttcccggagcgcagagcccagcgttagcgggtgggctccccgaggccccctgccctcgccgggctgctccagggtgtcgctcctctggctgctcccgaaggggcttctggccctgaggacggtggtgccaagcgaacttcatttttaaaaagaactggtggatgagaagagcgagcgagggcgagctatggaccctgtgagtcagctggcctctgcgggcaccttccgggtgctgaaggagccccttgccttcctgcgagccctggaattgctttttgcaatctttgcatttgcaacatgcggtggctattctggaggcctgcggctgagtgtggactgcgtcaacaagacagaaagtaacctcagcatcgacatagcgtttgcctacccattcaggttgcaccaggtgacgtttgaaggtgcccacctgcgagggaaaggaacggcacaagctggcattgattggcgactcctcgtcttcagcagagttcttcggcactgttgctggcttcgccttcctctactctttggctgccactggcgtttacattttcttccagaacaaatacg

SEQ ID NO: 92381 - DNA, 429 bp, Homo sapiens
cattcataccaacttcctggaaacttcagccgtggggatcaactgccggactctcccccttcctcccttggccacaaactgtggagaaggcaggggccatcacaacacctcttatcgctgggcgaatgagacccattaccgttcccgatctgctttcaagctgatcctattgaaaccccgctttgtgctcctgcctatagcccgagccttgctggacctgtgtgctgcgccagggggatggctgcaggtaactgccaagtttatgcctgtatccatccttattgtgggagaggacctggttccaatcaagcctctccccaatgtggtgactctccaggaggacatcacaacagaacgttgtaggcaggccctgaggaaggagctgaaaacctgaaggttgatgttggcctcaatgatggggcccccacg

SEQ ID NO: 92382 - DNA, 1517 bp, Homo sapiens
tggcgaccacatgggaaggtaaagctgcctgccctctttgcccactctcttaaaagccaagatacctgttcctctcttgggatctgtccagttaccagcagccacaataagcccctgggtaggggttttccccacccttagtcttgggtagcagtttttggtattcagggatactgaagcctcggaaacagataacctcatcaggatcacgaactgatgtttatataccaatcccttaatgcctctcatgccgccatacattatgtctgcagtgatttggcccaccaccttcttgccatgttgctgcctgaaggtcttaattctggcctgctccttaactatcaggtcagccaatatgtctttcaaattcttggaggaagcactggcatgccaggcagcaagaacaagacaagatgcactgttgcttcccaagagcctggcagccacttgggtaaaaccatggggagtgaactctgcgatctggtggagagggaagaaggggagagagctgtggcagaaacaggaaccaccactgcggcaccagaggccgcaatgggtggacaaggttgaaaggaggcagctgaggaaacacatagatgaacccgcagcaggtgcccagccaggggttctcagcaaggccctgtgcactgccaactatgaacttattaagactgactttccaatagttcttagcagtgtgtggagtagaagacagaacaatgtataccttcagaatgcacagagccaatgcatttttggattacaaataaatcaatttaagacctattgcttctgacaatgatttgcaaattgagaaaattctggaaaaatagacatccaacaaattaacagtgattatacctaatgacagggttacaggtggggatttgtttatttgtatgttcttatttgtttcttgtttcttatgtcagcaaattttaaatagaatatgcaaaatgatgacctcaataataaaaaatattgtgtttattcacaagagttaaataatgtttatagaaaggaaaagatgcgaatgtttttggacagattaggatttaaacaaaaatgttaaacacagaatacaaaatatgttttttctcctgttgtctagcttttgtacagtgaacacatgttgcttttatagtaagaaatatacattttaagtttcaaaattactcagattttgtaaacaatctaaaagaaaataaatgtgtttggaaaatccatttccgagtttacagtagtgttgaatagcccagccaaacaacacatgacctgaatcaaacacaagtttactggactcactcactattccagaagggtgaccacattcttttgtgttactacatgtcatcagtgcctgtaagagacaaaggtctttgaatggtgttaaggtttttcattggttttcttgtattcttaacattttatggtcaaggtcctttgatgtgggttcattccataatatttgtgatgaatgaaaatacatgaacacagaaggaaaaacaggaatgaat

SEQ ID NO: 92383 - DNA, 2529 bp, Homo sapiens
ggaattcaaatctttagtggaacaattcagaggaacagattcagacattcccagtagtaaagattctgaagattcaaatgaggatgaagaggaagatgatgaagaagaagatgaggaagatgatgaagatgatgaatctgatgacagccaatcagaatcagatagtaattcagaatcagatacagaaggatcagaagaagaagatgatgatgataaagaccaagatgaatcagatagtgatactgaaggagagaaaacttcaatgaaactgaataaaacaacttcctctgtcaaaagcccttccatgagtctcacaggtcactcaacacctcgtaacctccacatagcaaaagccccaggctctgctcctgctgccttatgttctgaatcccagtcacctgcttttcttggtacatcttcttccacacttacttcaagcccacactctggcacttccaaaagaagaagagtaacagatgaacgtgaactgcgtattccattggaatatggctggcagagagagacaagaataagaaactttggagggcgccttcaaggagaagtagcatattatgctccatgtggaaagaaacttaggcagtaccctgaagtaataaagtatctcagcagaaatggaataatggatatctcaagggacaatttcagcttcagtgcaaaaataagagtgggtgacttctatgaagccagagatggaccgcagggaatgcagtggtgtcttttgaaagaagaggatgttattcctccgtatcagggcaatggaaggtcgtagaggaagaccaccaaatccagatagacaacgagcaagagaggaatccaggatgagacgtcggaaaggtcgacctccaaatgttggcaatgctgaattcctagataacgcagatgcaaagttgctaagaaaactgcaagctcaagaaatagccaggcaagcagcacaaataaagcttttgagaaaacttcaaaagcaggaacaggctcgggttgctaaagaagccaaaaaacaacaagcaataatggctgctgaggagaagcggaagcaaaaagaacagataaagattatgaaacagcaggaaaaaattaagagaatacagcaaatcagaatggaaaaagaacttcgagctcagcaaattctagaggctaaaaaaaaaaagaaggaagaagcggcaaatgccaaattattggaggccgagaaacgaataaaggaaaaagaaatgagaagacaacaagctgttcttctgaaacatcaggagttggagaggcatagactagatatggaacgagagcgaaggcgacaacacatgatgcttatgaaagctatggaagctcgtaaaaaagcagaagaaaaagagcggttgaaacaagaaaaacgtgatgagaaaagattaaataaagagcgtaaactagagcagcgaagattagaattagaaatggcaaaggaactaaagaagcctaatgaagacatgtgcttagcagaccaaaagcctttgccagagttgcctcgtattccaggacttgttctctctggaagtacattttcagactgtctcatggtggtgcagttcttacgaaactttggtaaagttttgggctttgatgtgaatattgatgttccaaacctgagtgttcttcaagagggattgctaaatataggggacagcatgggtgaagtacaagacttgcttgtgaggctcctctcagctgctgtatgtgatccaggtctaataacaggatacaaggctaaaacagctcttggagaacatttgctgaatgttggtgtgaatcgagacaatgtttccgagattttacagatatttatggaagcccactgtggacaaactgagcttactgaaagtctgaagaccaaagcttttcaggctcacactccagcacagaaagcttcagtcctggctttcctgatcaatgaactggcatgcagcaagagtgtggtcagtgaaatcgacaagaacattgattatatgtcaaacttgaggagagataaatgggtggtagaaggtaaactccgcaagctcagaatcattcatgctaagaaaacaggcaaaagagacacttcaggtggcattgatctgggagaagagcagcatcccttgggcacacccactccaggacgcaagcgaagaaggaagggaggagacagttgattatgacgatgatgatgacgatgacagtgatgaccaaggggatgaagatgatgaggatgaagaggataaagaggacaaaaaaggaaaaaagactgatatctgtgaagatgaggatgaaggtgaccaagcagcaagtgttgaagagctggaaaaacagattgaaaaactgagtaaacaacagagtcagtacagaaggaagctctttgatgcgtctcactcattgcgttcagtgatgtttggccaagatcgttacagacgccggtactggattcttccccaatgtggggggatttttgtagaaggcatggagagtggtgaaggactagaagaaattgcaaaagaaagaaaaaaa

SEQ ID NO: 92384 - DNA, 1225 bp, Homo sapiens
cgaagtttccgaagaagtaaaatagaaagaagaccttttttgaaatgacctgtgttagtcacctctctcaggatgcgtgaggcggacacgttgaggccacctcagctgatggaagtttccgctgacatcatctctaccgttgagttcaaccacacgggagagctgctggccacaggtgacaagggcggccgggtcgtcatcttccagcgggaaccagagagtaaaaatgcgccccacagccagggcgaatacgacgtgtacagcactttccagagccacgagccggagtttgactatctcaagagcctggagatagaggagaagatcaacaagatcaagtggctcccacagcagaacgccgcccactcactcctgtccaccaacgataaaactatcaaattatggaagattaccgaacgagataaaaggcccgaaggatacaacctgaaggatgaagaggggaaacttaaggacctgtccacggtgacgtcactgcaggtgccagtgctgaagcccatggatctgatggtggaggtgagccctcggaggatctttgccaatggccacacctaccacatcaactccatctccgtcaacagtgactgcgagacctacatgtcggcggatgacctgcgcatcaacctctggcacctggccatcaccgacaggagcttcacccccagacatcgtggacatcaagccggccaacatggaggaccttacggaggtgatcacagcatctgagttccatccgcaccactgcaacctcttcgtctacagcagcagcaagggctccctgcggctctgcgacatgcgggcagctgccctgtgtgacaagcattccaagctctttgaagagcctgaggaccccagtaaccgctcattcttctcggaaatcatctccatccgtgtccgacgtgaagttcagccacagcgaccgctacatgctcacccgggaactaccttacagtcaaggtctgggacctgaacatggaggcaagacccatagagacctaccaggtccatgactaccttcggagcaagctctgttccctgtacgagaacgactgcattttcgacaagtttgaatgtgcctggaacgggagcgaccgaacatcatgaccggggcctacaacaacttcttccgcatgttcgatcggaacaccaagcgtgacgtgaccctggaggcctcgaggggaagcagcaagccccgggctgtgctcaa

SEQ ID NO: 92385 - DNA, 852 bp, Homo sapiens; identical to SEQ ID NO: 63030

SEQ ID NO: 92386 - DNA, 635 bp, Homo sapiens
atgtcgtcccggcctgggcgcgaggacgtgggggctgcgggcgcgcggcggccgcgtgagccgccggagcaggagctgcagcgacgtcgggagcagaagcttcggcgacacgacgcgcaggcagctgcagcagttcaagcacctggagtccttttacgaaaaacctcctcctgggcttatcaaggaagatgagactaagccagaagattgcataccagatgtaccaggcaatgaacacgccagggaatttctggctcatgcaccaactaaaggactttggatgccactggggaaagaagtcaaagttatgcagtgttggcgttgcaaacgctatggtcaccgaacgggtgacaaagaatgccctttctttatcaaaggcaaccaaaagttagagcagttcagagtggcacatgaagatcccatgtatgacatcatacgagacaataaacgacatgaaaaggacgtaaggatacagcagttaaaacagttactggaggattctacctcagatgaagataggagcagctcgaattcctctgaaggtaaagagaaacacaagaaaaagaagaagaaagaaaagcataagaaaaggaagaaagaaaagaaaaagaagaaaaaacggaagcacaaatctt

SEQ ID NO: 92387 - DNA, 1578 bp, Homo sapiens
ggggaactatctcgtcatccatagccaagagacgaggaattcgaaacttcagttaacagcctccttggtgctttaagcattcagcttccttcaggctggtaatttatataatccctgaaacgggcttcaggtcaaacccttaagacatctgaagctgcaacctggcctttggtgttgaaataggaaggtttaaggagaatctaagcattttagacttttttttataaatagacttattttcctttgtaatgtattggccttttagtgagtaaggctgggcagagggtgcttacaaccttgactccctttctccctggacttgatctgctgtttcagaggctaggttgtttctgtgggtgccttatcagggctgggatacttctgattctggcttccttcctgccccaccctcccgaccccagtccccctgatcctgctagaggcatgtctccttgcgtgtctaaaggtccctcatcctgtttgttttaggaatcctggtctcaggacctcatggaagaagagggggagagagttacaggttggacatgatgcacactatggggccccagcgacgtgtctggttgagctcagggaatatggttcttagccagtttcttggtgatatccagtggcacttgtaatggcgtcttcattcagttcatgcagggcaaaggcttactgataaacttgagtctgccctcgtatgagggtgtatacctggcctccctctgaggctggtgactcctccctgctggggccccacaggtgaggcagaacagctagagggcctccccgcctgcccgccttggctggctagctcgcctctcctgtgcgtatgggaacacctagcacgtgctggatgggctgcctctgactcagaggcatggccggatttggcaactcaaaaccaccttgcctcagctgatcagagtttctgtggaattctgtttgttaaatcaaattagctggtctctgaattaagggggagacgaccttctctaggatgaacagggttcgccccagtcctcctgcctggagacagttgatgtgtcatgcagagctcttacttctccagcaacactcttcagtacataataagcttaactgataaacagaatatttagaaaggtgagacttgggcttaccattgggtttaaatcatagggacctagggcgagggttcagggcttctctggagcagatattgtcaagttcatggccttaggtagcatgtatctggtcttaactctgattgtagcaaaagttctgagaggagctgagccctgttgtggcccattaaagaacagggtcctcaggccctgcccgcttcctgtccactgccccctccccatccccagcccagccgagggaatcccgtgggttgcttacctacctataaggtggtttataagctgctgtcctggccactgcattcaaattccaatgtgtacttcatagtgtaaaaatttatattattgtgaggttttttgtcttttttttttttttttttttttttggtatattgctgtatctactttaacttccagaaataaacgttatataggaacaaaaaaaaaa

SEQ ID NO: 92388 - DNA, 695 bp, Homo sapiens
ggcctcgtgccaggaacccttctctgatcatcaggattctcttggactctggggtccttgtcctgctcaggcatccctgcccccctcttcaggagggccctcaacacgatcttctctggacaggagtctggggcacaactggatgttgtgggccccaaaggggtgactccctgctcctgggccccacagagagtccttgtgctcagtgcactggctgagctgcaagacatcctggaattgggagcacacagcaccggcttgctgtggtacctgtgcattcaaattgaaggcaggatcgccagcaaggaacacagggcttgcaggatcacagaaaacccttggagttgttttgacacaccactgatgccaagtgtctgggtacttgtagggatggccctgccattccatccaggggcagtggccaacagggagattccacaaacaaagtgaacatgggggatgggatgagcaggctccaggcaactgagccctactggcgagcccgttgcccccggggccgggacaggggtgacagacacagagtgcccaggtaaccactcctgggagcagtggggaaccgtcggatgcttcaactcttgagagctgggctctaagcatccgccttagctgccaacttggccaaaggctatgcgagcagtttcccgttgacgggcaatgcatctttccgaacctga

SEQ ID NO: 92389 - DNA, 4585 bp, Homo sapiens
cggcgcgcacactgctcgctgggccgcggctcccgggtgtcccaggcccggccggtgcgcagagcatggccggtgcgggcccgaagcggcgcgcgctatcggccccggtggccgaggagaaggaagaggcgcgggagaagataatggccgccaagcgcgcggacggcgcggcgccggcaggcgagggcgagggcgtgaccctgcaggggaacatcacgctactcaagggcgtggccgtcatcgtggtcgccatcatgggctcgggcatcttcgtgacgcccacgggcgtgctcaaggaggcaggctcgccggggctggcgctggtggtgtgggccgcgtgcggcgtcttctccatcgtgggcgcgctctgctacgcggagctgggcaccaccatctccaaatcgggcggcgactacgcctacatgctggacgtctacggctcgctgcccgccttcctcaagctctggatcgagctgctcatcatccggccttcatcgcagtacatcgtggccctggtcttcgccacctacctgctcaagccgctcttccccacctgcccggtgcccgaggaggcagccaagctcgtggcctgcctctgcgtgctgctgctcacggccgtgaactgctacagcgtgaaggccgccacccgggtccaggatgcctttgccgccgccaagctcctggccctggccctgatcatcctgctgggcttcgtccagatcgggaagggtgatgtgtccaatctagatcccaacttctcatttgaaggcaccaaactggatgtggggaacattgtgctggcattatacagcggcctctttgcctatggaggatggaattacttgaatttcgtcacagaggaaatgatcaacccctacagaaacctgcccctggccatcatcatctccctgcccatcgtgacgctggtgtacgtgctgaccaacctggcctacttcaccaccctgtccaccgagcagatgctgtcgtccgaggccgtggccgtggacttcgggaactatcacctgggcgtaatgtcctggatcatccccgtcttcgtgggcctgtcctgcttcggctccgtcaatgggtccctgttcacatcctccaggctcttcttcgtggggtcccgggaaggccacctgccctccatcctctccatgatccacccacagctcctcacccccgtgccgtccctcgtgttcacgtgtgtgatgacgctgttttacgccttctccaaggacatcttctccgtcatcaacttcttcagcttcttcaactggctctgcgtggccctggccatcatcggcatgatctggctgcgccacagaaagcctgagcttgagcggcccatcaaggtgaacctggccctgcctgtgttcttcatcctggcctgcctcttcctgatcgccgtctccttctggaagaccaccccgtggagtgtggcatcggacttcaccatcatcctcagcgggctgcccgtctacttcttcggggtctggtggaaaaacaagcccaagtgggctcctccagggcatctttctccacgaccgtcctgtgtcagaagctcatgcatggtggtcccccaaggagacataggccaggaggccgagtggctgccggagaagcatgcgcagaaggccaagttaaagtagatcacctcctctgaacccactccggttccccgcaacccacagctcagctgcccatcccagtccctcggccgtccctcccaggtccgggcagtggaaggcttgctgtgaaaactctggtaagaaatctcatccctcaactgagggccagggacccaggtgtgcctgtgctcctgcccaggagcagcttttggtctccttgggccctttttcccttccctcctttgtttacttatatatatattttttttaaacttaaattttgggtcaacttgacaccactaagatgattttttaaggagctgggggaaggcaggagccttcctttctcctgccccaagggcccagaccctgggcaaacagagctactgagacttggaacctcattgctaccacagacttgcactgaagccagacagctgcccagacacatgggcttgtgacattcgtgaaaaccaaccctgtgggcttatgtctctgccttagggtttgcagagtggaaactcagccgtagggtggcactgggagggggtgggggatctgggcaaggtgggtgattcctcccaggaggtgcttgaggccccgatggactcctgaccataatcctagccctgagacaccatcctgagccagggaacagccccagggttggggggtgccggcatctcccctagctcaccaggcctggcctctgggcagtgtggcctcttggctatttctgtgtccagttttggaggctgagttctggttcatgcagacaaagccctgtccttcagtcttctagaaacagagacaagaaaggcagacacaccgcggccaggcacccatgtgggcgcccaccctgggctccacacagcagtgtcccctgccccagaggtcgcagctaccctcagcctccaatgcattggcctctgtaccgcccggcagccccttctggccggtgctgggttcccactcccggcctaggcacctccccgctctccctgtcacgctcatgtcctgtcctggtcctgatgcccgttgtctaggagacagagccaagcactgctcacgtctctgccgcctgcgtttggaggcccctgggctctcacccagtccccacccgcctgcagagagggaactagggcaccccttgtttctgttgttcccgtgaatttttttcgctatgggaggcagccgaggcctggccaatgcggcccactttcctgagctgtcgctgcctccatggcagcagccagggacccccagaacaagaagacccccccgcaggatccctcctgagctcggggggctctgccttctcaggccccgggcttcccttctccccagccagtggtggagccaagtggtccagcgtcactccagtgctcagctgtggctggaggagctggcctgtggcacagccctgagtgtcccaagccgggagccaacgaagccggacacggcttcactgaccagcggctgctcaagccgcaagctctcagcaagtgcccagtggagcctgccgcccccacctgggcaccgggaccccctcaccatccagtgggcccggagaaacctgatgaacagtttggggactcaggaccagatgtccgtctctcttgcttgaggaatgaagacctttattcacccctgccccgttgcttcccgctgcacatggacagacttcacagcgtctgctcataggacctgcatccttcctggggaccgaattccactcgtccaagggacagcccacggtctggaggccgaggaccaccagcaggcaggtggactgactgtgttgggcaagacctcttccctctgggcctgttctcttggctgcaaataaggacagcagctggtgccccacctgcctggtgcattgctgtgtgaatccaggaggcagtggacatcgtaggcagccacggccccgggtccaggagaagtgctccctggaggcacgcaccactgcttcccactggggccggcggggcccacgcacgacgtcagcctcttaccttcccgcctcggctaggggtcctcgggatgccgttctgttccaacctcctgctctgggacgtggacatgcctcaaggatacagggagccggcggcctctcgacggcacgcacttgcctgttggctgctgcggctgtgggcgagcatgggggctgccagcgtctgttgtggaaagtagctgctagtgaaatggctggggccgctggggtccgtcttcacactgcgcaggtctcttctgggcgtctgagctggggtgggagctcctccgcagaaggttggtggggggtccagtctgtgatccttggtgctgtgtgccccactccagcctggggaccccacttcagaaggtaggggccgtgtcccgcggtgctgactgaggcctgcttccccctccccctcctgctgtgctggaattccacagggaccaggggccaccggcaggggacctgtcctcagaagactttgatttttcccgtccctttttctccacaactccacttgacaaaacggtccccagcggtttccacttgtgggcttcaggtgttttcaagcacaacccaccacaacaagcaagtgcattttcagtcgttgtgcttttttgttttgtgctaacgtcttactaatttaaagatgctgtcggcaccatgtttatttatttccagtggtcatgctcagccttgctgctctgcgtggcgcaggtgccatgcctgctccctgtctgtgtcccagccacgcagggccatccactgtgacgtcggccgaccaggctggacaccctctgccgagtaatgacgtgtgtggctgggaccttctttattctgtgttaatggctaacctgttacactgggctgggttgggtagggtgttctggcttttttgtggggtttttatttttaaagaaacactcaatcatcctaaaaaaaaataaaaaaaaaa

SEQ ID NO: 92390 - DNA, 483 bp, Homo sapiens
  misc_feature (1)...(483): n = a,t,c or g
aggatagttnccccgccnnnnnnnnaattgagancctgaaggcangncgcggaacnccatncatactccatccattcatcgtgcacccattcatgcatccacctgtcatccatccatctatccacccacttatccatccttcattctccgtgcatggacccccccaccattcatccattcacccaccatccacccatccatccatctaccatccatccacccacccatccatccatccattcatcacccattcatcctccatccacccattcattcattcatcctccatccatccattttccacccatccacctatcatccatacatccatttatcaaactgcctatccacccttcatttatccatccatccatccatccatccatccatccatccatccatccgtcccctagtcattgaatgttcttgaagacctgctatgtgctgggcactgtgcagggcgttctgggaaggattcagagg

SEQ ID NO: 92391 - DNA, 1576 bp, Homo sapiens
gatgtatggtctgccctgggcttgtctgttccctcctgagcctgagccccttaccttcctgaccccatgaagcacacactggctctgctggctcccctgctgggcctgggcctggggctggccctgagtcagctggctgcaggggccacagactgcaagttccttggcccggcagagcacctgacattcaccccagcagccagggcccggtggctggcccctcgagttcgtgcgccaggactcctggactccctctatggcaccgtgcgccgcttcctctcggtggtgcagctcaatcctttcccttcagagttggtaaaggccctactgaatgagctggcctccgtgaaggtgaatgaggtggtgcggtacgaggcgggctacgtggtatgcgctgtgatcgcgggcctctacctgctgctggtgcccactgccgggctttgcttctgctgctgccgctgccaccggcgctgcgggggacgagtgaagacagagcacaaggcgctggcctgtgagcgcgcggccctcatggtcttcctgctgctgaccaccctcttgctgctgattggtgtggtctgtgcctttgtcaccaaccagcgcacgcatgaacagatgggccccagcatcgaggccatgcctgagaccctgctcagcctctggggcctggtctctgatgtcccccaagtgttggtgtgagcattgggagcgcgatccacactcagctcaggagctccgtgtaccccttgcttggcggccgtgggcagtttgggccaggtcctgcaggtctccgtgcaccacctgcaaaccttgaatgctacagtggtagagctgcaggccgggcagcaggacctggagccagccatccgggaacaccgggaccgcctccttgagctgctgcaggaggccaggtgccctctgtggaccatgtcctgcaccagctaaaaggtgtccccgaggccaacttctccagcatggtccaggaggagaacagcaccttcaacgcccttccagccctggctgccatgcagacatccagcgtggtgcaagagctgaagaaggcagtggcccagcagccggaaggggtgaggacactggctgaagggttcccgggcttggaggcagcttcccgctgggcccaggcactgcaggaggtggaggagagcagccgcccctacctgcaggaggtgcagagatacgagacctacaggtggatcgtgggctgcgtgctgtgctccgtggtcctattcgtggtgctctgcaacctgctgggcctcaatctgggcatctggggcctgtctgccagggacgaccccagccacccagaagccaagggcgaggctggagcccgcttcctcatggcaggtgtgggcctcagcttcctctttgctgcacccctcatcctcctggtgttcgccaccttcctggtgggtggcaacgtgcagacgctggtgtgccagagctgggagaacggcgagctctttgagtttgcagacaccccagggaacctgcccccgtccatgaacctgtcgcaacttcttggcctgaggaagaacatcagcatccaccaagcctatca

SEQ ID NO: 92392 - DNA, 1184 bp, Homo sapiens
aactggggtccggaggacgccccaggcctcttggccagggcctccctgatcatgctcccgtggccactacccctggcctcctcggccctcaccttgctcttcggggccctcacttccctgttcctctggtactgctaccgcctgggctcccaagacatgcaggccctaggggctgggagccgagctgggggtgttcgtggtgggcctgtgggatgctcggaggccggcgggccaagcccagggggtcctggggatcccggggaaggacctaggacggaaggcctagtgagccggcggcttcgggcctacgcaaggcgctactcctgggctgggatgggtagagtgaggcgggcagctcagggtggtggcccaggccctgggagagggccaggggtcctaggtattcagcgcccaggcctgcttttcctaccagacctgccttcagccccctttgtgccgcgggacgcccagcggcacgacgtggagctcctggagagcagcttccctgccattttgcgggacttcggggctgtgagctgggacttctcagggactacccctccgcctcggggctggtccccacctctggcccccgggtgctaccagctcctgctgtaccaagcaggccggtgccaacccagcaactgccgccggtgcccgggggcctatcgggcactgagggggcttcgaagctttatgagtgccaacaccttcggcaatgccggcttttccgttctcctgcctggggcccggctcgagggccgctgtgggcccaccaatgcccgggtcagatgccatctgggcctaaagatccctcctggctgtgagctggtggtcggcggtgagccccagtgctgggctgaggggcactgtctactggtggacgactcttttctacacacagtggctcacaatggctcccccgaagatgggcctcgagtggtcttcatcgtggacctctggcaccccaacgtggcaggggctgagcgccaggccctcgactttgtcttcgccccagacccttgaaggaaggggctcccttcacacacccaggctggagagacactgcgctcagggacggcttgatggtagccaggacctcctctctactgcgggggtgggcgggggcggaggatgggaactggctagtgagcactgaaatataaattctgaatcctctccta

SEQ ID NO: 92393 - DNA, 658 bp, Homo sapiens
  misc_feature (1)...(658): n = a,t,c or g
ggcacgagggcatttaatttgttaaaaagaagcatttaatttgttctttaatagactgtcataaaagttatactttaatataatatttaaaaatttaattgaaaaagttatattttacaggtaaagaattctctgaatgatatgcttttgccatgtcaattgtcctttaagtgaaaaaaaaatgtctgtggagacaaaaaaaatacatgattgccatactattttgttgttgttgctgagtatttgcttaaaaatatctacatgatgagtaacaagtaattcctggtcccaggatattacagctgtaacattcaaaacacagattcaatatcaaaacacatttattatgcctaaaaaaagtgccttgcaaaatgtgctttgtaccaaagcatgaaaagtttgaacatgagaataaacttgaccaacttcttttgtctttataagattcaatgcttgccaaagtgtacatctgtttattctacgcgattactaatctttcnnnnnnnnnnnnnnnnnggaaacggagcctaattgtttcaccacagttggattgccaggacttgatctcaaaaccctgaaacctttgcctccggggtttaaatggattctggggcttaaacctcccaggaactgaaattaaagcccggccaaccatccg

SEQ ID NO: 92394 - DNA, 1855 bp, Homo sapiens
gggcaaagataaatagagtcacaaaaaacagaacattgatggccacaacagcaacctggtcaatatttccttggggaacctgagcttcatctgtacttgcttcttcaaaattaatacttttacactgtcttcctgagtcatccacacgatgttctcttagtatggcaaggatcagaataatatttaaaattcccaggaaggcgctaagtaaaactggtgttgtatacatgtttatctgcagtttaatcacatcccatgtcacacctttttctccaaggaatgtaaaacaagtctgaaaaactgctccaattcccaacaatccacgagcaaccagcatgtagtatttattatgagaagctgggatgtggagatatgcatagaggcagttggctgccacggaaatcaagatggagacaataagaggctcttttcttggtctataattagaccataaaccaaatataggtgaagctaccatttggccaagactatatgaagcaataacccagcccaaaaaacttgtatcagctgtcggatcaatcttttggagatatggccatatggacatcatcactacagaaaaccctacactgctgagaaacatagtaagatataaaatcctaatagatctccatcggctcttataatgctcttcagtctctaaaatgtcccattctctgcttccaggtgtgtcgcctaagagcggctcctgttcactttcgttccgcaggccggccatagttacactccctacaaggcgtcttgcgcccaactctcgcgacacctgctttctcccatcccgggtggcgtgaagctggcaaaacaagcctgtaagtgcgcgtgcgcacctgacggtcagacgtaggcggaacgccccgaggtcataggcggggtcacgcggaaggccgggcagcgcagggcgaaaggaggctgtgtcctcagcctcctccctcggcacgcgcctcccatcctgacggggactgagagcccaggagagctcggggcgtgtccaaactgccgcgccgccctgctccgggtttgtcttcctccctccgtttctccttccgctgtatctagcatttcggttcctggaaaggttaccggagctgcgattggggctgggaccaaagttgagtcctggaaagggagcctggagagcggcggtgctgggaggcccggccagctcgatcgcaggcttccacctggcggccaatgcttgtttgctactgatgggtgtgagcaagttagatattctataccggagacttctcctaacaaaactttttatcagaggatggggaaggccagaagatctcaaaagactctttgaattcagaaagatgattggaaatcgggaaagatgccagaatctggtttcaagcgattatccagtacacattgataagattgaagagcaatcagattgtaagatcttagatggacactttgtttcccccatggctcactatgtgcctgatatcatgccaattgaatctgttattgcaaggttccaatttattgtgcctaaagaatggaacagcaaatatagacctgtatgcattcatcttgctggaacaggagatcatcattactggaggcgacgaacactaatggcccgtcctatgattaaagaagcccgaatggcttctttattgttagaaaacccttattgatgacgtcagactattcacagaagaagaaatgaaactggtgcacagatataaagaaatgttcaacgttgctggtaataaatgtagagttaaaacaacaatgatcaaatatttaaaaaaaaacagtactggtgaggctgctttgaaatgggcactcttgttactaatgactgaaaattagttca

SEQ ID NO: 92395 - DNA, 412 bp, Homo sapiens
  misc_feature (1)...(412): n = a,t,c or g
cgccgggtgaggttggcaccccttttttcctgctcttagagggaccggttgccaccggcatacttctgtcgccctgtcgtctgtgttgtgactgctttggacgtgggagtcacctgaaagccaggaaatggacttggtggctttcgaggatgtggctgtgaacttcacccaggaggagtggtctttgctggatccttcccagaagaatctctacagagaagtgatgcaggaaaccttgaggaatctggcctccataggagaaaaatggaaagaccagaacattgaagatcagtacaaaaatcccaggaataatctaagaagtcttctgggagagagagtcgatgaaaatacagaagaaaatcattgtggagaaacttctagccagattccagatgacacactgaacaaaaan

SEQ ID NO: 92396 - DNA, 391 bp, Homo sapiens
cttaggggtagatgaagagcagtgttaaaatcaggcttcgggaaccaggaagttttgtgtgccttacccttagaacatgacaatagtttcctgtctcatctccaaggctttgttctcttacttccagctccatcttcctatagcgtcatatgataatgtcacccagaaaccttcagtagctactcactagttcccaaagagaatgtaaatttcccatcctgcctttcaagactttcacaattaatcccaaagcacctctcccacttacatttctcccaacagacctgtataagacaaacacttcagctaaatcaatatcctccaacagaccgtttatttcttcatgtctataccaaattgttattctccccaatgcttggcacactattta

SEQ ID NO: 92397 - DNA, 1490 bp, Homo sapiens
ggcagaacacaacacaccctcattatccctaagctgaagcatgattttagtcactttgattttgttcgagtgtcatctggctggtcaaaaataagcaggacagataaaatgtatttcagacataccatcagaaaatggtttatcaccatcaaaggcaatcctttgaaagtgatagagtccctctaaaggtacagtccttagaaagagggactgtattaaaaagtattttgggaatatcaaagctttaatattccaacaaagactaagagaaaaacaatactcagtgggtgattgcagtcctaaattgtcatatgttgttattttcaggtcaagagcatcaacttcaattccatacattcaccaaatattctcagtatacacacagtcttgattacatgtatcaatttcaccagttatgacttctaagaattatatatattttttcagaacaagaccactattattaactaacttgaacaattgtatcatccaaaggccaaagatcatatggcagatcagggaagtcatgaagttgatttggtcttgacgtggaaaaccattaaacaacaaaagcaactgaacccatgtatgcacagaaacaatcaaacactagttcattttatagtgcccaggaaaatgttccttcttttaaaatggattttatttgaaagcgcagaaaatgaaaactagtgagatatatttttggtattataataggcaattggttgaggttcaagtttagtttcaggtaatattatcagggaagattccatgttttaaaatagtatttatggatcatgggtaggttaagaaagatgcattggcatatagtcttgatagttaagtccacgattatcattttagaatccaggctatgcttgctgctctttttatccacattttaaattacaattgcattttttacttgttcagtgcacactttgatgcaccacaagtgcattaattttgaatcgtgtgcaatatagaaatattttgagactcacaacattgaaacaaggtgacaccctagttgactttatcactaatgtgatttgaacattatttaaacaaatctagactgaacatgaaagaaaggagttttgggcagtgacatttttcacagaatgtatatctcaaaggtgaaagcagagtttttccagtgcaataaaaagaaacagaatatgcagattttgagctactcgctctatagaggataacctaacacggctgaaaattgagctgggacattcagacgaaagtgacaatccatggacagaatagggaataacaggtgtgaagagaacaaacttatcactgaatgtttgcaagctggttaaggcatagccttgatggctctctagcaaactgtagaaacaatgtagctttgggtagtttcatgctttgcagaatttcttagactataaagtgacacagcctggaatataggttgataattcactataggtcttcaaaatacttatctttgaaaa

SEQ ID NO: 92398 - DNA, 357 bp, Homo sapiens
ggcgggaggagcagcggctcaggcgcctgcaaactggtggcctgaacgaggtagaccatgactgtggtttcagtggcgtcactcgctgggctgctcttcctgaggttttcctaagccatcccctggcggaaccgcccccgttttttgtccagaagtgcttatagaaaagatggctaatattaacctaaaagaaataaccttaatagtaggtgtggttactgcctgctattggaacagcctcttttgtggttttgtttttgatgatgtttcagcaatactggataacaaagacttgcatccatctacacctttaaaaactttatttcaaaatgacttctggggaacccctatgtctgg

SEQ ID NO: 92399 - DNA, 330 bp, Homo sapiens
cacacttgttctcacttgtttcacacacacctctcactgttctcacactcgttcactcacttgttctcgttcttacactcacacctcactttgttctcacactcgttcactcacgttctcgttcttacactcacacctcactttgttctcacactcgttcactcacttgttctcgttcttacactcacctcactttgttctcacactcgttcactcacgttcttacactcacacctcacactgttctcacactctgtcactcacacttgttcacttgttctttcacacatttctcacattttgttctcacactcatacttgttcactcat

SEQ ID NO: 92400 - DNA, 341 bp, Homo sapiens
tttggacgcatactcatcaggctgggatatagcaccagcctaaacgcttctaatcttggcgtctctttgacttatacttgggctgtagtttaaagaagtaattaaataattactttttaaacagccttaagaagtaacagctttattgggctgtatctggagcagagataaatagaaatggtaatactattaattttaaacccagtgtgtgacaatgatgacaacaatttgtttagcacttactgtgtgtcatggcgtgtattaagtatgctatgtgcatttaatctcatttaatcttcacatactttgaagtagtcactattattttcatatctcatatg

SEQ ID NO: 92401 - DNA, 2203 bp, Homo sapiens
tttcgtcacccagggagccttagctatgtggagtgagtaggggcatgtgctattggtgattcctgcttctcttgagtactcctggaacgaggcagctgattgtcctaaaacatttatatgcatctagaatgtgcatgttaacattaaaattttaccttttttgtcctttttcttacctttcctctcaactttatagggtgatattcatgaggatttttgcagcgtttgcagaaaaagtggccagttactgatgtgcgacacatgttcccgtgtatatcatttggactgcttagacccccctctgaaaacaattcccaagggcatgtggatctgtcccagatgtcaggaccagatgctgaagaaggaagaagcaattccatggcctggaactttagcaattgttcattcctatattgcctacaaagcagcaaaagaagaagagaaacagaagttacttaaatggagttcagatttaaaacaagaacgagaacaactagagcaaaaggtgaaacagctcagcaattccataagtaaatgcatggaaatgaagaacaccatcctggcccggcagaaggagatgcacagctccctggagaaggtaaaacagctgattcgcctcatccacggcatcgacctctccaaacctgtagactctgaggccactgtgggggccatctccaatggcccggactgcaccccccctgccaatgccgccacctccacgccggccccttccccctcctcccagagctgcacagcgaactgtaaccagggggaagagactaaataacagagcccctctaggagaagccacgggatcccggcggcaaggagaacagaacactgaagactctagaaaagcaaagccggatttctggaaagtgcagaattcttttggttctttggttccagagagagagaagatgcttgtgccaggtggcaccagagtttgccaattgatccttcttattctgtgtgtacatgcaaagattggaccatgttacatgaaatagtgccagctggaggttctttgccagcaccatgccaagtgaaataatatatttactctctctattatacaccagtgtgtgcctgcagcagcctccacagccacgatgggtttgtttctgttttcttgggtggggagcagggacgggcggagggaggagagcaggtttcagatccttacttgccgagccgtttgtttaggtagagaagacaagtccaaagagtgtgtgggctttcctgtttctaaactttcgctactataaaaccaaaaaaaggaattgagatttcaccaaccccagtgcccagaatagggaaggggagtggctggagggagcagggggtgggacagtgtatcaaataagcagtatttaatcacctctggcgggggcctcgtgcaaggggagactgacaccaagaacagccagtaggttcttctcccctgcactctgctccctgcgcggtaaccccaccactcctgaagcctgcccagtctccttccttccctgcttggtgagtcgcgcatctccgtggttatcccgctgtctcctctccaagaacaagcagagcccgggccactggcccttgcccaaggcagggaagaaggatgtgtgtgtccaggaaggaaaaaaaggtggatcagtgattttacttgaaaacaagctccatcccttttctatatttataagaagagaagatcttgagtgaagcagcacgcgacccaggtgtgtgtgaattgaatggagacgtttcttttctctttctttaatttttgtttttgttctttttttctttaaggaaagttttattttactgttcattttactttcttggtaacaaaaactaaaataaggaatagaaaagctgtttttcaggctgacagtccaattaagggtagccaagaccttgcatggtagagtaggaatcatagtgtcagtgaggtcccgtgagtctttgtgagtccttgtgtcatcgttcgggcactgtttttttatgcaagggcaaaaatctttgtatctggggaaaaaaaacttttttttaaattaaaaaggaaaataaaagatattgaggtcttcctagtgttacttaaattaagatcaaggtaagaaacattgtaaaaaaaattacaaaagtgctatttgtttcctaaaaacagtgatttctattaaaaaggtgtcagaactggagaaaaaaaaaa

SEQ ID NO: 92402 - DNA, 983 bp, Homo sapiens
gccgccgccgccgccgcagccgctaccgccgctgcagccgctttccgcggcctgggcctctcgccgtcagcatgccacacgccttcaagcccggggacttggtgttcgctaagatgaagggctaccctcactggcctgccaggatcgacgacatcgcggatggcgccgtgaagcccccacccaacaagtaccccatctttttctttggcacacacgaaacagccttcctgggacccaaggacctgttcccctacgacaaatgtaaagacaagtacgggaagcccaacaagaggaaaggcttcaatgaagggctgtgggagatccagaacaacccccacgccagctacagcgcccctccgccagtgagctcctccgacagcgaggcccccgaggccaaccccgccgacggcagtgacgctgacgaggacgatgagggaccggggggtcatggccgtcacagcggtaaccgccacagctgccagcgacaggatggagagcgactcagactcagacaagagtagcgacaacagtggcctgaagaggaagacgcctgcgctaaagatgtcggtctcgaaacgagcccgaaaggcctccagcgacctggatcaggccagcgtgtccccatccgaagaggagaactcggaaagctcatctgagtcggagaagaccagcgaccaggacttcacacctgagaagaaagcagcggtccgggcgccacggaggggccctctggggggacggaaaaaaaaggcgccgtcagcctccgactccgactccaaggccgattcggacggggccaagcctgagccggtggccatggcgcggtcggcgtcctcctcctcctcttcctcctcctcctccgactccgatgtgtctgtgaagaagcctccgaggggcaggaagccagcggagaagcctctcccgaagccgcgagggcggaaaccgaagcctgaacggcctccgtccagctccagcagtgacag

SEQ ID NO: 92403 - DNA, 436 bp, Homo sapiens
  misc_feature (1)...(436): n = a,t,c or g
ntatatagtctatccgancaccngantacgcgcagcttggcacgagggcgacagaacacaggtggcgagaaaactaccccttttagccaaaatgggaaaggaaaagactcatatgtagcattagacctcttggacacctaaataagggcaagaccaccactactggccatctgaactataaatgcggaggcttcgacaaaagaaccattgaaaaatttgaaaaggaggctgctgatatgggaaagggctccttcaagtatgcctgggtcttggataaactgaaagctgatcgtgaacgcggtatcaccattgatatctccttgtggaaatttgagaccagcaaggactatgtgactatcattgatgccccaggacacagagactttatcaaaaacatgattacagggacatcttacggtggactgggctggccttn

SEQ ID NO: 92404 - DNA, 374 bp, Homo sapiens
aattcctttacaatgaatgccaaagtactgtctgattgcttttgttctggaatgtttttggtgttattactgtttgaaataagtaggttgtgaagatgactttttttgatggtatttcttgtaatgggacttgacatatattttacagatgaagttaattgaggactctgagaattttgattattgcagcagttataacattccaaggtttccttcagcgaattgaagctatcaaaaatgatttctgtgttagtatatttttaatgttcattatggcttaaagtaggtgattatttgcaggtaatggaaaaggtggagaatcaatttatggtggatattttaaaggtaaggcttaatattttacggtcttttgt

SEQ ID NO: 92405 - DNA, 384 bp, Homo sapiens
cgcctggttcgtagcagcagcctctgaggagtacctggacagggtccttccacctgaccacaagcatggggaacatcttcgccaacctcttcaagggcctttttggcaaaaaagaaatgcgcatcctcatggtgggcctgtgtgctgcagggaagaccacgatcctctacaagcttaagctgggtgagatcgtgaccaccattcccaccataggtgaggtgggggccagcagggagtgggctgggctgggctgggccaaggtacaaggcctcaccctgcatcccgcacccaggcttcaacgtggaaaccgtggagtacaagaacatcagcttcactgtgtgggacgtgggtggccaggacaagatccggcccctgtggcgccac

SEQ ID NO: 92406 - DNA, 557 bp, Homo sapiens
  misc_feature (1)...(557): n = a,t,c or g
tacctgctttctaatctccaccgtgcctggttcttgacacctctacatcacttacttaagcgcggaaatactgccactctcagtacccccactccccgcccccaccaattacgagaccttatttgatgccgtcgagaaccgccgaggaaaanatattggccatttttctcaaggactttggtttcttcattctcttttctttacaggaattctgctgaatggatcttggcacttctaggttctgtatggctcttaactttcaatatttagcttttttctaatcccttcctgatgtcttctgggactgtcttctctacttgttcttctacctcactaattcattctttggcttatctattatatacctaatctgaagagatctttatttcaacccatgtatgttcatactctgtattggttcttttttgtaactacttagatctgcatgttatcagtcttctaactctaagaggattttaaatgctttgaaaattcttcatgtgtcttctccattaattctgctttgtatacacatagcttagtttgaatgggaaacg

SEQ ID NO: 92407 - DNA, 545 bp, Homo sapiens
  misc_feature (1)...(545): n = a,t,c or g
ctgnnnnnnnnnnnnnnnnnnnnnnnnnnnnnnnnnnnnnnnnnnnnnnnnnnnnnnnnnnactcggcncatatatagtgaagacttctacaatgttaagatttcccccgctcggttggaaaccctgaatttgtgtgtatgtatttgtgtaaggtaagttacattttttattggtctgcgtttttctgtcatgcctgtgtacttgggaaatctgaaactgagtgtcttaagaacttcttaaagcaaatgtgggggaacattaaaaagtatatttaaaatatagaataggtccattttctaccttaaagagtagtatattaaatacaattattatgctgttgttgctttgcagtgtatgtggtgggaagaaggcaggagttttttatctgcatgctatatgaatccttcaataataatgtacctttttattactgggtttggccatattgatttcagtgagtattgtgctctcacagacttatttttccagatttcatctcttaaaagtgggaaattggactggatgctactttattccgaattcc

SEQ ID NO: 92408 - DNA, 274 bp, Homo sapiens
ttttttttttttgaaacagtctgtttcccaggctggagtgtagggatccagtcacagttaattgtaccctcaaccttccaggctcaaaaaatgctcccaccacagcctcccaggtagggagtacctggaactacaggggtgggctgccacacccgactaatttttttgtaaaaacggggtttcgctgttcccaggctggtctaaaactccggggctcaagggaacctcccgcctgggcctcccaaagggctgggattcctttttttatttctga

SEQ ID NO: 92409 - DNA, 451 bp, Homo sapiens
ctaccccctgtggtggaattcgagagagagaagggaggtgcacagacctacctggggatggagggaggaagggagtgcttgtggcctcctcgttccttctacttccctggagccagcccctcgggccctccccgctatggagagtagaaaggtgttgtgctcaggctctgggacccaaatgctggtttgagtcttggttctgcatcttcaccattgtgtgacctcagactagtcttctacttgccctgtgcctcagtttgcttatctctaaagcaggaatgataagaactcttgtctcttagggttgtagtgagaagtggcttaaatgcatgtagagggctttgagcagatcctagcgtttagcagacatcaataactgtgagctatttttattatactgggcactgtgctaataagcagtttactcacattattacccttgaccttccca

SEQ ID NO: 92410 - DNA, 1664 bp, Homo sapiens
cgctccctatggaagggctgggagcgttgtctgtgaaagtgtaaaccttatcggcctcagctttgatactggccatgcggctctcctgagactccgacagtccatttgccagcccttcattcttgttgagatgatcctttaaaaaatgcccaggtaaatctttgctggcccccttggagtcctctagtttccccagcttggcatccatttttgggcttcccgtctctttcccttctttgtcctttagctttcgcttctcctttttctttttgtctttgagtgacaccagagctgggttcacggtgatgggctctcccataattgtgggctttggttgaatgggttttaacggaggactctttggtgtagcctgaacaacagttgttgtgagggagggcagtccgggtattgtcccagtggtggtcgttgtaaaggttgcagtgggtatagcgattagctgcgggggagtgggggctggggcaggggcaatgggccgggcacttttcagtttagaagaggtttttgtccgttttgcagttgttagcttttttgcccttttctttatctcctaaatttttcttgtcaattaatccttctgcttccagtttaggcatctcagcagccaaactgccgtctgctgccgagcaactgtctaacgcagccgtcatgttggagattactggaaggttgttcagttcattgttaaggcccttctttttgccagaattcttcccagctttagcaccaataatggaacctgggccattgctcatcagctctctctttccctttggggtcccaggtgggtttccagcaccaggggatgccggtgccttcaactggtcataagcagatacacttgtgcttggctcactgcattcaagtgccacattactcaatccttcctcacagtccgagatcttgtcctcactgtcaggctcgaactccagcttgttttctgggtctaagtgtgcatgagcctggtggtacctcaggccgttaatgtgcttgtactttttgttgcagtttgggtggggacagtcgattaacactggagaagagcagccttggtccaaaaaagtagtctctggtttcccttgaggggtagtgggagtgcttctggaatttgtgcggacacgctttccaggcttattgtcctcagagctggagttcaggtccagctccattggaggcttgtttttccttttgttggtggaggaagggctggctttgatatcctcagcagcacaatttgggggtgtccttcgtccgctggcattgaggctgccccgcctccctttcccattggccccccctctgttcttattctgcagccctctggactctgtgaagctggcctcggagcccggggcagcagcagcagaccttgctctcttccctctgccccggccccctctcatctccaggtcacttgtcggtgactcacaaaacctgggaggggcccagtcgtgcttggtgcagtccagtagggttcccacgtacgttttgttcctccacgtgacattgaccactaggacaccttcttctgtttcatgccacacgatcccttccaaattcacactggtcccaggttcacagggcccaagacactctggctctgtcactactccaacttcacatgtattgacacccacagaacgagt

SEQ ID NO: 92411 - DNA, 718 bp, Homo sapiens
agggtgtgaagcgtgtgctttagtttcgtgggaggcctggcatccccgagagggaggggaaaggtaaccactcctttgtggaggtcgccagggtcattgtcgtggatttgcacagtcggctgggcggtgcaatggcggaaagaaaaggaacagccaaagtggactttttgaagaagattgagaaagaaatccaacagaaatgggatactgagagagtgtttgaggtcaatgcatctaatttagagaaacagaccagcaagggcaagtattttgtaaccttcccatatccatatatgaatggacgccttcatttgggacacacgttttctttatccaaatgtgagtttgctgtagggtaccagcgattgaaaggaaaatgttgtctgtttccctttggcctgcactgtactggaatgcctattaaggcatgtgctgataagttgaaaagagaaatagagctgtatgttgcccccctgattttccagatgaagaagaggaagaggaagaaaccagtgttaaaacagaagatataataattaaggataaagctaaaggaaaaaagagtaaagctgctgtaaagctggatcttctaaataccagtggggcattatgaaatcccttggcctgtctgatgaagagatagtaaaattttctgaagcagaacattggcttgattatttcaacgcactggctattcaggatttaaaaagaatgggtt

SEQ ID NO: 92412 - DNA, 3573 bp, Homo sapiens
ctatttcactctattaaatcttgcaactgcattcttctggtccgtgtttgttacagctcgagctgagctttcacttgctgcccaccactggtgtttgccgctgtcacagacccgccgctgtcacagacccaccgctgactgccatccctccagatctggaagggtgtccgctgtgcttctgatccagcgaggcacccattgccactcctgattgggctaaaggcttgcccttgttcctgcacagctaagtgcctgggttcgtccgcatggcccaagattccattccttgaaatccgtgaggccaagaaccccaggtcagagaacacgaggcttgccaccatcttggaagcagcctgccgccattttggaagctgcccgctaccatcttgggagctctgggagcaaggaccccctagtaacacatccacatacgtccgctatccaaatgtccatccatatacgtccactatccaaatgtcgaaatatccactgtccaaatacgccccatggggcgggatgtgggatcctgggaccaagccagcttctcacaaaggaggggggtcaggcagcagcagctcagggcaggctcagggagagcaggagggcggcagcgggggctgccagcaggctccaggggcgccgccgtctctcctgaccgccacaggcttcctgggccacctcaatcagatgccggtgctgtgtgaatcaccgtttatcatcgccgatgaaccgaccaccgaccttgacgtggtagcacaggcgcgcatcctcgatctgctggaaagcattatgcaaaaacaagcgccgggaatgctgctggtgacccatgatatgggcgttgtggcgcgtctggcggatgacgtggcggtgatgtctgacggtaagattgtcgaacagggcgatgtagaaacgctgtttaacgcccccaaacatacagtgacgcgcagcctggtttccgctcatctcgccctctacggtatggagctggcatcatgactttacttaacatctccggcctttcccatcactatgcgcacggtggatttaacggaaaacatcaacatcaggcggtgctgaataacgtttccctgaccctgaaaagcggcgaaaccgtcgccctgctggggcgcagcggctgcgggaaaagtaccctcgcgcggttgctggtgggtttagaatcgcccgcgcaggggaatattagctggcgtggcgaaccgctggcgaaactcaatcgcgcccagcgtaaagcgttccgccgcgatattcagatggtatttcaggactccatcagcacctgtgaatccgcgcaaaaccgtgcgcgagatcctgcgtgaaccgatgcgccacctgctatcactgaaaaaatccgaacaactggcgcgcgccagcgaaatgctgaaggcggtcgatctcgatgacagcgttctcgacaaacgcccaccgcagttaagcggcggccagctccagcgcgtctgcctggctcgcgcgctggcggtcgaaccgaaactactgattctggatgaagccgtttctaaccttgatctcgtgttacaggcgggtgtcattcgcctgctgaaaaagctacaacaacagtttggcaccggcttccctgttcatcacccacgacttacgcctggtagaacgcttttgccagcgggtaatggttatggacaacggacaaatcgtcgaaacccaggtggtgggagagaaattaaccttttcctctgacgccggacgtgtgctacaaaacgcggtattacccgcattccccgtgcgccgtcgcaccacagaaaaggtttaacgcaaatgcaacgagtcaccatcacgcttgatgacgatttactggagacgctggacagcctgagccagcgtcgtggttataacaaccgttccgaagctatccgcgacattctgcgtagcgccctggcgcaagaggccacccagcagcacggcacgcaaggtttcgcggtgctgtcgtatgtgtatgaacacgaaaaacgcgacttagccagccgcattgtctccacccagcatcatcaccacgacctctccgtcgccacgctgcatgtgcacatcaaccacgacgactgtctggaaatcgccgtgttgaaaggtgacatgggtgacgtgcagcattttgccgatgacgttatcgcccagcgcggctttttcttcgctttttcgtatgaagatactgtcattaaaataatagaaaaggattttacgatgagcggaaaaccggcggcgcgtcagggtgacatgacgcagtatggcggtagcattgttcagggttcagccggggctgcgcattgcgtgcccccaccggcgtggcctgttcggtgtgccccggcggagtgacgtccggccatccggtcaatcccctgctcggtgcaaaggtccttcccggtgaaaccgacatcgccctgcccggcccggtggcgttcatcctctcccgcacctaccagcagttacccggacaaaacacgcccgcgcccggtggggagcctcggccccggctggaaaactgcctgcggatactccgcttaacagctgcgcgataacacactgatactcagtgataagcggcggcagaagcctgtattttgagcacctgtttcccggtgaggacggctacagcccgcagcgagtcactgtggcttgtgcgccgcggcgtggcaaaactggatgaaggtcaccggctggccgcactctggcaggcgctgccggaagaactccgcttaagtccgcatcgttatctggcgacaaacagtccgcagggtgccgtggtggctgctcggttggtgtgagcgggtgccggaagcggatgaggtgctgcctgcgccgctgccgccgtaccgggtactgaccgggctggtggaccgcttcgggcgcacacagacgttccaccgcgaagccgccggtgaattcagcggcgaaatcaccggcgtgacggatggtgcctggcgtcacttccggctggtactgaccacgcaggcgcagcgggcagaagaagcccggcagcaggccatttccggcgggacggaaccgtccgcttttcctgataccctgccgggttacaccgaatatggccgggacaacggcatccgtctgtctgccgtgtggctgacgcacgacccggaatacccggagaatttacctgccgcgccgctggtgcgctatggctggacgccccgcggcgaactggcggcggtgtatgaccgcagcaatacacaggtgcgcagctttacttacgatgataaataccggggccggatggtggcgcaccgtcacacgggccgaccggaaatctgttaccgttacgacagcgacgggcgggtgacagaacagctaaacccggcaggcttaagttacacgtatcagtatgagaaggaccgcatcaccatcaccgacagcctgaaccgccgtgaagtcctgcacacgcagggtgaaggcgggctgaagcgggtggtgaaaaaggaacacagcggacggcagcgtcacgcagagtcagttgacgccgtggcagctcagggcacagacgaagccgcagccaggaccactatcggccagtag

SEQ ID NO: 92413 - DNA, 443 bp, Homo sapiens
ggaattcatagaaacattagttggtcacaaatcacattagctttgcccgaagtttttccccacactcttctttagcatgctattatggggaaagtgaccactcctgggagcgggggtggtcggggcggtttggtggcggggaagcggctgtaacttctacgtgaccatggtacctgttgaaaacaccgagggccccagtctgctgaaccagaaggggacagccgtggagacggagggcagcggcagccggcatcctccctgggcgagaggctgcggcatgtttaccttcctgtcatctgtcactgctgctgtcagtggcctcctggtgggttatgaacttgggatcatctctggggctcttcttcagatcaaaaccttattagccctgagctgccatgagcaggaaatgggtgtgagctccctcgtcattggagccctccttg

SEQ ID NO: 92414 - DNA, 424 bp, Homo sapiens
cggcgatggcggctgcgccggccttgaagttctggcgctttacgctggagcgggaggagaagttcgggtcgccgctctactttaccgactgtaacctccgcggcaggctttttggggccagctgccctgcggctgtgctctccagcttcctgacgccggagagacttccctaccaggaggcagtccagcgggacttccgccccgcgcaggtcggcgacagcttcggacccacgcctatcacaacagctctcttgcagatggtggacctgctggttccgggtggagctgaccatcccagaggcatgggtgggccaggaagttcacctttgctgggaaagtgatggagaaggtctggtgtggcgtgatgaaaaacctgccagggtttaaccaaagagggtgagaagaccagctatgtcctgactga

SEQ ID NO: 92415 - DNA, 461 bp, Homo sapiens
  misc_feature (1)...(461): n = a,t,c or g
naactcgaatnagccctnacgaaggcaccgnngcggaaataccggggcgacgaggtcgtgtggagaatgggagcttgcggggagctggagcttttttagaactggagcttgcggggagctggagcttggggggaactggagcttgcggggagctggagcttgcggggagctggagcttgcagggagctggagcttgcggggaactggagcttgtggggagctggagcttgtggtgccgacccaggaccagttatggactgggggaacccagaggacaaaagaaggactcctcattcaaaagtcgttaagagtttgaagacggcaatgacagagtattaaactaggtgggagccccttctgtgcctggggcctcgtgtgactgcaaagcccacgggtccttgaaggcaaccctggtcttatggcacagactgtggggacagctcctatgttctccccttggg

SEQ ID NO: 92416 - DNA, 746 bp, Homo sapiens
cgcgtggcaccggcccggaaaacccgggtcgacgatttcgttttatttaaaaagaaagctcttatagttctagggtttttttaattaaaaaatttaggcaattattttaatttgactatacctgttaacaatataagaaacgttgcaacagtcaaacgagcaactcttaagtcttattacatgttatctgtatcaccaccaaagctttttttggttaaagtaatttttgcttatagattcaatcaatctgtaagaccagtccaaaggggaaatcctttgttgtctatatgctgtgatcaatgaactgagtgtgagtgcaactaaactcccatttgactcagtcattaatggatttttttttcaaagtgggattacccacattaaaaacagagatcggccattctcacctaggtcattaaatttgttttcctggccacctttcatttagcctgatgcttttccgcttaggtgtgtcgattctgggtttttaggaaatgaagtccttcatgttgactgtggtatgtgaagaccctgatatctctgctgctctgaccccattaaactttcagattttactgccatattgcttttgtacatgtgcttttgtttcatgtacctcatgtgccatgaggacactcagtggggagtctggcacctgcctggacaaaccctttccttttgttcttcctcttaatgaaatactttctatcaaaattacttattcaaattttggtaattttttagga

SEQ ID NO: 92417 - DNA, 412 bp, Homo sapiens
cccgggtcgacgatttcgtgaggcgagggtggctgccgcctgaactttttagatctggggcggcgcggaatccgcatccgccgggagtgtgatgaagctaccctgcctcgctgctccgcttgccgccagctgacaccgcctgcacccagcccgcccgggaggggagacgccgcggggccgtgaccttggcggaggagggcacactgataattcttgtatcttgagtgtggaccaagttttgggtgacatggcccaggggaataattatgggcagaccagcaacggggtggccgatgaatcacccaacatgctggtgtacagaaaggtaagaatgtcttcagtttcttggaaaacgggaaacttccggctttctcgatttttttccccctctagatcagagtatgtatcaacg

SEQ ID NO: 92418 - DNA, 409 bp, Homo sapiens
aaaggtctctgaggcggcggcggcggcggggatcgtctccggcactggcgcaccatgtcggtcagtgtccatgagacccgcaagtcgcggagcagcacggggtccatgaacgtcaccctcttccacaaggcctcccacccggactgtgtgctggcccacctcaacacgcttcgcaagcactgcatgttcaccgacgtcacactctgggcgggcgaccgtgccttcccctgtcaccgtgccgtgctggccgcctctagccgctattttgaggccatgttcagccatggcccttcgggagagccgggatgacactgtcaacttccaggacaacctgcacccggaggtgctggagctgctgctggactttgcctactcctcacgcatcgccatcaacgaggagaacgctgag

SEQ ID NO: 92419 - DNA, 408 bp, Homo sapiens
ccagcctcatagttctgccttgcctgggcccaagcctccctctcacccttatcagggatttgtccaagcaaagcctgtgctaaaataagccagaataattcttccccagccacaccctccagtccagaggccacattgaaggatggctctggtatagggctgtcagagggccgtgcagcttagccctgccctgccctgccctcctctgctcggctctgcccgcccctcaggcatgtttttggtacccacaggtgtgacgagtacattacacagctggatgagatgcagcggcagctggctggctgctgaggacgagaagaagacgctgaactcgctgctgcgcatggccatccagcagaagctggcgctgacccagcggctggagctgctcgagctggaccatgagct

SEQ ID NO: 92420 - DNA, 2343 bp, Homo sapiens
caggtcctacacctacgatagctactatagcaggagtcggagtcgaagtagaagccagagaagtgacagttaccaccgaggcagaagttataatcggcggtccaggctttctgtctggaaagccctttcactccctcattgctctagttaatgttcaagttcaagcctcagctctgagcagccctgtgggcccaccagacagctcttcaaaccactccttcctgccaggtccagtgttgccagcctcctgccaacagagccagccccctgcccccacgggtgtccatgccagagcagcattccgcaagcctggctgcatctccccagcagaggctgagcaagggggccactcagcagtggtcagcgtccagacggcggccccagctgacgcgcgggctccaatcggcgccccgcgccccccgcccgccgcgcccgaggctctggggccgcagctgcttggcgctggactcgccgcggccctgcgcctccgcctgcctggccgcgcccccgggggccatggtcgcggggccctgcgcgggggcggcccccagcgcggcgcttcatggagcggccctggcctggccgccgggggcagcgcgatcccgcggggccctgtgagcccccagcgccacggcaccatgttgctggttgagaagacaactgactccccggcggctgagttctcgctggtggaggacgtggcgctgcacttcgcctgcttgatgggccgcctgaacgagcagcgcctcttccagcctgacctctgcgacgtggacttggtgctggtgccccagcgcagcgtctttccggcacacaagggtgtgctagccgcctacagccagttcttccactcactcttcacccagaacaagcagctgcagcgtgtggagctgtccctggaggcactggcacctggtggcctgcagcagatcctcaacttcatctatacgtccaagctgctggtcaacgcggccaacgtccacgaggtgctcagcgccgcctcattgctgcagatggctgacatcgctgcgtcctgccaagagctgctggacgcccgctctctaggcccaccaggtccgggcactgtggccctggcccagccggctgccagctgcactccagctgcgccgccctactactgtgacatcaagcaggaggccgacaccccaggcctgcccaagatctatgcccgcgagggccctgacccttactcggtgcgtgttgaggacggggcagggactgctggtggcacagtgcctgccaccattgggccagcccagcccttctttaaggaggagaaggagggtggtgtcgaggaggccggtgggcccccagccagcttgtgcaagctggagggtggagaagagttggaggaagagcttgggggttctggcacctacagccgcagggagcaatcccagatcatcgtggaggtgaacctcaacaaccagacactgcacgtgtccacggggccagaggggaagccaggtgccgggccaagcccagccaccgtggttctgggccgggaggacgggctgcagagacactcggacgaggaggaggaggacgacgaggaggaggaggaggaagaagaggaagaggaaggtggtggcagtggacgggaggaggaggaggaggaagagggtggcagtcagggagaagaggaagaagaggaggaggacgggcacagtgagcaggaagaggaagaggaggaggaagaggaggaagggcctagtgagcaggatcaagagagctctgaggaggaggagggggaggagggggaggctgggggcaagcaggggccacggggaagccgaagcagccgggcagacccccctccccacagtcacatggccacacggtcccgggagaacgcccggcgccggggtacccctgaacctgaagaagctgggcggcggggtgggaagaggccaaagccaccccctggagtggcctctgcatcggcccgagggccgccagccactgatgggctgggggccaaggtgaagctggaggagaagcagcaccatccatgccagaagtgcccacgagttttcaacaaccgctggtacctggagaaacacatgaatgtgacccacagccgcatgcagatctgcgaccagtgcggcaagcgcttcctgctggagagcgagctgctgctgcacaggcagacagactgcgagcgcaacatccagtgtgtgacatgtggcaaagctttcaagaagctttggtccctccatgagcataacaagattgtgcacggctacgcagagaagaagttctcatgcgagatctgtgagaagaagttctacaccatggcccacgtgcgtaagcacatggttg

SEQ ID NO: 92421 - DNA, 775 bp, Homo sapiens
tttcgtcgaagcagctgtcaagatgctggggtccctggtgttgaggagaaaagcactggcgccacggctactcctccggctgctcaggtccccaacgctccggggccatggaggtgcttccggccggaatgtgactactgggagtctcggggagccgcagtggctgagggtagccaccggggggcgccctggaacatcgccggccttgttctccggacgtggggcagccaccggggggcgccagggaggacgcttcgataccaaatgcctcgcggctgccacttggggacgccttcctggtcccgaagaaacactcccaggacaggacagctggaacggggtccccagcagggccggactgggcatgtgcgccctgggccgcagcgctggtggttcattgctacagcaagagtccgtccaacaaggatgcagccctgttggaagctgcccgtgcccaaaaatatgcaagaagtcagcagaaacagatgtgctttgcttcattctgctgcagtacaggagtacgggtatggaaactgacccttgctgacccctggaatcacctgttggctactgcgaagggctgccgggctgcgactttccccttttggcagggcatttgcagagcagcaatgttgggaatccactcttcccatcccccaggggatgccactaccatattccattgagctgccaggcattgattatttagttctttcaaatacatgtttttctaatagcaattaaacacccatcccaaaaatacagaaagtaattg

SEQ ID NO: 92422 - DNA, 1268 bp, Homo sapiens
tgaatggccgcaggcttcttaaaaattggttgtggggcctcagcaggcacctgcaccccaggccaccggggtcatcaggtgctgggatgactcatgccggccctgtctcctttcaaaagttgcaaaagatgacggatcctttctgcgttggaggccgtcggctcccggggtccagcaagagtggtcccgggaaggatggcagccgaaaggaggtccgacttccaatgctgcatgacccaccgaagatggggatgccggtggtccgtggtggacagacagtgcccggccaggcccctctctgctttgacccaggaagtccagccagtgacaagacagaagggaagaaaaaggggcggccaaaagccgagaaccaggccctccgagacattcctctctccctgatgaacgactggaaggatgagttcaaggcacactcgagggtgaagtgtccaaactcagggtgctggctggagttccccagcatctacgggctcaagtaccattaccagcggtgccaagggggtgccatctcagatcgcctggccttcccctgccccttctgcgaggccgcattcacctctaagacccagctggagaaacaccggatctggaaccacatggaccgacccctgcctgcctccaagcctgggcccatcagcaggccggtcaccatcagccggcctgttggggtcagcaagcccatcggagtgagcaaacctgtcactattggcaaacctgtgggtgtcagcaaacccattggcatcagcaagccagtctcggtcggcagacccatgccagtcaccaaggccatcccggtcactaggcccgtgccagtcaccaaacctgtcacagtcagcaggcccatgcccgtcaccaaggccatgccggtcaccaaacccatcacagtcaccaagtctgtgccggtcaccaaacccgtacctgtcaccaaacccattacggtaacaaagcttgtgacagttacgaaacccgtgccggtcaccaagccagtgacagtcagcaggcccattgtggtcagcaagccggtgacagtcagcaggcccattgctatcagcagacacacaccgccctgcaaaatggtgctgctgaccaggtcggagaacaaagcacctcgtgccacagggaggaacagtggtaagaaaagggctgcggacagcatggacacctgcccaattccacccaagcaggccaggccagagaatggggagtacggcccctcctccatgggccagagctcggccttccagctg

SEQ ID NO: 92423 - DNA, 2794 bp, Homo sapiens
tttcgtctctgcgcgcacacaccacacacacgcacacgcactcacacgcgcgcacacacgcagccggcacaggcggcggcggcggctgcccaagtcaggacgaacctatctaggtaccgtcttgagaaggcggcagcggcggcggcggcggcggcggcggcagcccgagcatccctcctctcccggagagggagcaccgccgagagtttccgttccctttgccattcccttccccctccttttcttttattttcgagagaatttcttcttggcttattggtttaatttgatttttaaaattttgggttgcttttgtgtatgtgtgctttttttttctttcctcattttatttgcatccagagcatggcgggctgcgggctgtcggaagacaccctcttctcttccttcttttacaactacggctcctcctgggaaaccccttccaaccaggttttttgcgaaaatcagtgaactaatattggtaaaattggagccccatggatgaagggtacttttgtgctgctctggttggtgaagaccagcctctttgcccagatcttcctgaacttgatctttctgaactagatgtgaacgacttggatacagacagctttctgggtggactcaagtggtgcagtgaccaatcagaaataatatccaatcagtacaacaatgagccttcaaacatatttgagaagatagatgaagagaatgaggcaaacttgctagcagtcctcacagagacactagacagtctccctgtggatgaagacggattgccctcatttgatgcgctgacagatggagacgtgaccactgacaatgaggctagtccttcctccatgcctgacggcacccctccaccccaggaggcagaagagccgtctctacttaagaagctcttactggcaccagccaacactcagctaagttataatgaatgcagtggtctcagtacccagaaccatgcaaatcacaatcacaggatcagaacaaaccctgcaattgttaagactgagaattcatggagcaataaagcgaagagtatttgtcaacagcaaaagccacaaagacgtccctgctcggagcttctcaaatatctgaccacaaacgatgaccctcctcacaccaaacccacagagaacagaaacagcagcagagacaaatgcacctccaaaaagaagtcccacacacagtcgcagtcacaacacttacaagccaaaccaacaactttatctcttcctctgaccccagagtcaccaaatgaccccaagggttccccatttgagaacaagactattgaacgcaccttaagtgtggaactctctggaactgcaggcctaactccacccaccactcctcctcataaagccaaccaagataacccttttagggcttctccaaagctgaagtcctcttgcaagactgtggtgccaccaccatcaaagaagcccaggtacagtgagtcttctggtacacaaggcaataactccaccaagaaagggccggagcaatccgagttgtatgcacaactcagcaagtcctcagtcctcactggtggacacgaggaaaggaagaccaagcggcccagtctgcggctgtttggtgaccatgactattgccagtcaattaattccaaaacggaaatactcattaatatatcacaggagctccaagactctagacaactagaaaaataaagatgtctcctctgagtggcaggggcagatttgttcttccacagattcagaccagtgctacctgagagagactttggaggcaagcaagcaggtctctccttgcagcacaagaaaacagctccaagaccaggaaatccgagccgagctgaacaagcacttcggtcatcccagtcaagctgtttttgacgacgaagcagacaagaccagtgaactgagggacagtgatttcagtaatgaacaattctccaaactacctatgtttataaattcaggactagccatggatggcctgtttgatgacagcgaagatgaaagtgataaactgagctacccttgggatggcacacaatcctattcattgttcaatgtgtctccttcttgttcttcttttaactctccatgtagagattctgtgtcaccacccaaatccttattttctcaaagaccccaaaggatgcgctctcgttcaaggtccttttctcgacacaggtcgtgttcccgatcaccatattccaggtcaagatcaaggtctccaggcagtagatcctcttcaagatcctgctattactatgagtcaagccactacagacaccgcacgcaccgaaattctcccttgtatgtgagatcacgttcaagatcgccctacagccgtcggcccaggtatgacagctacgaggaatatcagcacgagaggctgaagagggaagaatatcgcagagagtatgagaagcgagagtctgagagggccaagcaaagggagaggcagaggcagaaggcaattgtaagtggcctggagctcacttttattttaaagtagggtttcttctttttctgtgtgctttttttggtgatagattagaaaataaacaaaagctaagtctttgttagaacaggccattttcagccttttggctttaaaatatccataagtcttcggtccccattgacctaacttattggaaaacaaaatgtttaagtcagtatatttctcactcacagtttcattttgaagttcattactgttttcaccttctgttttgaaaaatggagggagtagagatttttttttcagtcagatatttgttctttctgaa

SEQ ID NO: 92424 - DNA, 466 bp, Homo sapiens
  misc_feature (1)...(466): n = a,t,c or g
ggggttgacctgaaaaccctcgaaatganangctttgnananacnanngnnntggaantnccgggtcgnnnnnntcgtccggccttatattcagggtcttacttctccaatgtcgatggaaatgttctcataagcctgggtccaagcatatggtgacatttatgtttctggttttttgtgggcttgtttttaccagagcaacagataatgttatttgctactttacttagaatggcacagggatgtgacttcgcattaggcaatgatttcttaaatataacaacaaaagcacaagcaaaaaagaaaaattagataaattggacttcatcaaaattaaaacctgctgtacgtcaatggacgctattgagaaaacagaacccctcacaaaatggacaaaagcatttgtaagtcatgtttcttataagagactcttattcggaatatgtaaagaatactcacgtcaata

SEQ ID NO: 92425 - DNA, 388 bp, Homo sapiens
tgggctttgggggcagacctggaaacaggggcacccagggataaagcaggacctgcacgtcacagagcccacctggatgcccacctggatgcccacctggatgcccacctggatgcccacctggatgcccacctggatgccctcccgcctattgggctaggcctacctgcccgggtgggttgctgtttcagtgttcttcctccgagaggaagtgctcatcaggagccaggaatctaatgaggcaccccccggggactgaggcctgtaccttccacactcctgcgggctgctctcccttcctccctctccagggcctccgatctcagcccccattctgggtgccagcactgcaggcctgctgagcaggaaagaatccatggcatctcct

SEQ ID NO: 92426 - DNA, 451 bp, Homo sapiens
  misc_feature (1)...(451): n = a,t,c or g
ntcgagatcctagaccagcgtggnggaattctggtagaactggaatcgttggcccgatctggagcccctggaggctgggtggtagaagtggagtctctggccccatccggatgatggaggtggaatctctggccccatccggatgatagaggtggaatctctggccccatctggagcccctggaggctggatggtagaagtgaaatctctggccccatctggagtccctggaggctggatggtggaggtttgctggggtaaccctaggcggtaggtgttgccacccaaggtgaagaggaactcacagcagcgctggcttagcagctctgtggggcataacccacttctttgcaaactctggtgctgggagatgatgaaatgagcacctggtacattaggtttgggacttaaagctgatacttccattcgggagcaggatgagtaagacctg

SEQ ID NO: 92427 - DNA, 586 bp, Homo sapiens
cggacgcgtgggcagagggggcccctccagtccctgagaattggtactacgaaaaggtgaactcctgggcagaatcttgcctagagcttgcggagtccagccaggcccctgctgaagggccccagaccaccggccacttctcccccgtccatctgaccagctgggcccctgcgcccacctggcctccacgttccctctcctctcacccacacccctggccatggctaactactacgaagtgctgggcgtgcaggccagcgcttccccggaggacatcaagaaagcctaccgcaagctggcccttcgttggcaccccgacaagaaccctgacaataaggaggaggcggagaagaagttcaagctggtgtctgaggcctatgaggttctgtctgactccaagaaacgctccctgtatgaccgtgctggctgtgacagctggcgggctggtggcggggcagcacgcgctaccacagccccttcgacaccggctacaccttccgtaaccctgaggacatcttccgggagtttttcggtggcctggaccctttctcctttgagttctgggacagcccattcaatagtgacc

SEQ ID NO: 92428 - DNA, 737 bp, Homo sapiens
ttttttttttttgactgtgaggaatttttattttcctttcatgttcactaattgcaagctttcttcatttcggtaatatctaaaatgatctcctcttgtcggaggtagattttcccagtagcttctaactcctgacccagaagcggtgtattgcgcctcagcatggaggaggacgtgaaggcgtacggagtctgggagtagtacaccacgtaggtaggtttgtactggtttggctttgtgtactgtgttccccaggcaattcgaatccagactgcattctcctcagtttctctgaagctgactgtcacattttttaatgctctctgaagaattttcttgaacgaatttttaaattgtttcatatcaaaaaggtcaacatcttcacctggtcctttactcatctgaaaaacatcccaaactttctggtgctgatgaaattgcatataaatgatgtctaacagggcagcatcactgatacttgcacgcttttcctcacacagatggatcaagtgctgaactacagattcctttctctgtcggaaatttacagtctgcagttgattttcagacaaaaaatcccaggccttcaggattgttgtcagttcattcatggggattttcaagatggtcctcttgatgaactcagcaacagtctcatccatctctttggcacggcccacatctcctgcagtctcactcctcaagagctgtctcgtgccgaattcgaatcgatggga

SEQ ID NO: 92429 - DNA, 432 bp, Homo sapiens
cgacccacgcgttcgcacgaagatgaggaaaagccagtgcaacaatgttgaaaattccaattaccataatgcctcttctcctgcaaatgattacaactcctctccagcaagggcacaaaactggacggaaatgagtttgacgaattgacagaagtaggcttcataaggtgggtaataacaaactcctttgagctgaaggagcatggtctaacccaatgcaaggaagctaagaacattgataaaaggttacaggaactgctaactataataaccagtttagagaagaacataaatcttcttgaagaacgagtatcaataactgaatcaatcaagcagaagaaaggatatcagagattgaagatcaacttaaataaaatgtgaagacaagattagagaaatgagaatgaaaaagaatgaacgccgcctccaaga

SEQ ID NO: 92430 - DNA, 410 bp, Homo sapiens
  misc_feature (1)...(410): n = a,t,c or g
gtttccaggctctcactctgtccaggtatgaggccaggcattgaggcgttgcatggtctcctcattctggatgcctcccattcctgccagcccctcggccatccctgcagccagaccccaagctgtcccagaagctgggggagtgggacatggagatctgggaaccacagcccccagcacctggatagacgctggccaggcgccatagctggctgccttgacagagcttanggactggtagttggtggataaggtgaagcgagtggtaaagctcatgctctctggggaggagagtgagaggataggactcaggctttgccgacgaccagaatattagatattatcattgcctaatatccctttcttcttttgctgttgataatcaaaactttattactgagtctgacttg

SEQ ID NO: 92431 - DNA, 403 bp, Homo sapiens
cttcgaacaagagctttagctgaacacaggaaaaacagaggtctgaagcgctgagtctgaaggatgcgccccagagctttgagggctctgctgtagcatctttatctttgagcagtcctccaccacggacacctggtgatcccctaaacatgcacaggagcctgagccaggtgcagcgcccagaacgctgcaggggccctcagcactggggatacagccttcctgccccacctgctggctctctgccttattacatgttaccatttcaatcatggctaaatatattcatacacatcttatatgaatgtatataaatgccttgaaagattgcaaagacaacaaaagattaaaagtcattttctctatgtggtaggattaagggggcttttcacgtttttcatcg

SEQ ID NO: 92432 - DNA, 412 bp, Homo sapiens
cataatgattatcacatgtttgaatctgttcatgtaacagtcttcttacgcccaccaaatgaatggattcttgagaaagtaactgtacattgaaatttggcaaacaaatgcatgttttacctgtacatgcaggcatgctgcacattctgtaccctctaacttttcatctgctaggtactgaaacatgaacctctggtggccaagtgcaatatttaggggattcagttttatacactttggtaagatgataaaaatatcttctaacatatttgtcttctttcaacatttcattcatttagcaaatacttaagttagagaagcagcattgcttagtgtggctaaaagcacaaactctgggaattgactggctggcttaatttctggctctgccatttaccagccatgtgctttg

SEQ ID NO: 92433 - DNA, 851 bp, Homo sapiens
cgaggggaggcgggaggtgagcgaggctgtggcaaagagctggggtggagctgtgggcggagctgcaagaggagaagttggggacggacttgcaggaggaaaagctaggggtggagctgtgggtggagttgggggagggagctgaggcccttctgtgatgcacccttaggcaagagtccaaactttcccgcggcgacctaactgcacctccagtgtcttcccccagagggcacagaagcagcaagaagggcgggaacacttgactggggtccatgcagctctaggctgagtcttgcagggctgagccccccaggcctgctctcctgtgtcctggccgctccgtcagtgcctgccagtggggtccagagggaccgtttttttaacgcctcttttgcagtctcccgcattgacttcataaccaagttctgggtccctgcctctggagtgcctgatgagacaaaacggctcctcgtcctgcatccccgctgctacttccagaattcaggcctcgtggtctggagcctgcactgttccatgagcctcctgagcaacctggagtcctctgtctttcttccctcagagagatgcgcctacttctccctggagaagctcgaggaagcaggaatgctggagatgagctgctcctcactctcactcctgggtgtgctgggcagtggggtgcaatgtgcacgtaggtgcacactctccctgggcggcagcgagaagcagaggtctgatctgtggtcggatgaggagaggaagtgcaagtctttttgtatttcagagacctcgtctgctcaggggcttgttcttacatcttttgcagggctgttttgaagtcagtattcact

SEQ ID NO: 92434 - DNA, 639 bp, Homo sapiens
cccacgcgtccgtttacatttggccgatttccagcaccgacgcccagggagtgtccgctggaggatcagccgtcttgtgtggcctgccccgaatgctgtgtacatggtgctcccggggcaattgtggattttgtcctgatgggatgctgcagtgacagtgaggctggagctcctgcccagcatgcatctctgtgtgccttgtctttgttgatgttcgttgccacgttctgtccacacccttgccccatgcctcctgcgcagcccctttactcactggagcccgccctgcggcctgtcccctcttcagccaaatggagcactgttcagggggactgggtggaggacacggagtacctggccgcactgactcccacacagaggacacgtggctgctgggaagcgtgtcccactgcggatcccccatggtgcacacagagatcgacttcttccgtcttctgggctgaactcttccccaaacctgagcttttcccagctctttgctccccggtcctgggcagttctcacccttaaagaagagcctttcccactacatcccccacggaagggcagaagctcagagagtctccactgtgccctaacctgaccctcaccatgcggtccctgcgcgggtccccgcga

SEQ ID NO: 92435 - DNA, 496 bp, Homo sapiens
  misc_feature (1)...(496): n = a,t,c or g
gggagttggggttttnnaaaaactgaggactgaggacntnccannnncnaannnngggcgaccacgcgtncgcagactnnnntcactgaagatgtaagccaactgttactctgagtttcggagaccccctgtggacagcatgaagcctgtccctgatcaaagtcttagtaagcaggaaggagtcaaggttaaggaatgcgtctgattaccctgaactgtagtaccttggaaagtgaaccaaggcttgagttttgttctggaagcctgccttgcctgcttctgtaatctggcgctctgcatgtgaatcttggatctatatggacactgctatatgttactgtcatgattctctgctcttccatgagctcagacttggcaccttattttacttctgagccacctctaccgtccagaaaggtggnggacctgtaaaactacattgttctgccaaacctgtgaccactcatagctcatggttgcataatggaaaaaagga

SEQ ID NO: 92436 - DNA, 369 bp, Homo sapiens
gtaaggctcaagaatcagaatggtgtagggtgtcttaacagaaaaggtccaacggcacacaatggaatatgatcatccgctaggtaacccagccacctgatcgaacatgcctggaaggccatgttcagcccagcatgtgcaacttttcacatcaacccctttaaggaagctgctcgcagacagcccatcctccttcctttctcccccactccatatggttgttaccgagaataagaaaaccatattataagtgtcacccctgcagctggttcaagactgtacaaccaatccactttcgtttcattttgataggtacaatttctttcccaaacaaacactcacgtattgagttttgaaaaacctcgtgcc

SEQ ID NO: 92437 - DNA, 469 bp, Homo sapiens
  misc_feature (1)...(469): n = a,t,c or g
gggcggaattgaaaccctnnnaattgataccgttggacctcatacgccnnctnnatcggagggaggaattgcacctccaatcccagatgctatgttcagcaaaggctccatggttctggcctacagtgccggcctggacacctcctgcatcctcgtgtggctaaaggaacaaggctatgacattattgcctacctggccaatgttggccagaaggaagacttcaaggaagccaggaagaaggcactgaaccttgggtccaaaaaggtgttcattgaggacgtcagcaaggagttcgtggaggagttcatctggcctgtatgaggactgctacctcctgggcccctctcttcccaggccttacatcacccgcaaacaagtggaaattgctcactgggagggggcaaagtatgtgtcccacagtgccatgggaaaggggaacgatcaggtctggtttgagctcgccttgtc

SEQ ID NO: 92438 - DNA, 441 bp, Homo sapiens
ctgtggaggtgctcctgaagctcggagcagacccccgggtgtacgcagaggacgggagcacccctgagcgggtgtggaccccagaggtgtgggccccgggaggtgtgagccccgggaggtgtgggccccgggaggtgtgagccccgggaggtgtgggtaccgggaggtgtgagtctggcaggtgcacacccaggcagggaaggctcacccgaccggctgtctctgaaagctgtcagaagcctgagtggcctgctagagcggtttcctagccccgccgtgcgccattcccttcctggaagtcctgactttaaaacctcgtcagtctgcagtggaagtggcagcgactcccattttgtgaatgcctttggtgtcgggttttgtgtcatttccttccgtgctttgcctgaggaagtggtgttactgatggagaaactgaggctg

SEQ ID NO: 92439 - DNA, 401 bp, Homo sapiens
aagaaggttcctgggagactgtcagaaatgagtttttcactgaacttcaccctgccggcgaacacaacgtcctctcctgtcacaggactgtgggccctctcttggattagcggcgggcataccattgctggtggccacagccctgctggtggctttactatttactttgattcaccgaagaagaagcagcattgaggccatggaggaaagtgacagaccatgtgaaatttcagaaattgatgacaatcccaagatatctgagaatcctaggagatcacccacacatgagaagaatacgatgggagcacaagaggcccacatatatgtgaagactgtagcaggaagcgaggaacctgtgcatgaccgttaccgtcctactatagaaatggaaagaaggaggg

SEQ ID NO: 92440 - DNA, 2283 bp, Homo sapiens
tttcgtgtcgagaggtcgcgctgccgccgttttatttgaagacatcgtccagttctgaccatggactcgcagccatcggcccttagtttccatcccctctagtgggccttcgggggctctactgacgtccctccttcccttggtaccgggccggggaagtgttctcgggcgcgggaggttccgcatgcccaggcctggccaggggagatgaccgatccgtcgctggggctgacagtccccatggcgccgcctctggccccgctccctccccgggacccaaacggggcgggatctgagtggagaaagcccgggcgccgtgagcttcgcggacgtggccgtgtacttctctcccgaggagtgggaatgcctgcggccagcgcagagggccctgtaccgggacgtgatgcgggagaccttcggccacctgggcgcgctgggattttcagttcccaaacccgcttttatctcgtgggtggaaggagaagtggaggcgtggagcccggaggcccaggatcccgacggtgagagctctgcagctttcagcaggggccaaggacaggaagcaggatccagggatgggaatgaggagaaggaaaggctgaagaagtgtccaaaacaaaaagaggtggcgcatgaagtggctgtcaaggagtggtggcccagcgtcgcctgcccagagttctgcaaccctaggcagagccccatgaatccctggctcaaggacactctgacccgaagactgccccactcttgcccagactgtggccgcaacttcagctacccttccctcctggccagccaccagcgggtccactccggggagcggcccttctcctgcggccagtgtcaggcgcgtttctcccagcgcaggtacctgctccagcatcagttcatccacaccggcgagaagccctacccctgccccgactgcgggcgccgcttccgccagaggggttccctggctatccacaggcgggctcacaccggggagaagccttacgcgtgctcagactgcaagagtcgcttcacttacccctacctgctggccatccaccagcgcaagcacacgggcgagaagccctacagctgccccgattgcagcctccgtttcgcctacacctccctgctggccatccacaggcgcatacacaccggcgagaagccctacccctgtcctgactgcggccgccgcttcacctattcttccctcctcctcagtcaccggcgcattcactccgacagccggcccttcccctgcgtggagtgtgggaaaggcttcaagcgcaagaccgccctggaagcccatcggtggatccaccgctcctgcagcgagaggcgcgcgtggcagcaggccgtggtggggcgttcagagcccatccctgttttgggaggcaaggatcccccagttcacttccggcactttccagatatatttcaagagtgtgggtgatggcgttcacacaaactggtcagcgtttccctggagaggaagaggcaaggtttgtgtatttgggggataaggaaaggaagtgggcgtttgaggaaaacaaagttcttgccttaaggtaaaaagcagaggttaggggcacagagggctgttggggaggaggcaggaatcttgaaaaggtgcctgggggttgaccccattttctgaagctccagcacacagggccccgtgttcacgtcccatccttcacttgaaaaccattcacctaactggcttttccttcatgattgttctctcccttgtagctctctgcttttttggcctgtatctctcctactcctctgagatggggtcccctacattccagtgcctattaaaggagcctgcacccactctggaccccccagaatagaggggatacctcaggcctgtccctcggctggtggggggggcggagctcatcccaggattcttttcttttttttgagatggagtcatgctctgtcgcccaggctggagtgcagtggcgtgatctcggctcactgcaacctctgcctcctgggttcaagccattctctgcctcagccttcccattagctgggattacaggcatgcgccaccaggcccagctaatttttgtgctgttagtagagacggggttccaccatcttggccaggctggtcttgaattcctgacctcgtgatccacccgcctcggcgtctcaaagtgctgggattacaagcgtgagccaccgacccctgccgaggattctgccttttaccaatgcaggtgaaacatctggcaaggagacacctggagtgtaggtgttccttgg

SEQ ID NO: 92441 - DNA, 379 bp, Homo sapiens
tttcgtgcgactctcggtcgtgcagcggcggcgagcgctctcgagcggctgcgggacgcgaggtttccggagctgagctcaatgtgcagcaatggatgacgacagcctggatgagctgtggcccggagcccagggccggatggacacccacaggtcggccctgcggacccggcaggtgactttgaagaaagcagcgtgggcagcagtggggactctggggacgacagtgacagcgagcatggagatggcacagacggagaagacgagggggcgtctgaggaggaagacctggaagacagatctggttccgaggattctgaagacgacggggagacattgctggaggtagcgggtactcaggggaaactggaagccgctg

SEQ ID NO: 92442 - DNA, 424 bp, Homo sapiens
tgtcgtgacacggcgcgcacctcacacagcacacgatttcgctgcgcacacctcacacagcacacgatcacgcggcgcgcacctcactcacagcgggggatcacaccgcgcacctcacacacacagggcacgatcacgcggggcacacctcacacagcacacgatcacgcggcgcgcacctcacacaggacacgatcacgcggcgcgcacctcactcacagcacacgatcacgcagcgtgcacctcacacacagtgcacgatcacaccgcgcacctcacacacacagcgcacgatcacgcggcgtgcaccacacacacagcgcacgatcacaccacgcaccacacacacacagcgcacgatcacgcggcgcgcacctcacacagtacacgatcacgcagggtgcacctcacacacacacagggg

SEQ ID NO: 92443 - DNA, 479 bp, Homo sapiens
  misc_feature (1)...(479): n = a,t,c or g
gtctgacnaaaacttgaaactccncgcaatagccaccngcctgnaanncccgggnccacgatttcgtgctggaaggcggcgggcggccgcccgcgaggttttgattttacagttcccgccgccgaacttaacccgggggtggggcggcccgggagggggcggggcacgtgagcgatggagaccatctggatctaccagttccgcctcatcgagatcggggactccaccgtgggcaagtcctgcctcctgcaccgcttcacccagggccgcttccccgggctgcgctcccccgcctgcgaccccaccgtgggcgtggacttcttctcccgcctgctggagatcgagccgggcaagaggatcaagctactgctctgggacacggcgggacaggagcggttcatatcaataaccccgatcttattaccgcaacttagatggtggatttttagtattngacattactaaccgacgatcttttg

SEQ ID NO: 92444 - DNA, 1241 bp, Homo sapiens
tttgtggactctccagcatgcgcctgtttgctcggtgctgttctctcgataaatcacaacaaagcttccagagggagaggaaggatggacggcaccactgcccctgtcactaaatctggagctgccaagttagttaagagaaatttccttgaggcgctaaagtccaatgacttcggaaaattgaaggctattttgatccaaaggcaaatagatgtggacactgtttttgaagtcgaagatgagaatatggttttggcatcttataaacaaggttactggttgcctagctataaattgaagtcttcctgggccacaggcctccatctctctgtcttgtttggctatgtggaatgtcttctggtgctactggaccacaatgctacaatcaactgtagacccaatgggaaaacccctcttcacgtggcttgtgaaatggccaatgtggattgtgttaagatcctctgtgatcgtggggcaaagctcaattgctactccttaagtggacacacagctttgcacttttgtacaactccaagttccattctctgtgccaagcaattggtttggagaggggcgaatgtgaacatgaagaccaacaaccaagatgaggagacgcccttgcacacggctgcccacttcggcctttcggagctggtggccttctacgtggaacacggggccatagtggacagcgtgaatgcccacatggagacccccctggccatcgccgcctactgggccctccgctttaaggagcaggagtacagcacggagcaccacctggtctgccgcatgctgcttgactacaaagccgaagtcaatgcccgagatgacgactttaaatctcccctccacaaggcagcctggaactgtgaccacgtgctcatgcacatgatgctggaagctggcgccgaagcccaatctcatggatatcaacggctgtgctgccatccagtacgtgctgaaggtcacctccgtgcgccctgctgcccagcctgagatctgctaccagctcctgttgaaccatggggctgcccgaatataccctccacagttccataaggtgaggctctgcccagtggtcagcaggttgaggaagattcaaatggcagccttgtctgaaatctccaagtaactcaagcttgcttgaggcttgagtcctgggctaactacctctgatcctctttgaccttccattacatacctaatcctagctgtctcctcatctcatcctagtctag

SEQ ID NO: 92445 - DNA, 381 bp, Homo sapiens
cacccaagacgcccccacagcacgtgcactcacctccacccaagacgctcccacagcacgtgcactccacgactgcacccaagacgccgcccacagcacgtgcactcacctccacccaagacgccccccacagcacgtgcactggactccacccaagacgcccgcacagcacgtgcactcgactgcacccaagacgcccccacagcacgtgcactcacctccacccaagacgctcccacagcacgtgcactccacgactgcacccaagacgcccccccacagcacgggcactccacgactgcacccaagacgccccccacagcatgtgcactcaccgactccacccaagacccacagcacgtgcactcaactccacccaag

SEQ ID NO: 92446 - DNA, 2402 bp, Homo sapiens
ccctactagtccttgtggggaaggttacggaatatctctgaatcttactttcatcataagtaacatgagggtgctaagagcacacttcatcgaattacagttcccttttatgggccaggtggtaactggaacacagaacagtgaaggacagaaccttggaccacaggccattcctcaggatggcagtataacacatcagatttctaggcctaatcctccaaattttggtccaggctttgtcaatgattcacagcgtaagcagtatgaaagagtggccccaggagacccaacagctgcttcaaatgcagcagaagtatcttgaagaacaaattggtgctcacagaaaatctaagaaggccctttcagctaaacaacgtactgccaagaaagctgggcgtgaatttccagaggaagatgcagaacaactcaagcatgttactgaacagcaaagcatggttcagaaacagctagaacagattcgtaaacaacagaaagaacatgctgaattgattgaagattatcggatcaaacagcagcagcaatgtgcaatggccccacctaccatgatgcccagtgtccagccccagccacccctaattccaggtgccactccacccaccatgagccaacccacctttcccatggtgccacagcagcttcagcaccagcagcacacaacagttatttctggccatactagccctgttagaatgcccagtttacctggatggcaacccaacagtgctcctgcccacctgcccctcaatcctcctagaattcagcccccaattgcccagttaccaataaaaacttgtacaccagccccagggacagtctcaaatgcaaatccacagagtgagccaccacctcgggtagaatttgatgacaacaatccctttagtgaaagttttcaagaacgggaacgtaaggaacgtttacgagaacagcaagagagacaacggatccaactcatgcaggaggtagatagacaaagagctttgcagcagaggatggaaatggagcagcatggtatggtgggctctgagataagtagtagtaggacatctgtgtcccagattcccttctacagttccgacttaccttgtgattttatgcaacctctaggaccccttcagcagtctccacaacaccaacagcaaatggggcaggttttacagcagcagaatatacaacaaggatcaattaattcaccctccacccaaactttcatgcagactaatgagcgaaggcaggtaggccctccttcatttgttcctgattcaccatcaatccctgttggaagcccaaatttttcttctgtgaagcagggacatggaaatctttctgggaccagcttccagcagtccccagtgaggccttcttttacacctgctttaccagcagcacctccagtagctaatagcagtctcccatgtggccaagattctactataacccatggacacagttatccgggatcaacccaatcgctcattcagttggaatctgatataatcccagaggaaaaagggaaaaagaaaagaacaagaaagaagaaaagagatgatgatgcagaatccaccaaggctccatcaactccccattcagatataactgccccaccgactccaggcatctcagaaactacctctactcctgcagtgagcacacccagtgagcttcctcaacaagccgaccaagagtcggtggaaccagtcggcccatccactcccaatatggcagcaggccagctatgtacagaattagagaacaaactgcccaatagtgatttctcacaagcaactccaaatcaacagacgtatgcaaattcagaagtagacaagctctccatggaaacccctgccaaaacagaagagataaaactggaaaaggctgagacagagtcctgcccaggccaagaggagcctaaattggaggaacagaatggtagtaaggtagaaggaaacgctgtagcctgtcctgtctcctcagcacagagtcctccccattctgctggggcccctgctgccaaaggagactcagggaatgaacttctgaaacacttgttgaaaaataaaaagtcatcttctcttttgaatcaaaaacctgagggcagtatttgttcagaagatgactgtacaaaggataataaactagttgagaagcagaacccagctgaaggactgcaaactttgggggctcaaatgcaaggtggttttggatgtggcaaccagttgccaaaaacagatggaggaagtgaaaccaagaaacagcgaagcaaacggactcagaggacgggtgagaaagcagcacctcgctcaaagaaaaggaaaaaggacgaagaggagaaacaagctatgtactctagcactgacacgtttacccacttgaaacaggtgagg

SEQ ID NO: 92447 - DNA, 610 bp, Homo sapiens
cgataaatacttggatgccatctcatcgacccataaccttctacataaattccctctccaatatgcatgatgagcagccagagcgttgccaaagtatttcctgtgtggaggaactcggcatgtgaaaagaacacacaatccactgcagaacatctaattctccaacgttttattttctttaaccaaaacactgaacaagtgaaatccttagcttggcatacaagatcctccctgatttattctccgctgacctctccagcttcgtttcttaccaggacctcacctgtaccctctcatccagactgtgggcactgggaggcaggtctcatttctgcctccccttcacatctggcatgcgggaagttcaagggtgagtggatggggaaggccagttggattaatgtatggaggtgtgttcacaaagctctaaaacccaggagagcctctctgccagcacaaatgagtcaggtgtcatacttctgtgctctagcagccaacctgaagactatttttgaaatggagtatctcccaccagaaatgcattgtgcaaaactctgctcaaaggcatcagtcatgtagggccttccatcttgttgattcaagagaatgc

SEQ ID NO: 92448 - DNA, 448 bp, Homo sapiens
ggggaggcaggagatggagtcacagggactacaggtcagtggttgtggatcacagggactacaggtcaatggagggggagcacagggactaaaggtgggtggaggtggagtcacagggagtacaggtcagtggcggtggggtcacagggactacaggtcaatggaggtggagtcacaggcactacaggtcaatggaggtgggggcacaggcactgcaggtcagtgcaggtggagcacaggtactacaggtcaatggaggtgcagcacaaaaactacacgttagtgggggtggggtcacaaggactacaggtcaatgggggtggccgcacaaggtctacacatcagtggaggtggattcacaacgacttcaggtcaatggaggggggggcacaaagaactacacgtctatggaggtggggcacaagaactataagtcaatggagaaggg

SEQ ID NO: 92449 - DNA, 5761 bp, Homo sapiens
gcacgaggaggagttgagagaacggagcggacgccatggcgaccaacatcgagcagatttttaggtctttcgtggtcagtaaattccgggaaattcaacaggagctttccagtggaaggaatgaaggccagctgaatggtgaaacaaatacacccattgaaggaaaccaggcgggtgatgcagctgcctctgccaggagtctaccaaatgaagaaatagtgcagaagatagaggaagtactttctggggtcttagatacagaactacgatataagccagacttgaaagagggctccagaaaaagtagatgcgtatctgtacaaacagatcctactgatgaaattcccactaaaaagtcaaagaagcataaaaagcacaaaaacaaaaagaagaaaaaaaaaaaagaaaaggaaaaaaaatataaaagacagccagaagaatctgagtcaaagacgaaatctcatgatgatgggaacatagatttagaatctgattcctttttaaagtttgattctgaaccttcagctgtggcgctggagcttcctacaagagcatttggcccatctgagaccaatgaatcccctgcagttgtgctagaacctcctgtagtatcaatggaggtatcagagccacacatcttagaaactctgaagccagctacaaaaactgcagaactgtcagttgtatctacatcagtaatctcagagcagtcagagcagtctgtggcagtaatgccagaaccatccatgacaaagattctggattcctttgcagcagcaccagtgcctactacaacactggtgttgaagtcatctgagccagttgtaacaatgtcagtggagtatcagatgaagtctgtgctgaaatctgtggagagcacatctccagagccatcaaagatcatgttggtagagcccccagtagcaaaagtgttagagccttcagaaacccttgtggtatcatcagagacacctactgaggtgtaccctgagccaagcacatcaacaacaatggattttccagagtcatctgcaattgaagcgctaagattgccagagcagcctgtagacgtaccatcggagattgcagattcatccatgacaagaccgcaggagttgccggagctgcctaagaccacagcgttggagctgcaggagtcgtcggtggcctcagcgatggagttgccggggccacctgcgacctccatgccggagttgcaggggccccctgtgactccagtgctggagttacctgggccctctgctaccccggtgccagagttgccagggcccctttctaccccagtgcctgagttgccagggccccctgcgacagcagtgcctgagttgccagggccctctgtgacaccagtgccacagttgtcgcaggaattgccagggcttccagcaccatccatggggttggagccaccacaggaggtaccagagccacctgtgatggcacaggagttgccagggctgcctttggtgacagcagcagtagagttgccagagcagcctgcggtaacagtagcaatggagttgaccgaacaacctgtgacgacgacagagttggagcagcctgtggggatgacaacggtggaacatcctgggcatcctgaggtgacaacggcaacagggttgctggggcagcctgaggcaacgatggtgctggagttgccaggacagccagtggcaacgacagcgctggagttgccggggcagccttcggtgactggggtgccagagttgccggggctgccttcggcaactagggcactggagttgtcggggcagcctgtggcaactggggcactagagttgcctgggccgctcatggcagctggggcactggagttctcggggcagtctggggcagctggagcactggagcttttggggcagcctctggcaacaggggtgctggagttgccagggcagcctggggcgccagagttgcctgggcagcctgtggcaactgtggcgctggagatctctgttcagtctgtggtgacaacatcggagctgtcaacgatgaccgtgtcgcagtccctggaggtgccctcgacgacagcgctggaatcctataatacggtagcacaggagctgcctactacattagtgggggagacttctgtaacagtaggagtggatcccttgatggccccagaatcccatatattagcttctaacaccatggagacccatatattagcatccaataccatggactcccaaatgctagcgtccaacaccatggactcccagatgctagcatccaacaccatggactcccagatgttagcgtctagcaccatggactcccagatgttagcaactagctccatggactcccagatgttagcaactagctccatggactcccagatgttagcaactagcactatggactcccagatgttagcaaccagttccatggactcccagatgttagcaaccagctccatggactcccagatgttagcaaccagctccatggactcccagatgttagcaaccagctccatggactcccagatgttagcaaccagcaccatggattctcagatgttagcaaccagcaccatggactcccagatgttggcaactagctcaatggattcccagatgttagcatctggcactatggactctcaaatgttagcttctggcaccatggatgctcagatgttagcgtctggtaccatggatgcccagatgttagcgtctagtacccaagactctgctatgttgggttcaaaatctcctgatccctataggttagctcaggatccttacaggttagctcaggatccctataggttgggccatgacccctatagattaggtcatgatgcttacaggttaggacaagacccttatagattaggccatgatccctacagactaactcctgatccctataggatgtcacctagaccctacaggatagcacccaggtcctatagaatagcacccaggccatataggttagcacctagacccctgatgttagcatctagacgttctatgatgatgtcctatgctgcagaacgttccatgatgtcatcttacgaacgctctatgatgtcttatgagcggtctatgatgtcccctatggctgaacgctctatgatgtcagcctacgagcgctctatgatgtcagcctacgagcgctctatgatgtcccctatggctgagcgctctatgatgtcagcttatgaacgctccatgatgtcagcttatgaacgctccatgatgtccccaatggctgatcgatctatgatgtccatgggtgctgaccggtctatgatgtcgtcatactctgctgctgaccggtctatgatgtcatcgtactctgcagctgaccgatctatgatgtcatcttatactgctgatcgttcaatgatgtctatggctgctgattcttacaccgattcttacactgacacatatacagaggcatatatggtgccacctttgcctcctgaagagcccccaacaatgccaccgttgccacctgaggagccaccaatgacaccaccattgcctcctgaggaaccaccagagggtccagcattgcccactgagcagtcagcattaacagctgaaaatacttggcctacagaggtgccatcattaccatctgaagagtctgtatcgcagcctgagcctcctgtgagtcaaagtgagatttcggagccttcagcagtgcctactgattattcagtgtcagcatcagatccctcagttttagtatcagaggctgctgtgactgttccagaaccaccaccagagccagaatcttcaattacgttaacacctgtagagtctgcagtagtagcagaagaacatgaagttgttccagagagaccagtgacttgtatggtatctgaaactcccgccatgtcagctgaaccaactgtgttagcatcagagcctcctgttatgtcagagacagcagaaacatttgattccatgagagcctcaggacatgttgcctcagaagtatctacatccttgttggttccagcagtaactactccagtgctggcagagagcattctggaagccgccagccatggctgccccagagtcttcagctatggctgtccctggaagtcttcgggctggtgaccgtcctggaagtcttcgactgtgactgtcctggagtcttcgactgtaactgtcctggaagctctcggttgtgactgtcccggagcctcctgttgtggctgagccagactattgttaccattcctgtgccagttgtttctagcgctggagccttctgtgcctgttctggaaccagcggtgtcagtccttcaaccttctatgattgtttcagaaccatctgtttctgtccaggaatcgactgtgacagtttcagagcctgctgtcacagtctcagagcagactcaagtaataccaactgaggtggctatagagtccacaccaatgatactggaatctagtatcatgtcatcacatgttatgaaaggaattaatctatcctctggtgatcaaaatcttgctccagagattggcatgcaggagattgcattgcattcaggtgaagaaccacatgctgaggaacacctgaaaggtgacttttacgaaagtgaacatggtataaatatagaccttaatataaataatcatttaattgctaaagagatggaacataatacagtgtgtgctgctggtactagtcctgttggggaaattggtgaagagaaaattttgcccaccagtgagactaaacagtgcacagtattggatacctaccctggtgttagtgaagctgatgcaggagaaactctatcttctactggtccttttgctctggaacctgatgcaacaggaactagtaagggtattgaatttaccacagcatctactctcagtttagttaataaatatgatgttgatttatctttaactactcaagatactgaacatgacatggtaatttccaccagtcctagtggtggtagtgaagctgacattgaagggcctttgcctgctaaagatattcatcttgatttaccatctaataataaccttgttagtaaggatacagaagaaccattacctgtaaaagagagtgaccagacattagcagctctgctcagccctaaagaaagtagtggaggagaaaaagaagtacctccccctcctaaagagacactgcctgattcaggattttctgccaatattgaggatattaatgaagcagatttagtgagaccgttacttcctaaggacatggaacgtcttacaagccttagagctggcattgaaggacctttacttgcaagtgatgttggacgtgacagatctgctgccagcccggttgtaagtagtatgccagaaagagcttcagagtcttcttcagaggaaaaagatgattatgaaatttttgtaaaagttaaggacactcacgaaaaaagcaagaaaaataagaaccgtgataagggggagaaagagaagaaaagagactcttcattaagatctcgaagtaagcgttccaaatcttctgaacacaaatcacgcaagcgtaccagtgaatctcgttctagggcaagaaagagatcatctaagtccaagtctcatcgctctcagacacgttcacggtcacgttcaagacgcaggaggagaagcagcagatcaagatcaaagtctagaggaagaagatctgtatcaaaagagaagcgcaaaagatctccaaagcacagatccaagtctagggaaaaaaaaaa

SEQ ID NO: 92450 - DNA, 399 bp, Homo sapiens
  misc_feature (1)...(399): n = a,t,c or g
ggaggcaggagatcggacatggcgggaagtgaaagtgaggtaagggagaacttgagggcccttctgcactgacagggtgagtgcatgggacagggtgagtgtgcactggaatggagcgtgggtgcaagagacaaggcatgtgtgcacaggagggagcatgtgtgcacgagggtggagtgtgtgcacagggatgctgtgtgtgtacatgaggatggagtatgtgcagaaggatgaagcatgtgcacgcagggccagggcatacgtgcatggggtgtgtgtacctggggactgagcatggtgtccagcctgttcctcctaagtagtgggcaccagctgattcctcaatgaataaatgtcagccagaaagagaggagatgcacctacaggctcacagcaggn

SEQ ID NO: 92451 - DNA, 387 bp, Homo sapiens
ttgcgctgagttccgcctgggttgcggttttccgagcgaacgacagcggcgtccccggagaccccgccggcgagccggtgtcagcagcgtcgctttctccaacgctgagggctgaaatctctttaatgatggagggaagcaggcagacgcgagtgtctcggccatacaagatcagcgaatcatcaaaggtataccgctgggccgaccactcaagcacggtgctgcagcggctgaacgagcagcgtctccgcgggctcttctgcgacgtcgtcctggtggccgatgagcagcgtgtgccagcccatcgcaacctgctggccgtgtgcagcgactacttcaactccatgttcaccatcggcatgcgggaagctttccagaaggaggtgg

SEQ ID NO: 92452 - DNA, 427 bp, Homo sapiens
cggacgcgtgggcagccttgctagagtctgaggactatccagggcctgactgccagctagccagccatgggccaggattattactctgtgctcgggatcactcgcaattcagaggatgcccagatcaagcaggcgtaccgcagactcgcccttaagcaccacccgttgaagtcaaatgagccgtcttcagcagagattttcaggcaaatagcagaggcctacgacgtgctgagtgaccccatgaagagaggcatctacgacaagtttggagaagagggcctgaagggtgggattcctttggagtttggatcccacaccccatggacaactgggtacgtcttccacggcaaacctgaaaaggtttccacgagttctttggaggaacaaccccttcagtgagtttttgatgcagaaggaagtgaggtaa

SEQ ID NO: 92453 - DNA, 809 bp, Homo sapiens
atcgattcgaattcggcacgaggcgcaggtggccccggtgccgctgttcatcgggccgcgcggggaaggcggcggccaagatgcgctccgtcacgtaggatgagcaatacccacagcactccgttcaaggtcatctcctgggggccctctctggagccaccagacctctggacaccatggccaggttccttgccctccccaccccatcccagagcgcactcaccaactccacgggaggcaaggcctgacaggctgaagtcacctggaaggggaccgatgcctggtactggataggaacttcatggaatggagctaatgggccgtagggcaggtttgagtcgtgccaccctggagcaaaaggtggagggtagggataagggggtggagcacctgattccaatcttgccacagggaaaaagagtctgtgaagaaagagagcagcatacttgcttgcagaactgaacttctgtaacacaacgagagtgacaggataatgaaggccctgaattatcacatcaaaacccaagacacaggatactgatcctttggcaatgggggatgacagtcagatgacacccacttgcttgctcatcagcattgtccactggagaggagctagggaagagggtcagaggcacatgcgatcttactatagtctcataccacctctacaccttgcagaacggatgagaacaaaggaagacagaaaccaggaaaaagctaaacttctttcgctatttcagtaaagaccaatgtcttatttccaaacactttgtattccaaatggaaagaagtccaacggcaaaaag

SEQ ID NO: 92454 - DNA, 568 bp, Homo sapiens
tttcgtcccagctccctaggggctgagaagctggagtctctgggcaaggggaggagctgagccctactcttgcaagacccccggcctcctcaccccacgcgggaagcatgaacagaaaagacagtaagaggaagtcccaccaggaatgcaccggaaaaacaggagggcgaggccggccccgccaagtgcgccgccacaagacatgccccagccctcgggaaatcagcaaggtcatggcttccatgaacctgggcctgctgagtgagggcggctgcagcgaagatgagctgctggagaaatgcatccagtccttcgattcagctggcagcctgtgccacgaggaccacatgctcaacatggtgctggccatgcacagctgggtgctgccgtccgccgacctggctgcccgcctgctgacctcatatcctccaggactgtactggctgatgcgacaccctgaggtgatgcaccaggatccccagctagaagaagtcataggtcgtttctgggccaccgtggcccgggagggcaactcagcccagagaagactgggagactcttctgacct

SEQ ID NO: 92455 - DNA, 452 bp, Homo sapiens
cagcttccaagagaggtcgggtcacagccagcagctatgtctgacataaatcttgactgggttgacaggcgtcagttgcagcgcttggaggaaatgctgattgttgtggatgagaatgataaggttattggtgccgacaccaagaggaattgccatctgaacgaaaacattgagaaagggctgctgcaccgagccttcagcgttgtcttgtttaacaccaagaatcgaatcctgatacagcagaggtcggacacgaaagtcacgtttcctgggtattttaccgactcctgtagtagccacccattatacaaccccagcagaactggaagaaaaggatgccatcggagtgaggaggggcagcccagaagcgtcctgcaagcagagctggggaatttcctggggagcagatttctccagaaggacattgtgttcatgacaatctatcaccacaa

SEQ ID NO: 92456 - DNA, 814 bp, Homo sapiens
tcagcaccgacccaaacaagcaggaaacaggaaatgttcacgtttcagagaggctgcagcccggggcagcatcctgagcgcgcctctgccgaggcgagcggacatgcaggctccccgcgcagccctagtcttcgccctggtgatcgcgctcgttcccgtcggccggggtaattatgaggaattagaaaactcaggagatacaactgtggaatctgaaagaccaaataaagtgactattccaagcacatttgctgcagtgaccatcaaagaaacattaaatgcaagtataaattctaccaactttgctccggatgaaaatcagttagagtttatactgatggtgttaatcccattgattttattggtcctcttacttttatccgtggtattccttgcaacatactataaaagaaaaagaactaaacaagaaccttctagccaaggatctcagagtgctttacagacatatgaactgggaagtgaaaacgtgaaagtccctatttttgaggaagatacaccctctgttatggaaattgaaatggaagagcttgataaatggatgaacagcatgaatagaaatgccgactttgaatgtttacctaccttgaaggaagagaaggaatcaaatcacaacccaagatggagcctcactctgtcacccaggctggagtgcagtggtatgatctcagctcactgcagcctcaacctcccaggtaccagtgattctcctgcctcagcctcacgagtgctgggactacaggcatgcgtcaccacgcctggctaatttttgcatttttagtagagacagggtttc

SEQ ID NO: 92457 - DNA, 432 bp, Homo sapiens
tttcgtcgggcaggttgcttgaagcgcaggggttttacattaacaaacggtgacggcgccgcggaagggtctatggccgaggcggtgaagccccagcgccgggccaaggccaaggccagccggactaaaacaaaggtgaggatctccccaccctcccgaggctctggcagagagctgtgactccttgctcctctcttcggcctccccagccaattctactcccgttccctgagccctctgcatcttccgcctccaccttccaatatttgatcccaccacccgttgacaccggcccttctcctccattccttctccatatccccctgccacactctgtcaggaccccatttttccttctccctcctgagacttcactggcctcttccttttctgctctcttggctttcctcacctggggctggtttcctgccc

SEQ ID NO: 92458 - DNA, 1255 bp, Homo sapiens
tctgaatccaggagcaggggttgcttgggcgggtggtggagtgtgggcaaatgtggctgaatcctgtggttgagccttgaacgggggaccgctgctgcccccagtgccgccgactgttccgaacgggaggtccgaggaaccccggaaagcggctgtggccccggccaccgcagtgaccgcgggagaattgtgtacataatgatgttcgtggcggcggttgtaggcgtccgtgaacttgctctcgtggcgccgggccttgaaggtcactgcagggtcctgactgaagaggtatgagggtgtgggctggcggctggagtagctggagtcctgtgagaaaggggtgcccaggcgcggtgtgagcggggtgcctgtccataggagttgggtgtgtccaggcggcagctggaataagctgtgtcctgggagaagggtgtcccaccgctattgggggtgacagaggaggagccggagccacagcctgcagacaggcctccatccttgaggcgcttcagggcatctgacagctgcagggtctcattcacgattggagagacagcgtccagctcgcccactgggagggtctggggggtgtatcggccagtgaccatacagttcatagaaccgcattcgggtttcccctttggtgtccagctccacgtggataatgttgcccatgacggaagtgctgtgcaagtgctgaacggcatccttggctccccggaccgtggcaaagaccaccttggcaatgcccaggtgcttcttggtcttggggttgtacaaaatttccacctcctccacctccccatacttcttgcacatgtccctcaggaagttttcacggatgttatcattcagcttggcaaatgtcacctgcttcggaggcacctggtccacgtaaaactcatcgatcttgaatttgggcaccgacagctccagcctccttgtttttggtccagatcccgacgacccggggatcttcgacaatttccaccgggcggttgctggacatcgccaggctgaaatgctgcccatcgtagcggtacagtttatgatgcccctttttcagagccgggtcaatcatcaacttgtaacttctccaatggtggttcctcctctcgcccgaagggccgggctgcggcgggggctgctggtggtggtggtggggggggtgactgttctccatgccgttaacccaaccctcctcctcttcctcctcctcctccttttcctcctcccctctccttcctcgacgaaa

SEQ ID NO: 92459 - DNA, 434 bp, Homo sapiens
  misc_feature (1)...(434): n = a,t,c or g
tttcgtgcgggatctctaacgctctccttcgagggaccaccacggagatcctagtgcggcaccccgcctcagggaagaggaaagcagggcgacaaccttcctgcttatttcttttacggccagcgtcggcaagggggaggaaccggcttccgcctccaagatgaagaactataaagcggttggcataataagagagggaacgatctctgaagttatgaagatgcaaagcctgagagatggaaactactatgcatgtaaacaaacgaaacagcgctttgagtggcagatacctagaaacagaatcactgggtcagaggtgacagaaaaactggttctcttgcactaagatgtgaacatatcggcatgaatatttatgagctcatactanggagaagatactcactgtcagagaaaaagattatgcactatatgcc

SEQ ID NO: 92460 - DNA, 392 bp, Homo sapiens
  misc_feature (1)...(392): n = a,t,c or g
aaattctttgctgtagcccttcactgtgacacaactgcaaccaaccactttacaaagttttccttgtctatcagttttacaaaggcttagccatgtctctggtttcttaaggccatcaaccttaattgggttgatttggtgttcggcacaaagggccacccctagcttgacatacataggctcttcacatttggatgcaagcacgcaaagatgggcttggcccttgtctaaggctttggcagctttgcaggttccacctgctaggccatcatggctgagggcggtcttcagtctcttgtagagcagtattaatatccattacacctccagcagcgtgtcttccttggtcatggtggngggttacaggtgaaagtgaatcttgagcgcactca

SEQ ID NO: 92461 - DNA, 330 bp, Homo sapiens
tgggaggccccgccttttcccctgcctgcccttcgggcacctcaggaaggcaccttcctctgtcagaatggccaccatggtaccatccgtgttgtggcccagggcctgctggactctgctggtctgctgtctgctgaccccagctctgagaaaatcgccttggagacgtccctatcaaaggagctggtggccagtggcatgggctgggcagccttcaatctcagcaacgtgactggcaacagtcggatcctctgctcagtgtactgcaatggctcccagataacaggctcctctaacatcaccgtgtacagtgagtcgacgtgtccggag

SEQ ID NO: 92462 - DNA, 711 bp, Homo sapiens
aatagtagacattagtccagtgcggtggaattccgagcagcggcgaccgacgcggcgaaggagcgcgccatggagcatgtgacagagggctcctgggagtcgctgcctgtgccgctgcacccgcaggtgctgggcgcgctgcgggagctgggcttcccgtacatgacgccggtgcagtccgcaaccatccctctgttcatgcgaaacaaagatgtcgctgcagaagcggtcacaggtagtggcaaaacactcgcttttgtcatccccatcctggaaattcttctgagaagagaagagaagttaaaaaagagtcaggttggagccataatcatcacccccactcgagagctggccattcaaatagacgaggtcctgtcgcatttcacgaagcacttccccgagttcagccagattctttggatcggaggcaggaatcctggagaagatgttgagaggtttaagcaacaaggtgggaacatcattgtggccactccaggcccgcttggaggacatgttccggaggaaggccgaaggcttggatctggccagctgtgtgcgatccctggatgtcctggtgttggatgaggcagacagacttctggacatggggtttgaggcaagcatcaacaccattctggagtttttgccaaagcagaggagaacaggccttttctctgccactcagacgcatgaagtggagaacctggtgag

SEQ ID NO: 92463 - DNA, 394 bp, Homo sapiens
cacgcgtccgtttgttatcccagctctatcatccacagccaaaggatttggaatttctgatgtttaatgttgatttttctctttggagttagtgtatatttaccttttcttttaaggtgcacctactgaagtgtatattgttagcactgttggttaatgttgtgttaacactaagagaaatgttcttgagtatctttaatataatcattgtaaatagaccttttgtttgtttttctgctcattcaatctgctacccaggaacttcaggtaagatgatgctgtttttaattcaaatatgctagtagacgttttgcatctttgcagatttataacaacataattgcttttttcctcccttccagaatatatatgcttatttgcgtgcatatttcca

SEQ ID NO: 92464 - DNA, 986 bp, Homo sapiens
gcgtcgatcttccgcctggaatgccatctccgactctgcgtttgcctggggtttccggtccgcccctgcgccaggtgccctaggacgcctgccctggagccctcgccctatcccttgccctatttctgtgaaactttctatctcagtgtgtcaggagcgccggaagcggtttctccggagaactccggtccaaagaggaccagtgatgtctttggaactttctggaacttcctgactctcgcggccccctctgcagcgcacggagcagagggtctaaagaagaagaagcaggaaggataaaagattgctgggacaaccaggaagcacctgctctctccacgtgtagtaatgccaatatctttcgaaggataaatgccatattggataattctctggatttcagtagagtctgcactacacctataaaccgaggaattcatgatcatttgccaggtttaagggaagaagctgtctccgtaacataaatgtgcaagatgaagcagcaagtgctgatggagaagctgcagcaagttacccagaagatctagctaagatcattgacttccaggactctgaagaaacagttacaagcaggatgcttttcccaacctctgcgcaagaatcttcccgtggcctcccagatgcaaatgacttgtgccttggcctgcagtccctcagtctgacaggctgggaccgaccctggagcacccaggactcagattcctcagcccagagcagcacacactcggtactgagcatgctccataacccactgggaaatgtcctaggaaaaccccccttgagcttcctgcctctggatccccttgggtctgacttggtggacaagtttccagcaccctcagttagaggatcacgcctgggacacccggcccatcctggactctcgatctagcagcccctctgactcagacaccagtgggtttcagttctgggatcagatcatctctcagatttgatttcaagcc

SEQ ID NO: 92465 - DNA, 492 bp, Homo sapiens
gctgggtcttccaggagcgcgcctgcgcgggagggtgaccacaggcggccgggcgggatgtcctgtccgcagtcttcagcccagccgccgccacccataagctatgaggaggagtttacgaccacctggactactaccacctgcgtgacttcccggcctgcggggtccgcgcagcaaaggcttgacgctgctggagcaggcgctgcgcacctactggctggcgcctggtaggcacgagcgcagggtcgcccagaagctcctcaatggcctgagcaagtaccagccagcgccagctgcagccctggccgcgcactcgcctcagctgagcctgggtatgtgcaccccccaacacttcccccagccatgttcccgggacctcgggagcgtcccccaccgcccggtgccattcgtgctgggcagggtcggccccctttgaggctgccccgcgttagggagctgcaccgcacccccaccagcttgacctctgactgc

SEQ ID NO: 92466 - DNA, 724 bp, Homo sapiens
tgggggcgccagcagcgcggaaggcgggcacgcgggccatggctccctgggcggaggccgagcactcggcgctgaacccgctgcgcgcggtgtggctcacgctgaccgccgccttcctgctgaccctactgctgcagctcctgccgcccggcctgctcccgggctgcgcgatcttccaggacctgatccgctatgggaaaaccaagtgtggggagccgtcgcgccccgccgcctgccgagcctttgatgtccccaagagatatttttcccacttttatatcatctcagtgctgtggaatggcttcctgctttggtgccttactcaatctctgttcctgggagcaccttttccaagctggcttcatggtttgctcagaattctcggggcggcacagttccagggaggggagctggcactgtctgcattcttagtgctagtatttctgtggctgcacagcttacgaagactcttcgagtgcctctacgtcagtgtcttctccaatgtcatgattcacgtcgtgcagtactgttttggacttgtctattatgtccttgttggcctaactgtgctgagccaagtgcccacggatgccaggaacgcccttcatatcacggaataatctattggtgcacgcacggcggccccatattttttgcatgatgatgtccctctggccgtcttgcgctttgcctctcgtcgcttggttgatctccggggggctcc

SEQ ID NO: 92467 - DNA, 1174 bp, Homo sapiens
atacataccatgaacataaatgaaccttgcaaactttgatagaagccagtcacataagacccagtgttgtgtgacttcatttatgtgaatggtctagaataggcaaatccatagactgaaagtgattacggatttcctagggcggggcagatcagggaaatgggcagtggctgctgatgggtaggtagtttcttctggagtgatgaatgttctaaaacgatggtgatggatacacaactctgtgaatatatacaaaccccttgcatggtacacttgaaatagatgggctggatagcatgtaaattatatctcaataaaactgtataaaaataaagagaagcgcccggaagtgctgccttgggagtccggtgagaaggcggccacggcatggcctggttgcctgaataggagtcggagtcggcggctgtagaggctgtgcgccacatacatctgcagaacttctcacgctctctgcttgagaccctcaatgggcagaagctgggtgggcacttctgcgacgtgactgtgtgcattcatgaagcttcgctgcgtgcgcaccgctgcgggctggcaatcggctcgccctccttccaagacaagctgctgctcggcccctctgagatccgtgtgccttcggtggtgcctgtgcagacggtgcgacagctagtcgagctcctgtacagcggttcgctcgttgtggcacagagtgaagccccgcaggtactcatggctgcgtcggtgcttcgcatagacagttatcgacgaatgcacgcagattatcgcacgcgctcctctgcacccgcgagcacctctgcacccgcgcccctgcccacccctgtgcccccgccactcgcacctgagcagctgcgtcaccgcctgcgccacctgctggctgcgcacccccggggcaccccgctgcctgcgcccccgacacctgccaaagccgaggggcttggtgcctacccctcactgtccgcggcccctgacgaccgaggtgacaacgatgacgaggaaactgacgatgagaccgatggcgaggacggcgaaggtggcggcccgggagagagccaagcacctccttccttcccagactgtgctgccggcttcctcactgctgctgctgacagcgcgtgcgaggagttccatgcacccactggcctctctgactacagtg

SEQ ID NO: 92468 - DNA, 887 bp, Homo sapiens; identical to SEQ ID NO: 63046

SEQ ID NO: 92469 - DNA, 583 bp, Homo sapiens
tttcgtccggccccgcgccccaaaggagccgtgtttgttgctggcaccacaggatgctgggcgagggggttgtttttctctgggaggcagtggcgcgggggatggggaggggtccgtctgggtgtccagccggccgcagtccgggggggcgccgctgtcaggaggagggggtgcagccgggcagcaccttctctccgtggtgccgggttaaagcacgggaggccggcaggtttgatccactcggattattcgtgctttgaggacagctccccacccccaccccaggtgcgcattggattgagctgcgagggtttggttgtcatcctcccatctgacggtcctgggacccgagtccaggcctgaagtggtggggtggggggatgctgtgtttgctccagccgtgtccagaaaatgccctcccaggtatctctccagtgcacccctggcccccatctgaagacagccgctggctacacacacccctgtctctacactttcagtccgggtcctcacactggcccatccctggccaacacctcactgtacctgcctggaccctttcttcctgtccaacccccatcca

SEQ ID NO: 92470 - DNA, 461 bp, Homo sapiens
cacatgattttcagggcagttgtttggcagactgctacattaaggcttaaaccagttgaagaactttattcttcaaagatacttgcatttcaacaaggaaggaagcttttaaggaagagaaaaacaaccctcattgtggttttagtaagcattaaggggaggacatgaattcagcttatatgtgcctggaatcccatcacaaagctacatagtaacaaagcttctgagaaaggcagtatcttatcaatgtcatattttttctttctttctgtgttttacatttgattttttttaacgttttgttttttagccgtgctatcaagactaatcaggaccttctcccagaaactccatggacgcacattttctacaatgatttttgggggactcttctaacccacagtggcagccacaagtcctaccggccactctgcactctttcttttcgcctgaaccatgcc

SEQ ID NO: 92471 - DNA, 779 bp, Homo sapiens
ctagtggtcttctcgcccggggccttctagctcttcgcccgtgtcaggtaaggcactgttagcctcggctcggttcgactcggctctactcgggctcagctcggctcggccagacctagagggcgggcgggcggtgccactggaagtgacgaggcgagggcggggccgccggcccggggagccaccgccgcgccgccgtttgggccgggaagcgatgtagtagctgccaggctgtcccccgccctgcccggcccgagccccgcgggccgccgccgccaccgccgccatgaagaagcagttcaaccgcatgaagcagctggctaaccagaccgtgggcagagctgagaaaacagaagtccttagtgaagatctattacagattgagagacgcctggacacggtgcggtcaatatgccaccattcccataagcgcttggtggcatgtttccagggccagcatggcaccgatgccgagaggagacacaaaaaactgcctctgacagctcttgctcaaaatatgcaagaagcatcgactcagctggaagactctctcctggggaagatgctggagacgtgtggagatgctgagaatcagctggctctcgagctctcccagcacgaagtctttgttgagaaggagatcgtggaccctctgtacggcatagctgaggtggagattcccacatccagaagcagaggagcagctttgcaaattggggttaactgggatcagtccaagcaggtggaccagctcacaattcttaggaccaactttaggt

SEQ ID NO: 92472 - DNA, 1626 bp, Homo sapiens; identical to SEQ ID NO: 62911

SEQ ID NO: 92473 - DNA, 1113 bp, Homo sapiens
accgggtcgacccacgcgtccggtcggcggagacagctggtgtctgaagccgatcgcgcccagggtgaccctgtttgcagcacgatgtctgaagaagaggcggctcagatccccagatccagtgtgtgggagcaggaccagcagaacgtggtgcagcgtgtggtggctctgcccctggtcagggccacgtgcaccgcggtctgcgatgtttacagtgcagccaaggacaggcacccgctgctgggctccgcctgccgcctggctgagaactgcgtgtgcggcctgaccacccgtgccctggaccacgcccagccgctgctcgagcacctgcagccccagctggccactatgaacagcctcgcctgcaggggcctggacaagctggaagagaagcttccctttctccagcaaccttcggagacggtggtgacctcagccaaggacgtggtggccagcagtttgcacgggtgtggtggacctggcccggaggggccggggctggatcgtgaagctgaagcgctccgtgagccatgctgtggatgttgtactggaaaaatcacaggagctggtggatcacttcctgcccatgacggaggaagagctcgcggcactggcggctgaggctgaaggccctgaagtgggttcggtggaggatcagaggagacagcagggctactttgtgcgcctcggctccctgtcagcacggatccgccacctggcctacgagcactctgtggggaaactgaggcagagcaaacaccgtgcccaggacaccctggcccagctgcaggagacgctggagctgatagaccacatgcagtgtggggtgacccccaccgccccggcccgccctgggaaggtgcacgagctgtggggggaatggggccagcgccctccggagagccgccgccggagccaggcagagctggagacgctggtgctgtcccgcagcctgacccacgagctgcagggcacggtagaggctctggagtccagcgtgtggggcctgcccgccggcgcccaggagaaggtggctgaggtgcggcgcagtgtggatgccctgcagaccgccttcgctgatgcccgctgcttcagggacgtgccagcggccgc

SEQ ID NO: 92474 - DNA, 1151 bp, Homo sapiens
gctggcccatggctgagacctctctcccagagctggggggagaggacaaagccacgccttgccccagcatcctggagctggaggagctcctgcgggcagggaagtcttcttgcagccgtgtggacgaagtttggcccaaccttttcataggagatgcagctggtccttactccctgccatggggctctgccactttgccaccctggcactgatcctgctggtgctgctggaggctctggcccaggcggacacacagaagatggtggaagcccagcgtggggtcggccctagagcctgctactccatctggctcctcctggcgcctacaccccctctcagccactgtcttcagtctccacagaaacagcatcaagtgtgcggagacaggcggctgaaagccggcagcacgaactgcccgtcagagaagtgcacagcctgggccagatactcccacaggatggactcactgcagaagcaggacctccggaggcccaagatccatggggcagtccaggcatctccctaccagccgcccacattggcttcgctgcagcgcttgctgtgggtccgtcaggctgccacactgaaccatatcgatgaggtctggcccagcctcttcctgggagatgcgtacgcagcccgggacaagagcaagctgatccagctgggaatcacccacgttgtgaatgccgctgcaggccgcgtgctggtacactgtgccatgggggtaagccgctctgccacacttgtcctggccttcctcatgatctatgagaacatgacgctggtagaggccatcccagacggtgcaggcccaccgcaaatatctgccctaactcaggctttcgtccggcagctccaggttctggacaaccgactggggcgggagacggggcggttctgatctggcaggcaagccaggatccctgacccttggcccaaccccaccaagcctggcccttgggaacagcaggctctgctgtttctagttgaccctgaagatgtaaacagcaagtgggggctgaggcagaggcagggatagctggggtggtgacctcttagcgggtggatttccctgacccaattcagagattctttatgcaaaagtgagttcagtccatctctataataaaatattcatcgtcataaaa

SEQ ID NO: 92475 - DNA, 432 bp, Homo sapiens
  misc_feature (1)...(432): n = a,t,c or g
gcacacggaggatgcctaggcggcaggagccgaagaaggacgtgctaagctgcgaaaagcccggaggaggtgcacaggaccagagataccgggatatccgaatgggagaacctgcatacctggagggtatgcgcgagagaggtaagccggcgaactgaaacatctaagtagccggaggaaaagaaagtaaagacgattccctgagtagcggcgagcgaacggggaggagcctaaaccgtacaggtgttaaagctggcagcgttgtctgtacggggtagagggaacatactgaactgaagccataaggttgattttatcatgatgtaagcggaacgcggctggaaagccggaccgtangaggtgagagtcctgtacagcgtaaagttatgataggaagaggaggaagatgaggaaaatgaacaggatgagggc

SEQ ID NO: 92476 - DNA, 599 bp, Homo sapiens
ctgtcattaccccatgcttgttacgaggtttgacaggcaccaagctgcctctgaatgtggcagcgggatcaaattgttgaatacattgactcatcggtgcgggctggaaattatgcttcttagccctctgtgaaacatgtttttcattttttatttttttttaaactgtatcttaggatctgcttcaaaacacggatgcccacaaaagagcattccatgaaatctaccggaccaggtctgttaacgggattccagtgccacctgatcaattagaggacatggccgagaggtttcattttgtttcctccacatcagagctacacctaatgaaaatggaatttttagaattaaagtaccgtctgctctcactgctggttcttgcagagtcaaagctgaagtcttggatcattaagtacgggaggagagagtcagtggagcagcttctacaaaactacgtgtcttttatagaaaatagcaagttctttgaacaatatgaggtgacataccagatcttgaaacagacagctgargatgtatgccaaagcagatggttcagtggragavgctgagaatgtgatgaattcatgaatgaaccaccg

SEQ ID NO: 92477 - DNA, 395 bp, Homo sapiens
ttttatgaagctgggagctctagagctaggttcacatacgcgtaggtggtaacacctccttgttggattgatccttttggtattatatactgaccttctttgcctttccttttcttttttactgtcgtcgtcataaaatatggtttttctgaaataagaaaaactactcttgctctcttttggttcccatttgcgtggaatacctttttcactcctttacattgagtttatttgagtccctgtctgttaaataagtctttttaaaaaagcataaatttggcttgccttgttttattccattctgccaatctatatcttttaacgcgagcatttaggctatttatgttcaatgttaacattgatatgtgaggtactgctccaatcaatgcgctgat

SEQ ID NO: 92478 - DNA, 439 bp, Homo sapiens
cttaaaatgctctgcaaagaaattgggacttttcattaaatcagaaattttacttttttcccctcctgggagctaaagatattttagagaagaattaaccttttgcttctccagttgaacatttgtagcaataagtcatgcaaatagagctctccacctgcttctttctgtgccttttgcgattctgctttagtgccaccagaagatactacctgggtgcagaggaactgtcatgggactatatgcaaagtgatctcgatttcctcctagagtgccaaaatcttttccattcaacacctcagtcgtgtacaaaaagactctgtttgtagaattcacggatcaccttttcaacatcgctaagccaaggccaccctggatgggtctgctaggtcctaccatccaggctgaggtttatgatacagtggtcattacacttaag

SEQ ID NO: 92479 - DNA, 1064 bp, Homo sapiens
ggttagcgccccgcggtccagcgaccggcgcagagcctttgtcactgggctggaagagcagttgggaaaattcggtgataaatgcatagcccggggctgggaccatcaaggggacccacgggaccgaaagggtaaagcagaggctcccggctcgctgagtgacagcatggccggcggccggggagagccgaccaatcagggagggcgtacgcgacccacgtgcgtaaacggcctcgctattggccggcgccgccagaggcctgccccccccggagcccgaacccacgtgcagctactgcgccttcattgatctgcttcgcggtccaggtggcggctgggtggggcctgggcgggacggggcggggacaaggcgggacgaggcggggcccgatgggtcaaatggcccccggtgggggaaggaggagtttcctcttggcctgaacttggctgacctccgcagcttccgcccgactctggctaaagtcttggaggctactgccttgaagatgacctctagggaccagcccagacccaagggccccccgaaaagcacttcgccttgtcctgggatctcgaactctgagagctctccgacgctgaattatcagggcattctaaatcggctcaagcagttccccaggttttctcctcattttgctgcggagttggagagcatttactactcgctgcacaagatccagcaggatgtggcagaacatcacaagcagataggaaacgtcttacagattgtggagagctgcagccaactccagggtttccagtctgaggaggtctcacctgctgaaccagccagccctgggacgccccagcaggtgaaggacaagaccctgcaggagtcgagctttgaggacatcatggccaccaggtcctccgactggctccggcggcctttgggggaggacaatcagccggagacccagctgttctgggacaaggagccttggttttggcacgacactctgaccgagcaactctggcggatttttgccggcgtccacgatgagaaggcaaagcccagagacagacagcaggcaccaggcctg

SEQ ID NO: 92480 - DNA, 373 bp, Homo sapiens
ggttttttggaaaagtgaaacaaaattggcaaacctttagccagactaagaaaagaaaagatccaaatgaataaaatcagatatgaaaaatgagacattacaactggtactgcagaaattcaaaggatcattagtggctactatgggcaattatatgccaataaattggaaaatctagaaatggacaaattccaagaaatatacaataccaagattgaaccatgaagaaatccaaaacctgaacagaccaatagaagtaatgagatcaaagaactttcccagtaaacaaaagcccaagacccaatggtttaactgctgaattctaccaaacatttaaagaagaactaatattaataccaatcctactcaaact

SEQ ID NO: 92481 - DNA, 1232 bp, Homo sapiens
  misc_feature (1)...(1232): n = a,t,c or g
tcataggccatcacactcaggagcgtgtctctcttccatgcctccaaaaatggcaaagagagacatttgagtcaggcagcctgcatagaagatgactctgccgtgagattggatgtccacaatcatcttggggaccgtggtggaggtgaaaccgatgtcaggcaaggacaggttggagaggaagaagtacatgggggtggggaggtgggagtcagggctgacgtccaggatgatgatcaggttccccagcaccgtgaccaggcacatggacaggaacagcccagcaaggaccagctgccgttctggatccttatggaaatatatgaatatgctattgatgatgctgtcagaacaggcaaatttgagaagttgagaggggtcacagacaaaattagagatttccacattcttgatgatggtgaattgtaacacaatccaactgtgcagctgggagtctaaaagactgagaaaaaaaaaagacaacaaaactagaaaggcacagaaacacgggttcatgatggctgaatgatatagagggtgacagatggctacaaaccggtcataggccatcacactcaggagcatgtctctcttccgtgcctccaaaaatggcaaagagagacttctgagtcaggcagcctgcataggagatgactctgctgcgagactgggatgtccacaatcatctttggggaccgtggtggaagtgaaaccgnatgtcaggcaaggacaggttggagaagaagaagtacatgggggtgtggaggtgggagtcagggctgatggccaggatgatgagcaggttccccagcaccgtgaccaggcacatggacaggaacagcccagcaaggactggctgcagttctggatcccctgagacttctaggaggaggaatatagagacatctgttagattctgtgggtctgcataatttggacacctttgcctagaaacgagggttgaaaaatgggaaacaagtaaaccaacacctggcattgtgtctgcattttgaatagaagcaattcacaagtaatgttttcagatttcagagcaatccacactcagcaatattttgcagttctgacagactcaattgtcttctaatgctttcatcattgatttctgtgttattcacttcttgctgtacacacctgccttagagacactagattcaagaatgttccaagaaccagatcatcatacataacaaattcgtaactgctagaaaata

SEQ ID NO: 92482 - DNA, 699 bp, Homo sapiens
atggccagccaagaaaaagatatatttattggctgggggacaattcatctctttcgaaaaccacaaagatccttttttggcaagttgttacgggaatttagacttgtagcagctgaccgaagcatgggaagatacatgctctttggtgtaataaacttgatatgtactggcttcctgcttatgtggtgcagttctactaatagtatagctttaacatgcctatacttacctgaccatttttgatctttttagtttaatgacatgtttaataagttactgggtaacattgaggaaacctagccctgtctattcatttgggtttgaaagattagaagtcctggctgtatttgcctccacagtcttggcacagttgggagctctctttatattaaaagaaagtgcagaacgctttttggaacagcccgagatacacacgggaagattattagttggtacttttgtggctctttgtttcaacctgttcacgatgctttctattcggaataaaccttttgcttatgtctcagaagctgctagtacgagctggcttcaagagcatgttgcagatcttagtcgaagcttgtgtggaattattccgggacttagcagtatcttccttccccgaatgaatccatttgttttgattgatcttgctggagcatttgctctttgtattacatatatgctcattgaaattaa

SEQ ID NO: 92483 - DNA, 2003 bp, Homo sapiens
ggaaaggagagctaccatcactaagggctgaaaacacagttaaatcactttcaaagttaaaagactattaagaacacaagatggggactcctgcttctggaaggaaaagaacacctgtgaaagaccgattttctgcagaagatgaagctttgagtaacattgccagagaggcagaggcaaggctggcagcaaaacgggctgcccgggcagaagcaagagatatacgcatgagagaactggaacgacaacaaaaagagtactctcttcattcctttgatcggaagtggggacagattcagaagtggctggaagattcggaaagggccaggtattccccaccggtccagtcaccatcgtccttatctgggagttgaggatgcattggtccattcgaagtgttggcagtcacaggtatgatatgttcaaggatagatcatcaagactttcatcattaaatcattcttacagtcactctcatggaatgaagaagaggtcttctgattctcataaagacctactgagtggcctctactttgaccagagaaactatagcagtcttagacatagcaaacccacctctgcctactacactcggcagtcttcttccctgtacagtgaccctctggcaacatataagagtgacagggcctctcctactgcaaattctggtctgctgagaagtgccagtctggcatcattgtacaatggtggattatataacccttatggtcctcgaactccatctgaatgcagttattattcatcaagaataagttcagcccgaagcagtccagggtttaccaacgatgacactgcaagcattgtgtcttctgatcgtgccagtcgtggacgaagggagagtgtggtatctgccgctgattatttcagtcgctccaatcgtaggggaagtgttgtctctgaggtggatgatatcagtatcccagatttgtccagcttggatgaaaaatctgacaaacagtatgctgaaaattatacaagaccttcatctcgaaattctgcctcagcaacaacccctctaagtggaaactcatccagacgaggaagtggggacaccagcagcttaatagatccagacacttcattaagtgaattgcgggatatctatgaccttaaggaccagatacaggatgtagaagggagatacatgcaggggcttaaagaactaaaggaatctttgtctgaagtggaagaaaaatacaagaaagccatggtttccaatgcacagttagacaatgagaagaacaatttgatctaccaagtagacacactcaaggatgttattgaagagcaggaggaacagatggcagaattttatagagaaaatgaagaaaaatcaaaggagttagaaaggcagaaacatatgtgtagtgtgctgcagcataagatggaagaacttaaagaaggcctgcggcaaagagatgagcttattgaggagaagcagcgcatgcagcagaaaatagacaccatgacaaaagaggtgtttgacctccaggagacacttctttggaaagataaaaaaattggggccctagagaaacagaaagaatacattgcctgccttaggaatgagcgagatatgctcagagaggagctggctgacctgcaggagacagtgaagacgggagagaaacatggcttagttataatccccgatggcactcccaatggtgatgtcagtcatgaaccagtggctggagccatcactgttgtgtctcaggaagctgctcaggtcttggagtcagcaggagaagggccattaggtaagatactggttgctatgttgacttggattaatgttaccctattgggttttctgctttttcatatcccagcttggaaaacaaaaacagcataagggctgagactcaagtagatccttaactagaagaatctgggcacattggcacattgtcttcagacatccttgaccttgggaaatcagcatctgggtcactgtaaggcaataagtgtaactgtaaggc

SEQ ID NO: 92484 - DNA, 683 bp, Homo sapiens
tcactgggcagcatctcagagctgccaccatgctgctgcgtggttggcccatctggaacacttagtcttcagtcacttggtttgattcaagaacaaagagttagaaactcttcaccttttgaatgcaaggaagtaggctgacccctcaaagtgtgccagacaagccattttaagcatagttgggtgagatgcaaagaggaagcctgcatattcgctgcttacgtgaaatgtttggcgcctactcatgctttctatccacagagtctcactgatagtttgtcagccttgcatcccatctgccccatgtgggtcctgtgaagctgctggtcaacctatcccctggctttgggggaatgcaacccatgtctggccaactgtggtgccccatttcccagtctagagttgttggtccaagaggaggctctctcttactctgaaatcatgagctgagggtttactgtgtatgcctgaagctatcagacaatgaagaaagaagagagagaaagagagagatttgagcacctgggtccagctatgactgaagctagcaagacacccatctttgttctctgaaattatgtaagaaagtaaactccctttttggaattttgcttgtttacttttgcttaagttaacttgagctggaatttcatcatcacaattaaaaacatcctaacaactta

SEQ ID NO: 92485 - DNA, 428 bp, Homo sapiens
tcccaccacttccacggccattactctttccccccagcctgtgtgctgctgccctgccctcgacgcggagcagggctgcccctcggggaaggtcgtatccatggaaccagagggaacacactcctgtgtgtcaggttctttgctcagcgtagtgcgcctggggaccgtccgcagcgcgtgtgtcctcagtgcatgtgtcctccgctagtgtcctcagcgtgtccgcagtgcgcgcgtcctcggctcgtgtcctcagcgcgtgtccgcagtgcgtcctcagcatgtgtcctcagcgcatgtcctcagcgcacgtgtcctcagcgtgcgtgtcctcagcgcgtgtgtcctcagtgcgtgtgtcctccgctcacgtgtcctcagcgcgcgcgtcctcagctcatgtcctcagtgcgtgtccgcagtgcgtt

SEQ ID NO: 92486 - DNA, 433 bp, Homo sapiens
ggttccgggtaggagctaggtgaccctcggctgctgcagggatctgcagcgactgcagccatgggggcccacctggtccggcgctacctgggcgatgcctcggtggagcccgaccccctgcagatgccaaccttcccgccagactacggcttccttcccttagcttgcaggagtccacttgtgcctgactttcactggatcgccgtggctactcctcagaatcttttggggacttctgcgctcccacgccttaaaggttagcactcctttggggcgtgttctaggcccttttgctttctcatctacatcttctcttgctggtcggttgcaccttcttccagggttctggttgccgtctatatgctggtgatatagaaacctacatctcagctgcagattcgtatatccaaccatccattcaacatctccattg

SEQ ID NO: 92487 - DNA, 811 bp, Homo sapiens
gcacacagttacgtttctggcttggttagtgaccctaccttggctgtgggcactgaggtgggaagagtgccatgcggctctacagacagaagccacccctgaatgctgggctccagcctgctgtctgcctgagtgcatgactcgggagccctgtcacggcacacacgccatcctggcagcctgaggtggggacacaagtctttgaccccagcatcgtgcatctcaggcactagcacagcagccacctctgtttctagttccagggccaggctacatctcactgcctcttagggggaatgccctggtgtgtgagatcaaaaagaaaatgatttctgctgcctgccagtcttctcactgcccttgtttagccctctctaatgttaagagtcataatgagggtagtatgggttatcgggaaaagtgtctttatacattcactccttttaacctcacatggaacctgtgtggaaggtcctatttctccattttgtaggcaggaaattcagactcagagaagttatgtgaattagccacagttataaccttactggttagaacccagatacataactacactcagagaaagagaagccagtccctgggcttgggacaaggaccatgttgaggagcccagagtgaaaattaaagcagaagggctgggcacaatctcacaactgtaatcccaagcacaaagggaggctaagacaggaggaccgcaagagaccaggagttcgaggctgtagtgagccaagactgcaccactgcactccagctcgggtgacagaggtagacctgtctctcaaaaaaaaaa

SEQ ID NO: 92488 - DNA, 406 bp, Homo sapiens
tttcgtctcggggcctggggcgtggtcttttggctttcgtgcgctcgggatcaatctttttaggcgtaggtatatgtgcatatatatatgggtatatacacacatatatatatgttataaaattctaacttcgggggagtactttactttgatattccacttgcaaaacaaaaccactgattcctttctgcttgacaagattgagtcgctatcaaggagctgcccgtgctttggaaatggtccaaacccacgaggaactgccaaggagccccctcagacacaacagcgtgcggggtcaaagacagccgcccccccatgtcagtggtctaggatggccagtgaaggccccaacatcccatgtcctggggcgcgccatagtgacaagcagtttctgatttgcactata

SEQ ID NO: 92489 - DNA, 424 bp, Homo sapiens
atttccgtttttgcgatgcctactggagactttgatttaagcccatttgggccgaccaggtggaggaggagggggaggacggtaagtgtacacggtcgcccggggtattcgcggccaggcccaagccgtgtgactgccgcctgcttccatctcccagtctggcaccgtgtaccccgtcacggtctgcccctgccccgcgccatcctccttgggacccgcctgttgccaactccaggtgttccccggcgggtccctcttcctcccatgccactgcctcccagctgttcccctccagggaggaagttgtaatctcccgtctcctgtttctctactggcgcctggttggcttcatggcctggcacccaccttcctacgagggatctcccatccttgccactccgagtccccacagggccatcccagc

SEQ ID NO: 92490 - DNA, 1011 bp, Homo sapiens
  misc_feature (1)...(1011): n = a,t,c or g
tttcgtcgaggtggcaaatcactgtgcgagggcgagcggacctccctctttgcctcctccctgttccaggagctggagccctgggctctgcgctgttgttttcagcgctccgaaagccggcgcttgagatccaggcaagtgaatccagccaggcagttttcccttcagcacctcggacagaacacgcagtaaaaaatggctccgatcaccaccagccgggaagaatttgatgaaatccccacaggggtggggatcttcagtgcatttggcctggtcttcacagtctctctctttgcatggatctgctgtcagagaaaatcatccaagtctaacaagactcctccatacaagtttgtgcatgtgcttaagggagttgatatttaccctgaaaacctaaatagcaaaaagaagtttggagcagatgataaaaatgaagtaaagaataagccagctgtgccaaagaattcattgcatctggatcttgaaaagagagatctcaatggcaattttcccaaaaccaacctcaaacctggcagtccttctgatctggagaatgcaaccccgaagctctttttagaaggggaaaaagagtcagtttcccctgagagtttaaagtccagcacttcccttacttcagaagagaaacaagagaagctgggaactctcttcttctccttagaatacaacttcgagagaaaagcatttgtgaagtcttcaggacggggtgagttactgatctctctctgctatcagtccaccacaaacactctaactgtggttgtcttaaaagctcgacatctgcctaaatctgatgtgtccggactttcagatccctatgtcaaagtgaacctgtaccatgccaaaaagagaatctccaagaagaagactcatgtgaagaaatgcacccccaatgcaggtgttcaatgaggctgtttgtctttgatatncctttgttgaggggccttgaangatataaggtgttggaatnttttggttttgggagttctagaa

SEQ ID NO: 92491 - DNA, 2831 bp, Homo sapiens
gaccgttagtgaggcggttgctgagacagacgctgaggcgggtaggaggagcccgagccgtaagggaagccgtgatgagggccgtgttgacgtggagagataaagccgagcactgtataaatgacatcgcatttaagcctgatggaactcaactgattttggctgccggaagcagattactggtttatgacacctctgatggcaccttacttcagcccctcaagggacacaaagacactgtgtactgtgtggcatatgcgaaggatggcaagcgctttgcttctggatcagctgacaaaagcgttattatctggacatcaaaactggaaggcattctgaagtacacgcacaatgatgctatacaatgtgtctcctacaatcctattactcatcaactggcatcttgttcctccagtgactttgggttgtggtctcctgaacagaagtctgtctccaaacacaaatcaagcagcaagatcatctgctgcagctggacaaatgatggtcagtacctggcgctggggatgttcaatgggatcatcagcatacggaacaaaaatggcgaggagaaagtaaagatcgagcggccggggggctccctctcgccaatatggtccatctgctggaacccttcaagccgatgggagagtttctggatgaacagagagaatgaggatgccgaggatgtcattgtcaacagatatattcaggaaatcccttccactctgaagtcagcagtgtacagtagtcagggtagtgaggcagaggaggaagaaccagaggaagaggacgacagtcccagggacgacaacttagaggaacgtaatgacatcctggctgtggctgactggggacacgaaagtttccttctaccagctgagtggaaaacagattggaaaggatcgggcactgaactttgacccctgctgcatcagctactttactaaaggcgagtacattttgctggggggttcagacaagcaagtatctcttttcaccaaggatggagtgcggcttgggactgttggggagcagaactcctgggtgtggacgggtcaagcgaaaccggattccaactatgtggtgggcggctgccaggacggcaccatttccttctaccagcttattttcagcacagtccatgggctttacaaggaccgctatgcctacagggatagcatgactgacgtcattgtgcagcacctgatcactgagcagaaagttcggattaaatgcaaagagcttgtcaagaagattgccatctacagaaatcgattggctatccaactgccagagaaaatcctcatctatgagttgtattcagaggacttatcagacatgcattaccgggtaaaggagaagattatcaagaagtttgagtgcaacctcctggtggtgtgtgccaatcacatcatcctgtgccaggagaaacggctgcagtgcctgtccttcagcggagtgaaggagcgggagtggcagatggagtctctcattcgttacatcaaggtgatcggtggccctcctggaagagaaggcctcttagtggggctgaagaatggacagatcctgaagatcttcgtggacaatctctttgctatcgtcctgctgaagcaggccacagctgtgcgctgcttggacatgagtgcctcccgtaagaagctggccgtggtagatgaaaatgacacttgcctggtgtatgacatcgacaccaaggagctgctttttcaggaaccaaacgccaacagtgtagcttggaacacccagtgtgaggacatgctctgcttctcgggaggaggctacctcaacatcaaagccagcaccttccctgtgcaccggcagaagctgcagggctttgtggtcggctacaatggctccaagatcttctgcctccatgtcttctccatttctgccgtggaggtgccgcagtccgctcccatgtaccagtacctggataggaaactgttcaaggaagcctaccagattgcttgcttgggtgtcacagacactgattggcgtgaactggccatggaagcgctagaaggtttagattttgaaacagcaaagaaggagaggaagaagcggggagagaccaacaatgacctgtttctggcagatgtgttttcctaccaggggaagttccatgaggccgccaaactgtacaagaggagtgggcacgagaacctcgcgcttgaaatgtacaccgacctctgcatgtttgagtatgccaaggatttccttggatctggagaccccaaagaaacaaagatgctaatcaccaaacaggctgactgggccagaaatatcaaggagcccaaagccgccgtggagatgtacatctcagcaggagagcacgtcaaggccatcgagatctgtggtgaccatggctgggttgacatgttgatcgacatcgcccgcaaactggacaaggctgagcgcgagcccctgctgctgtgcgctacctacctcaagaagctggacagccctggctatgctgctgagacctacctgaagatgggtgacctcaagtccctggtgcagctgcacgtggagacccagcgctgggatgaggcctttgctttgggtgagaagcatcctgagtttaaggatgacatctacatgccgtatgctcagtggctagcagagaacgatcgctttgaggaagcccagaaagcgttccacaaggctgggcgacagagagaagcggtccaggtgctggagcagctcacaaacaatgccgtggcggagagcaggtttaatgatgctgcctattattactggatgctgtccatgcagtgcctcgatatagctcaagatcctgcccagaaggacac

SEQ ID NO: 92492 - DNA, 458 bp, Homo sapiens
  misc_feature (1)...(458): n = a,t,c or g
tcttgatgtaccgggtccacgatttcgtgcccaggcgcccgctaggtggtgcctggcttttttttactccgcccgcctccccattcactgggaactagcacccggcgccgctcagacatatctattcccgcctctccgacccggactcactttgctcctgggcagctgcgcggagaactggggctcaccgccatggatgctctatcagaagcaaatggcacatttgcattatacctttttgaaaaagctaggggaaaacaactcaaacaacttatttttttccccatgagcatatcatcagccttggccatggttntcatgggggcaaagggaaacactgcagctcagatgtctcaggcactttgttttagtaaaaacggaggggaagatggagataatcatcggggttttcaatccattcttgttgcaattaacagaaccgaccctgtattatgtcn

SEQ ID NO: 92493 - DNA, 1139 bp, Homo sapiens
tgcccaggaatgagcagacgatgtgcttgtgaggttagaaggaagatgcagtcagctgtgacagatttctttcactatcattctcagtttctcacttaatttttccacggcagcctggggtgcgctgggagcagggagagataaaagtgagaactgggttggagaggagtgcttggacagtcactgcctcccatttcacctgtgcacaaactcctgatgtgagttgattcagtgaggaggggccagccaggtccccgtgggcatcatcctagcactttctctccccagtccctaggatgggtggctcacaatccagggagatgcctagggctgcttcttttctagatattccagtcagaggaggctccagcagaagggagtgtccagctgtggctgtggggtgcctgggcctcacatcttgtcctcgccttggtcaggacccagcacagattaggatgctgccttcagctcatccccagcacatattaccaatccgagtcatgctgccctgagggaaacattggtccccaggtccaaaagaataccactaaaggagagacaaccgggcaggcactgtggctcactcctgtattcccagcactttgggaggccgaggtgggcggatcacgaggtcgggagatcgggaccggcctggctggcacggtgaaaccccgtctctgctagaaatacaaaaaaaattatcccggtggggtggcgggcgcctgtggtccatatactttgggggctgaggccgaaaaatgggatggtcaccgccaggcggcccttcctgggaccacagagggggccttggacttcaacttgggggaaggaggagaatgtgtttacaagatttaggacggcggacggaggtaaaacgacggccggcggtgttatgagaggactaggtttctagcacgtagcgtcgcgggtaagattcttattatgtggcgacctcgctatgatctaccgggcgtacgtatgcatgaagcaacgaacgtagagtacctagcatcgaacctaggtacgtaacgacgcgaaccacgaatctagggatgctagcatccgtgcgtaggaacggatcgatcgttcctatctaccgcacgcatggtagtgaatgatgctacgctacggacggcaca

SEQ ID NO: 92494 - DNA, 439 bp, Homo sapiens
  misc_feature (1)...(439): n = a,t,c or g
cggaattcccgggtcgagcgctactgccgcgcggagcgcgtgtgtctgtgcgaggcctgtttcgtttaggagcaccgcggccacgagctggtgccgctggagcaggagcgcgcgcttcaggaggtgggctccgggggcacactcgggtgagccggggctggtgaccgaccgcgcgcgagcgggccgaggaccttggaccccccagtcttcccgggttgggtcttaatctcctcctctaacctgaggatctttgcggtcccttccagccttgacaaggtcatctgctggcggtgatggagatgggaagggaggaaggagggacgtgagaacaggacaaggacgcgaagagcgggcaggggacctgaagccgggccggggtctatgggggtgtangcgggagggagccgggttaggcccgcggggttccggtagcgtggct

SEQ ID NO: 92495 - DNA, 416 bp, Homo sapiens
aaccggctgaccacacacagtcctcactctcctggccctggtgggcggcaggcaccatggcgcagacagtgccgccctgcgagctgccctgcaaagagtacgacgtggcccgtaacacgggcgcctacacgtcctccggcctggccaccgccagcttccgcacctccaagtacctgctggaggagtggttccagaactgctatgctcgctaccaccaggccttcgccgaccgcgaccagtcggagcggcagcggcacgagagccagcagctggccacagagacccaggcgctggcgcagcgcacgcagcaagactccacgcgcacagtgggcgagcgactgcaggacacgcacagctggaagtcggagctgcagcgtgagatggaggcgctggctgcggagaccaacttgctcctg

SEQ ID NO: 92496 - DNA, 410 bp, Homo sapiens
gccctgtgtggagggtgacctcaggagccccggtccacggtgctcggggtgagcctgtgtggtgaggacagtcggcgggccctgggtctctgcccacacggaggtgaggacggtcggcgggccctgggtctctggccacacggaggtgaggacggtcggcgggccctgggtctctggccacatagcggtgaggacagccgttgggccctggactgcctctgcccacgcagggtcttgcacctgatctgatgagcagtgctggtccagggagggtcccaccgcatcctccgcctgccttggcccctgcagtaggcagtgctggggagacagactgagcgggagaggaggctgggccggggctgcagcggccacagagccttggccctcccagaaacggactctgatggcag

SEQ ID NO: 92497 - DNA, 422 bp, Homo sapiens
cacagaggcagaggggtgggcgggctggcccatggctgagacctctctcccagagctggggggagaggacaaagccacgccttgccccagcatcctggagctggaggagctcctgcgggcagggaagtcttcttgcagccgtgtggacgaatttggcccaaccttttcataggagatgcggccacggcaaacaaccgctttgagctgtggaagctgggcatcacccacgtgctgaacgccgcccacaagggcctctactgtcagggcggccctgacttctacggcagcagtgtgagctacctgggggtgccagcccacgacctccctgattttgacatcagtgcctacttctcctctgcggctgacttcatccaccgtgccctcaacacgcctggggccaaggtcctggtgcactgtgtggt

SEQ ID NO: 92498 - DNA, 436 bp, Homo sapiens
ctctcctcactcacccttcctggtgctttgggctctccttccttctcagacaagatgtcttatcagaagagagcagcccacccctcagcccccagtggactgcgtgaagacctctggcggcggtggcggtggcggcggcagcggcggcggcggctgcggcttcttctgcggcggctgctcctgcggcggcagctgcgggtgtggctgcggctgctgctgctgcctctgctctccgcgactgcgccgccggcagctgcgactgctacttgatcctcgagggccacccaggcgatcaaggagctcgtggtgcttcccaacgactccgaggagcttacgtctgatgcgatgctgacggagcgcctggagctccctcgtggctgctgcttccggggtgaagccgctgagctctctggccgcttccaatgctgctccgtcg

SEQ ID NO: 92499 - DNA, 912 bp, Homo sapiens
tcccacggctcctctcgagcgccgcattccccggactcgccccgggccggagccattgaccttgcgtctccgcgccgggtagctgctcctggccccttcgcccgcgccgacgcccctgagctggccgcccgccgcgccgtcccggggccttccaagccgggccttccaagccggacccgccgagcgcaagggcgatgggcacagccagaccctgggggaacgaacaggcctcggccagcattcagtggcctccgacgggagggaaggagcggcggacccggtggacgtggagccgctgtgtccgtgctgctggcgcccaggtgggctggcagcccgccgtcctccctgacggtggcgtttcagaggactccggtcctggagaggcacccctgggttgcagagaacacagacgtctcgaagggacagagaaggacgcaccattatctcggcccttccgaccgaaaggcttcggcacctcacgcggggggtcccatgcttgtcctgttaaatactcttgaactctattctgtcctgatactgaataatgcaagaatgggtgggtccagttttcatccctataaaccgtacatctttgtgccagtaagtaagcatgaaacaaataagtacgtctgcgctaagcgaacgtaaaacacacgacatcagtcggttctcggggagcgatggagctagtcacgctgagcggctgtcactctgccattccggcctctggggaggtggaacgattcatagtcccctgtgtggaaaaggggcttgcctgggccttgtttggctttgctagtcagtaggtaggtacaggagaggtaccttcaaataaccttacatgctggtaagtgcagggaggctgggggctgagtccctttttaacccaagtggagcaacattctccggggg

SEQ ID NO: 92500 - DNA, 433 bp, Homo sapiens
agagagagagaaagaaatatagaggtggaaacccttgtccttggggatcctggatagaggatgccagtgattgagtcttgaggcggggctgcctataggatacctcccaaccatttcagctccagatgctgaacatccctatgccccctcccccagtagtctctgttggatcttacaggtagggagcagactgaggcttgttcaccagaacaggtgcaagccacattgttgccaagacctgtctgaagccggattctccccactgtcttcttcaaccccgcctcttactccttctgtgggactgctctcccctcctgtgaggctagatagatgccctgtatccagcccaatatggaacaccagcaccgagtccgggaccccgtgatcactctgcaagcgaccccctgacccctgagtttatcaagcccaccag

SEQ ID NO: 92501 - DNA, 408 bp, Homo sapiens
gaagagatgtccttgaagggccggaggttataaagggagctggcactgaaagtggcacagtttgtccaacatgaacgagctcctgctctgtcaaggaggaggagttacttctgcggcacgatgagccccaagataacctcggagaaccaagccacaccatcctcttcctgggatttcaggcgcttggggctaccagcccgtcctgaacccaacacagagctctgagctggccagctgagggggccacatcaccggactcccggaggcagctgcgcttgctgagacaccttgccacattctgctctggtgagacctgaccttgtgccaatccatctccatggacccccttccctcttccttccactgtccatcacagctcttacagtttcagagacgccatcgagcttg

SEQ ID NO: 92502 - DNA, 580 bp, Homo sapiens
gtttatctgctactgaaatcagtctgactcagaaatgtaattgtatgtgtgttggcaagaactcacacaagaatactatcttcaagaacaaaaacgccactggatatttgtatcatccttcaccacggccacagaatttgacggattacctcattaactcctcgcaaccattgctatgttgagtttcattgtccctgtggttcttcctcctgctggtggcgtctcccagatgggtcctgtcccagctgcagctgcaggagtcgggcccacgactggtgaagccttcggagaccctgtccctcacctgcactgtctctggtgactccatcagcaatacttatttctactggtcctggatccgccagcccccagggaaggggctggagtggattgcgagcatccatgagagtgggaccacccactacaaaccgtccctcaggagtcgacttttcatattcatggacaccttccagaacccagtcttcctgtgggctgacctttgtgaccgccgcaaacacggttgtttattactgtgtgcgacgtgcgcgagtgtctgcttgttggttcgacccctagggcc

SEQ ID NO: 92503 - DNA, 397 bp, Homo sapiens
cccatgtgctcaagactggcgctaaaagttttgagcttctcaaaagtctacagccaccgtccagggagcatgtagctgctggctccggggacactttgcgttcgggctgggagcgtgctttccacgacggcgacacgcttccctggattggcagccacactgccttccgggtcactgccatggaggagccgcaatcagatcctagcgtcgagccccctctgagtcaggaaacattttcagacctatggaaactactttctgaaaacaacgttctggtaaggacaacggttgggctggggacctggaaggctggggggctggagggctgaggacctggtcctctgactgctcttttcacccatctacagtcccccttgccgtcccaagcaatggatga

SEQ ID NO: 92504 - DNA, 415 bp, Homo sapiens
ccagagttacataaagtgtgaggactcaggaggccatggaaggagccacagctacagcgctgacaggctggagcatgggaagccccagtccacagcctgtgctcagcacaccccacatgtggcctgtgtccagttggattctgtgtcttctctgtgccatccatgttctgtatcttccatgttctcagagagcatgattgtgttcatatattctgaccctcccccagctctacccatcaagttcacagagggtctgaggaacgaagaggccacagaaggggcaacagccgcgctgcggtgtgagctgagcaagatggcccccgtggagtggtggaaggggcatgacaccctcagagatggagacagacacagcctgaggcaggacggggccaggtgtgagctgcagatccgcggg

SEQ ID NO: 92505 - DNA, 619 bp, Homo sapiens
tgaacaaagcaatgcatttatttgttgcaagtcattcacacgaatgacaaggggccaggcaggcctgagggatcactaacccatcttttgtccctccctttggaagcagcagggctgagggactcacccagcctgccatgagccagacttaacaccccccagaccctccttccgggaggacagctgctgttgttacacgttctggaagaggaaccaaatgcactctcacgtgctgtggcccagggcctttagagccctggctcggaaaataacctgggctgtgcgaccctggagcctcgcctgccctggctcacctgggtggtgctcccccagcccctgcagcccctccggcgggtgcacgcagacattgttcttggagtagatgatctctccatccaggacagagggggacccgctgccgctgccaccgggggtgagggtcaggaggtccgaggctttggaggaggccctgcgaaggaggcggcccagagacattgccgggcaagtgtttccatcctccgcatgcgtcggcccgggcagggctcgtcaagacctgcccgggtcccgctgcgggggccggattcgcaccggctccgagagccgccaccgtcgcctccgc

SEQ ID NO: 92506 - DNA, 667 bp, Homo sapiens
attcatacgtgtacatttctacttcagtttttattatccattacataacatacatgcttgattatttgcttcaaggaaatacacctttataagtaatactcaataactactgggtttgagaatgaaggtgtcagaacgaatgagattgtcctatgaaagaagaggcaggagccagggaggaggatcccacccggccggggctcagccaggaggcagggccattggggcagggtggcagtccaaggaaccgctctgggaaggtttgcaaaggtcggggtcccccctgccaggtgatcgaattatcgtggagtgtctggaaggcgggggaagttttgttgagttcaccaaataactcagaccaactggaaaccaagtggagtttctacaggaccaactagaatagggatcagctacatgggggcggggggaggggggcagggaacggtgtctgtcttcattgcagctctgtctgcagagccagcactgtgatacctcatagtaggtgctcagtgaatgtctgtgaagtgaattactatctagacaaggatgagactggtatgactctccaaagctttcccacctccaaaacctcggcttgtggggaatctccagtagggggcactgtggacacggttcgcatctgcctcccaaggctgggctccgcgtc

SEQ ID NO: 92507 - DNA, 430 bp, Homo sapiens
  misc_feature (1)...(430): n = a,t,c or g
caggagttgaagcaaggcccgaacccgttggcccccagtccctctgccccgtccacttcggcggggctcggggactgtaaccacagggtggacctcagcaaaaccttctcggtgtcctccgccttggccatgctccaggagagaaggtgcctctacgtggtcctcacggattcccgttgcttcctggtgtgcatgtgctttctgaccttcatccaggcgttaatggtctctgggtacctgagcagcgtaattaccaccattgaaaggcgctacagtctgaagagttccgagtcggggctgctggtcagctgctttgacatcgggaacctggtggtggtggtgttcgtcagctacttcngcggccggngtcggcggcccctgtggctgccgtgggtggactcttggatctggaagggggcgagatgattgg

SEQ ID NO: 92508 - DNA, 1582 bp, Homo sapiens
atgccttgcaaatcagcaataaactctaccaaaaagactggaatgacaccaagcagaaaggctatgacataagggcagatgccattgaaatcaagcacgccaaggcctccagagaaattgccagtgagtacaaatacaaagaaggttaccgtaagcaactgggccaccacatgggtttccgcaccctacaagatgaccccaagtcagtatgggctatacatgctgccaagatccagagtgacagagaatataagaaagcttatgagaagtctaaaggaattcacaacacaccgttggacatgatgtcaattgttcaagccaagaaatgccaggtcctggttagcgacattgattatcgcaattatctgcaccagtggacgtgtctgccagatcagaacgatgtgatccaggccaagaaagcctacgacctgcagagcgataacttgtacaagtcagacctggaatggctgagggtattggatggctgccagagggttctgtggaagtgatgagagtgaagaatgcccagaatctcttgaatgaaaggctgtatcgtataaagcctgaggccctcaaattcaccagcattgttgacaccccggaagtaatccaggcaaagatcaatgctgtacagatcagtgagccattgtatcgcgatgcctgggagaaagagaaggctaatgtgaacgtgccagctgacactcccctgatgctgcaatccaaaatcaatgccctgcagatcagcaataaacgctatcagcaagcttgggaagatgtcaagatgactggttatgacctgcgagcagatgccattgggatccagcatgccaaggcttccagggatattgccagtgactatctgtacaaaactgcttatgagaaacagaaaggccattacattggctgtcgcagcaccaaggaagaccctaaactggtttgggcagcaaatgtgttgaagatgcagaatgacaggctgtacaaaaaggcctacaacgaccacaaagccaagatctccatccctgtggacatggtgtccatcagcgctgccaaagaaggtcaggcactggcaagtgatgtggactatcgccattacctgcaccactggtcttgctttcccgaccagaatgatgtgatccaagccaggaaagcctacgacctacagagcgacgccctctacaaggctgacttggagtggttgcgtggcattggctggatgccccaagggtctcctgaagtgttgagagtcaaaaacgcccagaatatcttttgtgacagtgtctatcggacgcctgtggtgaaccttaagtacacaagcattgttgacacacctgaagtggtccttgctaaatcaaatgctgaaaatattagtattccgaagtacagagaggtttgggacaaggataaaacttcaatacacataatgccagatactccagaaattaatctcgctagagcaaatgctcttaatgtgagcaataaactttaccgtgagggctgggatgaaatgaaggcgggctgtgatgtccggctggatgccatccccatccaggctgccaaggcctccagggagattgccagtgac

SEQ ID NO: 92509 - DNA, 724 bp, Homo sapiens
  misc_feature (1)...(724): n = a,t,c or g
atacatacttgtatgaaaaacaattgattttaattttcttatattaagtttaagtaaccaggaaatcatcaaatggtccatcttctagttcaagaacagctagggaagaggagtggattcccagtgctatggactcctgttggcatctctctgttgctctccttctagtatgagggaggtgaataaaaggcaatgatacatgtttttggcctgaaaaatatgagaagttgttagaatattgtttttaaagtacattgtgtggctggattaaatctcttctaagttctaagtaagataattctttaatatatgttttctagccccgctggatttctttcccagggtttaaataatgtaatttattgtgccttttacttgatgagtaaggtaaaatgaagaaaatcttgttgataccctggattgtttcatattataaagagaaacaatatgtaaatgcccatgattaaaattgctgattggggactcattaatcaagcagattattattattattactatcagggacaacaacactaacaataacaaaagctgctatgtaaaatggttaatattcagagattctttcatataagatggtgccataaggntcttaatttcttgtcttaaacattttacatatgacatatgtaaattaagagaaaaattctgcaattaacagngatatataaaatactataaatataccttaaagtggcatattcag

SEQ ID NO: 92510 - DNA, 512 bp, Homo sapiens
cggcaggcacgaggtacgggtgctttgggtcttagaccccagcctgggggtgacagattctggccctgccttggcatcaggtatcagaagcatgtgcacacgtatcgcattctgcctgatggagaagatttcttggctgtgcagacctcgcagggtgtgcctgtgcgccgcttccagaccctgggtgagctcatcggcctgtacgcccagcccaaccagggccttgtgtgcgccctgcttcttcctgtagagggtgagcgagagccggacccaccggatgaccgggatgcctcaggtacttcccagtgtgcaggtcccctccctgcccctgtcccttggctctacctgcctcttcccatccccccttctcaaccccacctctcctgtaaccccctttcccttggccatgatgccggggccctttaaccctctttccatggaagtcactttacagctgcatcgtgcctcctactccactgagtgtgggaggcccaaacggctgcccactgacc

SEQ ID NO: 92511 - DNA, 458 bp, Homo sapiens
  misc_feature (1)...(458): n = a,t,c or g
accctgcggactttcgcgaaattngggtanntatctcgtctggcgcccctgctctgcctggcgctgctgtccgcgctcgccgcacgaggcccgcgatgctcccagcccggtgagacctttctgaatggcgggaagtgtgaagcggccaatggcacggaggcctgcgtgtgagtaccacccctgcgggacctgttgctttgtcgagggcagagcccctgccttctgcagccgcgcaggggacagaacactgggccattgtcttctggagatggcccagagtctgggcacggtcacgtgctgacttttattggacaaagtctggcaattacttaatcaccagcaattatgctgcgtgtggagctggtctggctgctgagggcttgggcactcctccgtgggccacctcaggctccggggtcactaagtgggagtcccagtaccccaattcttctttaagt

SEQ ID NO: 92512 - DNA, 1114 bp, Homo sapiens
tttcgttggctgcccacaggtctgcaggcactcggtacgccgctaacgcggcgaggtagctcggtgcgtctcgcggtaccagtgcgaatcatcgggctatccaggtccgagatcctagtctcctgtcggctctgaggaggatggatccttctgcggatacatgggacctcttctcacctttaatatcattatggataaacaggttttacatttatttgggctttgctgttagcattagcctttggatttgtgtccagattgtcatcaagacgcagggcaagaacttacaggaaaaatctgttccaaaagcagctcaggatttgatgacaaatggttatgtctcccttcaagagaaagacatctttgtgtctggagtgaagattttttatggttctcagactggaacagcgaagggattcgcaacagttcttgctgaagcagttacatccctggatctgcctgtggcattattaatctaaaagaatatgatccagatgatcatctgatagaagaggtgactagtaaaaatgtctgtgtcttcctggttgcgacatacactgacggcctaccaactgaaagtgcagagtggttctgcaaatggttagaggaagcatccattgattttcgatttggcaaaacttacctgaagggtatgagatatgcggtatttggcctgggaaattctgcctatgctagccacttcaacaaggttggcaaaaatgttgacaagtggctctggatgcttggcgcgcatcgtgtgatgagtcgaggggagggcgactgcgacgtggttaaaagcaagcacggcagcattgaggccgacttcagagcatggaagaccaagttcatctcccagctgcaggcacttcagaaaggggagagaaagaagtcctgtggcggccactgcaagaaaggcaaatgtgaatctcaccaacatggctcagaggagagggaggaaggatctcaagagcaggacgaattgcatcacagagacaccaaggaggaagaacccttcgagagctccagtgaagaagagtttggtggtgaggaccatcagagcctaaattccattgttgatgttgaagatttgggcaaaattatggatcacgtgaag

SEQ ID NO: 92513 - DNA, 440 bp, Homo sapiens
tttcgtgcagaggagggtggcactcctaccatctagttgttttcaaagtgccaaggatcagttatcaatggccaatgtgccctcttctgctttgccctacataatgaaagggcaatcaggtcaatggcaatgggaatcagttaaaaaggaaacatgaatcgatgtgtcctgtgtcactcacacagaatactgtcagactgatggaggcaggtctccctcagaagcaggcagaaagggctgatgagctatttgaggcaggcttggtaatttacgtcaagcttgatgaacgagtactgaatgctctcatatagctctgtggggcttcaatggttcaaagaaagtgatttgtcacaccttaggctcttagagatttcttttcgctgattatttgttctaggacaaaatacatttctgtgtcaggtgagatcagcaaacaaagg

SEQ ID NO: 92514 - DNA, 457 bp, Homo sapiens
  misc_feature (1)...(457): n = a,t,c or g
tttcgtccaggaatctctctgagatccctgagagttggctggttttcctgttgatcaggtgtttgggggcatggccctggtgctgctgcggccagacagctccatctttgccaacattgttgctgtccccagtgcagtacaggagagggtgaccttctgtcccacggtccctgacaccgaggcttcctgggtcagcgcagactgtgcccaggaccctggaacagaggaggcaggcacagagaggcagtcacctgagcagagggtgagaagctggaggaggagaggggtccaggccatggtggagatgccccaggctctgcttcctaagcccacagctgagcagaactgcacagagnctctcttatcctctcctcctaagagggcacagagcacccttcatgcaaatcacacccctccccctgctatccctgggcctgaacttggggaaagttgagtg

SEQ ID NO: 92515 - DNA, 751 bp, Homo sapiens
ggaattcccgggtcgacgatttcgtgcagtataatcaatcattcatatatttaaatcttagaatgagacagactgcttgctgcaatgatagctcatggaaaggcaaagaccctatttttaaagaccagatgtttcatgtacttctatgtctgacttagaaaatgatttattccttcttttgcaggaattagtactgaaattaatattaatcaatggcaaggaagaccagagcagaggatagtcctgtgacaaatggtcacaagcttctcccagctgtgaaatgtctttccttcataagtgactatttccattccctttcatgtatttgccttgtctggaagactttgattatgtgcttcttaggacacatataaagtccttactttgtatttggggcccagagaagtttagcaatttgcttaagctcacatagctagttagcagcagagctgggcctaaaatcttggaccatttccaaatccagagtttgctttactgtatcacactgtgcaacgcttgtgttgatcactgtgagtacttaatatactagatttctaacagcagcctatttgcttctgattgccgactagttcacttcaattcatatttatcttaactgaaaaccactccttctgacggctggtggtggctataaaaaggaatggtggctcatttaaccttggggaggccgacccttcaaaaattaagcgccaagggttttagaggaaactgctttattatccccccccca

SEQ ID NO: 92516 - DNA, 412 bp, Homo sapiens
  misc_feature (1)...(412): n = a,t,c or g
tttcgtgaccatacagatccttccttgatttttctctgtcacctctgggagcaggcaggttcctgggatctgataaaactgatattggagacgctggagctgatccgacatagcaatgggtgttgactccctccttatgtgtggactgctcagcgggggaacttgactgtccaacatgctgagtgcaagaacagcagaaaggggacttttaagatgtggcaaacatgaggcctcttcggagaggactttggaaaccaggccttgcttggtaaggaccagggcatcttccctccatgcctgggtgatgatggagccttgttccatctaacaatcctgagggctgggctggggggcatgggctggggcctgattcanttcccgagattctgacctccacagctgttcacatacc

SEQ ID NO: 92517 - DNA, 430 bp, Homo sapiens
tttcgtggggcggccgcgggggcttagcgataggcttgaggaccttttccttgccgggttccgggtcggagagcggctccggacggcagctatgaagcggtacgtgcgcatcctgttactgggcgagggtgcggaacacgtcgctgatcctgtgcctggtgggcgaggagttccccgaggagaagccgatcacacggaccaggagctgcgggaggagatccacaaggcaaacgtggagcgtgtggtgcatgacgtctctcaggaggccaccattgagaagattcgtactaagtggatcccactggtgaatggggggaccacgcaggggcccagtgggcatcaagtcatacctgccgtcggggagatccatggaggccgagctccccatcatgagccagttgaccgagattgagacctgcgtggagtgttg

SEQ ID NO: 92518 - DNA, 678 bp, Homo sapiens
tttcgtgtggctccccgtcctggtgcgggacctgtgccccgcgcttcatccctccccgcacagcctattgattcccctgccgcccttgctcacctcctgctcgccatggagtcgctggttttcgcgcggcgctccggccccactccctcggccgcagagctagcccggccgctggcggaagggctgatcaagtcgcccaagcccctaatgaagaagcaggcggtgaagcggcaccaccacaagcacaacctgcggcaccgctacgagttcctggagaccctgggcaaaggcacctacgggaaggtgaagaaggcgcgggagagctcggggcgcctggtggccatcaagtcaatccggaaggacaaaatcaaagatgagcaagatctgatgcacatacggagggagattgagatcatgtcatcactcaaccaccctcacatcatctgccatccatgaagtgtttgagaacagcagcaagatcgtgatcgtcatggagtatgccagccggggcgacctttatgactacatcagcgagcggcagcagctcagtgagcgcgaagctaggcatttcttccggcagatcgtctctgccgtgcacctattgccatcagaacagagttgtccaccgagatctcaagctggagaacatcctcttggatgccaatgggaatatcaaga

SEQ ID NO: 92519 - DNA, 737 bp, Homo sapiens
ggaattcccgggtcgacgatttcgtgcggcgagtgggtgacagagcccccgtctccgcgcgtcttcgccgccctgcgccgtgacccgctgtggcactgggccacgagtggaggctgcgcccctccagttctgccttcatagttctctgcctttgcccaaaactgcagaaaatgaacaaatcccagggatcagtttcattcacggatgtgactgtggactttacccaggaggaatgggaacaactggacccctctcagaggatcctatacatggatgtgatgctggagaattatagcaacttactttcagtggaagtgtggaaggctgatgaccagatggagagagaccacagaaacccagacgagcaggcgaggcaatttttaattcttaagaaccaaaccccaattgaggaaagaggcgatctctttggaaaagcacttaatctgaacacagactttgtttctttaagacaagtaccttataaatatgacttatatgaaaaaactttgaaatataattcagacttgcttaatagtaatagaagctatgcaggaaagcagactgatgagtgtaatgaatttggaaaagcacttctctacctgaagcaagagaaaacccacagtgggagtagaatattcttgaataccataaaagtggaaaagccctcagccataaagcagccatttttaaacatcagaaaataaaaaacttggttaacctttcatttgtacttactg

SEQ ID NO: 92520 - DNA, 390 bp, Homo sapiens
aattcccgggtcgacgatttcgtggcgcccggactctcggaggccgggaagctcctggggctggagttccctgagcgccagaggctggcagctgcggttggatttctccgatgtccggtgttatctccatgtctgcccctttcttcctggggaagatcatcgatgccatctataccaaccccactgtggactacagcgacaacctgacccgcctctgccttggcctcagtggcgtgtttctgtgtggtgctgccgccaatgccattcgtgtctacctcatgcaaacttcacgtcagcgcgttgtgaagaggctgagaacttcgttattctcctccattctggggcaggaggttgctttctctgacaaggctggcacaggggaattgatta

SEQ ID NO: 92521 - DNA, 414 bp, Homo sapiens
  misc_feature (1)...(414): n = a,t,c or g
tacatcggaggtgcctcagccatggcatggatccctctcttcctcggcgtccttgcttactgcacagggaccgtggcctcctatgcattgactcagcctccctcagtgtctgtgtccccaggacagacagccagcatcacctgctctggagataaaatgggggacaaatatatttcttggtatcagcagaagtcaggccagtcccctgtgttggtcatctttcaagatggcaagcggccctcagggatccccgagcgattctccggcttcaactctgggagcgtagccactctgaccatcagcgggacccaggctctggatgacgctgactatttctgtcaggcgtgggacagcagaaaaactggtgttcggcggagggaccaagttgaccgtcctacgtcagcccaaggctgn

SEQ ID NO: 92522 - DNA, 897 bp, Homo sapiens
gcacgaggaaaatccgaagtgccgcggaaagtggaggtgagggccgcccgccctagaggtgcccgtccgagaggcagagctgacaaggaaggtttcgagcgttttgctggcaaagggatttcttacaacctccaggcatgcgtctttctgccctgctggccttggcatccaaggtcactctgcccccccattaccgctatgggatgagccccccaggctctgttgcagacaagaggaagaaccccccatggatcaggcggcgcccagtggttgtggaacccatctctgatgaagactggtatctgttctgtggggacacggtggagatcctagaaggcaaggatgccgggaagcagggcaaagtggttcaagttatccggcagcgaaactgggtggtcgtgggagggctgaacacacattaccgctacattggcaagaccatggattaccggggaaccatgatccctagtgaagcccccttgctccaccgccaggtcaaacttgtggatcctatggacaggaaacccactgagatcgagtggagatttactgaagcaggagagcgggtacgagtctccacacgatcagggagaattatccctaaacccgaatttcccagagctgatggcatcgtccctgaaacgtggattgatggccccaaagacacatcagtggaagatgctttagaaagaacctatgtgccctgtctaaagacactgcaggaggaggtgatggaggccatggggatcaaggagacccggaaatacaagaaggtctattggtattgagcctggggcagagcagctcctccccaacttctgtcccagccttgaaggctgaggcacttctttttcagatgccaataaagagcactttatgagtcacaaaaaaaaaaaa

SEQ ID NO: 92523 - DNA, 898 bp, Homo sapiens
  misc_feature (1)...(898): n = a,t,c or g
ccggattccgggtcgacgatttcgtgcggcttttgtgttgggcagcgcgaatgtggcgagctcggtgcgtctccgctgctccttccccttatccctgggaggtccaagtggtcccgcggcagcttctgttgctctgggacctgcaggtcccggaaggtccttagggaggaccccagacaccggagactgggaaatggattcagtgtcatttgaagatgtggctgtggcctttactcaggaggagtgggctttgctggatccttctcaaaagaatctctacagagatgtgatgcaagaaatcttcaggaacctggcttctgtaggaaacaaatcagaagaccagaatatccaagatgacttcaaaaatcctgggagaaatctaagcagtcatgtggtagagagactgtttgaaattaaagaaggcagtcaatatggagaaaccttcagccaggattcaaatttgaatctgaataagaaagtttctactggagtaaagccatgtgaatgcagtgtgtgtggaaaagtcttcatatgtcattcagcccttcataggcacatcctgtctcacattggaaacaaactatttgagtgtgaggaatgtccagagaagttatatcattgcaaacaatgtgggaaagcctttatctctctcaccagtgttgacagacacatggtaacacacactagtaatgggccttataagggtccagtgtatgagaagccttttgattttcctagtgtatttcaaatgcctcagagcacttacactggagagaaaacatataaatgtaaacattgtgataaagccttcaattattcaagttatcttcgtgaacatgaaaganctcatactggagagaaaccctatgcatgtaaggaaatgtggtaaatccattca

SEQ ID NO: 92524 - DNA, 758 bp, Homo sapiens
  misc_feature (1)...(758): n = a,t,c or g
accacctcaaataaattagaagttcgaaattcatcaaacaaaactaattctttatttgggcaatatgataacattaatacacagataactttgaattctagcaactgtaaaatctaaacttaaatgttatttaccgtatatttagtgaatttatttttccctaccttcacgggacattaaaataggaaaggaagttaggttcaaaggagaaatggggctttgtagtcatcgctgccacctgaagccacctgcctctagccatggtcaacgccactgtgttcttttgacatcattgttgatggtaactcctttggcccatgcagctccttcgagctgtttgccgacaaagctccaaaaacagtggaaaactttcgtgcactgagcactggaagaaaaggggttgggtataagggttcctgctttcacagaattattccagggtttattttatctgccagagtgctgacttcacacaccataataatgccagtccatctaccaggagaaatttgatgatgagaacttcatcctgaagcacacaggtcctggcatcttgtccatggcaaatgctggcccgacacaaatggttcccagtttttcacctgtgtggccaagactgagtggctggatggcaagcacaaggtctttggcaaagtgagaagagggagtgaatatcatggaagccatggagtgctctgggtccgggaatggtgagactggcaagaagatacccactgccanctgcggacaactctaat

SEQ ID NO: 92525 - DNA, 979 bp, Homo sapiens
aagacatggccctgccctcaaggaactaacacctcgctgctgatgcaaaccccctcccctccaccacacatgataaaacactgtctttagctatgaagggagtgtgaccaactttggggttgctggattgaaagttcatgagtgaaggtgacccaaagaaagtgatgcttagcttgagtcttaagattaagtacaagttcattaggcagatagaaggaaagaattccaagaggcaacagtgtgtgcaaagcctttaattagaatgtttgtattttttacatcatgcataacttcacatttgtgattaattagtaattatttcaatacttgtaagctcatctgcctcagatttaatcataatacatgaattaaattaatcaaattaaggaacagcaatttagaaagaaacacactttaaaaaatcaaaattctcaattcaggcagtctgtttctatcatttggtattctactcctttaaaaatttcatattgcccaacaaaaagtggttatttttactgtttttggagatgactgaacagatgaaggcatcagatgccttcatcagctggtattttgcctaagatctatttaagataaccttttcttatattttttacttaatattgggcataatcgtatcattcaagattaagtctgggttatttctttgataagaactgaatgtggccggagcgctagatgtcacgcctgtaatcccagcactttgggaggccgaggtgggtggatcacttgagatcaggagtttgagaccagcctggccaacatgatgaaaccctgactctactaaaaatacaaaaaaattatctggatgtggtgatgcgcatctgtaagcccagctactcgggaggctgaggcaggagaatggcgtgaacccgggaggggtgaggttgcagtgagccgagattgcgccactgcactccagcctgggcgacagagcgagactgtctcaaaaaaaaaa

SEQ ID NO: 92526 - DNA, 1176 bp, Homo sapiens
cctcctccttccccacctgtatgcggacggtctttcactctaataccagtgtgagctcgctgctgcacaggcctggccatgtcactcctcagctgacaatccatggagggtggagacaccaccgtgaccacacagccattgacgagtgggacttcaaccccagtaagtttctcatctacacctgcctgctgctcttctcggtgctgctgcccctccgcctggacggcatcatccaatggagctactgggccgtctttgcccccatatggctgtggaagcttctagtcgtcgcaggcgcctccgtgggcgcgggcgtttgggcccgcaaccctcgctaccgcaccgagggagaggcctgtgtggagttcaaagccatgctgatcgctgtgggcatccacctgctgctgctcatgttcgaagtcctggtctgcgacagggtggagaggggcacccacttctggctgctggtcttcatgcctctcttcttcgtgtcccccgtgtccgtggctgcctgcgtctggggctttcgacacgataggtcgctggagctggagatcctgtgctcggtcaacatcctgcagttcatcttcatcgccctaaagctggacaggattattcactggccgtggctggtggtgtttgtgcccctgtggatcctcatgtcgttcctttgcctggtcgtcctctattacatcgtctggtccctcctgttcctgcggtccctggatgtggttgccgagcagcggagaacacacgtgaccatggctatcagttggataacgattgtcgtgcctctgctcacttttgaggtcctgctggttcacagattggatggccacaatacattctcctacgtctccatatttgtccccctttggctttccttactaactttaatggccacaacatttaggcgaaaggggggcaatcattggtggtttgccattcgcagagacttcttcaggatcaactaccccagcccacgggaaaacccccacctccccctttgacagaccatcatggggaaaaggcgttgccactgcaaaacaaggacagaggctcatggccagcttccaggggatcccccaggctcctctgagcacgtccatgtctcgtgctgagattagatggaagatgccaacaggaccagcaaagggttcaggcccccgaatgaag

SEQ ID NO: 92527 - DNA, 411 bp, Homo sapiens
  misc_feature (1)...(411): n = a,t,c or g
ggtggaatnccagttgatagatacacctatattatctgtcttatctatgtatccatctatattaggtatctatatcatctatttatctaatccatctatccatttatctatctctatctatatattatctatcaaccaatctatttttccatgcatccgtctctattatctgtcagtcatcttatccatcaatcttatgtatgcatcatccatccatctatccatccctgtatatttctctgtatatatatctacccattcctctctctatctctatctatccctctctatatctatctgngcctctgtttttctctatatagctatatctatctatccatccatctatattatctatcaactaatctatctttccgtctacccatctgtctatattatctatccatctat

SEQ ID NO: 92528 - DNA, 696 bp, Homo sapiens
agggggttctcggtgagtgtctgtacgcagaagagcctggggccgcggtggcacaggaaccgggtgcgtgctcagctgcacggggctgcagccgctactctccgctgggccggcactggacgcgtgcagccgggcctactgtgcgcagcccgtcttttgtgtgaaaacgcccgctgtgtgcagatctccgtcttcgtgcagggcctactgtgcgccgcaccccccttccatgcaaagcctactgtgtgcagaaccccatttgcctgcaatgcctactgtgtgcggcccctctcctgcgtgcaaacgcctgctgtgtgtgacccttttcttgcatgcaaggcctactgtgtgcagagccctaccttcttgcagtgcctacagggtgcagcccctctcctgcgtgcagacgtccactgtgtgcagatcgctgtcttcgcgctgggcttactgtatgcagcacctctcttccatgcaaagcccactgtgtgcagagccccacctggccgcaatgcctactgcgtgcagacacccagatacatacaaaattgactgtgtgcaggcatccacctacatgcaaacacctgcacctgcactcgtgcaaacacccaccgtgcacaggcacccactgacaaacattcatgtgaggagcccccaagctcccacactcccaaacggccttgtctttttgtctttccc

SEQ ID NO: 92529 - DNA, 454 bp, Homo sapiens
  misc_feature (1)...(454): n = a,t,c or g
gttctttgacagtgcggnggaattcggccggtgcaggtaggttcaggtgagtgaaggtgggtgcaggtagattctggtgagttagggggggtgcaggtaggttcaggtgagtgagggtgggtgcaggtaggtactggtgagtgagggtgggtgcaggtaggtgcaggtgagtgaaggtgggtgcaagtaggtgcaggtgagtgaggtaggtgcaggtggtagagaagggtcctgcctcagaatgcctatccattcattccataaatgaccacttcttgagtgctatttgntaaaacttttccaagaccccaggacactgctaaataatctatacaggaagtctgatcttggaaagcttacaaactatccgaaggggtaggcattaaatcaagtgctcaatttattagctatttgcagtggntaaaagtgcctcaaggaagaaaaacaaaatttn

SEQ ID NO: 92530 - DNA, 788 bp, Homo sapiens
ggaattcacctgctgggatgacgtgagttgaggaggctcagcggaaagcgacaggaaagacagtaagctctctgaagtcaagaaccatagttgttttgttcactactgtatactcagcacctaatagtacttggcacataagtactcagggactatttgtcaaatgcaagaacatatgcccctaaagcagaagtcaggaaaaccagaaaaaatgcctttaagtattacagaaatgccacaggcctccacttaaattgaaaagcaagctaacccctcttgataaaaatgtggattgagatcaagaagcagcttctctgctccttctggaatctccacctggtttagcctgctgcctccactcctgcctccaccatgtccatcagggtgatccagaagtcctacaaggtgtccacctttggcccccaggctttcagcagccacccctacactagtgggcccagtgcctgcaccagctccttgagcttctccctagtggggagcttcactgtgcagcttctggggtggcctgggcggaggctatggtggggccagcagtatgcgaggcatcaccaccatcacggtaaaccagagcctgctgagcccccttaacctggaggtggactccaacatccaggctgtatacacccaggagaaggagcagatcaagaccctcaacaacaagtttgcctccttcacagaccaggtatggttcctggagcagcagaacaaggtgctggagaccaagtggagccttctgcagcagcacaagatggctgggagcaacatgg

SEQ ID NO: 92531 - DNA, 415 bp, Homo sapiens
  misc_feature (1)...(415): n = a,t,c or g
tgtggtgcaattcgtcctcctgagtctgtaaagagtctaggacagagcgaaccgaagcccagattgaccaaattgggggtggaataatatgcccgcctttatgagcaattttgaatgtctgccaatctcatcccaatccttaagttctaaagttccctcagtaggaaaccaagggcaaagaagatctacaacatcaaacagctcaattaacttatcagtagatacttttaaccactccttctttaaggagagtttttataaaatttaaataagctgagtacttagtacaggcctgtcccttggtgtccccgggatactctgagtgcccaagcttaccaccaagcttattgacctcaatcctcaggaatctgtcattgaaatcctctgctggtgttcacgctcanagtgaacttca

SEQ ID NO: 92532 - DNA, 1467 bp, Homo sapiens
gcggccgcgccaccgccggagagggaggcccgagcgcaggagcctctggtggatgggtgcatcggcggcgggaggacgcggaagaggagccccgggggtagcggcggcgcgagcaggggcgcggggaccgggctgtctgaggtgcgcgccgcgctggggctcgcgctctacctgatcgcgctgcggacgctggtgcagctctcgctgcagcagctcgtgctacgcggggcggcgtggacaccgcggggaagttcgacgcgctccaagccagggattatcttgaacacataaccgtccattggccccaggactacaggaagtccagaaaatgaaattctgaccgtgcactacccttttggaacagattaaactgattgaagtgcaaagcaacagccttcataagatttcagtagatgtacaacggcccacaggctcttttagcattgatttcttgggaggttttacaagctattatgacaacatcaccaatgttgtggtaaagctggaccccaagagattgaaccccagcatgctgtcttggctaattgtcattttgactcagtagcaaactcaccaggtgccagtgatgatgcagttagctgctcagtgatgctggaagtccttcgcgtcttgtcaacatcttcagaagccttgcatcatgctgtcatatttctctttaatggtgctgaggaaaatgtcttgcatgccagtcatggtttcattactcagcacccctgggctagcttgattcgtgcattcattaacctagaggcagcaggtgtaggagggaaagaacttgtattccaaacaggtcctgaaaatccttggttggttcaagcttatgtttcagcagctaaacacccttttgcttctgtggtggctcaggaggtttttcagagtggaatcattccttcagatactgactttcgtatctacagggattttgggaacattccaggaatagacttagcttttattgagaatggatacatttatcacaccaagtatgacacagcggacagaattctaacagattccattcagagagcaggtgacaacattttagcagttcttaagcatctagctacatctgatatgctggctgctgcttctaagtatcgacatggaaacatggtcttctttgatgtgctgggcctgtttgtcattgcctacccctctcgtattggctcaatcataaactacatggtggtaatgggtgttgttttgtacctgggcaaaaaatttttgcagcccaaacataagactggtaactacaagaaggacttcttgtgtggacttggcatcactttgatcagctggttcactagccttgttaccgttctcattatagcagtgttcatctctcttattggacagtctctctcatggtataaccacttctatgtctccgtttgtctgtatggaactgcaactgtagccaaaataatacttatacatactcttgcg

SEQ ID NO: 92533 - DNA, 435 bp, Homo sapiens
gcgtctggtggaattccatatacacaaatgtccacatgcacacacaattcatatacacaaatgcccacatgcgcacacaattcatatacacaaatgtccacatgcgcacacaattcatatacacaaatgtccacatgtgcacacaattcatatacacaaatgtgcacatgcacacacaattcatacacaaataggcacatgcgcacgcctgtggttttctagagcacagagagaaaaggcccttgggatctaggtgaagagaccaagcatgtcaaagggaaagagatcctcccaggcctcacagcaggtaagaggcagagtcaggatgagaatagaggcctcctgtcccccttggaaatgccaccccaccttcccatagcaatactgactcttggatctcgaaagagatagagttgcagattatgcacgacctgg

SEQ ID NO: 92534 - DNA, 648 bp, Homo sapiens
ccagctggcggaattcggagattagactgattcttcctgtaggtttttaaaaaaatgtataatatgctcaaatatgttctttctgaagtactaatcaggtttgttgctctctgcataaaattcatcactattttccattgcccttaggacaaagaccaaagtactcagcatgactcacaagcccctgacatatgtgtccttctcttccctctctccacctggtttctcttacctttccaaaagctcaattgaatctatatttagcttcttgaagcttttttcaaacgttctgtgtatgttctttactccctctttccttcctactattttctgtttccctgagatcattctccctcctttcaggactcagtttagtcatttttgagaagccattcctcatcttcagtctgagctaggtgccttttgtctgtgttttcccagaactgtgctgtcttatctcagcatttacatactgaaatttgtctattgtctgtctctcacttattgaagacatagattgtttttatgtgggtggatagattttggaagtgatattcagtcgtattaaaacttgacttttaattgttaggcaaacggggggttcaataaaatttctattggtttcttttaacctaaggctgggccaat

SEQ ID NO: 92535 - DNA, 692 bp, Homo sapiens
  misc_feature (1)...(692): n = a,t,c or g
ctttgtctctagctgctgcgggagctccaggtctagtctttactgctctgtgtattctgctcctagaggcccagcctctgtgactccgttatctgcaggtattgggagatgcacagctaagatgccaggaccacctggaagcctagaaatgggaccactgacatttagggatgtggccatagaattctctctggaggagtggcaatgcctggacactgcacaacggaatttatataggaaagtgatgtttgagaactacagaaacctggtcttcctgggtattgctgtctctaagcctcacctgataacctgtttggagcaaggaaaagagccctggaataggaagagacaggagatggtagccaaacccccagaatctcattctgtcgcccaggctggagtgcggnggtgtgatctcgactcactgcagcctctgcctcccgagttcaagcaattctcttgcctcagcctctcgagtagctgggattacagttatatattctcatttcactgaagacctttggccagagcatagcataaaagattcttttcaaaaagtgatactgagaggatatggaaaatgtggacatgagaatttacaattaagaataagttgtaaaagtgtggatgagtctaaggtgttcaaagaaggttataatgaacttaaccaatgtttgagaactacccagagc

SEQ ID NO: 92536 - DNA, 453 bp, Homo sapiens
  misc_feature (1)...(453): n = a,t,c or g
actcgccggnntcattcaggaccccgcgtccgcatccttgtatccaaggataaatctcacttggtcttgttatatgatccttttaatgtgttgataaaatttgccagaattttgctgagaattttgcctctatatctgtcaaggatattgagttgcagttctcttgggatgtctttttctggctttggtaatgctgaccttatacagtgaatttggaagtgctccctccacttcagttttttcaaagagttcgcgaagcattggcattaattttctttaataaatgtttgatagaaatcacttatgaagtcacctcgtcttttgcttttcttttgttgagagactaaaatatacttacttcatcccttacttgtattgatctattcagacttttccatttttacacaggtcaaaatttggcacggctttatgctttttaagaattttaacccg

SEQ ID NO: 92537 - DNA, 824 bp, Homo sapiens
aaggcaagaaagaaacaaaatagattgtccaggaagatggttacttccactttgtatttctctggtgaactcattaggaactctaaaaagttccaggagtagaatcacggggtcaaagtaccctggctataacttccgattcagagaatcctaacaacttacattgtcaccagcaaggtctttgactacatgagcaactctcaccttaaagcatttctcatctgacattagctgcttggctttctgtggatacgttgactccaggaggcttcttgagtttctgtgtgttcgggctggcctccggtggccccattattattttctgccaggtaaagggtcagtcacctgtaaccagatctcatcactcatgatatgctgcagcttataagagtgcttgggggtaggtgctccacacagtagcaacgtagcaacctccactcatagtgacaacgagactcagtgtagtcaagcaacttctcaaagttcacacagctggagggtggctgagccaggatgaagacctaggactctaaagctggtgtgccagtaaatgagaaaagtctctaagcgttcaggatagcttcctcccaagaaatctttctccaaaagttcttaccctgcggttttatgtttcttgtctcaacactattatttcttatttctccacaagttgaattgctcactccagcccctcgaagcatgctctttttgacacagttagctttaggcacatggttggtgcagttggtggttgtgcagcctggagcttccagtccgcgagtgtgaggaacggactagatgggtccagcagtgctgggtcaaag

SEQ ID NO: 92538 - DNA, 443 bp, Homo sapiens
ccgggtcgacccacgcgtccggataaatgggacactatgacagtatacgtagtcttcaagctctttgtgacttaataattgaatgtatgtcaagaaaattagtattaccttatgttctcaaaaatgaaaattggattataaatttacatcacatgctctttaaaaaaattaagctcatctgtgaactctgtaatctcatatggtattatttaaaacaggattaatcttttatgctttttagaattttcgcgatcaccatatttttagctccagagttttttgtgtaaactttatgagtgattctgcatttcacatggactttctattatgccttaaaacttcagatcactggaaattacatacagaacgtggaaacaggtttgagtgcttttgctgtttgtcatattcattatcgtctattttaaggggacataacattgact

SEQ ID NO: 92539 - DNA, 1311 bp, Homo sapiens
  misc_feature (1)...(1311): n = a,t,c or g
gcggccgctgggcagcgcccttcagtccaggctcgcgccccagctgccgccgacgacagcggccgagagaagttggggtctgactagacgcttacggggcctcggaccccggcgccgcggcgacctccggaggaaccggctccttgcgtcccgcctccctgggagctccgcacgggatttgcagatttacagaatggctgcacattaatggaaagagaagcataaacctatcttctttcattatggagggaggtttggcagatggagaacctgatcgaacttcgcttcttggtgatagcaaagatgtccttgggccatcaactgttgtagcaaacagtgacgaatctcagcttctgacaccaggaaagatgagtcagcgccaaggaaaagaagctttatccaacgccaaccaaagattttgcatcagccatctctttagtccagcaagtcctcatagccaggggtttttgaaagagggaaggaagatatttctcaaaataaagatgaatcttcactttctatgtcaaagagcaagtctgaatctaaactttataatggctcagagaaggacagttcaacttcaagcaaactcacaaaaaaagaatctcttaaggtacaaaagaaaaattaccgagaagaaaagaaaagagccacaaaggagctgctcagtacaatcacagatccttctgttattgttatggctgattggttaaagattcgtggtactctaaagagctggaccaagttatggtgtgtgttgaaacctggggtgctactgatctataaaacccaaaaaaaatggtcagtgggtaggaacagttcttctgaatgcctgtgaaatcattgaacgtccatcaaaaaaggatggcttttgtttcaaacttttccatcctttggagcaatctatttgggcagtgaagggtccaaaaggtgaagcggttggatccattactcaacccttacctagcagttatttgatcatccgagctacttcagagtcagatggaaggtgctggatggatgctttggagttggctttgaaatgttctagtcttcttaaacgtacaatgatcagagaaggaaaggaacatgacctgagcgtttcatcagatagcacacatgtgactttctatggcttactacgtgctaacaatctccacagtggtgataacttccagttaaatgatagtgaaattgaacgacaacattttaaggaccaagatatgtattctgataaatctgataaagaaaatgatcaagaacatgatgagtctgantatgaggtgatggnnggaaagtgaagaaaggacc

SEQ ID NO: 92540 - DNA, 980 bp, Homo sapiens
gcggccgcgctgagcccctatcccgccgggagcgccaggccggccaggcctgcgccgccgccgccgccgccgtcgccgccgcgccgaccatgtcggcagccaaggagaacccgtgcaggaaattccaggccaacatcttcaacaagagcaagtgtcagaactgcttcaagccccgcgagtcgcatctgctcaacgacgaggatcctgacgcaggcaaaacccatttatggcggttggctgctcctggctccagatgggaccgactttgacaacccagtgcaccggtctcggaaatggcagcgacggttcttcatcctttacgagcacggcctcttgcgctacgccctggatgagatgcccacgacccttcctcagggcaccatcaacatgaaccagtgcacagatgtggtggatggggagggccgcacgggccagaagttctccctgtgtattctgacgcctgagaaggagcatttcatccgggcggagaccaaggagatcgtcagtgggtggctggagatgctcatggtctatccccggagccaacaagcaggatcagaagaagaaacggaaagtggagccccccacaccacaggagcctgggcctgccaaggtggctgttaccagcagcagcagcagcagcagcagcagcagcagcatccccagtgctgagaaagtccccaccaccaagtccacactctggcaggaagaaatgaggaccaaggaccagccagatggcagcagcctgagtccagctcagagtcccagccagagccagcctcctgctgccagcctccctgcgggaacctgggctagagagcaaagaagaggagagcgccatgagtagcgaccgcatggactgtggccgcaaagtccgggtggagagcggctacttctctctggagaagaccaaacaggacttgaaggctgaagaacagcagctgcccccgccgctctcccctcccagccccagcaccccc

SEQ ID NO: 92541 - DNA, 993 bp, Homo sapiens
agatgttacaaggatatgtacacaaacggatctgcgctcctttacttgcccccatatacttgctttatatgtatgagaagtctcttctcttttgtgtcattacacagcgatgtgatcgaggagctagaccatgggtcctctttgtctgcccacagaatttgtctctagggaaacagacactttttgccttgacattgaagactcactcctattttttagaaagattgagggttgggagcactaatctgagatatttagttcataacgccgacaatgaaccaaaaagcatttggtgttggatatatcttgaatggtattgtatttatttttaaaaggctatacaagatctcttgtgaggatcaaatgacaagttgaacatgaaaactatttgaataattaacatgctactgaatatgataatgattccactttgaatttggaagtgacattttgttcattgattccctcattcattctttcaacaagcatctatgaggcagcgttaagcactttagcatgccttgtactgcacaccactaactgtgagatgtgtccattgggccgcctttactgagaagaccatgttctggcagagaacagacacgctctctttctttcccctcagacccagagagctctttctccccagtcccagagggtgtcaggctggctgacggccctgggcattgcaagggacgcgtggaagtgaagcaccagaaccagtggtataccgtgtgccagacaggctggagcctccgggccgcaaaggtggtgtgccggcagctgcgatgcggaagggctgtactgacctcaaaaacgctgcaccaagcatgcctatggccgaaaacccatctggctgagccagatggcatgctcaggaccagaacctacccttcacgattgcccttttcggcctttaggggaagacaccctgttccatgtagaatacacgtcggtccatgggagggaacgcctgtccgccaaagactagcc

SEQ ID NO: 92542 - DNA, 387 bp, Homo sapiens
attttaaaatgtgattttagcacagttagaggggttaggaatcttccccaggttatgccccttgtaagtattaagggttgagaatcaaatcccaatttgaattcagagcccttaccaagtgtcccaacctttaccagagtggtcatggtcaacacttgcttcctccctgttaggaaagctaacttcatcagtttttatagccgcctattttacgttggacccctccttctggtaaaaatttctttttttttttcttttttgagtcagagttttactgtcacccagggtggaatgcagtggtgcaatctcagctcacttagctcactgcaacctctgcctcccaggttcaagtgattctcctgcctcagcctttcaagtagcatcgaa

SEQ ID NO: 92543 - DNA, 704 bp, Homo sapiens
tttcctttttacagataaagaaatgggaacagaaagattaatatggggtgttcaatatcatatttgggattgaaaaaaatgacatacactccgtttccagtcctatttccagttgttcttttatgaggatattgggaaatgtatgcaaatgtcttcatcgtctttatcgtgctgactggggtgccacaggtatttagtgactgggatctaggatgctaaacatccactaatctgatggacagtctctcaggaagagtaagtgactgcccaaaatatcaatgcactcccatagaaaaatattgatttcccacttgggtttcttctcgggcaggcatgttttctttccctaattctcttttcgtaatagaaattctttttttagttaagtcctttgtattagggtggcatgtgatcaagtcggttctgtggaaataacctggttttgttgggattttttgttgccatgttggtgggaaaggctgggcaagaatccttccgttctatcacccgttcctactacaggggagcagctggagcactgctggcgtacgacattacaaggtgagccagaactggtgcatgggagggagatccttccctaaaacctctaaagctttttttttttattgaattccggggcaagaaaaggagggtttcttaaaaaggctatttggccgttttgtgggccacggcgtccccccttt

SEQ ID NO: 92544 - DNA, 822 bp, Homo sapiens
ttccttatgctaaaacctcagtttaactttctagcatactctcctatttctctccttctacactgtcccaaaatagattattcattattttgctttcaatgtttcccatgcttttctgtgttcttgttcatttaatgcacttttcccgtgcttcatgctttccatctgtcagaattccatagctttcaaggacccttcaaatgttcctggtctcttcctctgcccctccctaccccaacaagcggtgtgtatacacatagtcccctggtggtgtgtgatcctctgttccagtacgtcgtgttctggtctgtgcttctgttcttttgcagacacacctccactatgcagtcacgaggcccttgaggacaggaaccatctctttcttcgtaatgtcacctttcccagtaggcacacggctgtttattgaataaacacagatcctgtgtacacttgctcaaattgtacaaaattcggaggagaattcaaggggaaccattttactgaagggaattcggcccaaattacatccttgattcttgtataggggggacaggcctttaaagcattattacgtctttggtaaaacccttgctcttgccatgcctctaataaaaaactccgacaagccttgtccccccccctcccacaaccacttgtgctgtctccatctcccgccgccccactacccctgttcatctgaacctgattctattagcccccgttactaccattattaccgtactcacctccccccctctccactcactaccacatccctcctcacctccggacaccgtctctacccctgcaattccctggttc

SEQ ID NO: 92545 - DNA, 401 bp, Homo sapiens
cctgccaaaccccatgcatcaggccggtacacaggatccccccactcatcagtccctcccccatataatcctgaatcaataccccatgttccccctagccacacacttaagccctacagcatgaaatagaacaatgtaaaaaggatactcagaacttccctttcccctttccacctccaaagaattgcccccaactctcttccccttgaagaagtgccccttgggagaggaggcatcagcttcgtaaatgcccccttaaccagctcagaagtacaaaatctaaaaaaaaagaaaaactcaagcccttgttagatgacccttatggggtagcagatcaaatcattttttaggaccccagttgtatgggccgagcttatgtccattttaggcattccacgaaa

SEQ ID NO: 92546 - DNA, 1151 bp, Homo sapiens
aattcccgggacgacgatttcgtctgaccccaggcacctgtttgtgaagtttaacagtggttatgttttggagagaaggcaggggagtatgttcttgtagcattgcagcaaaccacatctatggatggtggatgatttaatcagtctttgaaaagggttatggcagctgttttcaatgggataaagcttaattgtaatcatgaagattattttggaaagaacccattttagtgataatccaacgtaagaagctactcagaagcaattgaaaggattaggttgactggaaaattataaaactgcctaaatgttcatatcgaggtgatgtttctggggagaaacacaccattttgtagcctcatgactcatcagtacacatggtatttgtctcactggggaactcactgtctaagtggaacaaggttttcctttttctttttgctctttttttttttggagggggagtctccttgggccccccagcctgaagggcagggggccatctttgtttaattgaacccttggcctttgggttcaggcaattttcttgcctcaccctcccaagtacttggaattacaggcgggggcccccccccccagctaatttttgaattttaaaaaaaaacggggtttcacctttttgcccgcgttggattggacctttcttgccccccttgtattgcgccccctctaaaggatccacgttcacgtaccgcggcttgccaaattataacttttttttggggccccctaaatcaactccctggcgcgcggttttacagccccgggggggggaaaccccccctcttgctttcgccgcctcccgccccgcgcgcgtccgcgctctttcacacctgcatctccgaccccccggcccgccccagctccaccccccccgcgcccccgctccgggcgggcgcggatctgcatccctccttcacctctcccccgcgcgcccgcccatctcatcatttatctctcgcaccccggggcaccgcgacttcgtcgtaccaacccaccgcctccttcctctcccgcgacaccggagtgcttcccctcaaatcctgtcccgcgccggcgcgccacccagtcggtcgatctccccgccacgccgctctccgcgccggtccgcccccgcgcatcctaggtct

SEQ ID NO: 92547 - DNA, 1087 bp, Homo sapiens
ggttggggcattcggcacgagaattaaatcacgtacctaattttattaattttactaatactagctgaaaagttaataatatctatgtagaaattaattgtgtttagggtaccactgaattgtctatagagcagtattaaaattactcaaatgatcctagtattaaatttactcaaatgatccattgtgtatatgatattttaaaagatgtgatgcgtgttatttcctcagcatgggtatggggattaactgctctgtttcagtgcccagtggtctgagaatccagatatgtggatgtgcttgctggtgaagctggctgagctactgaaatcaaaagcacaaggaaattctgattttcctgactataagaaataactgagcaactaaatatgatccaggcctggggccacacactttggggtctaagatgggggaaagaattaggatcattaagagataaacctagggatattaaaatattaaagagttggagcaggcacagtggctcacatctggaatcccagcactttgggagaccaaggtggacagatcatttgagcccaagagttcaagaccaacctgggcaacatggcacaatgccgtctctacaaagaagaaccgggcctggtgctgcatggctgccgatccagctacttgggaggtgaagtgcaaaaacccccgtacctgggacgtcagggtgcattaagctgtgctgacgccctgcctttccccctgcagtccatcgcgtatcccccgtcctgtcgcgaccatatcccgggcgccgttcgctttcacacacccctcctccccggcctttgatcctgtacgcaccggctccctcgtccggccggaacggctttcatcccccattcgcaccccccgccccccgacttactgcgacccacggctacgcccgctatccatgcccttctctcccaccaccaccacggcccctccatccgacccagccgtcaactgcccttcttcccgacccccctccctggccccttcccttcccccctcctagctccctccccctcgtccggactgctcgacctcgtactcccctaccttcccgccccccacc

SEQ ID NO: 92548 - DNA, 1053 bp, Homo sapiens
gtaaaggctttgatgagaggagctctggcttttgctcagggcctttggcaccccaccctccagcccccaggaatgcaggcgctcaaagcctgtggctaggctgcccgaagcgcgtgccgcagttcttctggagtgggagcagggggacagagctttgggtagaggagggtcacctgcaaagctggaatgccaggggagtgggcggtgcctccagctcctgggggccagggtgtctccatacctcatgggcctgagcctgggcaggggtctggagtgcacatagcccccaggcagggagagggcagtgacaggacagagccactcatctgtcccaaagctgcacccaaggggtgtcagcaaccccaacctactgacctactttgggaccacaggcccatctagtgcaaatgaggcccagaaaggagaaatgctttgctcaacagccacagtaggctgacgtaacctatgtaatgtagggtcagggtgggcctgagggatgagccaggtggtgggcaggtgacacaccaggtcccctcctggcctctgccccacccagccctctcctgcacggctaccagaagatgtccgggaagaacagactagccctgagtagggagtgtggtcaggtgcagaggagggcaggggcccggatcctggcccagaaacactctaaaacagaatccgatcctgagatgatccaaatcaaacagaaacttgacggaaatagtagagtctgaaaatgatgcactctgcgcacacatatacaagacacacacacacacacgaatccacgcacacgaggcacaccccactcatgctctcggtctctggttacacacccacaccccccctactcctgtattcagatgccctccatggcccaccctcccacccagcagagcgccagagcctggtgccagggactcagtgccgactgctgacgtgaagggtgtagaaagcccagggctcagggacgtagatgacacccgggtacttcttcctgagaacagggtcattccacagccaggcgccggcggtgggtgcgacggacac

SEQ ID NO: 92549 - DNA, 791 bp, Homo sapiens
  misc_feature (1)...(791): n = a,t,c or g
ctcatacgccagcttgaacgaggcctcgtgccacctcgtgccacaggccttcatagactgaagatgccaatgttgtgtatgctgaaggctgctggctgacttctggacacataatgaccagatctgagttttgcttcacacacttcacagtgcagaagcattgctggtctttacacccttgctgatataggcagccatggaaattagagcctgcagtggatttcccaggctctctgttgacttccagaatgatgtgtactttttctgcacctaaatttctcttttggtaatagctatagatctacctcatatccatggtgtgagcatcgataacacaagtcagtacaacgtccttgaggacgtttgggacaaagctgccccagtgctcagctgtgaagctgcaacacagactgaaaggagactggatctggctgcagtgactctgaggagaggcttgagatctagagcttcgcgatgcaggaccgcggtctttgatagattacaaatcctacatggacaccaagctgctggtggcgaggttcctggagcagtcctcttgtaccatgaccccagacatccatgaacttgtagaaaacattaaatctgttttgaaatctgatgaggagcacatggaggaagccatcacaagtgccagttttctagaacagataatggcccattcagnccagcacatcagggcccacaagcttccttgngagacagctggcctcttnacctcagagcttcgggnccttacaccttacaccagcnggaagccnagccagagaggc

SEQ ID NO: 92550 - DNA, 1409 bp, Homo sapiens
  misc_feature (1)...(1409): n = a,t,c or g
ttttttttttttaccgtcctcacactttattgttagctgttctttaagtttctcacacattattggcaattatgtaaaaatcaagaacctctataaaacaacctggctttccaggtggaattccgcatacagccaaaactggattccagtgtggccagacaacgcccatgtcccaatttaagagtcgctgtcctcaccaccatccggagtggcctctctgtcagtgtgtgatgtggccagggcagtgtccacctgaacttcctcctcatcggactgaacaacgggggactccccaccctcactgatgtcccgggtggccgagtcggtgcaggtggaggaagaagaaggtggcttggctcttaattctgagggatttggaacctggagggtaatctcattctgacaggtactggattcaggccctaaggcgggggacagcacagtgttctcttctcctccagagttcaggaagacgtccagggcctcctggtccgatatgtccatcaggtccatctgctccagcatgtccacgttcacttccatggatgacatgctgcctatgggctctcgccgctctgcaatctgcaggtagccagtggacaggtactgctccatgtcctgctggaaggcttcctcaaaaaacttctgccgctccttcagcttcatttgctgggtgtgctccatttccaggaccttctgggcgtgctctgcatctagttcagctttgaaggtttcaagttccttcctcttatttttcttgtaattctccagttgctgggactgcatatgtttgcatctttctaattcacactgcccacataagtcttccagatgcagcaggttgttctctacctcctcaaaactcgcctctaaatgagtcagatttgctgtcatggattctaagtctgcgattaaagctgggagctgctggagctgctcttgcagctccacgaggcttgtctttttcttctcccagtgcgcagaaagcatgaccacctcgctatccaccagctctccagcacttgcacagtctttggctcttctgtgaagtgcagcccatgtatcctcatacctgctaagtaattctaatccagcagagtactttggcaaaaatggaacagtcctgggtttgcttttcacttttgcttctcttgacttgtcacttaaagtcttcagcccggaggtgaaatcctgctgcacgctcagcagccgctcgcgaagggtctccagcattgccgccgccgccggtctcctctcctcaggcctcgggctgctgctgcctctgtcgccccctgggtcccacgccgccaaccccgcgctgtcaccgcgcgccccgcactcccactaccggccccgcccccggtgtggtcctcgccgccgccctcgtacnaagcagggggtaagccggt

SEQ ID NO: 92551 - DNA, 1441 bp, Homo sapiens
  misc_feature (1)...(1441): n = a,t,c or g
atcaatttcaatgatatcttatcagaaagataacatgtaaccagacatatattatgttttatctggccagctataaagtattgaagagggaagagaaaagcttgtttctcacctataaacatgaacataactttaaagttatttgtatatgggttcttggatatataaattaacctatactaaccaagaagtctagaaaggtaagatcgtgttttatttcatctctcatctcagagttttataaaacatctattattcaatgccatctgtctggactatattcagacaaatgtaggaggcattaaacattccccactattcaccacttgacccattttggggcctgcattttgtttcacaagaaaaatcttggttcagcaaggccccagtgtgggaggagtaggatcctgtcctctctctctcctgaaatacatggtaaagtggccagcctctatggatggctgatcaaactgtgaaatactcctttctcgcagtttgcttgtgcctgggaacagattacagaaagcagctgggccccacgtatgttgttctccaaaaaagcagagacagcaactgtcagaatccagcccttgtaaacagtaatcagggccgagacatctctctctgccttatgcctgcctaagtcgtttagccacctctaactttttgcttacattctaactgtagaggggggattcaggttggagaatggatgtggttacttcagatgagggagaattgccatatcaaacattttgtagagaaggcaggagagagagagagagtagagagagagagtggaaggattgagattgaaacctgcacaatttctttgtgtaaaaaaaaaaaaaaggggcggccgctttaaaggatccaagtttacgtacggcgggtggcgacggaatatctcttctattaggcccccaaaaatcaattcctgggcgggggtttaaaacgtggggacggggaaaacagccntcccccgcncccttctctgctaccccgtggtgagaacctgattcttacgatcggcgcgactaccatcggtctccgcccccggcccgttatccatcaagtcctctcagttgacagcggcgccatgccgtgtttttttcgcgctggcaccccaacatgctgtgacgacatgatctccgccgactctgagcgaatgaacccttatgacgtgcgaagcgcaggccgactctcctgaatcatagatgcgtgacgcgagacgcnacctgcagcgactaccctcgctctaccaagtcgcgacgcgttggcctataagccttgcccggtcgggctcgtacgctacaccgcgtacccgtacctcgcatatcgcagctctcgccttgccgatgacgggtcgaggtgccgagtccgcgccggtggaccttcagtttctcacaccgcggatccgaccgctcgagtccgcttctcc

SEQ ID NO: 92552 - DNA, 728 bp, Homo sapiens
aaataatcctggctgcaaatcatgcaaagaaaagagcaagaaaaatatctacaaaataaaatactgtacagcttaatttttttcagcttaattgttaaaatattgagaataatataggtgagaatttcttttttcacaagatttatagttttagtgtctgttctgccaaagtgagcatgtcacaagaatttctaagtgcatgcagtgattaccaaggagtcatagctaagcacattgagttgctgatcaccaagccatttaaaaggtaaaattataaatagcttttcagagatttggatagggctacattttttctttctttctttcctttcttaagtttttaaaaaatagagacagggttttgctgtgttctcaaattcctgggctcaaataatctgcccacctcagctgcccaaaatgttaggattactggcatgagctaccacacccggctgagctacattttaatatgtgggggtcgataatgctctcataacacacctaaaaagtaaaaccatctaagcctgcccctcctcctatggagcccccctccttaggtctaaaccccccccttggttgggcgggaaaccctttattttttcccaaacaccccactggttacatggtttttaaaaaaaagcctcttccccgggccttatatggaggatttccctggggccctcggggggggggtaaaaattacctccctcttttcccccatggggggg

SEQ ID NO: 92553 - DNA, 994 bp, Homo sapiens
acaaagctgataaaaacctgtctcttgggtagagaagttaatctggccccgaacaccctgggaggtgtctatgagaaatccctgtgggttatgtgccgtggcagcaacatgccggtcatgtgaaatccccactgtccgctgaacctcgtaactgaaatagaagtatccagtctggtgggcaaattgccaaaagcattccgtgcctcctggaggtatcatgatggcaaagtcatatcgatcagctccacggaagagtggctggtccccagagccacttagaggttctgtcttctggctcctggcagacgtcactagattcagaacgaccagcccagccccaaagagcaaaggggacatgccgctttctggagcctcctctgcaggtgaactgctcgcagcccagggaaatcaagtcgttcagacaaccgctgggctaatgattaactccacaagtcacattacggcccatttcagggccacacatagatattcatcatagaactgccatgatactcccatgtttggctcgcaggaggaaattttgctttcacctcaaaaactcagtggcttaccaaacctacttcatgggtgctacatagaatctaccacctcagaagaggtctttccacccttcattagggctgtcattttttagttcctgcttcttggggatataatagtgggtaagtttacaacttctgaatacactgacaaaaagttggctggggggattgttctcttacatcaaattgctcctataaacacatggggcaacacttctctctccccaatgctgcagctcagagcaaatcacagcatgtgtgtgcaaagatgtaaatggatgaatacagtgccagaggatggtgcttagacccctccactgacagtcctcgtcctgatgcctttcacctaacggtcacctaaagctatccaaacccactgaaagacaattatattatccaaagcctcaatcttttttttttcgaattccgcc

SEQ ID NO: 92554 - DNA, 651 bp, Homo sapiens
tttcgactagtcagtgctcgctgctggcctgcatggcgttaaacaaactcggcccgagagcggcagttttttccattgttagtaccaacgaaggatcgaccgcataatgtccataacgcgcatgaagatggcgtctgcgcgtccaccaagctcaccgaatagacattctagtggcgaaccaatcatacccgtggtggcaaccacgactaatccggcgagaattgattgctgactgccgaccagtacgcggctaaacagatcgcgtcccacttcatcggtgccaaaccagtgcgccgcagaaggcggcaaaaggcgggcggttaaatcaatggcgttgggatcatgcgtcgccagccacggtgaaaaatcatcatcaatagcattaatacaatgatgactgcgctggtcacggtgatcggactgcctttcagcatccataccagttttgcaccgttaaatcgcgtttgtttttgtgggcgtacggcggacgtttcctcgcttagcatcattcaccacctccacgtccgatacgcggatcaatccacaaatagagcaaatccaccaccaggttgaccagcacataagcaaatgaaaccacgacggcaaagcccatcactgccgggaagtcgagcgcctgtattgatgttacta

SEQ ID NO: 92555 - DNA, 289 bp, Homo sapiens
agtctggaggctgaaccccaccaagtgcacaggccaggtaaaccatctgcagcctccccaggcccaccccagcaacgcacgagccaaacacccaaagctaaggaggatcggccacaaccaaaattagcacacattggaggagggagcaggtgccggggtctctgccagtcgtgtcctttatgccgaaaagaggctgaagttgtagcaacatgaaacccacctgcaaggaaaaaactgatgtgctcaaaacgaagcctgagaagaccccgatggtagaactcaccagaaa

SEQ ID NO: 92556 - DNA, 410 bp, Homo sapiens
tttcgttttcaagccgggtctggcttggacttcccccgtaaggaaatggccgtgtagctccaagggacccaggcgccgtcgcttcggcggagcctgggctgaccacccatgacagcggggtaaacccaaacaattctgcgcgacgtatggaggccatggcgtccggcagtaactggctctccggggtgaatgtcgtgctggtgatggcctactggagcctggtgtttgtactgctatttatttttgcgaagaggcaaatcatgcgctttgcaatgaaatctctaaggggacctcatggacctgtgggacacaatgcccccaaggacttgaaagaggagattgatattctactctccagggttcacaatatcaagtatgagcccgcatctacttgcagatgatgatgctag

SEQ ID NO: 92557 - DNA, 1303 bp, Homo sapiens
tttcgtgtggcctccgaggttctggcggccggcagtggcgaccggcgcagggaatcgcgcagggttgcggctgaggtcagaccagcgagagacagagacccgcagacatttagtccagagactgtagcaaaggagggggacgaggggccagagccggaatttcgggggaggacttgggagcgcggcgaccagagtcgcttgctggcacttgcgagggcgaatgcaggggcttggccgagatgaccttggaccagagctcccttccggcctgcagagatgagcttggggcttagccgagtaaggagtgagcggcttttcagcctcagtgctgcggcagaggcggatggaggatgaactggagccgtccttacggcctcggacgcagattcagggcaggatcctgctcctgaccatctgcgctgccggcattggtgggacttttcagtttggctataacctctctatcatcaatgccccgaccttgcacattcaggaattcaccaatgagacatggcaggcgcgtactggagagccactgcccgatcacctagtcctgcttatgtggtccctcatcgtgtctctgtatcccctgggaggcctctttggagcactgcttgcaggtcccttggccatcacgctgggaaggaagaagtccctcctgggtgaataacatctttgtggtgtcagcagcaatcctgtttggattcagccgcaaagcaggctcctttgagatgatcatgctgggaagacttgcttcgtggggagtcaatgcaggtgtgagcatgaacatccagcccattgttacctgggggggagagcgcccctaaggagctccgaggagctgtggccatgagctcagccatctttacggctctggggatcgtgatgggacaggtggtcggactcagcactacggcagctacggggctccggggacttggcaggggagctggaggagctggaggaggagcgcgctgcctgccagggctgccgtgcccggcgcccatgggagctgttccagcatcgggccctgaggagacaggtgacaagcctcgtggttctgggcagtgccatggagctctgcgggaatgactcggtgtacgcctacgcctcctccgtgttccggaaggcaggagtgccggaagcgaagatccagtacgcgatcatcgggactgggagctgcgagctgctcacggcggttgttagtgtgagtctggagggtgcccttcctccaccagccctgtggggagggacccccaggtcctttgcattaaaccagtttacactccaaaaaaaaaaaaaa

SEQ ID NO: 92558 - DNA, 400 bp, Homo sapiens
tttcgtcatagcacgcaccacaggacagcgcattcttgtactccagggccagaatctgcctgggcttcttgtttgggtggcggagggggaggagcggccacagcacggcatcctggccttgccacgcacaaggcgcatcggagtgactgtctggcatcaccaagatgacactccacgccacccggggggctgcactcctatcttgggtgaacaggctacacgtggctgaccctgtgcaggctgtgctgcagctccaggactgcaccatcttcatcaacatcattgacagaatccatggcactgaagagggacagcaaatcttgaagcagccggcgtcagagagactggactttgagtgcagctttctgcaaaaaatcgaaaacattcctcttccccagag

SEQ ID NO: 92559 - DNA, 811 bp, Homo sapiens
tctgtctcctgagtacccactctcaccccaaacccttcctcctttccagagacatgagaaagattctgtgtggtccatggggcttctcgggttattttgattctgtccactctgacatcatcacatggctcagaacctgtcccactgggagctgacctcccctgcctttgccttgcccctgatctgacaactgtgatcctgtctctgcccccaccccaggctagagtggtgctattttatcggtagcagcagctccagtgttgttacagggaccagccatgcgtgacaacagagctgtatccctctgtcagcaagaatggatgtgcccaggccctgcacaaagggccctctacaggggtgccacccagaggaaggacagtcacgtctcgctggcaacaggtgtgccctggggctatgaagagaccaagacgctcctggctattcttagtagttctcaattttatggaaaactccagacctgtcagcagaacagccagatctacagggccatggcggaaggactctgggagcagggttttctgcggaccccagaacagtgtcgcaccaagttcaaaagcctacagttgagttaccgcaaagtgaggagaggccgtgtgcctgagccttgtatcttttatgaggaaatgaatgctcttttcaggctcctgggcctctgcacctcctatggcaagcgatgctgtttcctggtccaagaaggaagtgatattgaggctggagagctgaatcaccagaatggggaacccacggaggtagaagatggcactgtggatggcgcagacaggcatgtatt

SEQ ID NO: 92560 - DNA, 412 bp, Homo sapiens
tcgtggcccggcaagcgcccaggaggacgagcgagcccggacggcgcctctcgaacgagtgcgggcgcgaggcaggatgacgacctcaagcgcgctctttccaagcctgctgccatgctcttggagcacctccaacaagtacttggcggaatttcgggcgggaaagatgtccctgaaggggaccaccgagactccggataagcggaaagggctggcgtacatcagcagacggacgactcgcttattcacttctgctggaaggacaggacgtccggtaacgtggaagacgacttgatcatcttccctgacgactgtgagttcaagcggttgccgcagtgccccaacggcagggtctacgtgctgaagttcaaagcagggtccaagcgacttttcttctggatgcaggaaccca

SEQ ID NO: 92561 - DNA, 733 bp, Homo sapiens
tttttttttcagttggtgcttttattctaaagccagcaggttggtgtgtagttgcctccctggtctgaatcagtgcccctttcagcccctgccctgctccctgtcccttgctcccaccccaatctggacagaggactgccctcctcaaagtcaccaacctgctctcagggctgatccttggaaaggagttgtttaaggaaacaccctaattgccttctaatatgtcaatatcagattagattgaaccaccaccatttgcattttaatggaaaagcctgtgggaattgggggcttcagtggttaactggtaaagtgtggtaagagggggcctcagaggcatgacaattctggcagaaggtcacaggtcacaggccacaagccacaggctgactgggaccagagtcttcagggggctgattggcctccctgggctccctacacctgccttggggtgactgtctgctgccctctgggaagagccaatcttgagtctgtggtctgaaactaaggagttaaccaatcgagggaagatgaactacccacaaattggtcctcacagacctcacgtgaagggcctgagggtcaggccaggacctgggactctgagcaatgcacccaagagcctgtgcccaggaatgtctaattcagaccgagggatacatgtggggagaggggcagggcccaggaaagagagcaggtcacctggggaggggagggggaatgtcctttctgc

SEQ ID NO: 92562 - DNA, 514 bp, Homo sapiens
ttttttttttttaaaagaaaacctttttattttgaagtaattatagagtcataggaagttgcagaaatagtacagagaagtcttgtgtactcccttcacccagtttcctccaatatcttgtttctggagaggccttggtcttggccaccagcagcgtcgcgcccctggaggtgatgctgagctccgtggacgggctggtgcacttggtggcggcatgctgcgccctgtccggtttgctcctgagcaggtagaggcctttgagcacagccaagcactgctcctccacagcccccagcggcagcagcagggccagcagggaccccagcaccatgctcagcagcgtcacccagaggaagcggctccagaccgagacccatttcggttcagtcaccgccatcactgaagccattggtatgagcatcatctggactcaggagagggccctttgcgcatgtccacaggcggctgagagagagcaggatcgcgcgcagctgtcagaaccccaaccgccttc

SEQ ID NO: 92563 - DNA, 355 bp, Homo sapiens
tcgacacagccagaggtgaggctggaatgggagatcaactgaggcatcacctgcggctgaggcaccccatgtaccacacaaggaaacacaaagccgcaatgggcacacaatgcacacatggaggcaaagtcaggccagaccctcacgacatgctgacaactgtggtccataagatcaagctgttcgttctgtgccacagcctgctgcagctgtgcgcaatcatgatctctgactacctaaagagctccatctacacagtggagaagcgcttaggactcttcaggcctacttcggggctgctggcctccttcaacgaggtggggaacacagccttgattgtgcttgagagctattg

SEQ ID NO: 92564 - DNA, 814 bp, Homo sapiens
ggcacgaggtttcaccgtgttggccaggttggactcgaactcttgacctcaggtgatccacccgcctcagtctcccaaagtgctaggattacaggtgtgagccaccgcgcctggctgtgatgtgttttttaacctacagtgtacatcctttggtgtccctctttagtgggacagctttgggaataagcatagtcactatggaatgattggttttagcagggctgtctttcagtgtctttttctaatttctctgttaatctgtcagcctctgttatctcacctaatcattagtttgcactaatttcagactgattactctattggttttgaccatgtccaggggcataaattgcctaactatgtgatccaaatttgggcccttttatagagatagtatttgagaccaacctttgaggttggctcagatcccaggtaggctcttatttgtctttttctctgggtctctggctgtcttctagctggcggttctatagcttgttgctctcaagtaggtactaatcttgtcttaatagcttaccacccaaatctctattgttattgggaacatccttaggcttttttttctccccattgtgttccaaattaagtcatttattttggggataccttcagaactctgttattgcagcctgcctttcccctcgggcaaaacctctgcattgctgctctggagctgagggcaaggaaactggctcaagtttccctgtgacccaagcaagggggttggtaagggaaaaaagggctctgggtttcctacatgtcaccctacgggtaaaacctcccttttgggctc

SEQ ID NO: 92565 - DNA, 342 bp, Homo sapiens
aaaatgtcattatgcggttgcataactgtattggattgttatgttcttttttggactgtttttatattttggattatactttggaaaaattactgagcctctcttgagctccagtttccttctctttgagatgggacaaataataggacctacaccatagggtgctacttcactggattgtgtgggagagtacatgcggagccctagtatgttctttcctttacttgtacaactcaccaggatgacagctgtcatgaataaagagtgtgctttgccctgcccaactacaaggtcccactaccagttgaggagtatactctgattcattgtgaaaatgccaac

SEQ ID NO: 92566 - DNA, 374 bp, Homo sapiens
actgtgcagttctatgtaaaatctacttacgcagagggagactcacagaactagaatcattagatgcctactacgtgccagggaacttgtgtacgtcatcactttgcagatggatagtatcatctgactccacattccatattcttctgcttcaataaaggttgctaatggattatggctaagaaaacccatgcttgttatttttagaaacacaacaagcataaatgcactcagaggaatcattttttgggtcctcaatgacggcatgacgatgtctcttgcaaaaatgcacccttcagctttgcagtcagcagtggctgggagccggggctctggagctagactgcctggcatcagcctctggcttgtgactt

SEQ ID NO: 92567 - DNA, 518 bp, Homo sapiens
atggacattgatttactggtgatacaggtatggaaaaaactgaggcaactggaatctggagttgaattccagaaacctgcagcagccctatgccctctccagggtcaccctagaatcagatctgctccccagcatcttctgtttcctggagtgtgttgtctgctactttggattggccatgacaggctggagctgccttgtgacaggagcaggagggtttctgggttagagtatcatccgcctcttggtggaggagaaggagctgaaggagatcagggccttggacaaggccttcagaccggaattgaggaaggaattttctgttttccttttaacagtcaggcccctattctgaagctctgcttgagtatactggaggtccactctagacgctgtttgcctgggtatcaccagaggagcctgcagaacagcaaagattgctgcctgctccttcctctagaaccttcctctcccagagcgacacctgccaaatgccagccagagctctactgtatgag

SEQ ID NO: 92568 - DNA, 303 bp, Homo sapiens
cttttccattgaaattttatgcccttgtcccctcatgacttaataatatgaaatgatagagtttatacagtaaagcctctgtcccatccccatttcttacctccatttcataaacaggtccagcaaaattttacacttcaaattttcctatattgaagttatagatatgacggcttttttttggacccatttcccatttgatcttttattgcatccgtttaaccgtaatgttcttactaatttcagggagacccttctgagttccaggttttatctggcaaatgagtctgtgcattacaatag

SEQ ID NO: 92569 - DNA, 312 bp, Homo sapiens
cagaaatataagaatcagtcaatttttcttatctggtatcctttcattaattctacttgtcttttgaaattggtgttcttctgtttgctacaaatgaggacagtatgggctgctattagaaacaatctcttcaaatgaatttccataattatattggaatctatctttatagccagttttgttgtgggtttctgttaaaatggttttctgtttttaaaatcaagtatacagaactgttttcatcccctttttaaacaaagccacttaagcaaacttatcatctgttcctcttttctcaaaataacatttctg

SEQ ID NO: 92570 - DNA, 670 bp, Homo sapiens
ggcacgaggcagggccttataggactttggctttttactctgggcaagaaggaaaccttgggagagcttcaagcagaggagcgaaatgatctgatgcaggttatgaaaggatccccctggcagtggcacagagtatggcccctgacctgtgtggatggggcaaaagcataaggctggccatttgcatcccacaaatgacctcagtgtgagggatgagcgagatcatatacgaatgcgcttgcgtgagtatgcatagagcaagtgctcaagccatggcagcttctatcaatggccctgcagctgcctggctatagctccctggtctcctgcagacaagtcttggccagtcacgtgagtgcctctgtcattgcccactcagtcattccccctgcccccacctcctttcttcaacccttcactggtgggtaagctcctagcacaggagccttaccttcagcctctccccaccccaacccaacccaaatgcaactccactcacatccttcccctgttcaagagtcttccatggactagtggctcattaaatccacattcttggctaggtgcaggggctcacacctgtaatcccatcactttgggaggccaaggggggcagatggcttgagcccaggagtttgagatcagcctgagcaccatggcaaaaccccat

SEQ ID NO: 92571 - DNA, 333 bp, Homo sapiens
agtgcaatcaacagcagtaacaagcctgtccaataacatacctgggcatggaaatggactctgagagccatccctgtatcatcaactatcatctgatatcttgtaaagtccgcaacctgtctcatacccatgattatacccataataaatagcctttctccacagccaactggcaaaattcacccttcattttaaagatcttaaagagcattagagaaggggacttaacagcccttaactcttttccgtaacataataactctcatttttgtatccaacctaaatcctcctcaagttatttaagcttagcacttctatgttagatctcgtgcc

SEQ ID NO: 92572 - DNA, 656 bp, Homo sapiens
ggcacgagtttatgggtgacttagaaaccattaaatgagttattgtttcagtgcaataagttacatttgcaatattgctgcctatggaccattattaatcttagaaaatgaaataggtggtctaattacctgtctaattcttttcagattctggctgaataaaaatataaactaaatgatataaaatggtgtttcaaacattatgttaaaatcgaataggacaaatattttttaaattttcatatataaagtgattgctgacataaaaatatgtaagcaatccttgttaagatggtactataagattattcattggtcttccttcctctgctgtaaactcagttagagataaaacctaaccgttgcgcttgatggatttagagagaaggtctccttctgttgcccaggcacaatgcactggcacaatcaccggttaatgtaacactgaactcctaagctcaagggattcttccaccccaagcctcctgggaagctaggactataaacttgtgtcaccacagatggctaattttttaaaagaatttttgtagaaacagggtcttgctacattggccaagctggtctggaattcctggacttaaacaattctccagcctaagactttccaaaggctgagaatacggggggaacccccg

SEQ ID NO: 92573 - DNA, 648 bp, Homo sapiens
ggcacgagaagctataaagtgcagcttgtaaattagggtgtcacttttgactgatgtttgaagatattggttcagtataaggcagtggcacataagtgaacaaattcctaagcgttgtgaggaagaggtgtaaaagcacaaggaaaatgattgcaatctccttctaccacaccgtgcttcagtggcacatttactaggtgcagtttgcacactatccttccaagagacataatggacttgatgaagacccagcgaaaggaatgttaaatgactaaaggaattatggcacttctactgataatcattacaattatgtccaacactgctttagtccttactgtatgtaatccatgtgggagttcattttcatgtacttactgattgaaacctcacaaaatcctatgaggcacgtaatattattttatcctcattttacagataaagttaacaaggatcagaggctttaaatggcttgcccaagtcagaaaactaagtggctgaggcaagatttgaacccaggcaatctggtcctaaagttcctgctacatgaagatagagataaccattggggccaggcatggaggctcatgcctgtaatccccacctttggaaggttaaggaggcggataacttgaggcagctttaaac

SEQ ID NO: 92574 - DNA, 366 bp, Homo sapiens
ggcacgagcaagaaactcctactgcatacgccatgggtggtttcacacatgtgggcccggctactatcacaagccttggaggcaaggtgaatgtgcaacatgctgtaggagaaaccctggtaaggctcctggttgtctactaatggacccagaggttctttgacagctttggtaacctgtcctctgactctgccctgatgtgcaaccccaaagtcaaggctcatggtgcgaaggtgctgactgccttgggagatgccatatagcacctggctgatcatacgggcacttttgtccatctgagtgaactgctctgagactggctgtatgaggatcctgatagccttgggctcctggaaaatgtgctgg

SEQ ID NO: 92575 - DNA, 360 bp, Homo sapiens
cgggtagaatgggttagaagagggaagatggtatgagacggcccaaaagaaagcatagcattgtaagaggaaggacgaaaaaaggtaagagtaggagggtgacaggacagagtcagccatagatacatctcattccaatatccccgcaagtcttaacccatcccagcatcaactcttaagcccaaaatctcatttaaatataatcaactcaagaagtcccaatcttatattctaaatcattaaatcagtcatggatgagacgtggtatggtccattctgggacaaaattcctctctctctctctatgcggacccgtgaaatgtagaaaataagctatgtgcttgtaaaatacctcgtgcc

SEQ ID NO: 92576 - DNA, 374 bp, Homo sapiens
ggcacgagggccgggggtcggggccgcagaagtgccagacggggccggaaagcagccgagcggagttcaaatttgagagcgtttggaaattggaagacttggtggcgaacgagggtcaggacctgcatcctgcctcagagttatcgacgtatccggaatgtgggatcagaggctggtgaagttggccctgttgcagcttctgcgggccttctatggtattaaggtgaagggtgtccgtgtgcaccgcgattgtgggacttttgagtcatcatccactctgatccgggtgtcttaattcggtgttccctgtaatgcgctggcccattttggtgttactcacttttgatacattttagattttcttggcatgctgg

SEQ ID NO: 92577 - DNA, 356 bp, Homo sapiens
ggcacgagctcgaactaaacaaattcatcccagaaatctaagagacaaaattgaagaagcacaaaaagaacttaatggggcagaagtttcaaaaaaagaaatcttacaggctggtgttaaaggaacttcggaatcccttaaaggtgtgaaacgcaaaaagatcgtagctgagaatcacctgattaatataccttaatccccaatgacaaatcctctttaggcttaacattaacttaatacagatgagttatctttcatcatgatctgtcatggtttaattttatctcatattattttatatccctagttgttacgtctccatgatgattatttctttagaacctcttttcaatccg

SEQ ID NO: 92578 - DNA, 397 bp, Homo sapiens
agtgggagcatctgtatattggtcctgaatggcctgacgtgtggacgtaccatcatgcgagctgacacgagagctctagggccgacagggacaagatggacactagagggtctacctatacagacgcagacccagtgaacaaatccggtggcacggccaaaatgaacaagtggtccaaaggcaaagttcgggacaagctcaataacttagtcttgtttgacacagctacctatgataaactctgtaaggaagttcccaactataaacttataaccctagctgtggtctctgagagactgaagatcccaggctccctggccagggcagcccttcatgagctccttagtagaggacttatctaactggttatacagcacatagctcaagtaatatacac

SEQ ID NO: 92579 - DNA, 330 bp, Homo sapiens
cttcttagctggtgcgcgccggagcccaaattccaagtggaaactgcaggcgcacgagggaggaacgcgtggagcatgaaaaggcagggggcctcctctgagcgaaaacgagcgcggataccgtccgggaaggccggagcagcaaatggatttctcatggaagtttgtgttgattcaatggaatctgctgtgaatgcctaaagaggaggggctgatcggattgaattatgatctgtattatgagatgcgtgatctacattgactatgctgttcgttattggattaccatagtgtattacgttccatccttgaatatgaagtccagtactg

SEQ ID NO: 92580 - DNA, 396 bp, Homo sapiens
  misc_feature (1)...(396): n = a,t,c or g
cccacgcgtccggtgccgttggttctgtgcggtcacttagtcaagatgcctgatgaaacccagacccaagaccaaccgatggaggaggaggtggttgagattgtcgacttttatttctgatttttactagggatgtattttttaattaatactttctacttatgcaccaaattctttatgaatgatctattttatctttactaaaatacaatgttctgctcttagaatgacagtattaagaaaatgaaagtattagcactatgacctgaagaatgtatcatacaattgttactgttaaagaaaaaattatttattactatttattatagcgcagcagggaagactttattggagaccattaatacaggtttagggatcactgcaatatggtctccn

SEQ ID NO: 92581 - DNA, 404 bp, Homo sapiens
ggagagggacacatcatgtgtggtatgaggccgcatttaaagcacacgacatctgcaggggacacatctaggagggtgtctatcacaattcggccagtctaaacacgaaatgagattgggagacatgttgctctgcagaattcccaggggttgtaacatgaggatgaaaaaatgcttgacatcctgactgcccttgggcaaatagccctaagcagttaacacactcactaaatgatcaatgacgctccaggtcctattatctttattgtgttcctcacaatgtttgctgtcaaacttactgtatccgacccttactaaaccattctcaactcattcttaacttattaccctgtatgccaatttgtgccttaatgctaattacttatctttaaatgcttacccac

SEQ ID NO: 92582 - DNA, 352 bp, Homo sapiens
ttacttgtgttctttttgtccctcttcttcagcccatccatgttagttctcagtaggtttgaataagccatccggaacttattcacttctttggagctcaccacaatgctaaccttctttttcccatcagtagttcttaacagacacctgtctgaagactcaaagcccgcaacagaacctttcactagaatgggtttggttcaacctcagttctcaaggaacaaatggtaccaggaaaagtccgctgtaagtgaacccattttaactgagaatcaaaacatcatagtaaatagtatggaaaaaaattaggtttggtcaaaacttcaacttgagaaataaaaccagaaattat

SEQ ID NO: 92583 - DNA, 374 bp, Homo sapiens
cttagaagcaggtatttagaatgatgtgtacaatatcagattgatgttataacagtatattgtgtacaggtaaagtgacattatagtaaaattaaagtatgataacctaagaaaatcttattctatcattatctcttcttacagtgagaaatccaagcccctcctggtactatagttggatacgatacgcataagtgggacccctttctgcctaaattcacaatccaaaatgcaaacaaagaagatatttcgaaaagtgtaggtccttgagtgacatgtggctgattgggcgatgtggattttgaggtacaattgacacaaggaaagaagtgctcatttagggcctgatttttttttgcaacataattcaattg

SEQ ID NO: 92584 - DNA, 335 bp, Homo sapiens
tgaggaggaggagaggtcggagccgtctgcacgagcccttagagaccgagtcccggcggtgacggctgggcagggcaccggttgggggattcatttcacttaaaacctgataactttgcaccacacctaggcttactgatttcaggtaaatgccttgattgaagaggcccgcttttcatggagctccatccttattgcccaggcatggcgaactgtgcttcagatacgattagaagcctccatctgaggaataaaggtttcgaaggcatcagcggacctcatgtcctactgtgaggaacatgccaggagtgaccctttgctgataggaataccaa

SEQ ID NO: 92585 - DNA, 375 bp, Homo sapiens
acgactgaagtctttcctggtggctgagatcacaatttcccccttttttagggctagagccaaggtgaattctttcctctgaaacgccttgattcatctccagggaggcagatgttttagcaaacacttccacaggactgagacttgattccaattgatgatcatgagtcttagacatcactggtcctttttcatctatgatctctgatctagtcactgaagtcatcctaggtggtaaactctgaaacacaaggccacgggtcgctctccacagccccaggtcactcctggacgccttgcgcacccgcagccgatactccctgatcagggtgaagcggtctccaccttctacgtcacggtcaccggacgcgtggg

SEQ ID NO: 92586 - DNA, 379 bp, Homo sapiens
ggcacgagcatgttaaggagccagtcttcagatgattccaggctcagcctttaggccactcagctggtgccaaatatagtagggatgaactgtccccacagagacctgcccagggcacattgtgagaaagttcaggccaggtcttcctcctatagaggagagtatggaagtggcggcctaaatctatcctgtggtgctggttacctgttggatgggctcagcatcgacctgcgggtacgagttatcacatacttggtgcaaagtcttcaggggcgctgaggctatgcgtagaccgactatatggggggctgtataaggaacctgggggaaaacgttctgcacgctgacgaatcagagatccaggcttgtgggaagtgct

SEQ ID NO: 92587 - DNA, 299 bp, Homo sapiens
attagacctcacacatgtactctctctctctatctctctcacagtgactattctaggaacaacttttggcatggttatacctttacttgacgtcgtttatggagaaagaggctatgctcaaaatggagacttctaggatgctcagctggatgactactcattctcgtgctatagccatgcgcaagtgaatggagcacctaactcactgaccagagcttatgacgacccctaagtcaaaatctccggactggaatgccaaaaagttggggccctcgtggaggtaaagtgcctgaatttag

SEQ ID NO: 92588 - DNA, 440 bp, Homo sapiens
cggacacgtgggcgccaactccgcctttcgctcgccgagctccagccgaatgataaggggggaacctacggagaactctgtaccaagggtcgtacaaagcatactggccgcaaatcaaccgggggtaaagcacccaggaagcaactggctacaaaagccgatcgcaagagagcgccctgtactgaactggtgaccaaacctctacgttactagccaggggctgcgtcgcttcgtgaaattagacgttatcagaagttcactgaacttgtgattctctaacttacctttcaacgtctggtgcgagaaattgctcatgactataatacacatctgcgctaccagagcgcagctatcggagctttgcaggaggcaagtgaggcctatctgggtggcctttttgaagacaccaacctgagtgctatccatgccaaacgtgtaac

SEQ ID NO: 92589 - DNA, 395 bp, Homo sapiens
acccgtgaccgcaagatgatatcgctattagtagatctgcacataccacaccgtagcaacagatcgccggctatgatccttacactactggggccacgaaaaattcaccacattcttatgcacaagataccttctaccatagagagccatgactaatgcatgactctggctggacaagctgataatgcgagatgacacttagatgagaatcttacttatccataacacaaagttgatactgttggacaattcaaaattggactgatccatggacatcaagttattccatggggagatatggccagcttagccctgttgcaaaggcaatttgatgtggacattcttatctcgggacacacacacaaatttgaagcatttgagcatgataataaatg

SEQ ID NO: 92590 - DNA, 674 bp, Homo sapiens
  misc_feature (1)...(674): n = a,t,c or g
cggaacaatgttttttcagatatttaaaatttcctgaaatgaggtttcctttagtgttgtaaaattttcgcaaatggtcggcaaaggcgccagaaaaatttggagaattcatgcccccaggcagttgaagtaacattaattttgccanctatttttataagttgtggcaacaattgattgacaccccacagtaaactctcccagcctgttgtaccctcttgttctagctggtagtcataaagttgcagcagcactgccaattgctcacgacttccgataatagtggacacatcttgaagaggcgacataggccgaggaaacctagtcacttctatctgtggcacttcaccatgaagcttggctttgctggagaaaggtgcattctgtagcactaatgcaaagagagatgggatcaaggactgcaaggcagaaagatacatgtggagtttgtgttcatccagtccatgttctccttccctgagaagtttttcaatcttgttcagtagtgtaagtataagatgagactgtaaatttccaagttctgtagtccacgcagcgtaagctggtaaaaatacttgatgtgtagcactaactactctttatgagggatcacccaaggctgacagcaacaattcaaaaccctgatgatatttgtctggatcatcactcgtgcc

SEQ ID NO: 92591 - DNA, 1100 bp, Homo sapiens
gcacgagggaaattccactgggtctgcagctcacacataggcatgaccagcatagagatagagaggccccagtgctgctgagtaactgtgattccccaggtgatggcatcagctgagaagggaaggaagcccatgtgaggacactgaagaaggagtgagcagacaataagaagcccacagaagacagagaaggaacaactagagggagaagccaaggcaggcatgtgtgataacatataggaactgagggagaggacatttcaagatggaggggatgccatacaacaggactatgtgatggtttttggctgtgtccataggaagtcacaacaggcaagggaaagaaaccagaacccagtcatggagttaagaagtgagtcagagaggagatgggtagggacagtgaggtaaggcctctttctaaggaagtttggctgaaggatagactagctggacacatgctggctgtgtggggtagagggaggaatgatggagggtaggagagccttgagcctgcgagaagagtctcctagaatagagaagctgaggttaaagttgtggaagacagtggggataactgagtgacagataatcaggagaagaaaaggagatccagaatcatgacagagagatgacctttgccaagagcacagccatctttcactgtcacagagaggtaggacaaaacgattggtgttcaagaattggtttgtagcacaatattttaactatgtcctttaaaaagtttctccacagacactacccaaagcagtccttcactacagtggcagacagacctgaaaattttcatctgaagcagcagagtgaactgcagagtcagagatagaatctcactatgttgaccaggctggtcttgaactcttggcacccaagcgatccttttgcctggaatcccaaagtgtcagatttactgaagaatatttcattgtaattactttttatactttataggtcaagagctctgttttaaagacaaaatttattgaatatactttttcaaacaaagtttcatgttctaatcattgtctgatttcagcattaaatgaaacacagtaaagaaagttgggctgaaaaaaaaa

SEQ ID NO: 92592 - DNA, 434 bp, Homo sapiens
cttgtctatactctgatagaaccaaagtttcttgagggcaggcctgtatcttttacttctgtgtaacttccacagcttttgactgcattggagtcatgcagtcacgtttggtgcggcaactccatgcaagctgttgaccagatgacttctcatctctccccacaccatgatggtttaaggtgcctgttgtgtctggtggctggaacatggcaaagccgctacacacatcgagaggcggaaagaaagagggaacgagacagggaataagaacgggaacgagaaagagaacagagagagagggagagagagccagaacgggagagagagcgagagcgacaacgggaaccaaaaatagcgagagaatgggataaagaacgagaacccccaaaggatttggaagaccaagactaaggaccagatgaccgcatagaaag

SEQ ID NO: 92593 - DNA, 398 bp, Homo sapiens
cttagccctggattccaaggcatttccacttggtgatcagcactgaacacagaggactcaccatggaattggggctgtgctggattttacttgttgctattttaaaaggtgtccagtgtgaggtgcaactggtggagtctgggtgagggttggtacagtctggagggtccatgagactctcctgtgcagactctggattcacgttcagtagttatgagctgaactggctgcgtcaggctccatggaaggggctgtagtggctgccatacattactatcctatggtgtaccatattatacgctgactttgtgaaggaccgatttaccatctgcagagactacgccaagaactcactgaatctgctcatgaacagtctgagagcctaggactctggtgtt

SEQ ID NO: 92594 - DNA, 534 bp, Homo sapiens
gtagcatgtatgctgaatgcttttttccttagcacctttaacagtaaggtgttactgcattttacaaaacatcaattcaacatgtcttggatttagtttgtattcatagattttgttaaggatcaggcctgtgaacatgggcacagtgaggttaaataattcacctggccacaacctggctttgaggttctgcttttgggggccataattttcattcaatgttattcgatgctctgttctggtgaacaagttactatacctgctgtgtatataagcttgagctatactaaaccaaggctttattttcttttgttttttaacttactgtacttttactgtttatataacctatatttcaagagagagaagataatgctgaattttaaatttagcatttgaacatctgtccaatagtgaattaatcagtttttttaaaagttgagtttttagagttgttccagaaaaaaatatatatatatgttttatatatatagtctttttatatatataaaaatcttttttataaattttatt

SEQ ID NO: 92595 - DNA, 422 bp, Homo sapiens
gtgcaacttccttcggtcgtcccgaatccgggttcattcgacaccagccgcctccaccatgccgccgaaggtcgaccccaacgagatcaaagtcgtatacctgaggtgcaccggaggtgaagtccgtgccacttctgccctggcccccaagatcggtcccctgggtctgtcttctataaaagttggcgttgactttgtctaggcaacaggtgattgtaatgtcttgattatttctgtgattctgactattcggatcttactctcccatatttttgttgtgcctccttttttttgttttgatcatttgattgctttctgggatcttcaatctcttattttcctacatgtcatcttttcgttatttattacattattgcttttctgcttcttctctatcttttaaaatctccgtcttatcgtat

SEQ ID NO: 92596 - DNA, 395 bp, Homo sapiens
gctgggcgctgtgcagaggaaaggcgggagtgcccggctcgctgtcgcagagccgagcctgtttctgcgccggaccagtcgaggactctggacagtagaggccccgggacgaccgagctgattgtcgtattcactccatcttcgtccgcaactctttcgaatagcgggagctgaccccaagacgaataacctgtgctgtaccccaactatgcccgataccgaggaccacaagaatgcctttgaagactgcggctcacgatctgtggctatttgcagaggaccaacagcctgcacgagaactgacgcctagagtgtgtcttcctggcgatgctgccttgcgtgaacatggtttcctgcccaatgtgcaaccggtttgaacgtttccggttcacaat

SEQ ID NO: 92597 - DNA, 408 bp, Homo sapiens
cccacgcgtgcgagctcaccctcgtcggaaacacactgggctgaggccacttgcagccttgtaactcaagcgccgaccatggaaaactcactaccatgtgcagtgcggcgaatggcttttgtctcctaggcatcacctgtgccataccacttaaaggggctgattctggatgacgtgaggaaaagcaactttacttcttttacccaaacgctgcgtcctcatggatcacccctgacccaagtcataagcacaatcttctagccccacagaccctttcttgtatgtccaaagaatgccatgaccacatggaggatgtggacgatgagaatgatgacgaccatgcggtctgtctggactccattgactcgaacgactctgatgatgtagatgacactgatgattctcacc

SEQ ID NO: 92598 - DNA, 426 bp, Homo sapiens
accacgcgtacgcccacgcgtgcggctcaaggcatttgggaagtgcacaatgacatgcaccccctctggaggggcgcacctttgaagtcacctggaccaaggaaaggccctgccctgtaggctggccacttgcataggtaaactcccctctttgacttgtggccaagggttgtgctgagctggctagaaacggtcttaacctcactccggacacgaagggcagcctcaggccctcctgcctgcaggatcatgcccaccaccgtggacgacgtcctggaacacggaggggaggttcactttttacagaaacaaatgttatacctcttggctctgatctaggataccttcgcgcccatctacgtgggcatcgtattcctgggcttcacccctgaccaccgctgccggagccccggagtggccgagctg

SEQ ID NO: 92599 - DNA, 1655 bp, Homo sapiens
ctggtgctggcgttcacgtggaagactgcttatctgtatccagctgtttgcagagctcagggaggccagggggcttcagactccactgtactctgcattccaggattctctgttctctggctgtggtggcctgacacactcttcaccactgaccccacccccgcttgcacactatgccacaggaagggcaggggcttccatcacaatcactcagtattagttcccagctctgatagaattactcaccttgagtttccaagtcttgctgaaggtgcttgcgtaagtggcacatggatgttccctctgttcaaaggcatatgcacaacactatttttcaaaatttgcttttatttacacgtttgagtcaattacatgcatgttttatttttgaggagtgattagcaaaatgcattaaaattttaaaatagcaattaaatatacaaaaatatagcttacaaaaaactgcgaatgtttaaaaatattctgctgcagaatttttagtgtacaaagacgtctatgaaacctgaggttcagcatttcataaacctttttttgagggagttacacaatacctagtgaggaaacccgagggccaaactacaagacgaaaaagtgccccgttcctggcaatgatgtcagaagaccaagaggcgatagttaccagcaacactctaggaagaccagctgtcaccagaagggagttcctaacacttgccacacctgctcccccgaccgggggcctgggagggaagggcagatggagaggaacggtgtgcagtgggcgtgagatgcagatccaccaggcttgggactggcaaagggagctgagaagagagttcccccaaagcacaaacaagtctgctgacactggtggggcccttacagtcacagaagtaaggactggatggtaagccaaaggtgctgatgcttggtcaaaaagtggagtacatctttgcatcttgtaacaatttgggctctacagctgaattggcaaagtaaggtttactacacaagcccctctttttcttctgatatccccactcaaatggaagcacactccccagcacatggggatcccttattaatctttactaaagaaccgtgaaccagcattttccagttatcaactggatatttaggcatgaatctggacatgtccatctgcttaagaaatctgcttaagaaatctgtaacagctacaggaaaagacacacccagggccagagattctacaaatgccagaagagtggatgtgatagagaattttttctcaagttttgggttagggcaccagttgcaattttaatccaggggaggatctgggctgctgctgtagggggcaagtacaccagggaggtgggtgtggacagaggcactgggcagctgctgggaagcgaggcacaagtctgtgcccctactcccagggctgcctggaggaagcagctctaactttcatcagcggggacaaaaatgaacttaaactaaaaaaattattggccgggcgcaagtgctcacgcctgtaatcccagcactttgggaggtcaaagcaggtgcatcacgaggtcaggagatcgagaccatcctggctaacacggtgaaactccgtctgtactaaaaatacaaaaaattagccgagcgtggtggcgggcacctgt

SEQ ID NO: 92600 - DNA, 1895 bp, Homo sapiens
ttttttttttgtagaccaacagaactgtcacagctttattttgtgactcattatattacaacatagaaatatgcattttaatacttcatataaagttattgacatacaaaattttttttcttttttccttttaatgaaaatgatttaacttagaaatctgttgtgaaacttttgtctagttttgcaattctcagatattccagtgcaaaaatagatcccattacagacagcgtaaagtgcttggaatgagggccaatgatgaacaaagagcacaaaaacagcttcatcttagggtataagaagggataatagcatacctaaatccttatggaaatagaaacattctaagggggatgcaacaattttgaaaagaattagagcaatatttctacagtattacattattactagtagataataacaagggtacaaattaatgtctcaatatcaaagtggttcagtattacatgacacatggctctttggaaaatattttacctgatatatacaaccacaagaagaaaacacagacaaatggctttagtcaatgattactatacagtgaatgaatgatgtgcaacatttaatagtcacaaagcatttgctttcagtacagataatgaaatacagtagtgtgaggtttggttgttttttaacaatgaattgtgctgggcatttatgtatagagggcttattattttcttctgtatttctcatattcacagttgttaataagttttctgaggtgtcccaaagatgcaaaagcagaaatttttgaacacgtattttgagaatttctgaaactcacataggtacattccacagggaatatacagaaattttgcttgattgagtatagagttggtaaaaatttctaccacaattaggtttacacaggaaaatgtaaaaaattactattttaaaaggtaacacagtattaatgaagatgtataactatagattgtttctagcttcagaagaggtcctttcaatctgtattaaaatgttgtgttttcttcaaaatagttcacagtgccttttgattttttaaaatatggccttgaaatcagaggaaccgaagtaaggagttgctcatagatttactataatgaagaattagaatacgattttagtaaaatgaggaaaccataactttgattttgaaaaatattaaatgaggagaaattattctataaattctgtatttttgaagatactgtaaaatgcaacgatgccatatcactagttattggaaatatgccttcattacttatatttaaaatcaatattgactttaacttctaaaacaatcatttttttctttttcagcagtgggttatataatattctgtaaatttaaaaaatatagaaagattaatttgaaatctgaagtcttacacctttagcgttaatattcaaattttggaaaaagtggaagaagttagtaatgatattgaaagatcacttgaacttccccaaacaatagttctctcatatttttcttttctctcaagacagttaacagtaagtattagtgaaacagtatttttacaaatgtttactgactagaaaaataagactgggttagaaaactctgaaaaatgctccatatggaagtatttgttgtttttatatttttcttgactagtgattgaagagatgaaaaatttgagactgtcagatttaatggggtatccaatatctgcaaagccaattatttgaaggtactaaatgccataaacacaagttgtgtttttcagcaagttttcaagctagctgttttccctgttgaagaattcattgtttagacttgtgacccttatactttcttggcttttgcattgttgcaattaaaaaaaaaaaaaaaaaaaactaatcgataccgtcaacctcga

SEQ ID NO: 92601 - DNA, 375 bp, Homo sapiens
tacccacctcagcctcccatgccctgggattacaagcatgagccactgcgcctggcctaaaattttcatctaaaacccatcccggatacaagaatccagcctcctccatccctctggcagaagaagagatcacttaccttctcaggtggccacagctccctcttgcgctgtatgacatcgtcctcaaaccactcggcctgattggaaacccagaacatagccacagggaaagtgaggtagattatcatccgaaatatctccagcttcacccccatctcgtttctcccggtcaacaaagccagttccgcccaaagccgaccctccagcaagacagaagctcactggtgttttgcacgctccattgctgaagctgat

SEQ ID NO: 92602 - DNA, 433 bp, Homo sapiens
gcgacattagctagcgctcgctctactctctctaacgggatagcagcggaatacaagagactgaactggatctgcctctatttccaaaagactcacgttcaactttcgctcacacaaagcccggaaaattttattatgcctttttttaaaaaaagctgatatcaaattatagcggacaaaaaggggaccctgatctttatttccacatctgtaacaatccgaaggggaggttgctgacgggggacaagaggttgatttaatctgctttcctggggtggccggaggtgccctaggcacagggggagggaagctgatcatttttccaaagggacccagaagatgtgggaggtttgattttcccggggagtgcccgacgcaaacaaaggatgaggggagctcctcactatcccaagatcggaggggaacgtacttt

SEQ ID NO: 92603 - DNA, 404 bp, Homo sapiens
aagaaattaaccttgatacattgctgctatagtgaatcttttggactctgttaaagtagatgactcacaatcatcccagtagcaacctttataggaaggagaccaagtgctgcgtttacttctcatgtctctttattcttcttcttcaatctgaaacaggttttcagtctttccttgactttcatgagcttgatacttttgaagattacaggccagtaattttgtaggctgtctctcagtttgaatttccctgaaatttcctcctgaagtcaggtgttgtatttttgacaggatatcccagaagtgatcctgtattctcattgcatctcatcaggtggtgcatgatttcagtgttcccattactgataatgttcatgttgatcacctgattaaggtagtgtcag

SEQ ID NO: 92604 - DNA, 926 bp, Homo sapiens
aaaatggccatgctaactcctacacaactaggagcctcagcaggattgctaggatgtgggttccttcctgcatgcttgcttctgcagctgtgtggccttgccatggccctcccaccactttcccttctaccttgccttccattgtcttccttctcccagaaagccaggtttcaccacgtgctcaccacaaactgtctcccctccctcgtaggagtcactgcagtagggcacctgcaggccctggtagagtgagcagggcttacgtgtacattctttctcactctaaggatgtgatatctgaccctgatgtcagagaggaggtctcaggactagcattcggggtcctttgagtgttcccagaatggtttggggtatcacacaaaacaccagagctgaggatagggatagagtccccaaacacacatcctgggagcaagccacttcatctgagcttcccataccaggagcatggtttgtgctttgatgggaaacctagcaagcccctgcactctggggcttctcctctcctggagcccagggcggctctggcccgatgatatggcagccataggtacaggtattgcaggtgcagcctttcttaagtaccctgcctccactctatagcccagctgctgctggagtccaggaccttagacccaggatgagcaaaaggatcccaccaggttgtccaggaccattgccagggtgaccccagagttcttcagacctgtgtctgatactgaatacagtgccatgggaccctgctccaatctaactgcctacaacctgcccatccccctgctgcaagggatgttgctgctacctcgggaggctctctgagaactggtgtctggtcttagaatgctgcacatagtacctggtggctaaggtctaaggggctgcccaaagcccagcaaggaacaagc

SEQ ID NO: 92605 - DNA, 377 bp, Homo sapiens
cttttacagcaaaaacaggaatcattaagtgtgtgtgcttttatcataacttctcttttaatggaacttaaaatcttaactcgtgtttttgcagcactttttttgcacatggtaggttcttaatatttgaatggaattcagtgtgactgttctttgtgttctcaaaagtctgatctttgtaacaatttgtctttcacttgagactttttttttctttgcatatgtgcacgtctcactcttggttttccttaatcttttttaactaaacacatctatgactcatatttccctatttatgaataggagcaatttaaaatttcccaacatggtggtatgtgatgtaacataaccaaaggctacatgtttaccctttgtta

SEQ ID NO: 92606 - DNA, 1104 bp, Homo sapiens
tttgatgtaaaaaagtttattgcaaatgtaaccttaaggcaccatagagttaatttctttaagggtaaacagttattttattttcaaactatattttttttcccagttgtaatatacccccagaggagtgctcactcctctaaagacaaatcattaaaacatgctttattgttgaaatactgagaaaccaagtatgaacaaatgatgtatttgttcaaagagaataagtgtgaacatcatcaatccctatttcttttttttttttaataagtttttatcagtataacaagaacatctggtctttgaaaagttaggagacatctcccattaaaacctataggacctggttagccttatttttttaaagaacagccctgtcaggaagaaagcagaggctcacccatatggttcacttacatataaaatgtatgttgtcaatatacttatgcaggatgtttgtgtgtctcagagaattaagtccaatattatcttgaaatattaaaggtaaaaatgaaggtagaaaaaaattaatttaccaagcaagtatttacatttttattttctagacccataaattaaatcatctcttttctactttatgagatgggggtgaggcgcatggaagaataacacctggaaaacaatcttccactaaaatcaatgaattacttgacttggaataattattgtcaaactccaaaaaaagttgacctgtgggagtatgaaacagaatttacatcaggcttattattccggtggccaaagaaatagcaggtagaataaagtaaaaaggtggtagctgggggcagtgggagtggacttaagccagtttggggataggatatgaatggtctttcctaccaacctgtctctttttatttcaaactttatcagtttatgttgcatcaaacttgaactcttcaaatatgagataatgcttttaaggaattagaagacttccttcctgtttaagcctctctaattgctctcctgtgcaaaatttagatattttcactcattcattcattaaatattcacccctaccatgtattgagcacaccactaaagcaatggagattcagatctgagtaaaacacaagttcc

SEQ ID NO: 92607 - DNA, 407 bp, Homo sapiens
ggcacgaggaggatatcaataatctcctaggccacacgccatgggtcatttgacagaggttgacttggcttctatcactagcctgtggggcttggcgtatgtggaagatgctggaggttaaaccctggcaaggctcctggttgactacccatggacccagatgttctttgacagttttgtaaagctgttctatgtctttgccatgatgggcaaacccaaagtcaaggcacatggcaagaaggtgctgacttccttgggagatgcccttacgcacctggatgatctcaaaggcacctttgcgcatctaatggaactgcactgtgaccagccgcatgcggatcctgataacttcaacctcctgggaaacaagctggtgaacaatttggctatccatttcagcaaagaat

SEQ ID NO: 92608 - DNA, 425 bp, Homo sapiens
  misc_feature (1)...(425): n = a,t,c or g
acggtgggatgcctcacaaaaagttctccgatcccaaacatgggtccctcggtttcctgcctcctaagcgcaacagcaggcatcgtgaaaaggtgaaaagctcccctaaggatgacccatccaggccgggccaccttacagtcttcctgggatacaaggctgtcatgattcacatcacgcgggaagacggcaggcccggatccaaggagaacaagattgaagtggtgaaggctgtgaccattgtataaacaccacccatggggggtgcgggcattgtgggctacatggaaacccctcgaggcctccgaaccttcaagactgtatttgctgagcacatcagtgatgaatgcaagaggcgtttctataagaattggcataaatctaagaagagaggctttaccaagtcctgcagngaaaagacagga

SEQ ID NO: 92609 - DNA, 419 bp, Homo sapiens
cgcctgggaggcgtacagctgcttttatacgaatttgatcatctccttcccagccactggctgccacaaactcattgaagtggacgatgaacgcaaacttcgtactttctatgagaagcgtatggccacagaatttgctgctgacgctctgggtgaagaagggaagggttatgtggaccgaatcagtggtgggaacgacaaacaaagcttccccatgaagcagggcgtcttgacccatggccgcgtccgcctgcttctgagtggggggcattcctgttacccacccaggagaactggggacggaactataaaatcaattcgtggttgcattgtggatgccaatctgatcgtactcaactagggtattggaaaaaaaggagagaatgatattcctcgactgacagacactacagcgcctc

SEQ ID NO: 92610 - DNA, 1218 bp, Homo sapiens
  misc_feature (1)...(1218): n = a,t,c or g
ttttttttttttggttttttttttttggctcaatgaatttttctgtttgtcatggaaatgtaagagtggaatattaatacatttcagtttagttctgtaatgtcaggaatttttcaaaaaaattaaaagatggactggagctttttctttgtgaatagaaactggatgccacagtgattcatgtgggttttattcctcttgtcttgctgttatttttgtaccttttatccctcaaaggacccttcttgggttttgaatggaagcctttattccggttaagatgttttcttctattttaccacttccatctttttttgtggccctcgatcctatttttccctgactccatgcttggttggcccttataaaacttgtgcccaaaagattgaggattagactttccgaggacttacctgtcctaggggagtaggcaagcacttccactagggagggggtgggggaaaggaatgacacatgacatacatggcatacacattaagcagttgatcatatgtctgactgggttccagtttcttgggaatgttggtccccttgttcaggcttgcatattttaaactaaaaatttcagtctattgtttttagtaacttcatttatagtcctccataacaagttagaaggatgtatctgctaccatttattcctataattttagaaagttggggcttgacattatactcatttagtgagagtagatgcaaaaaagtggaggggcaggagaacttctccagacacctcagataaagtccggagcccaaggctttatcttaaccatgtatggtaccccattcattcatcaagaaaaccctcaacagctgggcctgcatggagtgttatatttcaaggtttttcacaggggttacagtaggacagtccccaccccaatcaggcaccaggataaaagcagggacttaaacagcaccccggttcttcagcctgagccatcacatgctattcagtctcctaacctccccctgggccttaagacagggcttgggcagagatgattaaatggtgggacaaaaaaaatgagttacattgccacctgaaaaaccttaaaaggggaggacccagccttagcctccctcctcccaagtgcaaaatgtgtaaacagagtaaacggaacagaaaagtgcagtctaagtggttttctctcctgcccctccacggcctttcccccacccctantatttgggggt

SEQ ID NO: 92611 - DNA, 380 bp, Homo sapiens
gaacgggtggggcgctacctgacggatactggaattctttcccgcctgcggaactggctgaaaaagagggactcctcccttccggtagacttgtggatgagagctgtgaaataaacaacatttttaggatctacttaagggcaaagtccagctcggaggactccaccctggcctctgttccccctgctgccacctttggggccgatgacttggtgctgaccctgagcaacccccagatggcattgtagggtacagagaacgccatctggttggcggaacatgcccagttctggtcaaaaacgcatgttctggactggatcacctaccaactggagaagaacaagtacgaagcaagcgccattgacttctcacgatgtggc

SEQ ID NO: 92612 - DNA, 385 bp, Homo sapiens
caattttacattggctacctttatttacactttatgtaaacgaacggaatttctctcacctctcatcttgggagcggaagatgacttttcgcactgaggatgggactttattattcatacttcaagaccattattgaagcaccttcgtttttgaaaggactgtggatgattatgaatgacaggcttactgaacatcctcttataactaatgcaataaaacgcttccatctttatccataggtgaggcataatttaagacaaaaaaaatctgtccagggatcctctttgtcagataaaaatagcttgcacaatcttgttaagaaagggaggggacgtttcaagcttattaaaagggtgtatccttataggacagaataatatcatg

SEQ ID NO: 92613 - DNA, 621 bp, Homo sapiens
gcggccgctgcggacggacgctcgcctgccggctgaggaaaaagaagcaactaacaaaacactgtgataataaggattattcagtatgcagtttgcaggatatccatgacgacattgaaaatgaattttttgtattcaccagatattcttatatgagaagatctattttaaacagtctaaatattttttcttctgttggaccagcatggcaggatttaagcgagggtatgatggaaagattgctggattatatgatctggataaaaccttgggtcgaggccattttgccgtggttaaacttgccaggcatgtctttacgggtgaaaaggtggcagtaaaagttattgacaagacaaaactggacactctagctactggtcatcttttccaggaagtgagatgcatgaaactagtgcagcatcctaacatcgtccgcctttatgaagttattgacacccagaccaaactatatcttattctataacttggggatggaggagatatgtttgattatataatgaaacatgaggagggtcttaatgaagacttggccaagaagtattttgctcagatagttcatgctatatcttattgccataaactccatgtggttcacagaga

SEQ ID NO: 92614 - DNA, 391 bp, Homo sapiens
gaccggccaagatgggccgggttcgtatcaaaatcgtgaaaaaggcggaccgggccttctgaaaagaggactacccgcgcttgggccacgacttccttacgaacaaacgcgggtgcgaggagatcgccattatccccaccaaaaagcacgggaacgggatatctggttgcgccccgcatgtgatgaatcgaattcagagaggcccagtatgagggatttccatcaggctgcttgcggaggagagagaaaggagagacaattatgttcctgaggtctcaggcttggatcaggggattattgaagtagatcctgacactaaggaaatgctgaagcttttggacttcggaagtctgtccaacctgtaggtcactcagcctacagttgcgatgaa

SEQ ID NO: 92615 - DNA, 348 bp, Homo sapiens
ccctattgcagccagcctgcgaatgtacaacctgcaaccctacacggaggagaacctcatctgcacagcctttgccaccatggtggagaccgtgccgatcgcccgaaccatcctagaccgtctcactgggatcccacacggctactgctttgtagaatgagcagattgggccacagctgataagtgtgtgcatatctataatgggaaaccccttccaggagccacacctttacttagcttacagctgcaccagctggcacacctgggctcatagaaccatggagctggcagtgcccttagcggtcatccgtgcaaccccctcattttatacaggagaaaaagctgagg

SEQ ID NO: 92616 - DNA, 383 bp, Homo sapiens
tcgcggggccgcctactgctcctcccgctgttgctgccgctgccgccctgattaactgcctgggcagctccggccgactggctccccatactaccctccgatagttggagttcttacagcatggcagaccttgacaacaaagaacaggctgagcttgatcaagatttggatgatgtggaataatcaaacgaacaggaacctggtgattaaccaaaactcaaagcacggaacctatctgttcaaacgatgcaaaaacctgagattcttgcagcccttccataaagactagacggactggtcaaagccccagcaggatacattgcaagcctgcctagggtacttaaaagactagtgaatgctgtcaaaaacctgcaggggaaagg

SEQ ID NO: 92617 - DNA, 384 bp, Homo sapiens
ggcacgaggctttttctcctgaaggggctgcaatagggaaggcttagccatggaccccttgatcagaagggtgaacagcaccgcgaaagccccaaggaccattggaccctacagacaaactgtattagtcgacaggaccatttacatttaacgacagatttgcatggacccttcaaggggacagcttgtgtcaagaggggtagcagaaaaaactaaacaagctcttattaacatgggcgaaattgtgaaagctggcggctgagacttcactaacgtggggaaaacaacagctcttctggctgacgtaaatgactcccactctgtccttgaaaactacggacagtatttgaagagtaattctcctgatatagctgcataccaaga

SEQ ID NO: 92618 - DNA, 368 bp, Homo sapiens
tggcacgagcgtttacgaggagagagctagcaccagcttcaataccctgagttctggaaccgattatatcccaaacctgtggggcaaggttaatgtgaaaaatgctgcaggtgaaaccctgagaaggctcttgggtggctacccatggacccatagggtattctatatgtttgacaatctggcctatgtctctgttatcaagggcaatcacaaaatcaaggcacatggcagaaaggagctgacttacttgggagaccacataaagcacttggatgaattcaagggcacctttgcccagctgagtgaaatgctctgatacaagctgaatgtggatccttaaaacattaagcttctggtaaaagggctag

SEQ ID NO: 92619 - DNA, 359 bp, Homo sapiens
ctaagagtacaactaggcattggtgtgttttgggttctcccaagtgatgctaatatgcacccaggggttagaattactattatagaatactgccacgacaatccttatctcctcctgaagagcacagaaggcttgatttccaaactattgcaaaaactggcatgacctcaactacttttagcagggttctgagaggtagggtatcactcaccttaattgcttcagatcctgcctgaaaaatgcccaggcatgttccagtccacacaagactgattccaaagggtgtatctctcattgacagcccctagaaccattctaagttatgacaataaacacctacttactgagttctcattcct

SEQ ID NO: 92620 - DNA, 405 bp, Homo sapiens
cccctccgctccagtcacttgtctggagcttgaagaattgggtattccccttcccaccccaggcactggaggagcggccccccggggattccaggacctgagctccgggagctggactcgcagcgaccgcggcagagcgagcgggcgccgggaagcgaggagacgcccgcgggaggcccagctgctcggagcaactggcatggtccgagcgattgtcgtcttgtgggcgctgctgctggtggcgctaatgatgctgaccgtgggccacacacgaaccagggacagaagacctgcggcccccacccaggtgcccgggttcttgggcgactgcgtgacgctggactgctacctacaggtgcccatcatgtatgagacgcatgtgacacacctgacttgagagcggag

SEQ ID NO: 92621 - DNA, 403 bp, Homo sapiens
cagtagacaaatgcagcagcaagtcaattgtattatcagaatattgtcctcattgcatgtgtagtttgagcacagatcccaaacctttcgggcaactttccatgatactaaaataaatgggcgcgggggatgagaaaatctccgcaatggggaaggcccgggtcgaccatagggagctgtacttgggcctgctctaccccacggaggactacaagttaactttccgggccaggcattgattcatgaagagggtgaggggtcccagacaaaccgactcgtagtttaggcggttcttgttagggggtgtgaactgggaaaagctcggcttgctgctgttcgctttctctctaaacaccaaaagtcggccttcctaaaaatttttcctcagtcccagcacggcccg

SEQ ID NO: 92622 - DNA, 377 bp, Homo sapiens
aacggccgtgattacaccctggctgctgggaagatctggattctcgttccaggtccccatcacaaaagctaagtttgctgtttagggaggatcaggagatctgatcctgattgcagaaccttccctgattacaaaatcttgggattgttgagaggattacttgtaaagtaccaggacagcgcatgggacattgggtggaataaaaacagggttgaatgaattccaaaaagcagggttctcaaccgtctggacagctatctgcataataagacaacttcaaaaaaccgactggaagcaccttgcatagaagtaaactgagaggggcctcctcatgaaagaagacagctggtccacatcagaaaaatcttgaaccagcc

SEQ ID NO: 92623 - DNA, 610 bp, Homo sapiens
gagcctcgctctgttgcccagcctggagtgcagtggtgccatcttggctcactgcaacttctgcctcccgggttcaagcgattcttccacctcatcctttcgaggagctaggattacaggtgtgcaccactatgcccggctaatttttgtatttttggaagaaacgtggttttgctgtattggccaggctggtctcgaactcccgacctcaagtgatccgcccaccttggcctcccaaagtgctggcattgcaggctgagccacggtgcccagcctgaacaccctttcctggtaaaacactccaaaaccaggaaaagaaggaatgtacagcaacaaaataaaggccagtcatgcaaggcccatggctgaaagtctttcagtcattttaggtgaaagactgaaatctttgcctccaagatcaggaataagagaaggatgcccgatctcactacttctattcaacacaggatttgaagtcaggctggtcacagtggctcacacctgtaatcccagcacttttggaggtcgaggcaggtggattacatgaggctatgagtttgagaccaccctggccaacatggcaaaaccccatctctacttaaaaaaaaaa

SEQ ID NO: 92624 - DNA, 610 bp, Homo sapiens
actgactctgtggctgctgcctcccacaacgctgtgcttgcagaccccaggagcgctggctgtcccttcacttcctgaacatgtggatgtgtgctttgggttcttgacctcagctcttcccaaggtcttcttagagaagggtctaaatgaagtcatttttagagtatttgtttttggttacacaggagcttccgcccatgtggcctcggagtgggaccctgcgggtcatcaatctgtacattgcctgagagcagccgtgtatgctctggaagggacaagaccaggtacctgtcgggggatgcggccgtggtaccaggcatggctgcgcaggtcctcgctgctcaggagcagctcctcctccagctccttcttcagtttctcgggggtcctgtccatgatgtgcctctccttggagaactgcaacacagagtcaaccatgagctcaccctgcccaggccacaccaggccatgccagctggaggtgaccgcctgcttcactaatccaaccagttatgctacagcctgcattcagggagatgtggccacaggactcagttctgaccaaggagctgagatgtgatggctggagactcaacaccattctggacgg

SEQ ID NO: 92625 - DNA, 361 bp, Homo sapiens
ctctgcttcctgataacaaacgaaatattattttgcatcttttctctgagctcactggattgaggcatattatataagaaacgacacacagattaggcagagctactcttcttaaatctctcatttgtttcctaagcaccctggctgtgaaaatacatgagataaatgatgaaggccactatcatcctgcttctgcttgcacaagatacctgggctggaccgcttcaacagagaggcttatttgactttatgctagaagaagaagcttctgggataggcccagaagttcctgatgaccgcgactacgagccctccctaggcccagtgtgccccttccgctgtcaatgacatcttcgagtgg

SEQ ID NO: 92626 - DNA, 534 bp, Homo sapiens; identical to SEQ ID NO: 92594

SEQ ID NO: 92627 - DNA, 329 bp, Homo sapiens
ggcacgagcccctgagaaagccatggtgtgattgagcgccaaaaacgtgaagcccaatggggagaatccggactagcttgaggccgggatctccccggttcttttggggctggagatgaactcggacctttcggctcagctcagggtgctgtatgttaccgcagctcagggacttgtgggaggtggtgggcggaaagctatcataatctttgttgccgttcctcgactgaaatctttccagaaaatcgccgcccggctctgacgcgagttggagaaaaagttcaatggtaagcatgtcgtcgttatatgtcatacgagaattctgccta

SEQ ID NO: 92628 - DNA, 373 bp, Homo sapiens
ggcacgagcactacagaagtgacagagccatgattcactctatttgtcatcaactctggaacctgtggtttttgtcctctctaggagccggccacaatgctgatagccctgaattggtggccctcagtgaatgctctctattggctgataggtgagagcgcaggtagcaagatctgaagttgaagaccttgttctgctactagagaacacccctgagtagtttgacatcaccagtccaggaagaggctggtagtctcagatacatacatgtaccgttctttgctgtaaaagctgagctagttgactggccacttaggcagccaaagtttatggtagccggaagtgaccacaccatattaccagggtctgagat

SEQ ID NO: 92629 - DNA, 350 bp, Homo sapiens
ggcacgagcggagagctgatcagcccatatgtgggacttcaccgaacacctgaccgaagaggtcaaggatgccttccaactgtttgaccgaacaggggatggcaaaatcctgtacagccagtgcgtggatgggatgagggccctgggcccaaaccctaccaacgcctatgtgctctaggtcctggggaaccccaccagtgacgatatgaactgcaaggtgctggactttgatcactttatggccatgctgcacacgggagacaacatcaaggaccagggcgcctataaggactattttgaacgacttagggtgctggactaggaaagaaagggcaccgtcactgatgcct

SEQ ID NO: 92630 - DNA, 356 bp, Homo sapiens
  misc_feature (1)...(356): n = a,t,c or g
ggcacgagggcagcgcaaatatccaagaagaggatattggggggtgatggcatcttcaaagctgaactgaatgaggttcttactcgggagctggctgaagaaggctactctggatttgaggtgcgacttacaccaaccgggactgaaatggttatcttagccacctaaacacacaatgttcttggtgaaaacggccggaggattactgaactgactgctgaacttcacaagaggcttgactttccagagggcagcgtaaacctttatgctgaaaaggtggccactaaaggcctgtgtgccgttgcccaagcacaatctctgcgttaccaactactaagaggtgttgctgtgcggan

SEQ ID NO: 92631 - DNA, 351 bp, Homo sapiens
ggcacgagggaacgtctgaggttatcatgaaactcctaaaccacactccatgggtcatttttcagaggacgacaaggcttctattactagcctgaggggcaaggtgaatgactacaattctgaaggaaaaacccttggaaggctcctggatgtctacccatggacccacaggttctttgaccgttttggcaacctgggctctgcctatgccatcattggcaaacccaaactcaatgcacatttgaagaaggtgttgatttccttgtgaaatgccataaaattcctggatgatgttaagggcgcctttggccatctgattgtaccgtactgtgacacgctgcatgtgcgtcc

SEQ ID NO: 92632 - DNA, 350 bp, Homo sapiens
ggcacgaggccgggtcccggaccatgcccgacctgcaggagattgcctcctctttcaacatgacagatgccggtgtgtccttcaccaaagactttctgacaggtggagtggccgcagccatctccaatacgggggaatcgcccatcgagcgggtaaagctggtgttgcatgagcagaatgccaacaagcagatcactgctgataagcaatgctaaggcattatagactgcgtggaccgtattcccaaggagcagggagtgctgtccttctgtggcagtgacctgaccaatggcatcaaatacttgcccacccaggctcttaaattctgcttacaagatatatacgagcag

SEQ ID NO: 92633 - DNA, 415 bp, Homo sapiens
atgacacccatggagccaatactttttgtttttgtcttcttcagactgcgccatggggctcaacgactgggaaagggagttggtgctcaacctctgggggaaggtggaggctgacatcccacgccatgggcaggaacccctcattcggctctttaagggccacccagagcctctggagaagtttgacaagttcaagcccctgaaggcctaagacaagatgaaggcctctgaggacttccagatgcatggcgcccctgagctcaccgccctgggtggcgtccttaataagaaggggcttcatgaggcagagattaagcccctgagccactcgcatgcctccaagcacaagatgccagggatattcctggagttcatctggaaacgcatcatccacgttctggatagcacgcatccc

SEQ ID NO: 92634 - DNA, 398 bp, Homo sapiens
  misc_feature (1)...(398): n = a,t,c or g
catttgcaagtgcaagcggagacagaaggagaaaggctctatggaggatatgagtggcaagtgatacttattttcagggtcaaatttcagggcctctggtataaaccttgaggtgagttgagtggaacagagacatctgctacttaccagctgtgaaacattgggtaaactaattaaatatttttatcattagttttctcatctgtggaaagaagagaaaagtagctctcagagttgttgggatggttaaatgagataaaatattctaaataaatgagagcaattactgtcagtatctgcatgccagcactactacttggaaaaatcagaagttttgcttctgttgcaggtggtactctgaagtgccatgctcttggcaggggtagagataacaaggn

SEQ ID NO: 92635 - DNA, 350 bp, Homo sapiens
tcacttagcggcctcaaacggacaccatggtgcatctgactcctgaggataaaactgctgtcaatgccctgtagggcaaagtgaacgaggatgcagttgatggtgaggccctgggcagattactggaggcctacccttggacccaaaggttcttcgaggcctatggggatctgccctctcctgatgctggcatgcgcaaccctaaggttaaggctcatagcaagaaggtgctctttgcctttagtcatggtcagactgacctgcacaagggcaccgtcacttttcttcagctgattgagctgcactgggacaagctggacgtggatactgagaacttcatgctcttgggg

SEQ ID NO: 92636 - DNA, 429 bp, Homo sapiens
acattttctgtgacagtgagtaaccatactgagtggtagtatttaacttcttaagaacatgtacttcaaaggtaaaactgctatgtgaaaagtgcctaaaggcaataaatatcataaccattgttcttatccacatcaagttttacctttgaagtacatgttcttaagaagttaaatactaccactcagtatggttactcactgtcacagaaaatgattgtatttgaaatcatgtccaaagataaacagactgcttccctcctcctaatatcatattacaaatgttgcatctgtttttcagaggtgctaagcttggcaagatttccaaatttggggaatttatttattatcaaatttatttctattactagcttgattttctctattctatgccgtgttttcatggcgggttttatacttcttccaaat

SEQ ID NO: 92637 - DNA, 640 bp, Homo sapiens
tttaaattgttttctaaataaaggtcttataagtctttttaaaaaatttactccgaggttctttgtatttttgttgtgattattaaataaatgggtatatagtgtatatagtctgtttattgctgccgtataaaaatgtatttgattttgtatctgaccaccttactgaattttgtcctatgaaacatttatttgtagattcatctggatttttccttttacaatattgtttctctcttccttatgtgctaactttattagataactgccatttgaaactaaatagggttaaagggaatgcttttcatgttttactgataggatggtgtttgctccagcttttttagtagatactctatcagattaagagagtaacctcctattcctagtttggtttggtgaaagtttcttaaaatgaatgggttttacacccctaccatgggtgcaagcctagtctcagatccttgtgttggtattgatatttatgttcctactctagtttcagcttatgtcttgtttcatttttttaaatgtatgtttgcttgcttttattggcataggggctggttggcctcagaaaagtctctttctgtaagtctaacaatgcaaattatcttttatcctgagaaaagaaataatt

SEQ ID NO: 92638 - DNA, 358 bp, Homo sapiens
tgagaatagaagaaagtagaagaccacatgagtaccacatgagatcaactagtcatttcctgagactctggtttggattcacaaataataaaatgggaaataactgtattttttcatttattggttatgataaagatatttgcataataagatattttatatgtatgtaccatctactaggaggttatttcttagtgaaagatgtgaaggttatcattgtcctgcatttcactcattgaaaattgactgtttcatttgctatatgttcattcattccatatttctgagatatacatcctgttcctaaacaaaattgaaaattttatatcagttcttaaagtgttatattgatattccc

SEQ ID NO: 92639 - DNA, 238 bp, Homo sapiens
tcaacatctacttagcctgggaccatcagaaaccttgtgagggtcccaggctaactagatgttgacactctgactggccctgcaggagagggtggctctttcccctggagacaaagacagggtggctggagactgtgtcaacacaatttcttcggtgatatctgggagccaaagtactacgaggaagagaagctgagctggggctttcatggttccctgtggggtcgatgcggggcgc

SEQ ID NO: 92640 - DNA, 748 bp, Homo sapiens
ggaagccttcccattccccttcatctgataacatattaggccctgtaaccaccctggccataggcatgggtatattaccaggcctggccaatgatataattcatggttgccctaaaaagatgattggcccaatggatggtcatgtgaaccaacagagccagtcaccgaccttccctgagattgctacctggaagctctttctattacacttaggctgaggctgctggtggccatgttcctaccaggtaaagaagacctgtctgcagtaggaaggaaagaggctaatctccaaagagaagtagagagagggccacacaacagatggacagagaggaagagcgctggctctttttggtccctggttttaggtcctagttttgtgagttactcctgcattctttccagggaccgaagccagtcaatttcaccccccaacacagccacacacatcaatttgtttttggttaagctgatttgagcagtttccctcatttgcagctagaatgggcttgaggaatatgatccagatgttcaaagaatcaaagaggagaaatcaatatgaaaatggcatttcattcaatgagggtttgtgacaacaacctccgtaacagcaggcaaccaggcttgtgatacagcagagacactcagttgtgtggggtgctgcagtcataactgaaaaattgtatctgcctataagaaagactaaaacagaaaaggtgaaaataaaaaagtcatggtgttaagatgg

SEQ ID NO: 92641 - DNA, 655 bp, Homo sapiens
taaactgtgagctatggtacatttattcctcatcatgccccattcctctcttctaaggatttctttagacaatctccttgatgtctttgctccaaaatcaagagagaaataataataactgggctgtcacaaaagaacatcaggactcccaagctgaatttccaacactacaatatcaaagataatcacaagacaactgcagactatatcattaagtcaagtgggacatccctgagaaagtcagcttctgatggtgtggttccagggatgctttccatattcgtccagtgaaaacaacctgtgcttggaaagagggtttcctttggggcaatcgaaatgttctttgttgacattcttggaattattccttctaaccctagagtttcctaactttcaggatttaagagcctcatgccaaagataccccttcaatatatctatgtaagagttaggactacctggagtttctgtctaccattagatgggagaaaacttatgttatcataatacagtaaataacttacttgaaaatataatatccttcctgaatattcaagaatgactttaccgccaggcatggtgattcacacctgtaatcctagcactttgggaggccgagccgggtggattgtctaagctcaagagtttgaaaccc

SEQ ID NO: 92642 - DNA, 705 bp, Homo sapiens
acccaagcgttgaattcgtgttcactcacttgcctttcaaatagagatctttttaactccctcatcaaattctttcaggaattattgattttcttagttggtttcttttgattttatattttatcatggagatgatattaattccaggataaaatactgatataaggaattttcaaaattgttgctcattattttctaattttcatttagcctcttgcaacattgcaaacaaagttgataacattttacctttagattcaccttttcaatttacaaaacacttaatgtctaagacttgccaatgatataagctatttactatttaacacatttatagataaggtgtagagcattggcaaggttaaatgactttgctaaggtcacacaaccagacattagcgaagccagaccttgaacccagcattttttactgtttacaccatgttagttgtgaatgtataactaaggcaaagggatcacctcataaagttcttactgatgagggactgaattgtttatttgctatttcactgtaagaagctttgcttaatggataaaagcataagatttagactcaaaccagaaatccacctctactttatagtagtatggggacattggttaagtgatctcttttattcacaatcgtctcatctgcttaatggggataataataaatgtaggtttttctggaacaatttaaag

SEQ ID NO: 92643 - DNA, 487 bp, Homo sapiens
ctagcccctgtggtggaattcaagcaaacctgttgtccacagtctgtacaagcactgtgataggtttgagttaagacagtcacagtaggtaggaatacatgggaagggttttagtgtctatgtgtgcttttagaggtagaattgaaggaccctttgattggtcttagcagacagaaatctggtatgaatcctttaattgggcagtagctatagtatcttgagttattctgagtgtttgctcaatgtttctagtagtgatgatgacttgtagttgggatcctatgtgtaatttggcagaagaggacggtggcttcaaactttgtttgggatataaagttgaccccattttgaattattttaaaataatttgaaagattaatgaaaatgcatttttataactttcattattagtaaaacgtttgactttagaataatgctgtttttcaattaattattattatagtataatggctccaggtgaacttaa

SEQ ID NO: 92644 - DNA, 237 bp, Homo sapiens
ttttttttttttgaaaaaaaaacccaattccgccccccgggtggggggggggggggaaaaaaaacgggttttatagggactctttgtttcccgggttaaaaacctttttttccccccccccccccccaaagtggggggaaaaaagggggcccgcacaatttgccggggaagatttttgagttaaataagaaaaatgtgggttcttccctgtggtggcgcccggcctccgccctcacc

SEQ ID NO: 92645 - DNA, 600 bp, Homo sapiens
cagcgcgatgtactctacatccatcctgctggcgggcctgctgagcgtgaccgtaaacaccttccctgtgctgtccctccgaggcatcttcccagccctttacgagctacttgccagggaggataaagcggaggatggccccaacgaggagaatttcaccatggagcccttgcctcatgtacaccggtagtctcgtgcccgccgttccagctatgctttctcccaccgtgagggatatgcaaacctcatcactcagggcacaattctgcggaggggaccaggggtcagcagtgacatagcatctgaatccctagacccatctgatgaagaggcagcttcgagcccaaaagagtcacagtgacacctcaggaagatgtccttcctggggaagaagaagcaccagccacaggggcaggtgtcctcccaggaagtacagctcccccctacacctagctcatcattttctatggatagacaatccgctcttcatccagaaaaccaacctgccctccccaaatatgtgctcaccagcagcaacaggctatctgagtctttccaagagcaattgccaagggcacaggagaggtcattgtcacccaa

SEQ ID NO: 92646 - DNA, 566 bp, Homo sapiens
agaccgtgtggtggaattcctgataccgagctctggctgtcaatggtaggagagtgggagggggagaggaggcttgggaaagggaggatggacaacccttttcaacatgagtcctaggacagtgacgagggacctaggctgctgctgctcctgccccgaaaagaaaaagctccaatcataacgaccaggccatggctgggattgcctctgttgaaggtgccccatgtggcagggccaggcttctaggatggaccctgctaaggccaaggatagagaagccagcacctgctgcagcctggcctggtggtgggggtgggagtgctgggtcagggctctcaaactaagctcaggtcctgctggtcccctggcttgctgggtggcaaagaagaagtctttgagcctctctgggcctgtttacccctcagaaaaaggagctggattatatgttttttgagacagggtctcactctgtcacccaggctggagtgcagtggtgcaattttggctcactgcagcttcaaactcctgcttcagcctcctgagtagctgggactacagatgtgcgc

SEQ ID NO: 92647 - DNA, 452 bp, Homo sapiens
  misc_feature (1)...(452): n = a,t,c or g
caatgaatcactgcatgngcgnggcanngncagacacagcagagtccttactgtctgagcccattcatatgaagttcaaaaacaggccaaacgcatgtatagtggccaaagtcaaaacagggtgggtagaatagcagcttctttctggaaattaccatgaaagaactttctgggtgacggaaatatcctatatcttcatctgggtagtggttatagatacatttataggtaaaatactcttcaggctgtacatttttgtttttattgtgtatgacatatacctcagttacacacaaaaacccattatgtacctaccagaatggttaataaaatttaacagattgacaattctaagccttggcaaagaggtggataaacaggaattctcacacactgttggtaggaatctaaactagtgcaaccactttggaaaatagtctggcattaccaag

SEQ ID NO: 92648 - DNA, 473 bp, Homo sapiens
ggaattcgccagagctaggaacagctccaagatggtctcagccaacagttctgagccctgtctgggtcccctccccttcccagggactcaggaggaagctttggcccctcttcccagagagaaagagcccacagagccggaggcactgtcccagggctcctggggagcttctgggtggggagatgctgggttgggtgtcgatcactggtcactgtcgcccattctctgctttcggggagcaggggaatgtatacagtttgaaagacagggctcagctcccctgctggactgaggaagtcgaggcccagggagggagaactggggtctgtctcctccatctgtcaccctccttggtaaaatttgtgagggtcctggagccacttctcacccacgccacacctacctcggctgggccttggccactgcaacagggtctccattggcatgtgagcctgggccctgccagcaagggc

SEQ ID NO: 92649 - DNA, 485 bp, Homo sapiens; identical to SEQ ID NO: 62847
  misc_feature (1)...(485): n = a,t,c or g

SEQ ID NO: 92650 - DNA, 397 bp, Homo sapiens
atctgcttagcttctaaatatatcatctttgatttaatcccagccctacaactttggaagagtgaagtattagttcagggatccagtgagagacactgaagtgctaaaagccagggctcgtgaactatggataaaaagaacagacatgggaacagcctggacatggcatcagagattcatatgacaggcccaatgtgccttattgagaacactactgggcgactgatggcgaatccagaagctctgaagatcctttctgccattacacagcctatggtggaggaggcaattgcgggcctctaccgcgcatgctgattctacctgacgaacaatctggctggaatgaaaaagggcttgtgtctgggctccacggagcaggctcacactataggaattg

SEQ ID NO: 92651 - DNA, 457 bp, Homo sapiens
taaataccaagccagaaatgtctggctcagaaatctgtaaagaagtaggtcctgcataagggaaaactcagcagatcaccaggctctggaaaagatattgcaggagttggtgaatgaaatttaagagaagtcttccatattggagagggcttttaatttatgtggagtagcttgttttcaacttttggtttattgtggtgggtgagtgtacatgtaattaatattatttactttgtttttctctatttcaaaaagttctggctctttcacttagtagctgtataatttggggaatgttttgtctttcataaatggatataataatggtatatggtatgtagggtcattgtgagggctaaatgagataatatatttaaaaagcatagaacatcattcaagaaaaaatatctgtcatttctgtcatcataattatcctaagtatgcataagctgctctt

SEQ ID NO: 92652 - DNA, 811 bp, Homo sapiens
  misc_feature (1)...(811): n = a,t,c or g
ggcacgagctgtcccccacgggtggccccaaagccagctgcccatttaactgggcacagcatggacactggcctcagctctcagccttctgaggaggaccagtccaccatgcctgaagtcaaagacctctcagaagccttgccagaaacatcaatggatcccatcacgggagtcggggtggtggcttctcggaaccgagccccgacaggctatgacgtagttgcacagacagcagatggtgtggatgctgacctctggaaagacggcttatttaaatccaaggttaccagatacctgtgtttcacaagatcattttccaaagaaaatagtcatctggggaacgtgttagtagatatgaagctcattgacatcaaggacacactgcctgtgggcttcatcccaattcaggagacggtggacacacaggaagtggcttttaggaagaagaggctgtgcattaaatttattccacgggattcaacggaagctgcgatttgtgacattcggatcatgggccggaccaagcaggccccgcctcagtacacgtttattggggaactgaacagcatggggatctggtatcgaatgggcagagtaccaagaaatcatgactcatctcaacccacaacgccttcccagtcatcagctgcctccaccccagcccccaaacttcccaggggacatcttccttaacatttccttgccacctttccgagggcagggaacagcacccgggacgggattacggagttaccagcattccattttgttntggccntattcagttttttcccagaaggcttnctggggg

SEQ ID NO: 92653 - DNA, 588 bp, Homo sapiens
aatagctgagagggcgtcaccagcgtgtcggcgcctgcggttttcttcgggctgtccccaggcgtcgtgcccgcgtccgtcacgcgcggtggcttgcaggggcgcaccgcgacagccttaaaggaaaacctgttagggacaagggctgctgtgggcagcgagggttatagactcatgtgtgttctgaattctggtgggggtagtgatggacgctgacccagttcacagaattatctgactggcgaagtaaaggaaaaaaggtcaaggtgaactgaagaaaataagtctttccccaaaggaggtagaagatggggaagatgagatgtcagaagctaaggacaatggcagtagagatgaggttcttgtccctcataagaattgcaggaagaataccactgtcccgggaaagaaaggggaggaaaagtctctggctcctgtgtttgctgagaagttaatatcaccaagcaggaggggagccaagctcaaggaccgtgagagccaccaggagaatgaagacaggaacaaacctatcaaagaaacacctgattaacaaaagaaggaaatggccaatcatatagagtcccctgg

SEQ ID NO: 92654 - DNA, 467 bp, Homo sapiens
  misc_feature (1)...(467): n = a,t,c or g
nattgatgaccactcgatgagcgctgnggaanncagggaatcccagtagcagagacatgcaggagcccagcttctccatgtcctggactctctatctcatagtacatggggtaaggtctgtggcattttctcaagccctggataggacagccacaattcagccatgtgacctctctcctgagcataaatacaagcggcccaacttggaaccacttaagaagcagaaaccaaaccccagcgagatggaaagcacttcacgcatcatccagctcaaccccctcagggagccaaaaaacaaaataaaataaaataaaataggctggggccttgcccaaggtggcatagtgaactggtgactcagccaggagccaaagccaggcctcctgaccacaagtctggagctctgtaccctgtgctgcaggccctctctcctgatgaaaatctccacattccagatgaggaaaagg

SEQ ID NO: 92655 - DNA, 1555 bp, Homo sapiens
ttttttttattattaaataaaatcattttatcatatggctttcaaaagacaatgagtgaaaacttaaggcaatacaataagtcatatttatgagtacgttcaagaattcacaaaaaagggtacaattctggcttctctttaatcattaaatttcagtttttacaaataattcaggttcaggttttgagggggaaacagttcttgtattattacatgctcatttttcttctgtaaatgactctattggctagatttacaaacattgtcacagaaacaaattttttaagccatagatcactgcatttatatttacaaaaaaagccataaacatgcatttctcctttattaggacttaaatagatgcttgaatattaaggcagtgatgattctaaaacataatgaaattctaagttaaggctttatgtttcttttgaaacccacactcataggcaactgtgaccaaaccaaactcttacctactaggttgagctcatctgcccgggatatgttatttatccattaccaacacttcttttgtgtcaaatgtatgggataggaattagtagcaaaaccatcaatttactttaatgaatcattggtccccttactaggttttgaggatttagctttcagtaatacaggcatgtgccacagaaaggagcatgtcgtgtgtgtgtgtgtgtgtgtgtgtgtgtgtgtgtgtcaatgtggagaacttacaggctgcactgattcctacttgactggaacttagccaacaattaagaatccaggatctcctaaatacagaaaatccccaaagcatacttgatcatgctcctacctcaaaacacacaaagcattcttgattattgaagcaataggtcttcaccttgttttctttgaagactggtattattcacttaagaaaaaaaaccaaaatgcagaataccatattttagatgaatctatcctataattgctagcctcaaggcacaagtaatatccttgctagatactttttcttattcaaagaaaagataaagaatggtgaatggaaggaaattcactttaaaataattgtagattgcactcctgccctatcaagcttagtagaagtgcaaagtattgaaacctaatgggggatgcccttttcccactttttttcttgtttaattttagagtgacaaaactcagatccagcttgtggatgcacttggggaaacagctcccagagccccccaactctcgccctactgtggagacccagaaaggatcttcataggacacaccccaagatgaagtcaataggcacgtttccataactccctgttcccaaggtttggataacctatgctcatttagcaggaacactacactacgtgcttgttgctggcgactttttttttttttttttttgagatagggtcttgccctgttacccaggttgggagtacagtgccaagaccatggctcatggcagccccaatctcctcgagtgatcctctcacctcagccttccaagtagctgggatcacaggcgcatgcacctgtgcctggctaattaaaaaaaaaa

SEQ ID NO: 92656 - DNA, 344 bp, Homo sapiens
cttactgctgttttaccccctgaagcaacctgaatccttctctggcactttctttcttgactttatgcattgccttttttgtttttcaaactctgggcatgtgtctttttcatgactaaaatgagatgtggaaaagctgtggccttctaacaaatctaggaataagtcttgctaccccccagtttaatttgaagaaagaagctggaattccaacccagaacccagaaattttgacctaaatctcctcagtccaaaataaaaaggaaccaggaatatgcagaacacttgttcgtaaaagagcttagtacccatgcttcccactataagaaaggaagcatgggtac

SEQ ID NO: 92657 - DNA, 924 bp, Homo sapiens
cgtcgcgtaattccttacgttcaactaggccaggggttggcaaactgtgccctctgtgccaaatcagcccacaacctgttattataaaatgaagttttactggaacatagtcatgcccattcatttatatattgcctgtggctgtttttccactaaaacagcagagttgaatagttgtgataaagaccatatgggctacaaaacctaaaatatttaccatctggccctttataggaaaagtttgctgactcttgggctagaccgtctacctacatgaccatggttggctacagctagcaacaaattgacttagaaggatacaaaataaataatagagcagagtggtgtctgcaagtcttcacagtagactcagagcttaggtgtgagggaatgagacgacacagatgggtgtggaagccacctggcctaggagccccattcccccaggaacacatccagtttcaagaatggcgcagtccagatgtgttgtactaatcacaggtcataagcagtgttgcctgtaatatagctgacattcgacaagatttctaaggaaacagttctggaaagttaacctgtggatgttaagtcctgcttcattgttgggcacttacgttgttctcaatttagtattatcccacataacgctgctctgttgcttcctaagggtgcattcctagggatggaattttggctgctgcttcaattgtcataagctctccaaaagatctttattagcttacagctccttccacccccgaatcgagtcaaatgccaacaaatcctgagctcaaagactggagcatgcagtcggtccatgaggcacatgaggccggaaataatgcttccctgcagaaaaacttgtggctgtggcctgggatcaagagacccttagctcacacaggcactgaactagatacaact

SEQ ID NO: 92658 - DNA, 572 bp, Homo sapiens
aagcatggagtaaaatacacctgagttttaattgctaacattaaataaatgttgatatatggcctcttgaggaatatgttatagataagtaagtggaaagagaaacgacttcaggtcatgctagttaagaaaaatatatttgaattcagcatttatggataattcagttagtatatagtatgtgacagttgaatttgtgctgtatacattgtcattgacttaaaaattaacttttactctaatgtgtagtatgccatttttatttttcaaatatgaataagaatatcattatataaataatataaatattgctaatatatgaaaaaaataaacactcattgtctttcatcctagtacaaggactaataccatcgtaggatattttcatcctggcttttttttcaaagttataatcctaataggcatgtaagttagtatactacttctgcttaatgttatctcattgcgtatttatagttgtctgttactgtagtcatcataatcttcagctaaagtttatgatagattcactggagcgatgtaacatctccttaaaattccctgggacttac

SEQ ID NO: 92659 - DNA, 769 bp, Homo sapiens
ccggtccggaattcccgggaaagaaactccaacaccagcagccttaaagtatatttttagccagaccagttcagacatagctagaattctgcttctctaaaaataaaagattctgcctgtcaagaagataccagtgaaaattctcaccccatgccaacagggctggattgtgggagagacactaggtagtgtacgtcagagcaaatagggaacagttgaagtaaggagactggtgttgggggtcagccaagactttgtatctccatctagtcaacagatgtttattaagaccattccttgtactagaagctgggaatgcttaaaaagatatagcccttgttgtcactgtcttatcctgttgtctgtgtcgtcctgtgttgtcatagccccattatctgcataggagacagtctttagttctaaaatgggatattagaatggtttaaatctgacagttgcattccctgcaagctgcaattttaattagaatcctggtttagttgaaggaattcaagatttgattgttaaatcaaatgaatctaatgaaagcactttctgaactaatacacagtaatatggttgaggccacgtgcaatcccagcactttgggaggccgaggcgggcagatcacctgaggtcaggagatcgagaccatcctggctaacacgatgaaaccccatctctactaaaaatacaaaaaattagctgggcatggtggcgggcgcctgtggtcccagctacttgggaggctgaggcagaagaatggcgt

SEQ ID NO: 92660 - DNA, 467 bp, Homo sapiens
  misc_feature (1)...(467): n = a,t,c or g
tcagacacgatgtcagatatcatccctattggagttaataggggtccggcacgacaatagttcttaatcaggcttttaacataagtatgttgaagaaatgaattccatagacattcaaacagcttattacttctacctaatatgatttggtgcgcctacctgaactcctaaatcaagtcataacaacaattactctgatgttttatttttaagataattgctttacgactagattcattttagagaacagtttcactatctagtggaaatctttttgaaatgccatctatacacacacataaattaaaaaaatatttctttcaaaggctncagctaggtgtgaataattgttcaatagcattatcaaagatacaaaaaaggaaaatataaaatatagtaccatgcttattcgaattccaccgcactgactagggtctactatnggcnnnnccgaggggnctccattn

SEQ ID NO: 92661 - DNA, 406 bp, Homo sapiens
  misc_feature (1)...(406): n = a,t,c or g
acctagcgtacggccactctttcgattgaatctattaaattacactgaagctatccttccaggtaatgcagctagttgctgatcagagcattctttatattagacttaagtattgttgcttattatttaaaagcagaaaagaaaaaccaaatggcagggctgagtaatagttacttttcgattcttttgatacatatttttaaactgaagaaatcactttatattcagtcttcttctgtggactttttgctatttgcagataaagaaggaattctacttagtatatttttactgcggnctattaaatgtcattaaacctatatctaagaggaaaggactaactgaaataagatcaggaatgtgcaggacctgttgttcatacctcactttctgaagacacttcttt

SEQ ID NO: 92662 - DNA, 1389 bp, Homo sapiens
tttcgtcgggcgcggggccgcgatggatttccagcagctggcggacgttgcggagaaatggtgctccaacacgcccttcgagctcatcgccaccgaggagaccgaacgcaggatggatttctacgccgaccccggcgtctccttctatgtgctgtgtccggacaacggctgcggcgacaattttcacgtgtggagtgagagcgaggactgcctgcctttcttgcagctagcacaggattacatctcctcctgcggcaagaagacgctccacgaagtcctggaaaaagtcttcaagtctttcagacctttactggggcttccggatgcagatgacgatgcgtttgaagagtacagtgctgacgtggaagaagaggagccagaggcggaccacccccagatgggggtcagccagcagtaaatctgggggctcccctgagaaggagagtgagccccacagtaacctaggtggggtcactgcccctcctgggttagcattttgcattagcacttcgaaataggacatctggctcccagcatccaaattaaaatgaaatacctttttaacgaccacaaaatatctgtgatgagctttgctcagaagtgacctgaatttcactcccgctttcagtggggtttctatggagttgtcttggtagcctttgccattttgaatttagagtccattttgtggctgactattctcttaagtttatgttggagaattaacattcgctgactcgaatgtagagaactctgaatgtattaaggataggttttgaagtcctcacaggtgaccttactgagggaaagcatggcagagaagaaatgcagtctgcactttttatgtactttttaagtgtccgtaagtgaaaggttttgcttataaagcatgaattttaatatctagtcattaaactgcacaagtgcaaatacaagggcaggaaaggataatcacttagctttggactaagagggtaagagaggcccagaagcctttaagtgttttgccattactgagttacctgggtatgtagcgactggttcgtggttaggtgtaaatgttacttgcttgttcgactgtttcaaaacatgctaattccaaagccacttttgaagtctatagtggaaaatatagatggggtgaaagatataatgtattgatttttaaagctgtttataagccgtcccacgtataaaatgaaacattttaccttctctctttctaatgagatggccgcttgttaaatcatgaaaacatccagaattcaagtgccgcttaaactttgaagccatagataaatttgttagaaaagtaagccaggattaaaagtttttaaaaatatggtagaatccttctttactttttaagtcttttatttaaaaaaaaaa

SEQ ID NO: 92663 - DNA, 624 bp, Homo sapiens
tttgccatcccttccctagtggtatctaacattctgtatgtttgtttgtaaataagtcacagcaatcatgcttatattactcatttatcttttattagaggcgagtccaaacagaagacttttctttgcctaccaccttgtacaaacaagtaccaatggatgtggagcccctgtgaatggaggaacatcctaccaagaataagggtcagctcatttgaaaataagaacatcctcctgcagtcattgtaggataccacatctgttatttctccctgagatagcaataatattattaatgataataataccaataaaagtagtatagactgttatatagtagggcacagctgtcctctgtttgtacttcagcccaaaatatttttagatttgttttcagaataccttttcatccattgctttaaacccgtcccaaatctaacttcatctttagctccttccaccttaaagagtatggtcttactccatttagtgttgctataaagaaatacctaaggctgggtaatttatgaagaaaaaaaggcttccttggctcatgattctgatggttggcaagctcaagattgagcatctgcctcagggatgagcctcaggctgcttccaaat

SEQ ID NO: 92664 - DNA, 390 bp, Homo sapiens
  misc_feature (1)...(390): n = a,t,c or g
cggacgcgtgggcggacgcgtgggcggtcgcgtgggcggacgcgtgggcggacgcgtgggcggacgcgtgggttcagcatttcagataaggacttaagatgtaaagatattgttacaggatgatgcattgtattttctgcattgcatgaaagaatttttattgaaaatgaagtgacatttcaaaggaagttctattctaattatgtttctgcctaaagtaaacttcccagattttagaaaatgtaatcttttaaatttcagactggttttcccagtacttttataatcccatgttttgataaaatattgaattatcattttatattcacaaaggcaaataactagtgtatgagaatgggataattcactctcactcttgaaaatatatcn

SEQ ID NO: 92665 - DNA, 388 bp, Homo sapiens
aagcccctgggttcacagctcattaccatttactggacctggaggagcctctttgtggaggcagcatggacaggtgtccagtcccaggagcaagtggtgcaccctgcggctgaggagaacaggccagggtcctcggtgagggtctcctgcgaggcctctggaggcaccctcaacagatatgctatcagctgggtgcgacaggcccccggacaagggcttgagtggatgggaggaatcatccccgtgtttggaacttcttactacgcacagaatttcctgggctgagacaccattaccgcggacgcatcttcgcgcacatcaatcatggaagtgaggagactgagacctgaagacacggccgtatattattgtgctgacaccgagagga

SEQ ID NO: 92666 - DNA, 415 bp, Homo sapiens
tttcgtggctacggctggaggagccgggccgaggccgcggcggaggccgcggctggtactgggagggtggcagggagggacggggaaggaagatggcgacgtcgggggcgaacgggcctggttcggccacggcctcggcttccaatccgcgcaaatttagtgagaagattgcgctgcagaagcagcgtcaggccgaggagacggcggccttcgaggaggtgatgatggacatcggctccacccggttacaggcccaaaaactgcgactggcatacacaaggagctctcattatggtgggtctctgcccaatgttaaccagattggctctggcctggccgagttccaggtgagtagaccccagccagggaggagtggagtttcttaggctgcttcctctgctgacttctgtccttt

SEQ ID NO: 92667 - DNA, 810 bp, Homo sapiens
  misc_feature (1)...(810): n = a,t,c or g
cggccgcagacgtggttttttttattttttatttctccgtcttaatggacccagaagttgacagctttgcccgctcttggatcaccaagttccgatagtgttcgacacatggatggtcccacatacactgcccgttggtgaagttgaaatactaaatgtcacctgtgatgtcctggcatggtttccactctccaggcagtggggccacgatgccctctcgcgccagccacatcagttctggttccttgatgggatcaataccaatctcccgggcaaattcaagaatttcttgctcactaggaatgtaggtctcatcataatcttcttccagaaccagctgatctcctatgcggaggggtcgtccagccatgactcatctgggctcaaacacctctcctccttagcccaatatactctcaggtcctattctcattctccagctctcagtccaaataaagttatttctcccgccagacccccagcccgggcccggtggcccgctcaggagccggcgagatttcaaacggaggaactgtcgcctggcagtccgattttcacttcttccctcagtccccgcccacactcgagcgcatcacgctcgtaggctcgagagcgtgcctcgggtcccccgccacgctcgctcccttccccgccgcccaacccctccctcgatgaggtcctcaactatcccccaccccggaaggctccgggcgaggctccgggcgaggctctgggcgaggcgcagctcccccaacacgaaatcgtcgacccgggaatncgnnccggtngcgcagtgntacggatttcaaa

SEQ ID NO: 92668 - DNA, 411 bp, Homo sapiens
ctggccgacgctttatgtctttccgccgccgccaccggagcggtgcgtcccggggctcgagcgcagccgagtacccgccgaaggctgtccccatcagtgcgtgtctgctgccgggcagcggcagcatccaacctgctttattcctcctgcctgcagcgccacagcgagcgagcgagcgaggagggggagagagggagtctgtctgcaaagtgctgctccctggtgctcagaggcggctgctccagctccaactctcattcatttcgccggataacatgagagatcatggccgccttcgtgcttctcagctatgaacagagaccgctgaagcgcccccggctcgggccgcccgacgtctacccaccggaccccaagcagaaggaggaagaacttactgctgtgaatgtaaag

SEQ ID NO: 92669 - DNA, 419 bp, Homo sapiens
tttcgtccgccctgctccggaccgggctttgcgctgtttcccgagagccaagagggtaatcatagcctcctggagtctcacatgcatgggaataatgaatttatttggactagaaactaagacctgctggaatgtcaccagaatacaacctcttaatgaagttcatagctgtgaaggattgggagatcctgcttgcttttatgctggagtagtctttatttcgaaaggactaatgaagagattgttcttcgtgtctggagcataacctgaggatgtcatgcccaaagctgtagcggtcatcttgtgaccataagggaaaggccataaaaatagcagatatatctggcctaccattcttctgctgctgatacaatgccaacagggactgtattattcctatttcaagactatagaggaaa

SEQ ID NO: 92670 - DNA, 387 bp, Homo sapiens
tttcgtgaaatacgttacagcacataaaaaatgctattcagggtcagcaaagcctgagtcctgtcctctcgctctcctccctggacagcatgagcttcaccacttgctccaccttctccaccaactactggttcctgggctctgtccagccacccagctatggtgcctgactggtcagcagtgcagccagcgtctatgcaggcgccaggggctctggttcgcggatctccgtgtcctgttccaccagcttccgcggcggcttggggtccaggggcctggccaagtggatggcccagggtctggcaggaatgggaggcatccagaacaaggagaccctccaaagcctgaacaaccacctggcctcctacctggacagagtgaggagcc

SEQ ID NO: 92671 - DNA, 427 bp, Homo sapiens
atgaggtctggcactaattttatctgtttcctaatgtggcttcacgtgccccaacacggtttattaaaacgcccatcttttgccccttttgtcgtgtactcaatttccacatgcagttggcctatttttggaaattgtaccctgttccttcctccattaatgcctgtagtacctcccgtttaattatagaagcttctcaaatgttttaatctcctacagggccattgtgttctcaatctttgtacatatcagaattttcctctttgccgcctcatttggaattcttttccccacagcaattttcgaatcgattcgtccagtttgcctaaaagaaattctgtgaactatctttattggatcacatcaaatttgcatattgacttgggtcattctgacacctttaggattgtatcagtttagatttttt

SEQ ID NO: 92672 - DNA, 413 bp, Homo sapiens
aaagaccttctcttgggtaggatagtaagacagaaatcttagagaccctggactcttatactgaagagaagcgtggattccatcacttggacagttatggcccaaaagctaaatccagcccaccacctcctttcagtgttcttgcctacaagctaagaatggttgttagatttttaaatgattggcaaaaaagaatcaaaagaagaatatttcttgacacacaaaaattctgtgaaattaaaatttcagtgtccagaaaaaaagctttattggtcctcagctgccccatccctttctgtgtcgcctgtggctgttttgctgctaagctggcagagtggaatactttgacacagaccctgtggccgacagagccaaaaataattttgcaatctggcccttgacagaaaacattt

SEQ ID NO: 92673 - DNA, 402 bp, Homo sapiens
ccaatccaccaaaggtttatttcaaaatctttgcatcaggcaaatttttaaaagagaaagctgacgggtgttgggttcctcttgtgtgacttgccccaggctaggagctccaccttcccttaaccttcacttgtttccctgtggaacgaggctctcacatgagtgcctgagaccatacttggtttcatccccttcagagcacacttctcagtgcaaggcatgtgtgaatggtgagactgctgctctaacaagaaataccagcagcaaaagaagtagccaggcatgtctaactaaatcccgatgttcgattttcacataaggtagtgtgtatgaaaggcctctgaaaaatgcacagtgctatgcaagtggaaggtagtgcgatggttatttcagactacgctg

SEQ ID NO: 92674 - DNA, 407 bp, Homo sapiens
cacatcggcgtcatatgtcccctctagcagcttcaccatctccaaggtacatggctgccaagtgcagggcggtgtagctctggcctcgctgttcccaggcagcagaggctcgttggggaagttgctcagcatggccataagctccagcctgcagtgctaggtgcctgcgcaggcaggtgaggctgtgatgaagcccagagtggccagcatgccggctggcatggggtcccccccctaagctgtcccctccccataggaggccgagagcagccagccgtgctgcctggtccagctcacccagccccacagctatcctccgcggacgggaaagccagcgctgcgctgccagagtctctcgcctatgcggtgtcctcggagaaggagaacccaggctgctgcctccagaa

SEQ ID NO: 92675 - DNA, 474 bp, Homo sapiens
  misc_feature (1)...(474): n = a,t,c or g
tgttccggnncttctgaaaaccttagtnataccgtagaaacnncnaannnnnngaaggnnggaagnggggctgtatcttctgtctttctaaaccggtccccttctctttttagtgggttgaatcgctctgagtctccaaagcgagagcgcaatgactttgggggcagcaacacccagctgtacagcagcagcaacaacctctacatgcctgactactcagtccacatcctcagcgatgtgcagtttgtgaagatcacacggcagcaatatcagaacgcactcactgcctgccacatggacagctcacctcagtcccctgacatggaggccttcacagacggggactccactaaggcccccacaacccggggcacaccccagacccctaaggatgaccccgccatcacgctcctcaacaacaggaacagcctgccgtgcagccgctcagacgggctgagaagccccagcgaggtg

SEQ ID NO: 92676 - DNA, 406 bp, Homo sapiens
ttttttttttttgtgttcaggtttctatttattttaaaagtgacttacgtatttttctcacaaggggggatgattgtagaggagtttagagcctgcatcgtggttccaagttagcatcaccgttcctggtccttccatctttctgcttagtcatatttaacttgtgtttatttcttcatgatcagaatatgtgtctttctcaactatcatatgtatgttcatcatgacatatgtgctcatgaactcggccaggaactctcgcgccatcttcctctcatcttcctcgcatcatatttcctggatctttgctatcacggaccaggagaccattttggagccacgggtggacctgatacagtggcccgagctcatggacagaaaggagactcaagtctgccctcgtgcc

SEQ ID NO: 92677 - DNA, 420 bp, Homo sapiens
  misc_feature (1)...(420): n = a,t,c or g
ccccagccttgggattcccaagtgttttcattcagtgatcaggactgcacacagaggactcaccatggagtttgggctgagctggattttccttgctgctagagaaaaaggcgcccagngcgagatgcacctgctgaagcctgagggcggctaaatagagccgggagggtcccttacactctcctgcgcagcctctgcattcaggttcagtgccgcctggatgaactgggtgcgccaggctccagctaagggcctgaaccggagtgcccatataaaaaggaacagtgccggcgtgacaacaaactacgctgcacccgtcaaaggcacattcaccatctcaagagatgaatcaaactacaccctgtatctgcaaatggaccgcctgataaccgaggacacagccatctatgagggtgcaat

SEQ ID NO: 92678 - DNA, 399 bp, Homo sapiens
tcatcacactgagggcaccgtgatcacagggaaggagcctgggacctgatgtcatcacactgagggcaccgtgatcacagggaaggagcctgggacctgatgtcatcacactgagggcaccgtgatcacagggaaggagcctgggacctgatgtcatcacactgagggcaccgtgatcacagggaaggagcctgggacctgatgtcatcacactgagggcaccgtgatcacagggaaggagcctgggacctgatgtcatcacactgagggcaccgtgatcacagggaaggagcctgggacctgatgtcatcacactgagggcaccgtgatcacagggaaagagcctgggacctgatgtcatcacactgagggcaccgtgatcacagggaaggagcctgg

SEQ ID NO: 92679 - DNA, 480 bp, Homo sapiens
  misc_feature (1)...(480): n = a,t,c or g
cgcgcccnttttgagtttgtaggctagtgcgggaactcggaaggctagggcggngcagctggaggaggctgaggggctggtggtacagaacagggtggggtctggacgactcgggacgcggttaggggcagaggtgcagggagcgcggaaggacagccgagggggcgcacggtgcggggtcgcggaggcgcggaggcgctgggggccgcggtggcgatctcggaaatttcccctccagtaaacatgggatacgaacggagcagcccccgagccaccgccccatgcagggagaggaggtgggacagaggccaccaggcccggaacggggcgccctgccttgcagtggagccaacagtccgccctccggagaaataaagagtggagcntangccangaaaattttnnnnttttnnnaatntattattttatttttaaanaaaaaatttaataaattgaagaagggcgtctttttttttatgg

SEQ ID NO: 92680 - DNA, 476 bp, Homo sapiens
  misc_feature (1)...(476): n = a,t,c or g
attcggacactattccagcgtggcggaattcctccagttcctccgaccgcccgtgcgctgggagggaggccgagcccggngaacgccgcgtgccctgcctcgtcccccactgtggccgcgccagctccatcccgggccagccgcgtccacgggccccctcccgagtctcctcaggctctcgcctcccctacccccgtgggatgcccaccgcccgcacccacgcccgagcctggcggcagcagccgccccccacctgaagggagccggaggtgacccaggccgcgggctcccgaggcccctgaagggctgcgcgtggggacccgccatgcttctgggttccgaacgggggtgagctccgtctcctcacccggccccgcacccgctgggcctggggacccctcactccccgtgcccgcccctccgcgaggcagcagaaagcgcccggccggggcctctctctactccatcttgccaca

SEQ ID NO: 92681 - DNA, 565 bp, Homo sapiens
atgacgggtggggaggaggctgtggactggctcgagaagtgggatgtggttgtgtttgatctcctttggccagataaagtgctggatatagcattgaaaacggagtatgaagaccagttagaatggagggtcagggaggccccccagccccaaactcaccacctggccgtggacacctgtgtcagcatgtgggacctggttctctccatcgccttgtctgtggggtgcactggtgccctgcccctcatccagtctcggattgggggaggctgggagtgtgagaagcattcccaaccctggcaggtggctgtgtacagtcatggatgggcacactgtgggggtgtcctggtgcacccccagtgggtgctcacagctgcccattgcctaaagaagtaagtaggaccctgggatctggggagggaatggctgtgtcccacaggaataacagcgggatgcttcccccagggtcacttctcaggtgaggcttcagactaaaggagagagggaaggtcctggcccaggtcgcacccggaggcagagctggggctggaccactctccccatg

SEQ ID NO: 92682 - DNA, 839 bp, Homo sapiens
taaatataaggagcaatccatttgctctcaaccagctcttccttctgccataatagtaattcactagcactgttgtagttgtatatactttttcagtggtactgtgttgaggatcatttgaaagatcttaatacatattgccaaattgctttctagaatatgtttaccttgctttttattagaaaatctatatttgatacccatctctataaaccttatgttatattcttaaggcatgaatcagactttgaattaaaaaactctactctttacctattttctataagcagagttgcccttttcttattgacataaagccactggtgtttttgagtatgttctaaaacagcagatcagttcttcttgtgagttctttggctatccagcttaaattccatatccttttaaagaagcgcattctaaatcctttccttttaatattttagctgtgcagaagagagcattgaatacaaatggcacttgttcaggaactgggtcgataagctgctaagcctctctctgtatgactatgaatttaatagaaaatattttctaacttttggtcttaacttttctgggaccttcaagcttaagaatccagaccccttttgtcttttccagccaaggaggttttaacaaaatattgttggaaaggggggcaccctgaaaccattcccccttaaaaaccgctttgtaaacccccaagaaatagggcccggaacccctaaactctcacctccagggatctcgggcccccattattggtggaccacggccctcacacgtacctcgcggcgccccccctgtcacttcatccatatgaacgcctcgagcccccc

SEQ ID NO: 92683 - DNA, 610 bp, Homo sapiens
caaagcctcaggccaggggctctgtttgccctttctctatggccctctctgtgcacttaggatggtgctctgctgactggccggcattcccctgcccttcccttgcgtcttcctgtcctttcacccagcacctctttactgagtgactgcgatgggggctgacatgctctgccaggccatgttatttttatgtgcctgtgtgtgtgtttggctctagggccagatcataatggcctgaatgtacccagcacttcttacatgctgcgctctgagagctttccctccccagtgccattcatccttgcaacactctcacaggacaggcgctgatacaatctgcattctagagatgtgggaactggcacagagaggacatgacatcagcccaaggtcacagagaaagatgagcagagccagagttaaccccagctggcttccagaacctgtgttctaatccctctggtgcaaccgtctcccacacagagctggtttggatcccgcctgacctacatgttagctgcatgacccaggacatgctctttggcttctctgcctaaccctcaatttcttttcttttcttttttttgagaaggaattcttttgtcgcccc

SEQ ID NO: 92684 - DNA, 1238 bp, Homo sapiens; identical to SEQ ID NO: 62800

SEQ ID NO: 92685 - DNA, 407 bp, Homo sapiens
taataagtcaacaaaggagataagatagaatcacaaaaaaatactcaacccaaaagaaggtggaaaaaggaacaaataagtagtgaaactaatagaaaaatggcaaggcaatagactgtaatcatatcagcaatcacattaaatgcatattatctaaatatcccacttaaaaggcaaagattgtcagataaaaagcaagactgcttttggacctggatgaacaggaggcaccatcacggaagttgactcctgccacaacaatgactgaaaggttcaacaccaggaacccaagagccaggacatctactgaaggctgttggttaagctgtatatgtttctggccagaagaaactctaccttcaaccaagttgtggtgaagaggttatttatgagttgcacccaaatgc

SEQ ID NO: 92686 - DNA, 396 bp, Homo sapiens
tcgagtgccgggccatgcccgtcctgcagtagactgtctgctctttcaacatgaccgatgccgctgcgtccttctccaaagacttcctgacaagtggagtggccccccccatctccaagacggcggtatcgcccatcgagcgggtcatgctgctggtgcaggagcatcatgccaacaagcagatcactggagataagccctactgaggctttataaacggcggggtccttattcccaacgagcagggagggctgtccttctggcgcggctacctgggcaaagacatcaaatacttccccacccaggatcttaacttcgccttcaaagataaatacaaacaaatcttcctgtgtggtgtggacaagagaacccaggtgcggcgctactttgcatgga

SEQ ID NO: 92687 - DNA, 683 bp, Homo sapiens
tttcgtcttcctggcctgggcgctccggtggcggcggaggtgcgcgcggagccatggttatcatgtcggagttcagcgcggaccccgcgggccagagtcagggccagcagaagcccctccgggtgggtttttacgacatcgagcggaccctgggcaaaggcaacttcgcggtggtgaaactggcgcggcatcgagtcaccaaaacgcaggttgcaataaaaataattgataaaacacgattagattcaagcaatttggagaaaatctatcgtgaggttcagctgatgaagcttctgaaccatccacacatcataaagctttaccaggttatggaaacaaaggacatgctttacatcgtcactgaatttgctaaaaatggagaaatgtttgattatttgacttccaacgggcacctgagtgagaacgaggcgcggaagaagttctggcaaatcctgtcggccgtggagtactgtcacgaccatcacatcgtccaccgggacctcaagaccgagaacctcctgctggatggcaacatggacatcaagctggcagattttggatttgggaatttctacaagtcaggagagcctctgtccacgtggtgtgggagccccccgtaagcaaccccggaagtcttgaggggaagtatgtatgcggccggtcggaggatcaagcagcgtctc

SEQ ID NO: 92688 - DNA, 432 bp, Homo sapiens
catttctgttgggtataaacctaggagtaaaattattttgtcacaggggtatacatatgttcagctttagttgacattgacaaatgttttgccaaagaattgcaccaatttacactcccaccacccatgtttgagagtttccattgctccagatctttgccaacgttttcattgtgatttagctatctaagcaaagtgttttagatgcctattagaccttcaagctgagatatcaagactgttggatatgcaagtctggggtatgaggaagaggtcttaaaaaaaagaaatcagaaagatgaagatccatgtgtgaggtaggcagcatgtgaggtagtaagataatcagcagagtgtggtaccccagaagctgaatgaaaaaaagtgattcaggtaaaacacttctgagaggtttaataagatgaagagaga

SEQ ID NO: 92689 - DNA, 400 bp, Homo sapiens
  misc_feature (1)...(400): n = a,t,c or g
cgaaagannnncatgatgaaagagtgctggaacggatcccgtggctcgttcccaagcccggtcggtcgtacagagccagccctgcggaacctctttgccgcaccctcggactgccccaaggcccccgtcgccgttccagcgccgcgcatgcacctgacgcgccgccgactctccttattatgcgccatgacgaccgagtccacctagcaggggcgccagaactaccaccaggactcagaggccgtcatcaaccggcagatcaacctggagctctacgcctcctacgtttacctgaccatgtcttactactttgaccgcgaagatgtggctttgaagaactttgacaaatactttcttcaccaatctcatgaggagagggaacatgctgagaaactgatgc

SEQ ID NO: 92690 - DNA, 1165 bp, Homo sapiens
ggattagcaatgatagatgtaaagtacccaggagtgtgctacatattttctgaggtcatggtgcttattctattgtcagaacagattggacagaggtggatttctgaagaagcaaatgcagcttcagttttaggacccctcacttggattggtctctccaagaccctgtgcttaattttatacattttcttaaaagggtgcctctaaaatgggaaagttttaggccttatatagcctggatccacacctgttttggagtcagataaaagttgggtatggggctctgtgtgattctgtatagttttctaaattttctgagcctgttttctgacctgtaaaatagagaaaaccatgtctatcttacaaggttatttgttggcctaaattaaatttagaggcagtacactgctatggagaatgcctatttgagtcagctctaacttacctagctctgtgacctttgacaggctccctttgctcccattatctgtatcactctcatggcattgttttcaggattgcattgtctatgcaaagaataaggcctggcacatcataagcactcaaagtattatgtttctttttccctattctaactcagcattattggtgcttcttatatgacttccctctcattttatcagatgtgatgactgaagcccaccacaaatatgaccactctgaggctacaggatcctcaagctgggatatccaaaattctttcagaagagagaagctggaacaaaaatccccagattcgaagacactacaggaagattcacctggagtgagacaaagggtctatgagtgccaggagtgtggaaaatccttccggcaaaaaggtagtctaacgttacatgagagaatccacactggtcaaaagccttttgagtgcacccactgtggaaaaagcttcagggccaaaggaaatcttgttacacatcaacggatacacacgggagagaagccttatcagtgcaaggagtgtgggaaaagcttcagtcaacgaggtagtctcgctgtccacgagagactccacactggacagaaaccctacgagtgtgcaatttgtcagagaagcttcaggaatccgagtaaccttgctgttcacaggagagttcacagtggttagaagccctatagatgtgatcagtgtggaaaagct

SEQ ID NO: 92691 - DNA, 433 bp, Homo sapiens
cattttgccagcgcccgccattgaagtgttgttgccagtggaccaggaacaccttagccactccagcgcagcaagtgcttaactttgaggtgcctaagagcaaagccatgggcctggtctcagtcccccagggcatgcagttcagcgctgctgaaatcatccagaagcagagccagttcactgaacgtgcagtgtatactgcagtcaaaccctcaagggcatcaaagaatataaaaacaaaaagcctcatccaaaggacagcaatttcgaagatgaaaggaacatcctttcatgttaaaaaccctcaacaaactaagaattgaaggaacatagctcaaaataagaagagccatctatgacaaccccacagccaacatcatagtggaggggcaaaagctagaagcattccccttgagaactggaacgagacaag

SEQ ID NO: 92692 - DNA, 377 bp, Homo sapiens
  misc_feature (1)...(377): n = a,t,c or g
cttttgatgtatagaagtagtttgaaactcattgtttccttgtggtaagcgaccgccaagctgccatagcaccgttcatcaggggaccatggacaggggtccccggccggaaccagaccaggattcccacggtccccgccgtgctgcggttctgaagcactgaactccgcagacaccccaagtatccttgggggagcgctcccatgagaagccggctcgaccactatgctatcatccagtatcctctgaccagagcagcggtcactgaaaaaattnaanacaaccacacacttgtggtcattgtggatgttaatgccaacacgccccacattaacctatgtgagacaacacaggttgacattgatgtggccaaggtg

SEQ ID NO: 92693 - DNA, 443 bp, Homo sapiens
ggttttttccaggttgagatcctattgagagcgtggaattaatcagatctccttcagcatgatcaaattcatactggagagaaaccttatgaatgtaatgaatgtagaaaaacttttagcctgaagcaaaaccttgtagagcataataaaatgcatactggagagaaatctcatgaatgcactgaatgaggtaaagtgtgctctcgagactcatctcttactctacaccttagaagtcacacaggaaagaaggcatataaatgtactaaatgtggaaaagccttgacccagaaggaaaacttcctttctcatcagaaacatcacactggagagaaaccttatgaatgtgaaagagcttctattcagatgccaaccatcatgagagaccagacatatcatacaggaaccaaaccctatgcatgtaaggaatgtggcaaagcctt

SEQ ID NO: 92694 - DNA, 1229 bp, Homo sapiens
ttttttttttttatgaaaaatccaaagtttattgcaaattgtattttgcttcccttcgttcttcatttttacaggatttattgatatccatgattttttcacagatgtacttgttgactttggagagtctctgtgcaatttcagtttcatccacagtttcttgtgctattctgtcatacaaacactctctgacgatgcttagtttgtgaggcgagaggggtggtttagggactgcatctttctttttttttgtggcgacgcctgtgacgcttctgtttttcagaacatctgttccccaaatcataactgccaagttcttcgtgtacttggaatctccttgggttacttgtagctggtgccatttctcctcatcaacccaaatcccgcttcccagatggaccttgccattgtctaggatatacttgtccatgacaggcgcaggagcggggtaataggacgacgtatttgcttcctcactgaaagtgctccgtaactccggctcgggctcgagacattctgactttactttttccagatcaatggcgggaccgctgccaagcctcaggagcagcacgtcctggagcctccggttaaggtcacggagctccttcatttcagacacaagtgccccgtactccttgagcttcttggcctgttgtaccagctgcctccgagtccgctccagctcctgctggaggtggcgcatctcttcctgttgctgctggtagttgcgcagcagctcctcatacagagcccggggcaccacagcatcttctagactgtccatgtcctctgtgcctggcgaggcctccacgaagacctcttccggacacgtgctatggcccaggctcaggccgttctgcttctctagccgagccaccactgcctcgatgctcttgtgcgccacttcgctcggcttccgcccctcaggtctcttgatgtgtctaagctgtaaatcttcttccccataatctttaacctctccatcttcttctacatgattaagagaaagcttggggatttttattttcttctgcatcacactgttttcaaggtcagatttgtcttctgccagcgccaggatctgggccttgtggagcaacagcgcgccccagtcgcggggggcgcgcggggggctctcgggcccggcgcccaattcctccgggccccggtacacggcgtacaccttctggttgtcaaaatccagccgcgagcgggggctgaagtcg

SEQ ID NO: 92695 - DNA, 396 bp, Homo sapiens
tttcggcgagccactaccattctgctgagaaggaaaagttcgctttttctttaagagattaaaacaatatgcgcaatcctcacctctctagcaatcactatttaaatctggcaagaactgaaacagtctttgcaagaatggaatccgtaaaacaaaggattttggccccaggaaaagaggggctaaagaattttgctggaaaatcactcggccagatctacagggtgctggagaagaagcaagacaccggggagacaatcgagctgacggaggatgggaagcccctataggtgcccgagaggaaggcgccgctgtgcgactgcacgtgcttcggcctgccccgccgctacattatcgccatcatgagcggcctgggcttctgcatctccttcggtc

SEQ ID NO: 92696 - DNA, 484 bp, Homo sapiens
  misc_feature (1)...(484): n = a,t,c or g
ggtttcgcgctttcnnnnnaactgaggcttccgaacnctgagggtctccgaacngcnncgacgatttcgtgttgaatttggaaattggaggggacgctggtggacggtcagttttggggagtgcgggggtagagatggatgtcaatagggctgaaagtggggatccgggggagcccanagtaggagtccgaggaggctcanagcttggagtcctaaaaggctcggagtcggggatctgaatggttcagggagggaagaagatttgggagtcagcctcagagctaaagatctcagggtgctggagtgaaggggcgctcaggaggggaaatccgaggggcgtccaaatggggggatccgaggaggctgagggtggacatgtctgaggaggctcagattggggtcacaggagtgcacagaatgggattcggtggggggcgggggtcgctgagtgttgatagccgggctcacagttgcaggtctgaag

SEQ ID NO: 92697 - DNA, 468 bp, Homo sapiens
  misc_feature (1)...(468): n = a,t,c or g
cccctaggtngtctgtgcagangcncnacngnnncggaanncccggnacgacgaggtcgtcgcgggggcggcgacggaggcgagagccgttttttccgtangaagccaaccttccctgcttctccggggccctcgccccctcctccccacaaaatcagggatggaggcgcctccccggcaccctcttagcagccctccccaggaaaagagtcccccctgagctcctaacgctccccaacagctacccctgccccccacgccatggggcccggtgccccttttgcccggggggggcggccactgccgcttctgggtgcgatggcggaacgggtggctccggggtgggacttgcacaccccctatttgccgcggacaaactctcggaggacaccacacctgtaatgagaaccgcacgcagggtacatcggggcactgtttccaatgagcgggggctggccagggggccag

SEQ ID NO: 92698 - DNA, 872 bp, Homo sapiens
ggaactcgcagatgaaggtggactgcttccgcaagctgggctattcatgcacggagatccacatcgtcctgtaaaagctgggcgtccaggcagacaccgacacggtgctgggtgagctggtgaaacacgggacagccaccgagcgggagcgccagacctcaccggacccctgccctcagctacctctagtcccgcgggggggtggcacccctaaggctcccaacctggagccttcactcccagaagaggaaaaggagggcagcgacctgagaccagtggtcatcgatgggagcaacgtggccatgagccatgggaacaaggaggtcttctcctgccggggcatcctgctggcagtgaactggtttctggagcggggccacacagacatcacagtgtttgtgccatcctggaggaaggagcagcctcggcccgacgtgcccatcacagaccagcacatcctgcgggaactggagaagaagaagatcctggtgttcacaccatcacgacgcgtgggtggcaagcgggtggtgtgctatgacgacagattcattgtgaagctggcctacgagtctgacgggatcgtggtttccaacgacacataccgtgacctccaaggcgagcggcaggagtggaagcgcttcatcgaggagcggctgctcatgtactccttcgtcaatgacaagtatgttccctcccagaggccctgacagacttggggtccacaggggaagccagaggtgcccttggcaagggtggagctgggggctgggctctgcggggccctgtggccatgggaggttgcgggtcttggctccaggcagctttgagagtgagacggatagctcaccacatatgagaaatcagaccgggac

SEQ ID NO: 92699 - DNA, 388 bp, Homo sapiens
  misc_feature (1)...(388): n = a,t,c or g
cgccgcttcctctctctgtttcctgcttcatctcttgtctctctctttgccttcatactttggctcactgcttcttatctctttgcctatctctgcctctgtctttgtctttctctggctcgctctctctccctttggctttctctctccgtctctctctggctcactggttctctctctcgctttcttggctgctctcgctctctctcgctctctgttccacttccccatctttgcctgccatcccccaccctaccagccacaccaagcgcagcccctctgtgaccagcctccttnccctcaatcccctgctgccctccttgcctgccctgaggcctcgggacctcagccgctgaagccgagagacgcatgagcccactatagctgc

SEQ ID NO: 92700 - DNA, 449 bp, Homo sapiens
  misc_feature (1)...(449): n = a,t,c or g
agcctaacggactgaccctccnnnnnnnnaanaaccggccagcttgctttcgggctccttaangctttttctttcgttagttactgcatactcgcagaaactattttgacggcgtggtgaaaggctcaatatagggggggagtactgcgcacagagcttcatgtttttaaatttttttcatatacttgttgatgagttatttagtattcattgggggagaaaaagccgtaccggaccctttctctttaactcatgtatgtctatatggtgggaaaattgcctggctaaattgcctggctttcagggttgttctttccttctaaccaggcaaatctttgttttttatgctataagctgacagcagattccaggtacagagggcacgctatgaggcacctaactggaaatacaagtatggctattagattcctgtggacatgctgtgtaan

SEQ ID NO: 92701 - DNA, 331 bp, Homo sapiens
caaaccagtgacaagttttcctctcccagtgagaaaatggggctcccaagttctaatctttctcctgccatcagcatggctgaagggggagagggtgggtgttagggaaaatccagggacccttccacacaggaggtacgtctggggttccattcaggagggtgccagataattcagatcactctacccaggctttttggcaaaaaacaaccctcaccctccgtaactagtcatcttccttgtcccccccccccctttcccttccagggccttctaagcagcttactttttttgtaaaatccctcccccgggaaaggggaaaaaaaaaaaa

SEQ ID NO: 92702 - DNA, 411 bp, Homo sapiens
  misc_feature (1)...(411): n = a,t,c or g
aaagcttggacttagtgataatgaaattcagcggctccctccataaatagcaaacttcatgcagctggtggaactagatgtgtctcgaaatgagattcctgaaattccagaaagcatttcattctgtaaagcactgcaggtagctgacttcagcggaaacccactgactaggttgccagaaagctttcctgaattacagaatttaacatgtctttctgtaaatgacatctcactacagtctctacctgaaaatattggcaatctttataacctggcttcactggaactgagagagaatcttcttacatatcttcctgactctcttacccagctgcgaagactagaagaacttgatttaggaaacaatgaaatatataatttgccagaatcaattggagccctcttacatcn

SEQ ID NO: 92703 - DNA, 381 bp, Homo sapiens
agaatagctactctttctcttcttttgttccctctctttcagtctatatgtgtctctaaaggggaagtgagtctcttataggtggcatatatttggttcttgttttactatccattcagccactctgtgtcttttgtttcactgatttggtccactgatatttaaagtaactattgataggcattttgtagttttcttgttcttttatttctctcttgctgtgcatgatttgattactttgattattttctgtagtggtatactttgattctttgctgtgcctttgtattaattcttttttaaacatgtggtaaaattctcatttgtgtatctgttacatgttttgtctttgtgtttatcatgaggcttacataaaacatt

SEQ ID NO: 92704 - DNA, 409 bp, Homo sapiens
  misc_feature (1)...(409): n = a,t,c or g
tttcgtgtgactgcggccagggcggctccacgacggtgactggggtcagggcaggagagtgtggaggccagtgaggagggtccacacccatcggtgaggcaggagtcagggtaggctgcatacccgggcggagattgcgaggcaggggtcagggtcactggagaaacatggctcaggaaaggcttcagggagaaaaaggtgttggacgagagaggctggtgctcaggggctgcaggggggccgggcctcagcagggagggagggagggactctgggaacagcacagccggcactgaggatgctgccagggaagggcactgacgtgcatggacctggaggatgccactggccaaaagctagtatctcactcacatgtgggatccgaaaaccctgaattcatggaaacagn

SEQ ID NO: 92705 - DNA, 460 bp, Homo sapiens
  misc_feature (1)...(460): n = a,t,c or g
ccgggcnctttgaaatgagtgctgttagcacngccgnaccggnccggaattccnccccgacgatttcgtaccggctggaggaggcggctccgcgaattcggtttgggcgcaggtatgggtcttacaccatgaaggaagatgacagcccaggaggggagccaccgctgtgatgaacgcttgcaggagccatgaggggcggctttccgcgcagtgtttgcagtgatttatgggagtcaggggctgccagagagggatgtggatgttagcagcttggtggattaaatgcccatttacattgttattgacatataaattatctgtgccaaggagacagtgaaggaaagggtttctggggcagtaatgtggtatgtgcctcaggatatggacttgtctttgcccagatttgtcctctgggctctcatgaagcgagtctcagacctaaagtaaaaccccaagactc

SEQ ID NO: 92706 - DNA, 1491 bp, Homo sapiens
atggaggcgccggcggccgagcccccggtccggggctgcggtccccagcccgcgcctgcacccgcgcctgccccggagaggaaaaagagccaccgcgcgccgtcgccggcccggcccaaagacgtggccggctggtcgctggctaagggccgccgcggcccaggcccgggctcagcagtcgcctgcagcgccgcgtcctcctcacggccggacaagaaggggcgcgcagtggctcccggggcgcgcggtgcggttgtgcgggtggccggggtccgcaccggggtccgtgccaagggccgtccgcgctcgggtgcggggcccctcacggatagcagctcggaggtgtcggactgcgcgtcggaggaggcgcgcctgctgggcctggagctggcgctgagcagcgacgccgagtccgcggccgggggcccggcgggggtccgtacggggcagccggcccagcccgcgccctccgcgcagcagcccccgcggccgcccgcctccccggacgagccgtcggtggccgcgtcgtcggtgggcagcagccgcttgccgctcagcgcctcgcttgccttctccgacctcaccgaggagatgctggactgcgggcccagcggcttggtgcgggagctggaggagctgcgctcggaggacgactatctcaaggacgagattgaggagctgcgggccgagatgctggagatgcgggacgtctatatggaggaggacgtgtatcagctgcaggagctgcgacagcagctggaccaggccagcaagacctgccgcatcctgcagtatcggctgcgcaaagccgagcgccgcagtctccgtgccgcccagaccggccaggtggacggcgagcttatccgtggtctggagcaggatgtcaagctctctggtaaacttcactgtctacgtggactcgtccaggccctgccccagaatgggtttctgccgctgtcttccatgttcacatctgagaatttgtcctcaccagggatggcaggtgtctcctccacagcctatttcaaatgtccctctctctgtccactgtatcctgtcttccaacacattgtccaactgctgtcactgctccaagcctttgatgtcaaggagacctctcatgccgagcccacctttgccttggtgtcccccagtgccccccgcttctctcccctcccctcctggtccagtttaggttccgttgtccatgttgtattttcactcccttcaacttcctttccctctctgccggtgttaagccagtttggcaaaacccccaaccctggctgtccactctctgctgtcccctctgcaggcctgcgccgagcagccgatgcactgaagtggcggcgtcctaacctcacaacccaagccgccactcacacggcccagcggcgcttctgctgctccggtgttctccagcaggcttccctcccttcccacacctgtgatgaccgcgataccggatccttcaccttcctccagcaatga

SEQ ID NO: 92707 - DNA, 475 bp, Homo sapiens
  misc_feature (1)...(475): n = a,t,c or g
cgtaccggnnagaattcccgggtcgacgatttcgtcttggcggccgtgctctgcaggcagagcctccctcgggcgtgggtctgcaggagagccggacagggcagcggccggcactaccgcgctgcgatttgcgcagagctgaagaagcccctgaccattgaagaggtggcccccgccccgtcgggcctcacgaggtcagagttgatgtccatttctgtggagttaactttggtgatattttgatctgccgtgatcaatatcaggaaaggccccatcttcccttcacacctggaatggacttttctgggacagtattggagacaggcacagatgtcaggacagttaaagagggagatagagttattggcacaagaaactttaattgcatggctgaagaatgcgtcactgaccagaaggacctgtggcagattccagaaaaggtctccctataagaagctgctgtcctccctataac

SEQ ID NO: 92708 - DNA, 410 bp, Homo sapiens
tttcgtccgagggccggcggactggagcggtttgcccctctcgggggccccgccgagtgcgcgtcctcccatcttatcctgcataaatgatgaaagtttcctgtgaagcataacaatccctgattgtgaaagtaccccacacgcatcgttaactataaagtaaggaaaagtatgaaagaaccatctggttgagtctaaagttggaagatcaccatatccaccacaagacccaggatggatctgcaacaaagcaccaccatcacttacctatagaaatggagtttggatgagtcactgtctggctgcacaacacattatagtgtcaagaacaaactgaagttaattcgagtcttaggccttttcatgggtctggtaaccattagcactgtctcattttcaatcagtgcctt

SEQ ID NO: 92709 - DNA, 420 bp, Homo sapiens
tttcgtgcgggaaggctcctcccacagcaccctctgcatcgtcgccatccccagcaaggggaggtggaggcaggggaaagtctggggtaggaaggagaaagacgtcggccggggtccctctacccctcacccaagctcccctcagttaaccgctctaacccctaacccaagaactctctcaggggtcccagagcgtgtggggaagcaaaggaggggcgcagggcgccctgggagtaccaggtcaggaaaggccgggcgcactgccgaggagtggtgcagctcccgttacacttcggaaaacggacccggaggggaagattcgtgccccacattcccgactcccactcccaggcgggggacttggaacggtcccaggagccctggctcccagccacgagctccacgatgagggaatgaggg

SEQ ID NO: 92710 - DNA, 589 bp, Homo sapiens
aataataaggagggcggtcttccgttggttttggggttaaaggagttggggccttaatatgattagaccccaaaatactaaggactctaattctaattgtttggagaagactgatagcccttggtgtgaactgtttaaagagttatacaaaataaatgcatttgacactcctgattcattgctcatgagaggcaaggagtttagtgaccctatacatcatacctttgaccatatgtggagaactaaggaacataatgaagctggttggttgctcctaagttcagtggataaagtgatgaaagaaaatgatgaactcggggattctatctcccagcttcagaagcagatactgagcctcaaatctgccaagattgccctgagtgagagtctaatctcctgtagagaaagaactgaaattgtggaaaaatagacataagctcttatcatgttagtggctgacctgcaatgaaaggtgcatgcacagcctcaccatgcacagcctcgccaagtatctactgttaaagtgagggcattgattgttttgcaggaagtcacggacccttgatggagggatcggccacagctgagg

SEQ ID NO: 92711 - DNA, 220 bp, Homo sapiens
acaacgaggttaaataaatcataaccaggacattaacaccccatggaaaaggcatgcatgaaagcagctggtactgtccctgatagacaaaacaatgaacattgacccagtttcaacaagttatgttataaatatgtaaacattccgtagagaatttctatgttaagaaatttatgttatgttattaagtttatattacagaggcttccattcctcttaa

SEQ ID NO: 92712 - DNA, 423 bp, Homo sapiens
cgcgcctggtgccccggggaggggcgctttcgggtgatgaggaagaggagaaggtggataggaatagacgccccctctgtccgagacctctcaaggccctgacctcatgggccagggcactgacaggacaggagagccaggctcctccacttgggctgcccgaagaggccgcgaccctggagggccctgagcccaccgcaccaggggccccagcaccaccccgggggcctaaagcgacagtctcaggggccatcgcaaggtttccagttgcctagacaacaggcccagggtcagagcaacaatccttccagccacctgcctcaactgctgccccaggcaccagccccagtccctacgcggcagccagcccaggagacatgccggtgctctccaggccccggccctggcggaggaacacgctgg

SEQ ID NO: 92713 - DNA, 401 bp, Homo sapiens
aacattttatagaagacagaagaagtactaaatatggcctaacttcttctttcttttatattggagataggtttactaatatctggtgaataagaaccctaccccaatagaatgcattttatttcagatgtttcaactctcttttgattatcttcaaagggacaatttctcttaaaaaatcttattataattcttctttgtgcaatagtagatatatcagacatgttgtacccttccccccaatttacctgttgaaaaaatttgatagttcacctgggttcatgaagagaccaattacatgctattgaatattacctccagtttgtcttgtctttgtcctacttttgagcataatacacttgctttcattcctttctctggatctcttgcatcattctggg

SEQ ID NO: 92714 - DNA, 394 bp, Homo sapiens
cgatagcaccaatgaaaagtttctttttagccttgatcagtttttcattgtacctctgttgtggtagaagcaaaaccagtctcctcagtggtggttgaatggacggtagcaacatcaacctagttgttccagcaaaattgtaggacacatccttgagaacatttttcctcacctccacatcaaagcatcattaaggttagtgactacttccagattatatccagaatccaactacttccctctatttctatccctattactctcatccaagtcatggttatcttcaatctggactttgcaatcttttggaattggtctccttgtttccattcttgctttccttcaatccattctgtacatcagtgaaataatttcataaatatttcttccttgt

SEQ ID NO: 92715 - DNA, 393 bp, Homo sapiens
agtgactgtccacacttaagcagcatctttagacccctccccacgatgcttctggggggatgattcatcaaatactaagtgctaggggtatggcagagactataacagatgacagcccctgcctggtggagtttacattctggtggccctttagtagactggccttagcccacatgtgtttagaccacatgacttcagaaatagcaagaggaaaattggcaaaaaaacaaagacaggagtcagacccaaatttgaatcctggctctgctctgtgactttattgagttacttattcttcgtgcctcagtgtcttcctgtaaaacagacacaatgaacctggcaggggcgagaacacctggaggcactggtgtggacggcctacctggcactcgg

SEQ ID NO: 92716 - DNA, 396 bp, Homo sapiens
cggacgcgtgggtgactccagagcctccagcaagatgctactgattctgctgtcggtggccctgctggccctgagctcagctcagagcttaaatgaagatgtcagccaggaagaatctccctccgtaatatcaggactcagaaaaggagactgataaggaacagccactgaggttggaggacagtctagagagcatggaatctggcgtccaggggaagaaagtatttcatgatgtgggggaatgctcaactgtgtctaatgttgataaaattagaggaggaccaagacgtgactatgggatttggcgacatggaggcccttggttaccttgacaagactgatttcattgctgactggagcaagttcaagagagaatgggaggagaggggagggagc

SEQ ID NO: 92717 - DNA, 390 bp, Homo sapiens
aaaaaaaagtataactgattatctaagagagaaaatggaattatataaaatgctcaaaaccacaaaaggcagaaaaggagtgaaagtaaaaaataggaacaaagaacaagggcaacaaatagaaaattgtaacaaatcaatagataataattaaactatatttgaatgatcagtttgaatagcagtggcctaaatatacaaattaaatgtcaagagattgtcagcatggatgagaagcaagactcaactttatgttgtctataagaatcctactttaaatattaaaacacatgtagagtaaagataagttactggggaaagatatactatgctaacactaatccaaagaaagtgggagtacctatattaatttcacaaatagaagacttc

SEQ ID NO: 92718 - DNA, 397 bp, Homo sapiens
aatttctggtttgcgggaggttgcagtactcgctgggctgaggccgcttcggttgaggaggcccccccgaaagtggctttagccggggcgcttcggcgtagtaaggaccctgcaccaaagttttgttgttaagggggcgcggaaccgaaccgttcctttaaccttgcagcagccatggcaaaaggcaaagcccccgaacgatcgcagttgggcgctcaccacacaacccccgtggggaacggggcaccgggaacccggggtctcccggcgcctggcagcaaaaaccaccaaaagggtgagtgggcccgggaagcaaagctgggggtggcccaaggcttctgtgtgtcggggggggaaaaggacccccgctattctcggaaagtcgcggggaaggagg

SEQ ID NO: 92719 - DNA, 1345 bp, Homo sapiens
tttcgtgttctccgatgggggagaagcggcgacggcggctgtggagtaaccgagccggagcgtgagcggccccggtgccccgttccccacggaggccatgggcgacccagcccccgcccgcagcctggacgacatcgacctgtccgccctgcgggaccctgctgggatctttgagcttgtggaggtggtcggcaatggaacctacggacaggtgtacaagggtcggcatgtcaagacggggcagctggctgccatcaaggtcatggatgtcacggagctcctcccatctgcttaggacgaggaggaagagatcaaacaggagatcaacatgctgaaaaagtactctcaccaccgcaacatcgccacctactacggagccttcatcaagaagagccccccgggaaacgatgaccagctctggctggtgatggagttctgtggtgctggttcagtgactgacctggtaaagaacacaaaaggcaacgccctgaaggaggactgtatcgcctatatctgcagggagatcctcaggggtctggcccatctccatgcccacaaggtgatccatcgagacatcaaggggcagaatgtgctgctgacagagaatgctgaggtcaagctagtggattttggggtgagtgctcagctggaccgcaccgtgggcagacggaacactttcattgggactccctactggatggctccagaggtcatcgcctgtgatgagaaccctgatgccacctatgattacaggagtgatatttggtctctaggaatcacagccatcgatatggcagagggagccccccctctgtgtgacatgcaccccatgcgagccctcttcctcattcctcggaaccctccgcccaggctcaagtccaagaagtggtctaagaagttcattgacttcattgacacatgtctcatcaagacttacctgagccgcccacccacggagcagctactgaagtttcccttcatccgggaccagcccacggagcggcaggtccgcatccagcttaaggaccacattgaccgatcccggaagaagcggggtgagaaagaggagacagaatatgagtacagcggcagcgaggaggaagatgacagccatggagaggaaggagagccaagctccatcatgaacgtgcctggagagtcgactctacgccgggagtttctccggctccagcaggaaaataagagcaactcagaggctttaaaacagcagcagcagctgcagcagcagcagcagcgagaccccgaggcacacatcaaacacctgctgcaccagcggcagcggcgcatagaggagcagaaggaggagcggcgccgcgtggaggag

SEQ ID NO: 92720 - DNA, 373 bp, Homo sapiens
tttcgtgcggagcctgacaggacatggacggagccgggttgggggggggcgacggcgacgactcgttctaccccctcgcggtgctcatagaccaactccgtattgaggaccctcaacgtcgcctaatcagtcccaaaaatctgcccaccatcgccttggacctcggggttgaaaggacccgaagagagctgctgcctttccttacagataccatctatgaagaagaggaagccctcctggccctggcataacagctgggaaccttcactaccctgacgggaggccccgagaacctgcactgactgctggcaccgctggagaagctggccacactgcaggacacagcggagccggacacggcagtggaggactt

SEQ ID NO: 92721 - DNA, 444 bp, Homo sapiens
ctcgcttgacgaccggccaaatttcggatcgactgacttggtctggccggagcgcataagtgggcattaacatgagccgcgtgtttgggtcttagatttggcccacctgtgatgagcttttcatggattatcttacctagataagacactgcaacaccgttaaatgccgctagatggagtgcgtgattctggtatggcctcacgtggacctgctgcaaaggatggagagaacatggtctctgcttcccaaaaaaaaaggggaaatttggtccatggctaatgaaacacagaagggtggggccatccattttcctttttccttcacaccctatttcatccaggaagacttcatggcatagctgtaccgggttttggaggctggcaagattgggatatttgagagtcccactggcactgggaagaccttaagtcttatttggggcg

SEQ ID NO: 92722 - DNA, 1109 bp, Homo sapiens
atgccacacaccgccatccccccacactcgtacacgctcaatatccctcgcacgctcacatgcacacacgcgtctgacacggacacacacaaccagcccgtatcagcagagctgcttcacgggtttgctcgcgtcctcacgcgctttgggtttcccggtctcatggccggcctgaccttatttgtgggccgcctcccgccctcggcccgcagtgagcagctggaggaactgttcagtcaggtggggccggtgaagcagtgcttcgtggtgactgaaaaagggagtaaggcatgtcgaggctttggctatgtcactttttcaatgctggaagatgttcagagggccctcaaggagattaccacctttgaaggttgcaagatcaacgtgactgttgccaagaaaaaactgaggaacaagacaaaggaaaaggggaaaaatgaaaactcagagtgcccaaagaaggagccgaaggctaaaaaagccaaagtggcagataagaaagccagattaattattcggaacctgagctttaagtgttcagaagatgacttgaagacagtatttgctcaatttggagctgtcctggaagtaaatatccctaggaaaccagatgggaagatgcgcggttttggttttgttcagttcaaaaacctcctagaagcaggtaaagctctcaaaggcatgaacatgaaagagataaaaggccggacagtggctgtggattgggccgtggcaaaggataaatataaagatacacagtctgtttctgctataggtgaggaaaagagccatgaatctaaacatcaggaatcagttaaaaagaagggcagagaggaagaggatatggaagaggaagaaaacgatgatgatgacgatgatgatgatgaagaagatggggtttttgatgatgaagatgaagaggaagagaatatagaatcaaaggtgaccaagcctgtgcaaattcagaagaggtaagcagctcatcctgttctgagacagcagaggaagattcaagattgtctccgagaggaaaaattctcctttttctgcctgcatcattgcagaattgacatgtgtaatgaaattgaataggccctctgtcagcccat

SEQ ID NO: 92723 - DNA, 743 bp, Homo sapiens
atcacccgcaaaccagaaaaatgctgtcatcggcagttggctctgtcaataagccttgcgaagctgaaatgcgaagacttatctgccgagaccgaagcttccttcggaatctaggaatcgacaccgcgcctgcgaggctagccttggagcccggagaggaaggcaccagcaatggcaaaaaggatgcactgagcaggcagcaaccgagcagccaacccgagagctgggagcgcgcgggcccggtcggaaaatgcgcctgcgcagaccgctggggacgggaggggcggggctcgaggggcggtcaatgcgcctgcgcacaccgcacggcgaagtgggggagggcagtccgtgtgtgtctgtgttgttgttcggcggcggcggcggcggtaagatggctgcccacgggggctccgcggcgtcctcggcgctgaaggggttaattcaacagctcaccaccattaccggtgcaagtgaaagtggtggaaaacatatgcttgaagcgcgcaacaataatctggaaatggcagtcactatgtttttggatggaggaggaatcgctgaatagcccagtaccagttcagcaagtgtctctactgtcagaccacacacagagtatgaatttattatgtgttggcaggagctatccattgcctaaattaagtagttgcatttttatcaaagctaggtcgattctttggttttgaaataaaagaaaggctgaaagcctctgaaaaagtatgaag

SEQ ID NO: 92724 - DNA, 419 bp, Homo sapiens
tcagctgttcagggtgccccttggccctttatctcaccaaaccgctcaaccacagggtgggtcctgagcaggagtggtggctgtgtgaatgggaaggtgtggggagaatgggctctgtgtgcctcaggaccagtttcagggtttccctttcccacagggcccatggaggaagtggagcggcaggtcctcccagaccccgaggtgctggaagctgtgggggacaggcaggatgggctaagggaacagctgcaggccccagtgcctcctgacagtgtccccagcctgcaaaacatgggtcttctgctggacaagctggccaaggagaaccaggacatccggctgctgcaggcccagctgcaggtgggcacaggcaggaggggctgggctagggtaacccacctaggccaggcgtctgtcct

SEQ ID NO: 92725 - DNA, 2062 bp, Homo sapiens
  misc_feature (1)...(2062): n = a,t,c or g
tgtttgttactaccgttcattaaactgccaaccacaggaaacagcctggcaaagattcaaactgtaggcaaaaaccggcagagactgaatagagtcctcatgggcccaaggagcatccagaaaaggcacttcaaagaggtaggaaggcagagcatcaggagggaacagggtgcccaggcatctgtggagaacactgccgaagtaaaaaaggctcggaagtccagccccaagggagctgaaacagcctcacacacagcaggggcctgagaagttagcgggaaacgccgtctacaccaagccttcgttcacccaagagcataaggcagcagtctctgtgctgaaacccttctccaagggcgcgccttctacctccagccctgcaaaagccctaccacaggtgagagacagatggaaagacttaacccacgctatttccattttagaaagtgcaaaggctagagttacaaatacgaagacgtctaaaccaatcgtacatgccagaaaaaaataccgctttcacaaaactcgctcccacgtgacccacagaacaaccaaagtcaaaaagagtccaaaggtcagaaagaaaagttatctgagtagactgatgctcgcaaacaggcttccattctctgcagcgaagagcctcataaattccccttcacaaggggctttttcatccttaggagacctgagtcctcaagaaaacccttttctggaagtatctgctccttcagaacattttatagaaaagaataatacaaaacacacaactgcaagaaatgcctttgaagaaaatgattttatggaaaacactaacatgccagaaggaaccatctctgaaaacacaaactacaatcatcctcatgaggcagattccgctgggactgcattcaacttagggccaactgttaaacaaactgagacaaaatgggaatacaacaacgtgggcactgacctgtcccccgagcccaaaagcttcaattacccattgctctcgtccccaggtgatcagtttgaaattcagctaacccagcagctgcagtccgttatccccaacaacaatgtgagaaggctcattgctcatgttatccggaccttgaagatggactgctctggggcccatgtgcaagtgacctgtgccaagctcatctccaggacaggccacctgatgaagcttctcagtgggcagcaggaagtaaaggcatccaaggcagaatgggatacggaccaatggaagattgagaactacattaatgagagcacagaagcccagagtgaacagaaagagaagtcgcttgagctcacaaaagaagttccaggatatggctatactgacaaactcatcttggcattaattgtgactgaaatactaacgattttgattatacttttctgcctcattgtgatgtgttgtcaccgaaggtcattacaagaagatgaagaaggattctcaaggggcattttcaggtttctgccacggaggagatgctcttcgcgaagggagagtcaggatggacttttttcattcagacggccgctctggcttaaagatatgtacaaacctctcagtgccacaagaataaataatcatgcatggaagctgcacaagaagtcatctaatgaggacaagatcctcaacagggaccctggggacagcgaagccccaacggaggaggaggagagtgaagccctgccataggaggagaacacagcccacctcaggcctcctgcaaaaatacatagaataaacaacaacagttactaaatgaaaaaaaaaaaaaagggggggccgttttaaagaatccaagttaacgaacgcgggctggcagaggaatagcttttttatagggcccccaaaatcaattccctgggcggcggtttaacaacggggggacgggaaaaacccgggggtaacccacttaaatcgccctgtgggaaccccnnngnnnnnnnnnnnnnngntttttntngggnttggggtttgggtgttttgttgtttggggtgggtttttntgtgggttgtgttgtgtgtntggggttggggtgttgtggtgtttntttt

SEQ ID NO: 92726 - DNA, 422 bp, Homo sapiens
  misc_feature (1)...(422): n = a,t,c or g
tatcgacctctacancagncnggtggaattcatgatattaaacagatagacgataagttcattcgaggtttacaaaattatttatttttcattatgctagcactacaatgaatattctagtgtttttactttacgccaataattagggtagagcgatagacaaatacgtttggttttcttcattttataaattattttcatagttctatgaactatgatgattcgaattacttacttaatgattcaaaccaagaaatcgtctttaagacaaaaatttatgatggcttgcaaatctgattttattgttatcttcacttttagtggcgggctctgcattgtttttttaaagctaccaacaacataagaaaaatctatgtgttttaaaattgagaaaagagttggtttcttgttctgcgagtttn

SEQ ID NO: 92727 - DNA, 480 bp, Homo sapiens
gatttgccttactataactcttagaaaaaaggcttacaacttttgaaggtttagcatgatgtcagatgtccatttgtcatatatggcctttattggcttgaggtatgtatgttctatatgtaatttgttttgagattttgtcataaagtaatgttgaattttctaaaattctttttctgcattcacttaaaagttataattggttctgagatccttcatctttctcagaatctaggaggatgcatctgtacctataggaggacacaaaggcatcatatgttacattctcgtgacatataatgtctactgcttataatgtctactgtgagtttctgactccccaaatgaaattgaggcccagaaactttcaactgctttgttcgttgaataatgccaagtgtctggaaatgtgactattcagattaaatgcttaatgtgtgtgtgttgactaaataaatctcaaccagaaccttctcagat

SEQ ID NO: 92728 - DNA, 590 bp, Homo sapiens
gcggccgcatcgccttgcccagccggcagtcggtcaacgcgctctccatgtactcgtgcaccagctctgcctccacctcatcgcagtggaagaagtggacatccggcttgctctgctccgagtcctggcacacgagcagcagcacagacgggtagcgcagctggttgaggaccgtctggctgcgctgcaccgtgggcagcgggaagtcttccagctcctcctgtgactcgatgtccagcagccgcagcgactggtcgttcacctgcagcagcatctcctgggtccagatcttctccttggagctcagctgcaccagcttccggatggcgtcgtccacagacgtgatggcttcgctcttgtccatgatgaatgtggccaggtgctggacgtggtactgcgaggtctcgtgcatgatgacgttggagttggaatacttcttcctctgctctgaaccgggagacaccagtcactcccccgacgggcaggacccacagcctcccgtccagttgggactggacccacaagggaaggtggagtcaagcggagggaggctgctccgtggacctcttgggaattccaccacactggag

SEQ ID NO: 92729 - DNA, 460 bp, Homo sapiens
gcccgtgtggtggaactccatggtttgggggttttgtttttattttgctgcatgatttggattcaagaagaaggatctgtaggacagtgggctcccgggtctgcctttgccctcatagcctgcagcagagcaggacgttcgctttcccttctccgcctgtgtgttcttcctgcactgcctaactgctgcttgctcatttgtgcttccgtgtcacccctcctcagccctctgaactctgcacgtcaggacttggcacacttcctaactgctgcttactcatttgtacttccgcgtcacccctcctcagccctctgaactctgcgcttggacttggtgtgacttcccttccccgcctattctctagaggcagtctcttggtgactcctggtttgggtcagggcacgccttaagtctctggatggctaccaaccccaggttccctcagctctagccccataag

SEQ ID NO: 92730 - DNA, 600 bp, Homo sapiens
tttttttaactttttaaaaagcaaatgtattcttcctccattatctaaaaaagattggcaaaaagttaaatctccttttacttcaaaagtaaagaaaatcatgcaatgagatgatcctgttgggccttcagcacagacccatcctctcttccccggctcccagcagtccagggcaggtttctgtcctcagcaggctgagttttgttcagtccattcgttccttgctggatcagcacactctggatttctcagccctttcagtctgagtgttcctccctcatggccttcacaagccagtcctgttctgtcccctgctcagagtcactggtgtcactcacctccatggacagcagcttcgagtacttgattttccgctctcggggcagcctccgctgtatggacaggagcaaggccaaccagagcaacagggccacacagcaggcctggtagagcacagccaggctgaagcgcatcaccacgaagcccccgacaaagctgcccaggctacagccactcccgtaaaagtggcctcggaacaaggcactcagagccctctccatgcggggagtggccaggtcctctactgaggcccccacagcc

SEQ ID NO: 92731 - DNA, 428 bp, Homo sapiens
gaaaaggtatgcagggagcagaagagtggaggggtggctcggggtttggagacttgcccgtcaattcccacaacagagacttgggaggactgggtgggtcctgaaaaattaggtaaagcagagtaggttgcccggtattaaataagaaaaaatactggcctacctgccaccatcagggttacccttgtcttagatgaagcaatggtagttgccggggcgtccattccagggccccatcagtcttcagtggcaaggccagtgagatccgagtaggaggttttggccagctcaggaagggatgggagtggtccttgtgggggccgctcacagtccaacttccagtggggtcctctgcagagggggcatggcctgatgggcttacctgggtttgggcattgtctagaccagtggccctcattgccatactt

SEQ ID NO: 92732 - DNA, 432 bp, Homo sapiens
ccgacgcgtgggcggacgcgtgggtttaaatttcctatgatattctgtccctcagggtgcaatacccgggagccaagactaccatactagtctcttttagagggtcagcactctccattccccacccctgtttccctgacttaccttgaccttcctggcatctgctgttgactcatcgaactccaccccccacttaaagctgatatatgtgatcttgaaggcgctgcgtgtttttagggagagaagagacccattcttttatatgattgtggtaagcttggacatgcggcccacctgcctggtagcaaaacccacacctgagggtggggggaaggttatgagtatatgagccgtgccacagaatcagtagacaagaaactccatgaataactctcaagcctcggtatggggaagcggaggactgtatctttc

SEQ ID NO: 92733 - DNA, 414 bp, Homo sapiens
ttagaagtagagctttttccagacctcctatcttttattctactttgaaaggggaaagaaagaacatcgtttcaggaataaaaatgcacagtagtagttatagttaccgtagcagcgattctgtgtttagtaacactaccagcactcgaaccagtcttgattcaaatgaaaatcttctcttggttcattgtggtccaacactgatcaactcttgcattagcttcggcagtgaatcctttgatggacacaggtattgaatcattggtgtgggattgtgttttactttttgatgggcagcacttttcaggaatggtgagctctttgacttcgcagggagaagctttattttattttgtctcatcttttaggatagaaatgttgcaacagattgccaacagagttcagagggacagt

SEQ ID NO: 92734 - DNA, 409 bp, Homo sapiens
accacgcgctgtgaaagataaaagaaaaagatgtttgcaaggaagagctcagaccgtatatgtcaatggatccacagcatgacaggggcctgagtcccagaatgactgcctggagcagagctgtccccattgcactggactgtgaaataagcaaaaaccaaacctttatcgtgttaagccgtagagagctgggtttttatttttgatgttgttacagtattagtctaactaatccaatatacccagatatatgtatagccatatacaatactgctctatccttatctttcatactttgaacacaactcctcaaaagtcctagttcataatgagctcagcctctcactcttcagtttccattcctggcactatacaaacgcgtccgccctcgcgtccacgaacgcgtggg

SEQ ID NO: 92735 - DNA, 387 bp, Homo sapiens
caaagtttcagggtaagatggtggtgatgaacaccctgagggtcactcgtcctgtgtccccatgcaaattgctgtggagaagcttccagattccaaggcccaggccattctgcagcctctgtacttgtacttacaaaatccagaaataagcctgagagtacaccgtttcattaaagagaggagaaaaggcttgttggttttataaaaatcacgcgtgttaagcgtttgtagctgtgatgtcatgggcattccagtgtgagattatatgccttatggactgtgagaataactgtttctctgtttgtccagtaaaataaatgtggaacattctttcttgacaaatgttaaaatgttaaaatgatgtcatgcagaaactggagaaggttc

SEQ ID NO: 92736 - DNA, 407 bp, Homo sapiens
  misc_feature (1)...(407): n = a,t,c or g
cccgggggaaaattatcatcctgaatcacaatgggcactttgggagatttgaatttcctgctttctgtgagatcttcagttttttttccagacgtctatttccccgctgtctgccgtctcctcccagctctcagcaacctcctcatattccatcttactcgccactttccagatcgcttgctttcttatttccaaattttctctgacttttgcagtattcaatattattacctgattctgatttttcagacatcactatataggccttggctttttggtcggtcctctcattcctttgctgattcaagctctgntcccagcctaagctttttaccaccgaattctgttctgtgacccataacttaaaactaacccaacttttcattcccttcagacttttttggaaa

SEQ ID NO: 92737 - DNA, 624 bp, Homo sapiens
tttttttcacttttgtcacctcttggcaaatccctcacccctcctctactttaccatctgttatgagtctctctcattcttcttttctctgtctcaggttttctactgctctatgtctgtctcctgatccctttggcccacagaattgtggtaaaggttaaaaagaaaaagaaacaagttttcttctgcttagcagctcacttcaaggaaagttataagataacgctgtccaaaaagctaaggctaaagtaatgggctctagacactttttaaattccagaacaaagtgaaggaaaaaaaagagagagagagagagaaagccaaattcttctactgttactcatttccctagtctcttaagcatgactatgttttacaaatgtctgtatttagccagttcttttttttgacacagctacaaggccaccagctatgtagaatccaacttctctaagactcatacaatataagccctatactgtaatcttgttcagtcccgctgctgttaaagttgcaggtgttgtgccttagatccaccacagtcagctgaaactggcagctcaagacaagtagacaagccagcaggacccagatcatccaactcatcctgagatgagatcaagc

SEQ ID NO: 92738 - DNA, 369 bp, Homo sapiens
cagctaaatttaatgtgttatagtatttgcgagcctcataactttgaataaaaaaattaatagatatgtatattatataaagcaagaaattaaatcataccactagggaaaatcaccttcactgaaaggaagaccggaagaaaggtggaaagaaagagaagaccacaaaacaaccagaaaacaaataacaaattggcgggagtaagaccttacttaccaataacaacattacatgcaaatggactaaactctccaatcaaaagacatagattagttaaacagatgaaaagataagccccaaagatctattggctacaataaacacaattcacctataaagacacacataaactaaaaacataggaatgg

SEQ ID NO: 92739 - DNA, 365 bp, Homo sapiens
ccctgctgtctttctctccacccccttttctttttttcctcctttaataatcaaaccatacatgccaagcagcttacttaaatcagtggcaggggtattcttggtggccaggccattagcccctggagccccataagcagcttaatcagttttcagtgatggaggcaatcaacagcttatcaaacaccctgtgggtggggcagctagagctcaatgcatccattcacttaacagctcactctaacctggttctttgtgcctggctttaagagccccaaacttatcatatttaaaggaagtttaattcgattactttttctgcctgaggtgggttaaattggatttagcttttgatctgtctgcat

SEQ ID NO: 92740 - DNA, 421 bp, Homo sapiens
  misc_feature (1)...(421): n = a,t,c or g
aatacaagcctgggatttgctagttaggtgtttcctattatttacactcaagttcctatttttagcctgatatgacatcataaatgcagatggttaaacatttttaaaaacagtatgatgaaattttaatcaaagcatcagaaatttagtaatctgatgtgaaaaccatcatttttcctaaaactgaagaaaaagagattgtaacaatgaaaatttaagtgtctagatttattttagtgccacaaaacaaaacaagattactgaaattagaggtggtaaaaagcagagatagccttaacttaattatactgcaaaagtctgttatggctagcaacagcctaaacttaccttcagcttttacaaactatctgtataacatacagnatctttttttaatctttctggtacaaatataaacacn

SEQ ID NO: 92741 - DNA, 466 bp, Homo sapiens
  misc_feature (1)...(466): n = a,t,c or g
nggggccaggcaagcaagagatgtggggcgagcaagaagtgggcccccaaacccaagccataagcagggagggtgaagaagccacatttctcttcagagctcagcaacatcacaccaccctgaccctgaggaggctttaccctgtgcctagcaccacctttacagaaaatcccagggcttagatgcctggagaaacagattcttattataaagaggaggaaaattagggtcacagagatgaatgaagtaacctgcctgtgattacagagctagcaaatggcagagatggggtttgaatcaggactcctgactccaagttcagtcatttcccaagaggccttattccttcccagaagaatttctagagcttttccccacgtagaatatattcttctcctttatccttccatcaaaccatccatcatccatcactcatccagccatgtattgcggccgctctagagga

SEQ ID NO: 92742 - DNA, 653 bp, Homo sapiens
gttcaggcaaacgcgttcgctataaaaattactgctgatatttctagtgtatagattatagagttggctcaattctctttgtgctgttttgcagctatttagtagtttgaggtatgtgggaaaaaaaatctatgtcaaatgcattagcagactgaaatctgctcttccagacagaactgtagatgagcattgcatgtgcagtatgtgtagttttagtttcacgttttggccacagtcatttagatttcccaatgatacatggaaaaaaacttaagtagtacctaatatgagagtttttcctttctattttttccattttaagtaaagtaaaaacagcagttttactagttaactgaaaaactttgcttatgagattggaaaacatttaatggttgcactgaagaaaccaaccaccttcacagacagtttatcaaattttttaaattcatatgctcactgaaatgcattgaaatgaagctttctatgagtcatctccttttcaatttttcagatttcaaggaaaattttcaaaattgtcattatattgctttagaatataaaacatgattgtccttagtggaacaaaaatttaactcagctcaaataattattgaatgcctactcttgttcagttggtacaaggaaaaaaaaaa

SEQ ID NO: 92743 - DNA, 395 bp, Homo sapiens
cagaatgaccgccatgtataatctgaagttacagaaggataaattgaagatctatgctaaaagcgataaacacaagtaaatgaaaaatagaaaaacactgtatgatgcaaaatatgaagatctcaattgtgcactgaaaaagtggatccatcggcatcacagtgaccacatgccacttaatggtatgctgatcatgaaacaagcaaagatctatcacaatgaatttgaaattgaaaggaactgtgactattcaacaggctggttgcagatatttaagcaaagacacagcactaaatgtttaaggatttgtggtgataaagcatctgcagatcagaaagctgtggaaaaagtcattaatgagtttgcccatatcatcgctgatgaaaactggatag

SEQ ID NO: 92744 - DNA, 834 bp, Homo sapiens
cgaactctcgagtctacgatttcgtctgcgggaggagaggtttgggaggcgcgggagatgtccaccctgggctggtggcgccgccgggcgccgggcgccatgagggtgcgctaggcggctgttcgtgcccgaggctgcgcagcactgaggtgagctttgccttcttgatcttccgtccttcttggagacgactggcgagaggaagagggactaggtccaaacgctaggtggctgggtccagccggagacccgcaccaaggaggagatcatcgagctcttggtccttgagcagtacctgaccatcatccctgaaaagctcaagccttgggtgcgagcaaaaaagccggagaactgtgagaagctcgtcactctgctggagaattacaaggagatgtaccaaccagaagacgacaacaacagtgacgtgaccagcgacgacgacatgacccggaacagaagagagtcctcaccacctcactcagtccattctttcagtggtgaccgggactgggaccggaggggcagaagcagagacatggagccacgagaccgctggtcccacaccaggaacccaagaagcagtgagtcttaaccactttctttcccagtaggagatatagagcatgtgctgtgcacaggttcaaggggaaagtgccagggcctcgaagtttctgctgctccatttggagtatattccgcttccccaaaagtttagtccaaggctcgtatttttgaagttccactcggtaccaccagcacaggtttcaccacatagacctgttgccacctaaactatttgctcagtattcttaagctggtgcattaaaaaaaaaa

SEQ ID NO: 92745 - DNA, 395 bp, Homo sapiens
ataacatttaagtaaccaaatgaatgatttgaaagagtaaagttggtagaaagaccataaaatagggcacatctagagaatgacatgagagtggggcattgggtaggaggtcaaggaaaggcctctgtgataaagtaataatttgagatgtgcaaataacaaatgacaaaaagccactcatgcaagggttttggtaagatttacagaggaaaaaaattgtaattttaacaaacggtgctgggacaactggatagccacatacaaaagagtgaagttggacccctacctcacacaaaacacacaaattaactcataatggatcatagacctaaatgtcagagagaacactataagactcttcaaagaaaaaatgtaagtaaatcttcatgtctttg

SEQ ID NO: 92746 - DNA, 748 bp, Homo sapiens
gcaaagttgcttgtcatttgagaattaatcctcaaaaggttaattcttaattttcgaaaaggctatcgaagaaatgacaagcaactttgcctgactgcttcaaaatttgtggcgcatcttattaaccaaaatgtggcacacgaagttttatgcttagagatgctcactttgctcctggaaagaccaacagatgatagcgttgaagtagctattggttttcttaaggaatgtggcctcaaattaacacaagtgtcaccaagaggaatcaatgctatatttgaacgccttcgaaacattctgcatgagtctgaaattgacaaaagagttcaatatatgattgaagtgacgtttgctgtacgcaaagatggattcaaggaccaccccattatcctagaacgtcttgatttctcggaagaagatgatcaattcactcatatgctccctctggaggatgactataatccacaagatgttcttaatgttttcaagatggatcctaattttatggagaatgaagagaagtacaaagctattaagaaagaaattcttgatgagggagatactgactcgaacacagaccaggatgctgggagtagtgaagaggacgaggaagaagaagaggaagagggagaagaagatgaagaaggacaaaaagtaactattcatgacaaaacagaaattaacctggtctcatttcgtcgtacaatttatcttgctattcagtcaagtttagattttgaagaatgcg

SEQ ID NO: 92747 - DNA, 738 bp, Homo sapiens
  misc_feature (1)...(738): n = a,t,c or g
ggcactccttgatgagccgcacaatttcctggacagaacttccatatccttgtgcaagtgcatattcttggtgagctgctccctccnagcatgttatgcagcttcttgttcatctcccgaaggttctcgttcccctggcttcactaggtctctcaggacgctgcccagcccgctgcggtgtgtgtggcctgctgccacagacacatctgcaagggcccaggctgaaaaccaccccctcggcagagccagaggagagccaggcagagccagaggagaaaagagggagacgaataccaggggagaaggcagcaggaaaagccatgtcatgtaggacagaggctttgacatacaaaacctagctctgtcactcactagctctatggccccgagaaatgaggataactaacttgtggaactggaaagatgcacatgactgtatgtgaagcacagagcacacagaaagtcctcagcacatgttggtcagtatgattctgattaaaaaaaaaaaatctgtgaaggagaaagtttgaaagaaagcaaaagcaatgaagatacagagaaggaaaacaatatagacagcgagacaagatgaaggagtggggtgaaaaagagaaacggagaagagagaagggagagagagaggagaggaagatgaggcacagggagaggaaaggagaaagtggacagagagacacaatggagaattggagagtggagagattgacagagaaagagaga

SEQ ID NO: 92748 - DNA, 948 bp, Homo sapiens
ggcgttgcgtgtttgtgtgtcgtattcaggcgtggtgttgttcatccggtgctgtcttctggtccgtggcctctatgcaccaggcgtggatgtgtctgtgtctgtgtctctgtgccttcttgtgtgcatcatgtcttgtgtgtccaggcgggagggtgggagctgtgtgttgttttttccccggtgtgtgtgtggagagactggacgcgcctgcgtacctggctgccctgtgcctctgtacgcgctgtcagcttgcacacccgtgcacacctgcccactgatctgctgacccctccccacagggcaccttcagccgctgctacaagctgacagacatgtccaccagcgccgtgttcgccctcaaggtggtgccgtgtggcggggctggggccgggtggcttcgcccgcagggaaaggtggagcgtgagattgccctgcatagccgcctgcgaccccgcaacatcgtggctttccacggacactttgctgaccgcgaccacgtgtacatggtgctggagtactgcagccgccagtctttggcccacgtgctgagggcgcggcagatcctgacggagccagaagtgcgcgactacctgcggggcctggtcagcggcctgcgctacctgcaccagcggtgcatcctgcaccgcgacctgaagctcagtaacttcttccttaacaagaacatggaggtgaagattggagacctgggactggcggccaaggtggggccagggggccgctgccacagagtactctgtgggacccctaacttcctggcccctgaggttgtctccagaaacggtcactcctgccagtaggacatctgggctctgggctgcatcatgtacacggtgctgactggcaccccacccttcatggcctcacccctgtcggagatgtaccaaaacatccgtgagggccactaccccgaacccgctcacctgt

SEQ ID NO: 92749 - DNA, 1651 bp, Homo sapiens
gaccacgcgtccgattaatcttcaaatcagcgccgcgggaagtgcgggcgggtgttgctcccctgtctctggacgacgctgtgactgatcccaggcttggagccggagctgcgagcgaggcagtgaaagggtggcagatttctgtgtaagagctgcagaaaatgatcagcttccaggaatcagtgacattccaggatgtggctgtggatttcactgcagaggagtggcagctgcttgattgtgctgagagaaccctgtattgggatgtgatgttggagaactatagaaacctcatctcagtgggatgtccaattaccaaaacaaaagtgatcctcaaggtagagcaaggacaagagccatggatggtggagggagcgaatccacacgagagctctccagaatctgactacccacttgttgatgaaccagggaagcattgggaaagcaaagacaatttttggaagtcagttttgctcacattcaatataattctgactatggagagaatccaccattataatatgagcacaaggcttaatccaatgagaaaaaaatcatataaatcgtttgagaagtgtttgccacctaatttagacttacttaaatataatagaagttatactgtagaaaacgcttatgaatgcagtgaatgcgggaaagccttcaaaaagaagtttcatttcattagacatgaaaaaaatcatacaaggaaaaaaccttttgaatgcaatgactgtggaaaagcctatagcaggaaggcacaccttgcaactcatcagaaaattcataatggagagagaccctttgtgtgcaatgattgtgggaaggcgtttatgcataaagcccaactcgtggtccaccagagacttcacactggagagaagccttatgagtgcagtcaatgtgggaaaacattcacttggaactcctcatttaatcaacacgtgaaatctcatacacttgagaagtcatttgaatgtaaggaatgtgggaaaaccttcaggtatagttcatccctttataaacattccagatttcatacaggagagaaaccctaccagtgtatcatatgtggcaaagcttttggcaacacatccgtgcttgttacacaccaaagaattcatacaggagagaaaccttacagttgtattgaatgtggcaaagccttcatcaagaagtcccatctcctcagacatcagataactcatacaggagagaagccctatgaatgtaacagatgtgggaaagcattttcccagaagtcaaatcttattgtacatcagaaaattcatacataatattcactttatgaatatgagaaggccttattaaatattttgctaaatcttattaaatactaaagaattcatggtgagaagtctacaatttaaatgaatttggaagagtagattcccataaaaaacaaccaatgccaatcatgttctggaagtgataataaactttttacagaaaatatgacagaaaacaactataaataatagagcataaagcttggaaagtaagcataccttaaaaaaatcaaaagaaccagttgaaaactacatttgccattcctgacttttaatttttataataaaaataattatgcaagtgtgagtttaaaatatatgccttatacattattattaaa

SEQ ID NO: 92750 - DNA, 1148 bp, Homo sapiens
cggttcgacccacgcgtccgttctgggatgatcattatgttgattttggaaagtaaagtcctgatgtgtcatctgcactctccgtagcagctgtcggtccctatctgcaccatttgttttctggggcatgttcaccctaacagccattggtgcccttgcccccggagcctcctcagccctgcagtttgtcagtccccgctcaaaaatctccccaccctccagcctgggcctaggggagccatgacaccacattccgggcagcccggctgcctctggctggcctgctctccgagacagcagagcgcaacgtgcaggcagggccctcagtccgggccttctcaggcccccagcctccctgacgccacatgcaggcagggccctcagcctgggcgttctcagggggccccagcctctctgacgtcctctgccagggctctgctgccagtggccagtgtcctgcaccatccttcccacctcgtgccctcagctctgcagtgtcagcccaaacaaaagccgggcgctctctggaccctccaggtccacggcggacagagcaggaggcaggcctctgacatgaggccagagcccagctgggggcagtaaacggctgtggagggagcactggccttggaatcaggagagtcaggaagccgggatctcccctaagctctgtcatcccgagctgcatggcctctggcactcctcgcagaggccctttgccagtcgaggaggcacggtcggctgacatgaagaatctagaacacgctttgcagtccagcagcaccgggtgaagtgggctgtgctatgccttgtaaggacaaccttttaccactggcgggggtgagtttcggagccaactcaaagaaaagcccgctgcactcccggcgtccccattttagatttgagtgtgcgaccgattctccccgccccctagtggatcagccggcaccctcgcttgaacgtcgtactggccgtcgcgcggtgggggtcagtgtcgtacatgatacaggtttactctgttgtacattcgccctgacaagcttctgtcttcatctgattgtccgcgcacgtggctctccagtagcgtttttgtgtgctcaacgcctcccgggagtggtctcttcgtccatatcgcctgtgtacagcac

SEQ ID NO: 92751 - DNA, 436 bp, Homo sapiens
  misc_feature (1)...(436): n = a,t,c or g
cggtccggaagtcccggctggacccacgcgttcgggcgtcctcgtggaattgacatcgtctttaaaccctgcgaggcaatccctgacgcaccggcgggatgcccagggaagacagggcgacctggaagtccaactacttccttaagatcatccaactattggatgattatcccaaacgtttcattgtgggagcaaacaatgtgggctccaagcagatgcagcagatccgcatgtcccttcgcgggaaggctgtggtgctgatgggcaagaacaccatgatgcgctaggtttncctggggcgcgccctccccgcaccctggggctccccagctgtaacaccttccccccacggctttaggcgcagggtggggggcaccccaacacacaaatgccgcgggagagctcctgaccatggggtcacgcccttggccggatg

SEQ ID NO: 92752 - DNA, 415 bp, Homo sapiens
cccgggtcgacccacgcgtccggttttaggaaacactgcaactctaaagaatttgacttattaactggactttctcctctaagaggacaaacggctccgcctagtggatggggacagccgctgtgccgggagagtatagatctatcacgacggcttctggggcaccatctgtgatgacggctgggacctgagcgatgcccacgtggtgtgtcaaaagctgggctgtggagtggccttcaatgccacggtctctgctcactttggggaggggtcagggcccatctggctggatgacctgaactgcacaggaacggagtcccacttgtggcagtgcccttcccgcggctgggggcagcacgactgcaggcacaaggaggacgcaggggtcatctgctcagaattcacagccttgagg

SEQ ID NO: 92753 - DNA, 328 bp, Homo sapiens
ttttttttttttggaaaaaaactccctgttgtgcccccgggtggatatgctggaaccgaaccttgtttcttcataacttccccatccggagttggcccgttttctgggattaacttccttgaaaaggtggacttgagggcccctttccccgaggagataattttttgtttttttctaaaaaccaggtttaccggattttgcccggagggattgggtgtcctgctcatgaaataccccccattcggtctccaagatgcgtgtttagcgatgggcccctccccccccttttgtccttatttttaaagaagttctatcttttcttaagccg

SEQ ID NO: 92754 - DNA, 407 bp, Homo sapiens
tttcgtgaaagtttgcctccgtgctggaagaactaaccttggccgtcttttttgctgggctgcctctcccattgccccctcgctccattttgggcttttatttatgactttatcagaggcagttagcagacatgaaacctggggtgggacattcgggggcgatctcagaatcggggcgcagctgcagaaggcatgccgtgatagccgggagcttctacttggcatggcgttggcagtgacgaggttggtaattagaagaagctcaagttccaccggggccttgcctgtaaaatgctggaggcgtttacccggaggccacagcagactgggaacatatcacggagggcaggcatggtgtggcactctactgaggctgcggggagtccctctggattaaaacagattcc

SEQ ID NO: 92755 - DNA, 405 bp, Homo sapiens
  misc_feature (1)...(405): n = a,t,c or g
tagttccaatctagcacccttgccccatccctcccaaaatcaggaacagacggccaccatgtcaggagactacgaggatggcctctgacgacggccactcatcctggtctcggacctctgtgcgcgggtccgagatgctgacaccaacgacaggtgccaagagttcaatgaccgaatccgaggctatccccggggtccagatgcaggtcagcacccctgtttgttttgtgcaaccccctgcttgcactatggccaggagactcggagcaaaactgctcagctttccattgcttgtggggtcagtccctcgtagcgtcttgcccccattgtgcctgatgctgcccttctcccaaatctctgatccaaggggaaggagctgtgtggcctgctttttgagttttgccn

SEQ ID NO: 92756 - DNA, 424 bp, Homo sapiens
tttcgtggtagggcgactggggctcacctcttcaccgttttaggacccggggtagggttttgagcccgtgggagctgccccactcggcctcgtactgccaacggtcggatgggggagacgaaagacgcaccgcaaatgttggtgaccttcaaggatgtggctgtgacctttttccgggaggagtggagacagcttgtgctggtccataggaccctgtaccgataggggatgctggaaacctgcgggcttttggatactctaaggcataacgttccccaaccagatgtggtccacctcctatatcatgggacccagctgttgatagtgaagagagaggtgtcacattctccctgcgccggtgacatgagagaactctttaccagagaggccacacttaccccgcacccttataataacggggcgt

SEQ ID NO: 92757 - DNA, 425 bp, Homo sapiens
ctgctgcggggctgagcggtgctcgcacgcgtctcgggagccaggttggcggcgcgatgaggcgcagcaaggccgatgtggagcggtacgtcgcctcggtgctgggtctcaccccgtcgcctcgacagaagtcaatgaaaggattctattttgcaaagctgtattatgaagctaaagaatatgatcttgctaaaaagtaagtacaaaccgtaacatgtattcttttttttaaaatcaatgccttttctcattttcttctttgaaataggtaaaaatatgttcttagtagttcttcctaagtgtattctggaataagggatttatcactcagactgatgctaaggaccagcctagattccattgagattgaaactgcaattagtgttttctgcatgctgctgctttataccaagggcaagaaattg

SEQ ID NO: 92758 - DNA, 435 bp, Homo sapiens
gaccgccctctgaattcccgggtcgacgatttcgtggcgtgggtgagcatggagccttctggaaagcggccggatgtgtggaggcagagaggcagcatccaggcgctggtcgccttcgggacatgctgctgctgaagaaacacacggaggacatcagcagcgtctacgagatccgcgagaggctcggctcgggtgccttctccgaggtggtgctggcccaggagcggggctccgcacacctcgtggccctcaagtgcatccccaagaaggccctccggggcaaggaggccctggtggagaacgagatcgcagtgctccgtaggatcagtcaccccaacatcgtcgctctggaggatgtccacgagagcccttcccacctctacctggccatggaactgtgaggagggcctgggcaggctgtgggagccggggagg

SEQ ID NO: 92759 - DNA, 429 bp, Homo sapiens
  misc_feature (1)...(429): n = a,t,c or g
ttgatcgggtaagcgaacagaccatttcgngcttgggggagaggctagtggtaacaggccttgcatgatggatgggtatggggagaggggcaggacgttcanccctgggattctggccgaccctcgcctttcttctctgcagcttccccgcagccacctccccgtgcaagatcctcaagtgcaactctgagttctggagcgccacgtcgggcagccacgccccagcctcagacgacacccccgagttctgtgcagccttgcgcagctacgccctgtgcacgcggcggacggcccgcacctgccggggtgacctggcctaccactcggccgtccatggcatagaggacctcatgagccagcacaactgcttcaaggatggccccaccttgcagacacgcctgcgcacgctttcaccggccggagacagcg

SEQ ID NO: 92760 - DNA, 412 bp, Homo sapiens
  misc_feature (1)...(412): n = a,t,c or g
tttcgnnncggcggcgggagccctggaacggagcttcttgtagctaagcggagctgagcgcgaaaggccgaggcactttcgggaattcacagtctgcagcattggtacggaaatggccagggagggtgcgatcccatctgtcccctcgggctcctctcatgggtcccagggtccctgacgccctgtttcatcctcctgagtccacatgcctctagccccgggatcagagattccttgatgtccgacgttttcctcttttctttgtatgggttgacagtctgtcactctctgctttgtcagctcccttagtccctgtcatttctcagaagacgcgtgtgcaggctgaccacgttcattttgcagggactgcaaatgccgtggctggcgccgtaaaatacagtgaaagcgcggg

SEQ ID NO: 92761 - DNA, 3325 bp, Homo sapiens
ctgcttccctgacatctctgctccagccagctcggcctcctactcccacgggcagcctgcgatgcctggctccagcggggtccaccacctgagcccccctgggggtggaccctccccggggcgccatggtcccctcccacccccgggctacggcaccccgctgaactgcaacaacaacaacggcatgggcgctgcccccaagcccttcccggggggcaccgggccccccatcaaggctgagcccaaggctccctatgccccaggcacactgccggactctcccccagactcgggctccgaggcctactccccccagcaggtgaatgagccccacctcctgcgcacgataacccctgagacactgtgccacgtgggagtgccctcccgcctggagcatccgcccccacctccagcccacttgccaggccccccgccacccccaccacccccacctcactaccctgtcctgcagcgggatctgtacatgaaggccgagcccccgatcccccactacgctgccatggggcaggggctggtgcccactgatcttcaccacacccagcagtcccagatgctgcaccagctcctgcagcagcacggagctgagctccctacacacccctccaagaagaggaagcactctgaatccccccccagcaccctcaatgcccagatgctgaatggaatgatcaaacaggagcctgggaccgtgacagccctgcctctgcaccccactcgagccccatcgccaccctggcctccccagggtccgctctccccgggccctggttccttgcctctcagcattgcccgtgtccagacaccgccttggcacccgccaggtgccccctccccaggcctcctgcaggacagtgacagcctcagtggctcctacctggaccccaactaccagtccatcaagtggcagcctcatcagcagaacaagtgggcgaccctgtacgatgctaactacaaggagctgcccatgctcacctaccgcgtggatgcggacaagggcttcaacttttcggtgggcgacgacgcctttgtgtgccagaagaagaaccacttccaggtgacagtgtacatcggcatgctgggcgagcccaagtacgtcaagacgcccgagggcctcaagcccctcgactgcttctatctgaagctgcacggagtgaagctggaggccctgaaccagtccattaacatcgagcagtcccagtcagaccggagcaagcggcccttcaacccggtcacggtcaatctgccccctgagcaggtcacgaaggtgactgtggggcggctgcacttcagcgagaccaccgctaacaacatgcgtaagaagggcaagcccaacccggaccagaggtacttcatgctggtggtggccctccaggctcatgcacagaaccagaactacacgctggccgcccagatctcagagcgcatcattgtgcgggcctccaacccaggccagttcgagagcgacagcgatgtgttgtggcagcgggcacaggtgcccgacaccgtcttccaccacggccgcgtgggcatcaacacagaccggccggatgaggcgctggttgtgcacgggaatgtcaaggtcatgggctcgcttatgcacccctccgacctgcgcgccaaggaacacgtgcaggaggtggacaccaccgagcaattgaagaggatctcgcgcatgcggctggtgcactacagatacaagcccgagttcgccgccagcgcgggcatcgaggccaccgcgccagagacaggtgtcatcgctcaggaggtgaaggagatcttgcctgaggctgtgaaagacaccggagacatggtctttgccaatgggaaaaccatagagaacttcctggtggtgaacaaggagcgcatcttcatggagaacgtaggggccgtgaaggagctgtgcaagctgacagacaacctggagacgcgcattgatgagctggagcgctggagccacaagctggccaagctgcggcggctcgacagcctcaagtccaccggcagctcgggcgccttcagccatgcagggagccagttcagtcgggcgggcagcgtcccccacaagaagaggccccccaaggtggccagcaagtcatcgtccgtggttccggaccaggcctgcatcagccagcgcttcctgcagggaaccatcattgccctggtggtggtcatggccttcagcgtggtgtccatgtccacactgtacgtgctgagcctgcgcacagaggaggacctggtagacactgatggctcttttgccgtgtccacttcctgtctcctggccctgctccggccccagccccctggggggagtgaggccttgtgcccatggtccagccagagctttgggaccacgcagctccgacagtcccccttgaccacggggctaccaggcatacagccctctttgctgctggtgaccaccagcctcaccagctcggccccaggttctgctgtccgcaccttggacatgtgttccagccacccctgccctgtcatctgctgttcctcacccactaccaaccctaccactggtcctagtcttggccccagctttaaccctggccatgttctcagcccaagtcccagccccagcaccaaccgctcaggccccagccagatggcccttctgccagtcaccaacatcagagccaagtcctggggtctttcagtcaatggcattggccactccaagcatcacaagagtctggagcctctggccagccctgcagtccccttccctggggggcagggcaaagccaagaacagtcccagccttggtttccatggccgggcccgccgaggggccctccagtccagcgtgggccctgctgagcccacctgggcccagggccagtcagaactgggagagatgcccgcagtcaggaacacaggcctcgagcgggctcctgcacacctggcaggggatgtgaagacccatccctacttctgggtgttccagttcttttgaggaggcagacgtcaggctcatgggaactgggtagtcctagggctgctgaggaaagggtgtagtgtgatgctggccattgtggaggtctggaaaaaaataacctggaacttattcatactaaggtgtgagtgactgcttcaagtctggcaaggaaagacttgccagcttctcatttgtgtcctgccttgtcaccttactcctgccccaacagcctctctccttgcagagccagtgccctccctgacctccatccaggtgctggagaattcgatgtccatcacctcccagtactgtgctccaggggatgcctgcaggcctgggaacttcacctac

SEQ ID NO: 92762 - DNA, 407 bp, Homo sapiens
ctcctgtaggtggcggagcgggcaggaaggcgctttcgcaattgaaccgtctgcatgcccgagggttgggtggtttcggcctcctcttctgttccccctcgtgtctctcctcccaccttgtccccactcccgctagcccgctgcctgccgagggtataagactcccccctcccttgatttatctggttacgtgtaatcgaggcgtgttttacgcgcatctctttgcaagtgggaagtcggcactggagcacacaacagtggcatgggtcgagggtgtcccagggcccctcgcggttctccctcctttcctcccggcctgctccccttcccattgcccctgacacctgcacttcctggtctccccgcagggtggcggcggcatggaggcgcgcttcacgcgcgggaag

SEQ ID NO: 92763 - DNA, 476 bp, Homo sapiens
ccaagatagatcaactctccctaaaggctgacagtgaactcttggggccgttttattctctgaggttagcaaggagtcatctactagccattcaggaggccagctgggaagacaaaataggcaccccaaactcagcaacttcataacaccttcctctccccgcctgaagccttaaactgcatcaagtcaaagaaacctggggcaaatccttaacatgtttttgactgcagtaaatccacagccactctctactccgagctggcagattgagaccaagtattcaacgaaagtgctcactggaaattggatggaagagaggagaaaggggctaccttacaaacacctgatcacccaccaccaggagcccccacatcgctacctgatcagcacctatgacgaccattacaaccggcatggttacaacccggggctgcctccactccgcacttggaatggacagaagttgctgtggctgc

SEQ ID NO: 92764 - DNA, 486 bp, Homo sapiens
atacgcaatcggtaccggcccggaattcctgggtcgagttctgccttcctcagtgtcttctgcccatcgtgcgtttctttctccaccttattctgtgtttctgtttcagttgctctgcttctctccctctctttctgttgctgtttctctgtgtctctgtcactgttggtctttccctgttactttgggaatctctctgtctgtctttctgtatctatgcctctgtttctcattccatctccgaccctgttttgctctcctgtgcctctgtctgtctctgtctcttttcctggtgcttgaagcttccattgttgcagtccggatgctgggactccagccccaagcttcctgtcctgggacccaaaccctccacttcctcaatcctctgcagcttgtcagccgaggagagcaggatgcagggaaaacaggaaggaggtggactccaggggtctgggcctcgggcctctctgcccttcctgcccctgg

SEQ ID NO: 92765 - DNA, 412 bp, Homo sapiens
actgaggagctcgcctgctgccctcttgcgcgcgctatgcattaccacggtcacaggcaccgccttggcactacggtccagagtggctacaacaaaccctgatgggtgccgcaatgtcctgagacccaagtactacagactttgtgataaagctgaatcttggggcatcgccctagaaacggtgcccacaggtgtggcagtgacctcatgggccatcatgctaactgttctgacactggtctgcaaagggcaggactacaacaggcgacaaaagctgcctactcatattctctgcctcctgtgagagaagggcatctttggcctcaccttcgccttcatcatcggactggacgggagcacagggcccacacgcttcttcctctttgggatcctcttttccatctgcttctcg

SEQ ID NO: 92766 - DNA, 386 bp, Homo sapiens
tgctacagacccgttttcctggagaaaaagcatgctttccccactgttagtaaatggccttcataccctggggagtgggcttctttactgctcgacactggactggcctttatgtccaaaggatacaatgctagcttggcttcagccctagtgaacagagaacagaggaagcaggcagtttaatccatccgtggtccttcctctgcctcccaattaactaagagtgcctttgcagtcaactctgacgtccttggctggtaggcaggcaagggagggaagtacaaggcaagtttacaatcctgattcaaaccagcccactatcccgaaaccagcacacagagccggcatcaccatggaaacacatttcctcacagtggagcaagatg

SEQ ID NO: 92767 - DNA, 424 bp, Homo sapiens
cttcttcctagatttatgccggttgttagagaaacaccttttgcactcatcgttgatgtgctcagcaaagatggccttgaaggtccggaggcctcaaggggtttccacgtagcccgcaatgcccacaaccaccataggtggtgtctccacagtagtcatggcctctaccacctccttcactttcaccttggatcttggcctgtcgacttcccgtgtgatgtgggtcatgccagccttgtatcccaggaaggctgtgacgttgaccagcttggaagggtcatccttagggaagctgttcaccttcccacgttgcctatttcttcactcctatggcaggaagcagagggacccatgtctgggagtggagaactttctgtgagacatcacacaatcaaattccaccggtagagctctccctgtggtt

SEQ ID NO: 92768 - DNA, 550 bp, Homo sapiens
ctgatgttgagaaacaaaattccaaataatctgtcttaagttgtgttggcaacaaggaagtagtaccatgttctctctggcgctctgttttctgtgcacaaactgagagacctcccatttaaagttttcacctgagcactgtttgctcagtcctgcctcacaccagcctcttgagtccagtattcctgccaagtggtccctgaactttcagcagctaaatggtgtctcatttttcaaattcttactgttcaataagtacatgattaagctaacaaaaaatatctaatgcaatggaaaaatatgaatctaaatttaaaggcatgactcatcctacctgcctcccctccttcagaaaactgccactgttaactttatggcatcttctgtttgaaatatttatgtgtacatagacaactagaatatttttcccccagaactaatactataatttatattcaggtacatatgttagtcatttaaaaaatacatttctttgaaaatttccacatacgtctatgaagctaagtagatctcttcagtggctatctgt

SEQ ID NO: 92769 - DNA, 397 bp, Homo sapiens
gggaaggccaggctgggtctcagggtgagagttacagtttgatatgaaataatcggggaagaggcaagttacagcgggtatcctgatgcagaccatccccagccagaaacacagccgcagaactgagcccaagctccagaccaaaaactgagcccaagctcagggtctgcatggcccagagctggcatctgtccgggggactggcccatgcaaagtgaccactgtcatccagtccaggagctgtgagctgcatggaaagaatgtgaatgaagacacaactctaaatgtggaaccatggacgctatgtgagccagtgtgctccctagccgtccagaaaaacaaggcccacttgtacattctgcaagagcataaataaagctgtcctcaggcggaaaaa

SEQ ID NO: 92770 - DNA, 1873 bp, Homo sapiens
tgttttaaactccggacgggcttttttctcctcctcttgggggggacccagagggagcggcgccccctcccccctccggcgcggaccccgcgtgcgccttgctcgcccgcagccccgagaccgcaggcgtcacaatgtagcagggaccccaggcgtcgtgctcagaaaatggaaaaagagccagggccggaaggagggtgcagaagcgagtccgcgtgcggagccaggaggcagcgtcgcgtgggagtgctggcctgaagcctccatgccccggcagagggacggacacgcggacgtctagcggagaagccaaagatgttgaccaggaagatcaagctgtgggacatcaacgcccacatcacctgccgcctgtgcagcgggtacctcatcgacgccaccacggtgaccgagtgtctgcacacctgtacgtgccctgcccgcgccacccagggagggcgcgcccttcccagctctgtgctcttcagaaccttggcttttgtgttaccacacgcttttagctcaagcccgacaaaagcaggaaccaggaccaggggcagagacgatcttgaagataagtcagaaaagtcatttcacgctaaaggtcctgtgggtggtgtcagagcagatgaggcctcgcttaggagagcgaaacacaggagagaccccacattcctcccacggagcagcaaggccagtagccgctgtgacagtgctcactgctggcagtttccaaatctccagaggagttccttagatccttcaaaggggaaccttccagtgtgttcttcacacctgatgtgcgtcctcacacctgatgagtctgtgctttggtgttagaggactcacacctggggctggacctgagtgtttttctaagtgtggctaccgctgacgggcaggtgccatccatcaggctgaggctcggctcttatgctaacctgaggccccatggctggcggccctgctggtgtggacgaccgctgtgtgcgtctcttgatggctggggagcattttgtttaaacaggatctttaaaatgaagtgtacgcttataatacaagtgatgcttgtgtatttctcactttaggaaataaaatatttgccaatttgatagaattttgactttaacgttaatcgtatttttagatattggttagcatattttatgttaggttattttcatttgattttatctagttgtacgtagaagatactgtcatcttttaggacaaagtattgtaaaattatctgttttagcccatgttctgatgacccacagctctgtcacctttgagcatcatctccccattctaagtttttttcccacttaattcctaaccctgcctctttgaggaagcccattgacggggcaattaaaaccttctcattgctcctgagaccagaacggcaagatgtttcctttcagaagctgagagccacaaggaggacagcagtgagcatctgcacagaaacgagctcagagacgcccgtgttcagtggagcacgccgatggggtgggcgccctggctctagacgctctcctaacacacctgtgctttgatgacagtctgcaggagctgcctggtgaagtacctggaggagaacaacacctgccccacctgcaggattgtgatccaccagagccaccccctgcagtacatcggtcatgacagaaccatgcaagatattgtttacaaattggtaccaggcctccaagaagcggaaatgagaaagcagagggagttctatcacaaattgggcatggaggtgccgggagacatcaagggggagacctgctctgcaaaacagcacttagattcccatcggaatggtgaaaccaaagcagacgacagttcaaacaaagaggccgcggag

SEQ ID NO: 92771 - DNA, 420 bp, Homo sapiens
ccaagcttacacgagcttgcgacaccctggctttctatatatggggaggcgggctagtcaacctgctcgccataatggacaaccatccttactactgtgccgagacataacccttccacctacctacacatatgtagggcagctgggcgctgatccaagtgttaggcgtgcctggcgttctactaggtgaaaatgcgcgctccatcagatccttgaagattcggggcattgggcatttctgccaggagatggccaagaagggatgcagacacctggtgtgctcctcagggggtaatgcgggcatcgctgctgcctatgctgctaggaagctgggcattcctgccaccatcgtgctccccgagagcacctccctgcaggtggtgcaaaggctgcagggggagggggccgaggttcatctgg

SEQ ID NO: 92772 - DNA, 426 bp, Homo sapiens
aattagcagccgaatcctctgccagtcagcagccgttccaggcatattgatggggtagaagatgcaaatctcacagtcatactgctttgtctcattactgctgcaattagcacttaaattgatgctttaaacatactaatttctggaataattcaggatttgtatgttacctgggatcgcctcactgcagagccggcaccagattgctctgcaaattgaagcacttgtgagccaaataaccatcatcatatcagacagagccaatttgcatttggttttaaagataacagaatggcaatgtatgcaaataaattaagtaagtttggttctgagttctccctgaactaatatagcaatgttctattttctgatattaaaaaggctggatcgagttgcgaacggtgggtggccgggatccggccggtg

SEQ ID NO: 92773 - DNA, 410 bp, Homo sapiens
ttataaagtatcgtgatccctgcaatttgcttaattttatattgtcttataaacattgaaaatagagcatagctttacacatgatgtggagagactggtcagctcatctttgaagcacctactatacatcagttgcttagcatattaaaactaataattaaatattactttgaggaaggtaaagtatacggagtttaatgagggtaaatgtttctaggagttaaagtgctgatcataaagctacataatgtttttgtaatgtggaaggtgatgataagacatgtaaataaatttctccattatattaaactaatatttatcaactactaaaaattaatcattctctccattttttcagctttcgtgtttcacctgactttcaccaccccatacatcatgtttcactctcc

SEQ ID NO: 92774 - DNA, 425 bp, Homo sapiens
  misc_feature (1)...(425): n = a,t,c or g
ntgagttcacagtcatcccgagtatggccataccctgtccttcaaaagcctcacagcaataatgggattcaaagaaaatgtattcagctacccagatggacagcttcacttccggcatctctaacaggttaactgcactcagagaaaggacaagaaaatacatgaatgtggcagattcagcttcttaaaacctaactggctgtgagccattctgtctccagataaagctatttacaaaggaccacaggggacttggtagaggacacaacactgatggcaaaggacatctgtccccaggacagccacactcggagtcagccatgtgcttgccatgccttctcctcccacctctttagagactcactccattgccctctccatcttctcatctctctccctcaccacagccctacttacaaccatct

SEQ ID NO: 92775 - DNA, 392 bp, Homo sapiens
aaaagaaaaaatcagggggcctcaatttgtccttatgatgagtcatggctttccaacgcaggctgtaggatggatcattgtcaagacaaccatatttctcttcaggaatgatgttaaatttggggactatgttcctggagattaatatggctgtgaccattaaaatgttacaaaatagcaaagaaaaactgtaaatctctatagtcattcacagttggaaaatcagattccaagtcctagaaaaaggcaaaaatataaagtacatattagataaagactgttatcagacacacagaatttcttatcttctttactatatgttagacctaagataaatgagttgatcagaataaccattacagacttaattagcaattttgattggctctttt

SEQ ID NO: 92776 - DNA, 1173 bp, Homo sapiens
cccacgcgtccgcccacgcgtccgcaaacttctgagctcaagcaatccacctgcctctgcctcccaaagggctagggttacaggcatgagctaccatgcccggccaataatttttaatttatgtatcggttctttctttctttctttctttttttaatttaagaaagctgctgtaagtagattggctctggaagctctgaatttaggttgcctatgttcctaacacaggtccaattctcactagctaagcttaggcttagctattatttaaagtctccaaacctcagtttccttaactgtaaagtgggaataataataaacctcacctcaaggtcattgtgaggtaaaatgaaataatccatgcgaagggcttagctcagtcaggcttcaagataaatgtgaactgtaattactctatctacctgaattgaatgagttccaacatgaattctggagtcaccacagaagctgctacaacaccaatattaataaattagttttcttttacaatcggccaaaatgtattttcttagattaaaattctttaagttcccaatgacgatgatgaggaggataatacatctagcactttgagcagcacacagttctcgtaactagaaggtaggtattacagttaacttcatttcagatgaagagactgaggggtaggcacattaagggatttgcccaaggatgtacaggtggcagctataggaggcagggtctgaaccaccttagtctgactccagtgccggtgttgttgattattatgctattccatctaacatggtgtgatttgtaatttcatggactcaggtaaatccagggttaaattaacttcggaaaatcacaagcacaattcctaacagaaagaatttgttacttgggtgggctggagtaagatgctcattcaacgtgttctcagagttagaaaaaggcccccgcttggtcaaaaactggactgataggggcaacagtcatgcttaaataaggacagttatttttccctgaaagatacattgaaaagccagtatcctcaattttctttcttattttggcagtacagagactgcattatttgttgctattcttaaacattaagtgtacatagcccaaagagtataatttcccaatctgcagagggacagtagttgcatatataacccggttatt

SEQ ID NO: 92777 - DNA, 761 bp, Homo sapiens
atggagcccattgagggcaagagatccagctgccataaaacaggagaagctacaggaagcctcatgtgccttcgtcggccgcgccggctcccaggatacagtgcggaccggccgggcgctaaaggcgttgacgcaactgcgggcggcgcagggcaggggcagtcagggagcagcggcggcagagacagggctgggcgggcgccgcctgcggagagcaccgggaggcgggccctgcgtggaggccgcgcgcagcagcggcgacgactttatctgggccgcgggggacagcgcagggccatggaggaggcggtcgcagctccgatttctccgtggacgatggcagccacgattcaggccatggagaggaagattgaatcgcaggctgctcacctgctttccctagaaggtcaaaccgggatggccgagaagaagctggctgattgcgagaagacagccgtggagttcgggaaccagctggagggcaagtgggccgtgctggggaccctgctgcaggagtacgggctgctgcagaggcggctggagaacgtggagaacctgctgcgcaacaggaacttctggatcctgcggctgcccccaggcagcaagggggagtcccctaaggtgcctatgacatttgatgatgtggctgtgtagttctctgagcaagtgtggggcaagctggaggactggcagaaggagctttgcaagcacgtgatgaggggcaactgcgagatgctggtctctttggactacgccatctc

SEQ ID NO: 92778 - DNA, 450 bp, Homo sapiens
  misc_feature (1)...(450): n = a,t,c or g
ctgcggtanngnnnnagggtcccgggtcgacgatttcgtgggtggagacccggaagacccccgagctgccgccgcgccgcctctctgcgccgggagaggaggttcaggacgggcgaggggagaggagagggcagggacgaggctgaagccgcagaagggagaggaccagcggggctacagacaagagaaaagctttagaggagaccaaagcctatacaacccaatctctagctagtgttgcttatcagataaatgcattggccaacaatgtactccagttgctggatatacaagcctctcagcttcggagaatggagtcttccatcaatcatatctcacaggtaacagcttataaaatgctttaaattcaatttaaaaaaaactacagcgtatgccagagaagtaaatagcctgcatgtatggatttctgactcatcttactggtgatac

SEQ ID NO: 92779 - DNA, 1220 bp, Homo sapiens
tccaggtctcgacttcactgctctgtgtcctctgctccaggaggcccagcctgtgtggccctgtgacctgcaggtattggagagccacagctaagatgccaggaacccctgcaagcctagaaatgagccttctctgcatgatggcttcttatatgccatgcagaattctcaccatgaatttgtgatctgcaatattaaaaatgttctctttgtggctgttgaacatggaaaggtgtggataatctatttctatggagaaaacctgggattcttagtgaagatggagaacatataatgttgagggactgttgacatttagggatgtggccatagaattctctctggaggagtggcagtgcctggacactgcacagaagaatttatataggaatgtgatgttagagaactacagaaacctggccttcctgggtattgctgtctctaagccagacctcatcatctgtctggagaaagaaaaagagccctggaatatgaagcgagatgagatggtggatgaacccccaggtaggtgagagtgaatacaacagatgacctggatgagaggtccaacgtcaagaagaaagccagtctttaaagtgatttggaaagctgcattccaaaggaaaccgtttctggaaagcctgaaatttaaaaaaaaatatactctcagataggggcatcttctgcttatgccttataaaatctctaagaattctactctcccttcaatgatcttccttaacgtttacagtgacagccaaagtactgttcatggcatataaaagagtgtacaatctgactttttttttcttgtttttgtggacagatagatatctgcatagttttgagacactctatgttaaaatttttttttgttttagaaggagtttcgcttttgtggcccatgctggagtgcaatgagctgagatcatgccactgtactttagcctgggcggcagagcaagactctctctcgatgtatatatatatagtttgaaattataaagtataatgtccttctgctttgttctttttcctcaagattgctttggctattcaaaatttattgtggtttcgtgtacattttaggattgtaattttcattactgtgaaaaactggaattttgacagggagtttattgagtctagagatcaccttagataatatggcagtttcacaatacttattctttcaatagaaataaaatatttttaaattt

SEQ ID NO: 92780 - DNA, 1077 bp, Homo sapiens
taaagatttaattctccatatgagtaagttagcgtgtatcatcagaaactatctagaactgtgtgcacagactgctactggttttccaagttgaatatacttgagtatcttaaaatatttcatcaactttctaaaacatcaagaaaagctctctatacaaataccatggccgattataattattttgttttccatccttttaaaaatattttctgctttgcatcccattattattttgagtatcttttcattcgcagtttgatgttcattgcgttggcttacagctaacattcatttcatacgttttgatgcttagctgaaaaattacaataaattctccaatgaaattatgtatctttatttaatgaaaatgcctgctgcgtaccaaggtatgtactagggcatctggggtaagtaaaaacaaacacatagagcctgcctggagaagctcatggtctgatggaaagataagcaagaagagttaatttctaatcaatatgataaaaaggtcagagagcagtttctgaaaaacatgtttttgagttgagtcctgaaagacaaggagatgttagtaaagcagagaagggagaattcattctagaaagatcagacagtgtgtgggaagggcagagtctgaaaagagcatgccccatttggagaagcatcaagaagcccacgtgttagaagcaccggccccatgagacaaagacacagctagagagattgactaggccatgtcggaatgtcctcttattttatacatacataagcatatagatacatatagccaaagttacctttttaatgatcttttttacccagtgtattctggaggtcgaatggtcacatatgaacatctccgagaggttgtgtttggcaaaagtgaagatgagcattatcccctttggtaagttttgtttggaaaataatatgctgttgccccaaatgccttaatgtttattaggtttatgtaaaattgtacatttgtacccaaattgccttaagttatggacttaaaataataattacaatataagtccagataattgagcatttactgcagatgtatacagacat

SEQ ID NO: 92781 - DNA, 410 bp, Homo sapiens
tttcgtaaagcacagcaggtttcagagcaaggagagatgttttgaccttcgtgatcaaaagaacctggctttgatagttccatcatctcaaatgtctcctatagaaatatttgtggtgaaagtgtttgatgttctaattctcttttgaataaggaagagtatttctggtgggactttgtcattaaaactgtttcttattaagttattataacagttattcacctaattttaggactgcttatgattagtattaaaaactcataccaacttaagaatgttaatcttttgatattctcacttaccagctgtggtttaatttaatgctgttaaaaactgctgatgagaattgataatgttggttagttagctagcttatctacgcttgacttttaagaatgctaggcaaattg

SEQ ID NO: 92782 - DNA, 651 bp, Homo sapiens
tttcgtctgtggtggggtcgggactgcgcggcctcagcagctgcgggagacggaagtggcaagagcgcggcctcagagggtcgggcggacgccgcctggtgagaagcaggcagccagtacccttgccacggtagaatgggtgaggaggggccccccagcctggagtacatccaagccaaggatctgttcccccccaaggaactagtgaaggaggaagagaatcttcaggtccccttcacagtgctgcagggtgagggagtagagttcctgggccgggcagccgatgccctcattgccatctctaactaccggctgcatatcaaattcaaggactctgtcatcaacgtccccctccggatgattgacagtgtggagagccgtgatatgttccagttgcacatttcctgcaaggactccaaagtggtgaggtgagaacaacggagcctcactcaggtcccctggccctagtcttgtccagttctctgtgctgcagggtttctctggtgcaagagaggaaagaacctgcctcactttccccagttggaagaaaaggtgaagaccatgttctgggttgggaggtcagtttactgacccataagatcttgacctgaaaaaatgggggtaatgcctagttcatggagtcatcgtagg

SEQ ID NO: 92783 - DNA, 423 bp, Homo sapiens
ttcggagcagagagaacagcgcccatgagccacagggctcatacatccggagcctatcaccactccgcatcttaagctcccgggatgaccgcggactggcggcccaggaccactgctccagctgtttccccaggtaatccacctgccttgggttaccttttagcgcggcccagttagccgcaaccagccaccatttacccgctttccccaaaccaggaaaaccacagaaacgcatgtgcgcggccagtctcttccacgcccgggaacgcagagcttacagaccaaggccgcccaagtcccctcaccccaaaggctacccaagaaccccgagtaggctgtttggctgactcaggcgcccaacgcccacccgaactgagtcgctagggaaactcccaactgccagacgaaatcgtcgacccggga

SEQ ID NO: 92784 - DNA, 418 bp, Homo sapiens
ccagcgtggtggaattctgggaaggagggtgctgtggagggggctgcagggctgaccagcaggcagcctcatctggtcgggggcgggggcggcaggagcagaagcggggtctccgtccttgggactgtactggttggccacgggccctgaggatgcacggtgcctggggctcctgtgccggtgggcggggggcatgctggcctctgagcgatcaggcgaggccagcgagggtgtgcttgcaaattcaagcaataagaggggggttcctgggggcttccagcccaggctataagcatccatgtgttctggcagctggacatcctgcccaggcattgtcttgattccggtcatgaacgcgcgcctgactgagtagaccacacatgatggggggctatgccgcgggacccctttattaaag

SEQ ID NO: 92785 - DNA, 568 bp, Homo sapiens
tctagctctgacatacacaggtatttattgaactctgggatttctcaggaaaaatgcagtgcagagaaaggttcctgatgagaccacagcatacagaccatccagtgtgggcaccaccttgtcactacactttaaattcttcatattgattgagggctatctaaatgtcagaccctttgctgagtgctaggtgcaggaggatcataggcagccaggaggtagaggggtcttggggtacataagtcattgtggttgaagagcagagattcaaaaagaagttaggcctggagatttaaaggagaccgaagctggtgacttccttatgtcaacttctggctgagaaagtttgacacagtgtgaataaactgtcacagatgccagaccatctccttcttgtccaggtgcacaaataactgctcatcttcatcagattcaaacatatactccccagagggtctgtgtgtctgcacaaactctacatacgttgacacatggtctgcttacgggttccaatgggtgtatatttccaagaatgtggagggatccttctcagttgtgagattatgaa

SEQ ID NO: 92786 - DNA, 721 bp, Homo sapiens
gccacccgttcagcaaccctctacacctggacccgacctcctcgccttggaggaagaatataagtaagaaattcggcggttgaacttttccttctttctttcatctgaatgaggctgcttacaagtacttttttctggagactggctggatcttcgggaccactcactctgcagcattcccttctcgtcatctcgttcacctgccgtttatcctttctttgtctttgatctgagtagttcgcctgcgtattagaagatatttgaagtgggcgaaaatttagcccaagcgtttaaatgcagaattgcaggcaaaaacagctgacgtggttcaacaagctaaggaaataatagcacttacagctgcataaatttccctctcagtactgctttcacttacctatctttactcatttaagagagatcggcaagaagtacgatctaggcctgtttcaacacaaatgaaatcatgtgatgacgaagatgattacagtttaagaggtctgttaccatctgaagggatagttcatcttcattcagaaactaagccaaagaccaaaaacattgatcctgtaaacaaggttcaaaacaaattacactctgcaaataaaggaaggaaaacaaattcaagtgttaaattgaaatactctgatgtccaaactgccgacgatgttgccattccagaggatttctcagacttttcccttgcaaaaacaattagcaa

SEQ ID NO: 92787 - DNA, 803 bp, Homo sapiens
  misc_feature (1)...(803): n = a,t,c or g
gtgtgtattccacacaccacaacgagtctgtcattcttaatgtctgaagatgaggttttgcttttgcattctttgctttagttctgtggatcctgacaagtacctgattctctacagcaatggccagggcccccacgtggtgggagcggggatgatctgggaactgcccggctccagggggcatccacacagcctacggctcggatggtgcccctggatgtgtgctgttcggcttccaggcctgggactcccccaaatggaccccggcacagggacaggatgagtaggggaagcccgccttggtcactcgtgcccggtggttgctagccccagcaactgcgtaaacggggctccctggctctacccctctccgtggctgcccttctgggtgcagcccagcctggtcactgccctccaccaggagccagggaacaggacccgggcaggtacagcggtaccacctgttccttaccatgcaaatttattggacttgaacgaatttggaactgttccagagctcattgttctcaccttgtggcataacttaggtagtagggcaactcccttacccttgcctggactcttactatcaaagccctccattgataagggctaggccgaccacaccctaaagcatttcttggatgaatggattngcgtccttacctatacccgaagaatggcccttggtagggtctccccttttggtagactcgcgaacatccatcccctatgtgtgtgaagcggccccatttccaataccggtcctcgaagcacccctcggctccacgtgtgccgtgccg

SEQ ID NO: 92788 - DNA, 456 bp, Homo sapiens
cattagtccagtgcggtggaattccaagctcaggacctctgagaagaatggagccctcctggcttcaggaactcatggcttaccccttcttgctgctgatcctcctctgcatgtctctgctgctgtttcaggtaatcaggttgtaccagaggaggagatggacgatcagagccatgcacctgtttcctgcaccccctgcgcactggttctatggccacaaggaggtaagaggggaaaattagttggggaggttaaggaacagaaagatgaggtattaaaaaaaacagcacatattggtggggcattatgtaatatgcaaaatgctttcacaccaatctcatttgatatttacaaaaattctatgataggggaggaaacatattgttattcctattttacaggtaagaaaactgaagcctaaaatagagatgcaactttcctgtgctacccatctca

SEQ ID NO: 92789 - DNA, 435 bp, Homo sapiens
gtcttttagtccagcgtggtggaattcgttcttaatgtcaagagtgccagaatactcagtttgacttgaaatgctgtagggtgtcattagccccgtgtggtttaggcaggtaattgagttagtggagcagcagggtgacatttggaatgtgcgtagacgcaggggaggagcagctttgggatggaaggcatatcctgcatggtggacagtccacacctgcatcatttagaggctcgtgaatcacttaggaggccccaaatctacccattgaggacttttatccacctctctcggagtttctcagtgtgtttttgtttccctctgctgcttccttttcctgaactcttcaacccctacgcccccagaatggcccttcctttcctctgccgtggactgggattacttgggaactggctttagctcccaccctagagg

SEQ ID NO: 92790 - DNA, 558 bp, Homo sapiens
aatcctatccaagtatgcagtacgctcttgggtcgtctcatgagacccaggggcatgttggaaagaactgagagaaagagcaacaaagcggcgagtggtgtgagagggcagcacgcgctgtggggcccttccagagaaatgtactgaaaaagtctacgcaatgtctgggatttgctaaacaatacctggaaagcagacaggtttttttgccattcctccaggacatccaccataaggaaaggagaccctggaccaacattctctaagatgtcgatatggaccagtggccggacctcttcatcttatagacatgatgaaaagagaaatatttaccagagaatcagggaccatgacctcctggacaaaaggaaaacagtcacagcactgaaggcaggagaggaccgagctattctactgggactggctatgatggtgtgctccatcatgatgtaatttctgctgggaatcacactcctgcgctcatacatgcagagcgtgtggacccgagagtctcaatgcaccttgctgaatgcgtccatcacggaaacatttaactgc

SEQ ID NO: 92791 - DNA, 650 bp, Homo sapiens
agtgcggtggaattccagtggccagcatttacacacttcccacactgatggacaaaatcttgctgagtctggatatttgtatcagtcaaccctgaattatctttgcttaaatatctatcagcagattttctggattatctttatcagctttgccatatggggaaaagcactaagacttcagttttcttgtttataaaatgagggaggcatacaaaatgatgtctgagcactctcctacattgaagggctgggatcctcttatatctaatgacctaccaaatatctatctctactgggtgtctcactggcatgtttaattcagcaaaatccaaactaaactccctttcactccaacacctcagtcttgtccttgtttcctttgatggaattgaaagcctttttcctctttgaatcccccttctcctatgtgttgatatccaatccattgcatggctctccatcttcttttggctgtactttctttccagttacacactccccattaacaccgagactgcctggctcaagacattatgactgccttcaataactattaatttttctggctataggttttctacctaagtaaagagatacctatttggcaccactatactttggaaaaatatgccaaactatcttgcttagca

SEQ ID NO: 92792 - DNA, 726 bp, Homo sapiens
tgacctacgcgtttggaagaaagcatttaggtctatatcacctgtgtttttccagatttaaagtagaaccaaaattgtaaaagtgtcccacattgacctctgaagttctttagatatgtcatgctatgtttctgtaactgagaaatggtagctatatattaccctaacataacttttttattcagttatttcattatttgctcttgcctgagatgtttgtgtccttttatcgctctctcgatacaaatttaaaaaaatgacaaatatcacatgatatttaaactataggaggattgagatcctggaaacagtcttaccatgtggcatagaataattgacagaaactttgaagtggtaaaaaatagtccattatttgtctaataatccagctctgctacacttctggatctcaggaatgcaatgtggtgtggtgcagtgagtaagagaaaggactctggccttacactatctgagttcaaatattgactgtgtcccttaggaattttttagtattgagaaacttatgtaaaccctcattccaaaaattaaataatagagcacctacaccttcttattgtggcgaggattaaaataacatatataggccagacacgggggctcctggcactttgcaacgcccaaatgggaggatagcttgaggcccagaggtggatatcagctggggcaaaaaagccagaccctgtttctactgaaaatttaaaaaaa

SEQ ID NO: 92793 - DNA, 439 bp, Homo sapiens
tgatatcatttgtacattcccctaggaagggggctgaatatagggagccaactggcattgttctgagggccccacttccatggaacctcacaagtcacaacccactgggttagaattccagctggccagaggcagcaggctggagatggccagaggcagcaggctggagacagcctgagatggattgagttcctggggggaggggcagatgccatctctatggttcaagtcagccattctagcctgctggctccagagagtccaggtggtacagaccagcaggagttctccataatggaagcacagctgctgctgtgccggatcatggccagactacttctttaagtgagatgccaacccatctctcctcactgggatgtgtggcgaggggctccctgtgggaatttcagcaattccgaccacgggtatatggacatag

SEQ ID NO: 92794 - DNA, 392 bp, Homo sapiens
tctagagcacgcaagcttacctacacgtacatgcgacgagctatctgttctatagggggacgtaaaatcaactcgctgcccggcggtttaccacctccggactgagagaacatctcgcgataccggaattaattgactagcgcacgatgaaagcagcagaaaggggggatgtagaaaaagtgacctcaatccttgctaaaaagggggtcaatccaggcaaactagatgtggaaggcagatctgtcttccatgttgtgacctcaaaggggaatcttgagtgtttgaatgccatccttatacatggagttgatattacaaccagtgacactgcagggagaaatgctcttcacctggctgctaagtatggacatgcattgtgcctacaaaaactt

SEQ ID NO: 92795 - DNA, 1054 bp, Homo sapiens
cacctggcgctggcgctggaagcgctgcaggcgcatgtgcaggcggcgccgccacagggcgccctggaggaactgcgcacagagctgcaagaggtgcgcgcccagctctgcaatcccggccggtccgcttcccacgcagtgcctgcgtccaagaaataggagcttgctggatggaacctgaatttggacatggcctatgtacctaacgtggccttcttcccgcaccacccttgcctgcgctggcccagtggaaaccaccaggatcttgatgcaacttggcatttggttacccctgctgataagagcagccattacctgccactgggaccagcagtgtaccactggctggagatgcggaccaaaatgcgcatcatgggtttcaatgccgctgccatcaagccgctgaacgagggtgcagccgccgagctgggcgcggagctgctgggcgagggcatcatcttcatcaccgcctgcagctgcctgatgctggagtattggcgccaccagttgcagcagcgccgcaaggaaaaggagcgacgtgttgccagggaggcgctgcggggcgaggtgggccacttggggctggcgctcgaggagttgcaggcgcaggtgcaggcgacgtcgacgcagctcgccctggaggagctgcgcgctcagctgcaggaggtgcgagcccacctctgcctccgagacccgccgcctgcacccccagttgcgccggcgtccgagaaataggaggtctcggggccctggtcttggaggtgactgctgtctggactgcgaagtctctgtcttggcctattctccgcactgtcccatcctggaccggcccagctgacaccacccagtccttcgggggcgccggagagatcctgggctggagctgatcgaacctccctactaacctgcccagtgggaccttccactgggactctccgcctcctgcaggtggaacgttccaagaaggaccccgctttatcccacccccgcccctgccagcgcatttgttgagcacttttgaaagacagcgatctttatcagaccccaactccct

SEQ ID NO: 92796 - DNA, 625 bp, Homo sapiens
aaaaacaaagagaagtaatgaaagaagagagctacctttgtagtaaaattcccttcccttttcctatggttagatggcttatcctcagagaaagtcaatttcttttaatgttactctaaaccaaacactcctcggaagttaaatctgcaaaataacaacatgtgttctacagcaatgaagaaattagctttttgattatctactcttccaaaggatttgtagcatgaattactctttcctcaccagcaggtcactgaggaccagctttaaataatcctctgcagcatcataattgaatcccagcaccatggagtttatctccttgacagcctgtgcctttgggctggggagggggcaggaaagcctagtggctgctctgtcccctacatggggctgatgaatacacccagcacccctcaggtccttctccacccctaggttgaaagatatggtctaccgctccagcaacctgcagtacttcaagcggctcattgagatcccccaggtgcctgagaacccacccaactttctgcgagcctcatccctgtgagaacatatccaccctgaggtggtgaaacctgtagaggccttattccccgacagcgagccagtcctagagaatgat

SEQ ID NO: 92797 - DNA, 383 bp, Homo sapiens
tcttggcagacagttcacctgagtctttccctacgtgtgagttctttggagaccactatcatcaggagtctgctgtttcctgcctctgacaagtgttcagttccgccagaagccagttaaaatcatcttgatgggcaatccagttggcttcattattgattgtagcttgaagtcccaggtcgttatttttaacttgaactttaatatcatctgggcctccttgctcctgaacccctaaaccccttcctttagaccattccatcttctctagtatcctctggccaaatttagaatcagcattactccaggcagtgttttgagtattcacagcccacttctgcttctgctgctgctcagccagcatcaacatgtcatggagactg

SEQ ID NO: 92798 - DNA, 650 bp, Homo sapiens
  misc_feature (1)...(650): n = a,t,c or g
aagaagcgaccgagggactgggagtcgttagtgaggatgacgcggcatggcaagaactgcaccgcaggggccgtctacacctaccacgagaagaagaaggacacagcggcctcgggctatgggacccagaacattcgactgagccgggatgccgtgaaggacttcgactgctgttgtctctccctgcagccttgccacgatcctgttgtcacgtgagctgggaacagggatgggtaggtctgggtggggagagcaagggaaccgccaggaggaggctgtgtgcgtgggtctggccacctgcacagccagggaaccctggatgagcagtttatcctcagagcctctgtattctcacatgggacatgggcatgatcctagcatctgtttcatagtgtggaacatatggaaaggaacatacttctaatggggtgtagggctctcagagcattgccgaggccatcggagcagctcacctttggacacttcccatgacctacctctgatggtagggcaaaggcttaacaggtgctgagtccaggcactaaatacgtgctcaattagtggtatattttgtagaagacagtaattaatgatcagggcccccaaggccaccttcaggtttcnnnnnnnnnnngaaacaaagccttcat

SEQ ID NO: 92799 - DNA, 610 bp, Homo sapiens
ctcagagcctacaggcccagaacaatccatgccagctgatcaacctagtaactaccacagtgactacaagagctagcatttattgagtgcttcctgtgtaccaggcatgtgctggatacgtttacctgcactatctcattcattctcagtgcagagttctgaagttcaccctcttctcaagcaatttctgcctcagagcctcctgctaaacggacacacttaaacgctgaatttgatggaaggcaggttcaccttgcacttggcttttaaagggctccttaccactgcaactcaattccatgactggatggataacagaagcacccgggaggagggcagcttggcaggagcccacaggaagattcaaggtttcataacaaagcatcttctggtgtgtcaagagtaagactaggccgggcgtggtggctcacgcctgtaatcccaacactttgggaggccaaggcgggtggatcacctgaggtcagcagttcaagaccagcctggccaacatggtgaaaccccctctctactaaaaatacaaaaaattaactgagtgtggggcaggcgcctataatccagctactcagaggctgaggcaggagaatccttg

SEQ ID NO: 92800 - DNA, 420 bp, Homo sapiens
tgtttgcttgcatgcatttacctctctaatttgtcctacacataatgctgaagaaattcccttctaaaaaaatttttttatgttattgttttcagaggagattttctgtgggcaaatttatcaaatgtaaatcatttaaactgattctttcatttcccattccagaaaatttgctgtagatggcatatgcagaaatacttcgcaaactgtaaagtgctacgcaatgaagaaagtattatgataatcatagatatcttgcgtctttgcttttacatgttccattttcttcatttaaattggatttcctttatgttctcgtgaccttcaaaaacagcatcaaagctggtatgttttcaagaaagcttgatttttatcactcccttagcattaggtactctgttctgtataataaacttctct

SEQ ID NO: 92801 - DNA, 550 bp, Homo sapiens
gcgtcgtatcacgcgtacggctttgtgtattttagagctttgttattaggtgcataaatgtttaggattatcaagtcttttctatgaattcaccccttcttcattacaaaatgatcctcttaatctcttgcaatactctttgctatgaaatttaggaaatcagttatagggattaagactataacttcagttttggatatatacatgtttatacatgtagcagtatctaagaacaaacatctgagagttcagatgagatatggagatagatatttgggttaagatggtgttactatagcatctacttcaatgccaataaataaaggtgctccagaaatattcgtaagataagtagtctgactctggtttccaaagtgattacaaggtttagaaatgtccagctgatcccaggtcatgccagtataagttcatggcctccagatgagtgcttaaacgctctcatgctttccagtgagttatttgctaggtttctcataatagctattttagatctttttgacactgcttaaatcttgggtttcctacttac

SEQ ID NO: 92802 - DNA, 402 bp, Homo sapiens
atgattctacaggtcagcagagctgacctcaaaaacacaagctttggggtcatcagataacattttggtttctcagaagcatcaggtgcagttactagtgttgagtatggctggtgctttcacaccatacccacctttcttaagaaaaggaacaactgcttattcgtgccttccttttccacctcccttttataattctcttgttcttgtcatggccaggcagagactaaggttttgtgcttgaaatagctgcgtgatcttttctatcttttggtagtcaccatcaacaggaaattgctagcctaagtaagttgcagcaaatggtcaaagagtattttttagtggggtaaaactcgtttctcgacaaatattcagaatttggataatttgtagtggttgaat

SEQ ID NO: 92803 - DNA, 356 bp, Homo sapiens
cgcggaactgtcgcttgcttcaacagcgtgtggacggaacacatccggtgactctcttccagactacgaccgtgctccgatttcctctccgcttgcaacctccgggaccatcttgtcggccatatcctgcttgtgggacctgccaacgccggttttgagggtagggctttcttgccaaccaagcatgagctcccagataccccggatgtattccaccgacgtggaggctgccgtcaacagcctggaggatttgtacctgcaggcctactacgcctacctctgtgtgggcttatatttccaccgggatgatatggctttggaaggcgtgagccgctttttatgagaacttgccgagc

SEQ ID NO: 92804 - DNA, 392 bp, Homo sapiens
ggaacgtctgaggttatcaataagctcctgctccagacgccatgggtcatttcacagaggaggacaaggctactatcacaagcctgtggggcaaggtgaatgcgaaatactctggatgagtaagtctaatcatgatggagaaaccgcatagtgatccaaacaggaagaggttaatataaagaattcatgattctaactgtgatcgtagcgatgaggaactgtctattaagaagttaagagaactctcaatacaggaatagcagatacaagatccagctactacccgttagctgaaatatacaccctacgaagatcccccagactctgccctcatgctgtgaacagactcctttgggaatgcatggctcttacctactgaaagacatgaggag

SEQ ID NO: 92805 - DNA, 338 bp, Homo sapiens
ttctatagatatatagacagaaccattatctgaaagcatatttgtataagacctttttaaaaatctctctgggattaatttctcacatttactatttcccctcttgttctaagcgcaaaggaactgtactgacattttctactattctttcaaaaccaaaaggagaggataataaaaaaatccatctttatccaaaagataatactacacggtttccttatacactgagttttttcatgtacattgaaactatattctgatatatacatgaaagagtttacattctatacaacgaatcaaaacatagtcatagcaagtgaaatattcatctattttgg

SEQ ID NO: 92806 - DNA, 351 bp, Homo sapiens
agaaatgatagggcaaagtctctttcacaattttggttttcttattcttttgtattaaattaattgaaagagaattagtcccgcgcagcaatgattagaagccatgtggggaagatacaatagtgcagagaacagacgtttttgtgtgagccattacctaatcccagaaaagcaagacgtttgggatcagatcattttaatacaattccttccattcattttcctattccatttgaggagtaattgtacaaatctgactatacacacgacctactttcttactgtggaatcatgcttgctattcttgcccctgagttttttgcttcattaagatatatggtcgatgtctgg

SEQ ID NO: 92807 - DNA, 704 bp, Homo sapiens
  misc_feature (1)...(704): n = a,t,c or g
gccaatatttcacgaggattaatctgaaatgtggaagaataacttatttctaccttttcatttgatatataagtttagaatctataagggtttaccttcaggtagtcctgtctctggcacttgtgacaattccctgtttgtttttatatttagagtttggataggcaatcacttatttgagagttaaattttatatttgaaagaaccttaagaacttatttggtaatctgttgtagacataaaaataacagaagaaacaatgtaggggcaaggatattcactttaactttatttctaaagataaaaaaggaaataacctgaattttccttacttgtggaatagtcgattaagttctgttacatacataccatggaatgaattagtacacatatacaccctgtttaaagcaacatgtaggatgtgcatttattggcctgggggaatgcccataatttatcatggttggtcttaaaccagataaagatatttcatatcgataaaagtcataagccaccatctgtagtagtgatatagtagactgacattaattgatactgtgcatctagcattgtactaaatacatgtgttaaccttattcaggtctcacagtaactctagggaagatttattcatttatagattatacttaaagcagttaattaccttgctcagnggacattttgaaagcttaggtttaacagaa

SEQ ID NO: 92808 - DNA, 396 bp, Homo sapiens
cgtggcactcctcctccatctgctgtgctggcccttggccatattctaccatgcagtgacctgtttacctgttttacctgctacgtggtgagctctgtgagactctccattactgtagacacaacaatggacatgaagaagaggctgaacaatagcttcttgaagaatttagggacaatcaggtatatccacattcaaatgtcacctaatcatgcttcccttgtcttcctcctttttacgtcactgattttttaatagtttcattgagtcatagtttacataccttaaaggtcattcattttaagtgtccaactcaatgacttttagtaaatgtacagagctgtgcaaccattatcaccatcttggtttaaaatattttcatcactcagttaatcc

SEQ ID NO: 92809 - DNA, 352 bp, Homo sapiens
tttgagcttttttttaagattaattttatatgatatttacttgattaagtacaacaaatagttaacaatagtaggtttagggaagatcataaaagttaatatggagaatgatatacctcaaagtatttaaaatctaaagagagagtatttaataaagcctgtattttatagtgagttagagtcatatttacaacattaaactattgtcaaaatgatactttactccatcatcatcatttggcttaagagcagtaactattataatacacttggaatattgttaatcttgacttccttattcataaaataaaaaaaattttgaaaaaatatacatctttgaacaaaacatatc

SEQ ID NO: 92810 - DNA, 297 bp, Homo sapiens
ccctggggtttttagggtgtgtgtcaaattaacaagcttaataaaagctttctggacattttggtcttatcagtcttctttaagaaaatatagttagaaacccctcccttcccattcatgtattttggaggaaaagattctcataacgttgttagaacgaataactctcatcactacttaacctaattctggtaacattcctcccattgatgtcagctctacatatctctggcatgaataaatgaatattttacacacacatgtacatatgtgtgtacatataaaaacaaaaacctc

SEQ ID NO: 92811 - DNA, 475 bp, Homo sapiens
aaaacttcaagtgcacatttctggttttagactatcagccctaaaagtgtggcgctttagctaagatgcttgatgtacgtcagtgcaattattttgaatttttacatagaatatttcacttaaatttttttctcataattttggtgacagcctatattcattaaaaagctcttttttttaggaaagatatattccgggggatgagaaggaatagatttcacattatggcagatactatagaagcacgtgaacaggcttggtaagaataactatttctcaggtggaaaaagattccatcttttcaagatgtccttactgttcagatggtgtattaggtggatattctaatattccctactgtcattggtctggattcgaatcatgtatgtgacggttgccagaatgaaaacttcggacccgacattgtcatggcagtgaccgactctttaataaatggcgcctgacccgcttcaat

SEQ ID NO: 92812 - DNA, 383 bp, Homo sapiens
caatctgaatggatgcttttctttctcaaggtgatccaataaagctgtcattgattaagaggaaaatgcatttcttctccttcttacatattttgagttttctgattctaagtgtcccctgcttcttgtgtcagaattttgtaagggggccaagtgagggcagcataggccttgaaaagtaccacatggtctagtcaaaagcacaagtcaggcatattggacctctccactatggcagagtctgggttactagcttgtggcgtgcctaagaatttaaactcacctattctgcttaagtagctggtccactttagtgggctggaagcatctggccagttgcctgtggctaccattttgtatcactgaaagcgggatgtgctatg

SEQ ID NO: 92813 - DNA, 912 bp, Homo sapiens
cattccccgagctgccaggagtgttagcagctgacagatcctggctgggtatttctctccaacaaagggagctgcctccttcacatctaatgactgtaatgacctggcccccttgctttgattttgggcaacgctgaagggctataccagcttaaatccccctgggatcagttgaatattctgttgcagatgttcagcttcctccactgccaaatcctgcttccttccttacacgtgctcttcctgagagcactccccgctaaatctcccacacatcatctcagcttcagaatcttttccctagggatcctgacctgagacactcctcaaggcactgggaagttactgcagggttttaagatggggagtaacctgctgagagttgcatcttatgaagaagatgagtggcagcagcaaagggtcaactgaagtggggggcagggaggatactactgtcatcatcgagggagaaaaggatgtggcttggactagacagatagggtggagaccaagagaattaaggagtatcgcagtgcgtcatcatgagagtcatttaaattcttagcttcagtttttccaattgtaacatcgaaatgatgatgcctgtatctgttaggatactttcttatctattcattttaacaatatattgagcacaattaaagagatattcagagtcaggtctatctgaagaccatgcgatttccattattctttgctacctccaaagctgtcttagccctggcttactttctctgggatgctgggtccatagtctttatcaaggtgggttagagccaagctatgagtcccttataatcaggagaattgcttaaacccacgaggcggtggttgcagtgagccaagatcacactactgcactccagcctgggcaacagagaaagactctat

SEQ ID NO: 92814 - DNA, 787 bp, Homo sapiens
caccattcacatctctgcctatgtgatgctacccccaagggccagggctcttcctgttataggtagcttttgcttacttggactaactttgtgataattatctgaatggactattattttctccattttacaggtgaagaaattaggctagaaagatgttagtgttgtcccaagtcacacacccaagaaatggccagaccaggcctgagtccagtactgtggggcccctggagcccatgctttcaaccctctccgattctcccgcactgccttgttttgcacatgggtggtccattcttgtccttaaagcttctcaactgtgcaggttcagctcccatccttttgtaaaaggttgccaattgggaatttccctgttgtttcataattttagttaaatccctcaaactgaagcttacacagggggagagaccctcaatttttaaagggaaaccctggaggagcagccagatatctcctacctgcagcccttgctaagaggtgtccaaactggagttttgaatcttagcctatctccccttttatactaataatcttatcccaaccaccaaacccctaccacaacaccccccgcccccgcccccgcttttttttttcgcggcgcgcgcttttttccttttgagggggataattttggccgggccggcccgcttttacaccggcggaggggaaaaaccgggggcccccccacttaaccccccgcgaaacatccccctcccctctgtctcccctaccccgacgatctccccccgccccatccactcacacc

SEQ ID NO: 92815 - DNA, 429 bp, Homo sapiens
aatttgtctattttggcttttgttgcctgtgccttttatgtcttatccaagaaaccattgccaaatccaatgtcatgaagcttttctccaaagttttcttctgtagatgtcatctcgatctaacccctaacagcagttttcaattgtccactagttatatctcaataatatctagcttttcccacccccattctgcccctaccataacatgaatgttgaaaacctggcaattttgctgtcagctcagagtatagatagggtgctctctgatgaagggctaagacaagctggactaaggtcagaaatctggatggccttgatcttattaaccctgatcatgccgaaagcgtcctgggaatagcaaaaaaggccaaacctgttggaaacaagtgggtccttgctcaaaaaacttgggttacaccccactcc

SEQ ID NO: 92816 - DNA, 799 bp, Homo sapiens
  misc_feature (1)...(799): n = a,t,c or g
gggaggcggggaggaagaagacagtgtcactaccaaataacctacttggctgagccaccacgcccggccaagcctatgtcgcttttaagatgaatccaaaaagactgtgtgctactaggctacagaaagcagcattaagtctgatatacatcaatccatgttcaagcagattcctctctgtctctggaaggtggttaatttttctggtcctgatattggatattgtcacattttccttgatagtgtcatccggtgaatgatttttcatcttgaaccttatactcctcctctctcggcagctggtgcttccctgttcttcctcagccatgctggggctcactgcagcctcctctgctcaactcgcctgggtgcagccatcttcaagaaaacattattaaagcaatattattagtatgcagcaaggtgccttctttctgctaaatcagtttgtaaagtggtcctcacaaatgcacacattctttgttatgacagcagggcttcgtgtttctgatgcaagactaataagacttggaagtagggaggtaaactgggtggcccaggaaagcaggggttaggggagttgatagaagatatgagaaatgaacctaaggggtgatcaaagagcagccaaagaaaaaaaaaaaaaagaacttttaataaggcgcccgaagcttaatccctttaaggggggggaaatttacgtgggcccggggcgcgggtttaacaccccgcggcgggggaaacccttggcggtccccactaaaacggcctttggagaaaccncgccccccgcgtctcc

SEQ ID NO: 92817 - DNA, 694 bp, Homo sapiens
gttcagtgttttttttctcatcaatgttgagttccaacttagaatctcattctaacctgactgatgacctctccaagtggccttcccgtctgtggaataatcagttaagaaaacaaccacagttattatttttttttacaggactattgaattgagttgtgttataatgctaagaaaggacctcaaatagatctagcaatgaatacaattttcgtgggtttcgttgggtgacagtgaaactgttgcctaatataaaaatagaaacataggaaagaaatttgtaagacttccaaaatatcagccatttcacatgatagtttatagtgcctggctctcttgggcattgtagaatttatgtgggatttgcttgcttgtttcatttactattaggagctaaaaagacctcgtgttcatgttgatgtaaagacagacaaggctttttactctccaagtgctccagagcatactctggggtgtagaggatgtgaaatgcataaagagaatggttccatagcaagtgccaaacacagggttaccttccttttgttgccctcacgaacattccttcatattcatatcaacatcctaagtactagcccccccttccgaaagattgggcctggccccccccccccccaccccttggtatccctcctccaagcgccagtgtgtgtcccccaggccacgcctgggc

SEQ ID NO: 92818 - DNA, 429 bp, Homo sapiens
acacaaggtagatagtcaggcatgagtagggcaggagaaggctccatgccccacaccccacacccagatatgtcaggcaaccatcaggtgatggtccagtggttgttaactgtctctctaaaataataattggtcacagccagtgccagccaggttcagtctccgaatacaaaaaaaaaccaaacctgaaaatggtgatcagcagcttcctgacaggacctcaggagttgggcaggcaggcttaagcatgtgcattcagaggcaaaatgacagagtttaattatgatatgaacttctagggacgtttgactggtaagggagaatgccttaaattagcatgcatacaactctatgctcacactacacatgctcacctcccacatgctagcaggctgctgaacatgtggacagcccacccccatgggaaaa

SEQ ID NO: 92819 - DNA, 402 bp, Homo sapiens
aatcgcctcctgtccagataactagcaaattgttccagagtagacaaatgaagggacttcgtctgaagtctctcctggtgggtgagatcacaatttcccccttttttagggatagagccaaggtgtattctttcatgtaaaacgccttgattcatctacagggaggcagatgttttagcaatctcttccacaggactgagacttgattccaatagatgatcatgagtcatagacatctctggtcctattacatctatgatctatgatgtagtcactgaagtcatcctaggtggtaaactatgaagcgcaaggccacgggtcgctctccacagccccaggtcactcctggacgccttgcgcacccgcaaccgatacaccctgatcagggtgaagcggtctcca

SEQ ID NO: 92820 - DNA, 404 bp, Homo sapiens
  misc_feature (1)...(404): n = a,t,c or g
cccaaaaaaaggaaaggaaaggaaaaaaanccccattagttttgaaattttttgatggctcataattttattgaaaagacaaatggtttttgctccataattacaaaatattttcatttttatattaataaaaatcaatcagaataataaatccaatgaatattttcacttctacatcacctatttccttctaggtgcttttgtacacacacctgacttcaccatttctccagctgtgtaataaactttggtgcaaaaacatcataaaaccaccagctatttgtctctctactggtaccagcaaactaccaggtatttgtctctttacatttatcctctaattcacataataattgtgaagcaattctcaacctcagaaaatattaaaagaagctataggaata

SEQ ID NO: 92821 - DNA, 546 bp, Homo sapiens
agtttcttctctcctgaactgccacacttcaccctaaatcccagtaacgccaacagttttggtaaatcactttttgccacagttttgccttgctttgtgggagccagtttcttcataatgactctatgcaaatttgtagcattttatggattttaaaatgtttccacatcggtgaattcttgtgaaatgggcctgggtagataaggaaaagaacctccaagaggttaagtgatttgcggatttgcctaaattatacagaagagtcagcaccagtgcccaggccttctgattcttagtgcagtaaacactaagcaccatcattccatttcaccacactcctgtcttgctgttgtcctcagctaagaaagcctacccctgagttaccctcttccatcttagagccttcctgctcgctgtctgcccccctgcgatggggacttctttggcccttctcacccagcccagcctctgcccgttttccttctcctttccactgcggctgagctcttttctccttccgagaagcctttccttcatctttcctgg

SEQ ID NO: 92822 - DNA, 768 bp, Homo sapiens
gtaatgacattatctttccttaggcagccgcgtgttctctgagaacaggatgtggggagggctgggccccagtcacagggtatgggggtgggcaccggaaaatgggctggtggtaaggccatgaggattagtgcttgccttcttggctttgagaggcatgaagagctcctgtattcttgattgttcactcatgtgtacaccccaccctcgcacatggcatgtctgtgttcttaccctaagaaagactgtacctgagaaacaccttgtgtaagagccccagctgtttggcttgcagaaactcagtgaggtggagtgagtgggcccaggctgctcactgtaccaacccatgccttgtgattctttatgacagcctgtggcttcaggccacttttgctaagctttattggggagctgggccccagtagataatgggcagctttgctgctctttctcagggccccagttgtttccctccccacaaatggctccttagctgaggtgatttgcatgttcaacttcctttcaggccccatccttctcttctccctgccccccactgcttctgctggggacctgtggtgatgttctgcctggggtggggaaaagaggatgtagctagctttctgtgcaaaagagggtggggcgccggccttcctgcctgtctgcccacccacccatggcttgaggaattgcctgaagagttcatgtcaaaggcaccatatgctgaagggctgtcttcaaaggatgagatgacctttgatcaggcct

SEQ ID NO: 92823 - DNA, 624 bp, Homo sapiens
  misc_feature (1)...(624): n = a,t,c or g
gatgaatctgtgcaccaatcccactcctacagcagttctcacagcaacgccagccacgcccgtctcatctctgaccagcatgcagacaacccggtcggaggagactcctgcctctgcagcacggccgtctgccagatcttccagcaggggtacttctacctatatcccttcaacatcgagtacagcctcttcgcctccaccatgctgtatgtcatgtggaagaatgtgggtagattcctggcctccacccctggccacagccacaccccaacccctgtcagcctcttccgggagaccttttttgctggcccggttctgggcctgctgctcttcgtggtggggctggctgtcttcatcatctacgaggttcaagtgagcggggacgggagccgcaccaggcaggccctggtcatctactacagcttcaacattgtctgcttgggactcaccaccttggtcagcctgagcggctccatcatctaccgttttgaccgccgggccatggaccaccataagaaccccacgcgcactctggacgtggccctgctgatgggtgccgcccttggtcagtacgccatctcttactactccatcgnggnctgtggnggcgggcacaccccagga

SEQ ID NO: 92824 - DNA, 981 bp, Homo sapiens
  misc_feature (1)...(981): n = a,t,c or g
aaagttatattagaagcggaaccaaggcaactgaaggcttcatagccagggctagcagtccctttacaggaataaaaagagctccaaagccttcttaaatggaaaagtctgcggactcctcggttcttcaaagaaagatggagttatcagnccgtccaggttaagggatgggactgaaatcaaatgttacaggcatcaaaaagtttgatatgaaaagttaatgcatgacttggcaagtgaaagccaacagtagattttagtcttaaaatttacaaactacgtacagctgtttcagtattttgaatacaaagaaaaccttttgtattggtaacttttaataggaattttaatgaatctggtttttttatagggtgttcttagttctgcactggatttgctagatttgttggaagcctttgtaccttatgtatcctcgtcattggtggtacttacttaaccaattaaaccatttctgttgtgggattattaaaccactggtagcttttataccagatatataatccttatatccaattacacatgaagaaggaaaagcaaaactcaggaacactgctattgtgaattactcttggattcttgtgctttgcctttgaaaatgcttaaatggccatgaccctcttcctgctttattctagtgtagtctttataaaacttgtgggatttgataagcagttcacatgcaaaccagtatcttttaataatacaaagtagcatctggaacaatagacagtttgaagttagaatctgcttagacaactttcttacttggtaaattcgactttttaaaacctggattatgctgtaggtaactagtaatcatatataggctataccagtgtcatgttgtttctgtggtttagaggtggaatactaaattaaatcaaatgtatgaaaacaaacaaggaatcattatgttatgtaggcttgcagatactcatgtagcgttancnnngcccaggg

SEQ ID NO: 92825 - DNA, 439 bp, Homo sapiens
  misc_feature (1)...(439): n = a,t,c or g
tttcgttgtattccagcctggacggtatagccagacccagtctcattaattaataataaaaaaattaatgtaatacagctactatgaacccacaaaaactttaaaaaaattttttaattattaaaaaaatgtaatgctgctactgttttgcttatgtagattgtgggctagaataggaaataaaactatcatttttaacacttttctggggggaaatattattcgaatttcataacaattagcttgatgaccttttagaatatatatgtagaccattgtgatgttggggctgcctgttgcaaataggatttttgtgagcttgattgtacaaaattgaaatttgcaaacatcttactgagtttactgtttccttctgggtgttaggcctactgtagaaatcagaaaaatcggaaatattttgttgcttgctctgtgaaan

SEQ ID NO: 92826 - DNA, 1547 bp, Homo sapiens
cggccggatttcccggtcgacattcgtcagcttcaaatactttgtctagattcagttagttgtgccatgacttctgaagttttcactgccatgatccttaatttttcttttccgttgttattttcttcttttaactgccttaatttctctttcagaatttcaagttcacttttatatagaccacacctttcttgtagccttttattttctttttcacagttagttagatttctctctaatatttcttcttcagcttgaaccttttccagtttttcagccactttttttttatattgttggaaagctttactcagctcttcggcattatatagtgcttcattcctttgtcgttcagctctttttccttgtttggtttgttcaagtaagtccacctttaattttatacattcctctttggactcctgcaaactctgttccttttcaattaccattttctggctctgttccagcttattttctgcctctctcaaaactttatcttgagctgaaacctctgcttccaaatttataatctgttcttctaagattgggacactggctgcctgctgttgagcagactcaagcatagaaacttttgctcttgactgtgttaattcaaagtgaatagattcaaatttagtcattaaggaatgattctgtgtgaccaaacaagcattctgttgcctaagtttatttagtttctctcgaaggcttttaatctcctgatccacgggggcagaagatgaaaacatcttatctcttggctttttttgaaaatcagtgctgctaccagatattttacagacgttttcataaggtgaataattcaaaagtccagggtggctaggctgaacatccaaaattagcttttcagaccttgaaggattaggggcataatcagaattttcacttggactaacactggataactcttcccctaaactctgcaaactccattctgttatcttcagttcatgtcttaaggaagcaacatttgcaagcaaactttcctcttcattgtctttattatagtagtctgatgaactagattccatttccggcgactgcgcgcttcgcactcgagtctgcgttaggaagcctctgaccctttcccgggcccctgcgcgtggaagcctcggacacaactcggagaaccagcgaaccccggcagcacagaattcgaaccgccgcgggagccgttgggacgcgcctacccggtcactgccccgccccggcgcagactgcgtgaggcgcgcccggaggcgcggggcttgccggggatcgtggtcggcgagcgcgcccgagcccactagcggagcccgcccgggactacatttcccacaattaccgccatgatgcccattggtgggggaagccatgggaaccggaggccgtcagggggagaggcgggcggcgctcacgcctggcctgagggggccgagactgaggcggttgcggaataggactgctagccccgcccagagtccctaccctttggagaactgcgcttctctttcggagggagtgttcgccgccgccgcggccgc

SEQ ID NO: 92827 - DNA, 421 bp, Homo sapiens
ttcaaggggaaaagataaggataatcacagagtcagaaaccagagaatcagggaaaacaagtcaagaatttctggcagtgcaatcaaaaatgattctgatgaggaaccaagtgtaggggggcagtgaggggaggcacataaagaaatcaatgtgtccacacgggaagttctcttatacataaacgatttaagaagatactaaaagataaggaaaaagaaacttgtgtccaattttttaaaaagtatgaacaacttgttagaatagtatgaaaatgatacatcaaaaatgaactgagattgtgaacctgttatacagggcgataaagatggttaactccagggatatcgcagtcatgacgctgtagagcaacgtccagtttatgtaatacagctcactatagcctgaattgaacatccccaa

SEQ ID NO: 92828 - DNA, 784 bp, Homo sapiens
cgctgcaggaattcggcacgagggcacgcgggactgctacgaggtgctgggcgtgagccgctcggcgggcaaggcggagatcgcgcgggcctaccgccagctggcccggcgctaccaccctgaccgctaccggccccagcccggagacgagggccccgggcggacgccgcagagcgccgaggaggctttcctgctggtggcaaccgcctacgagacactcaagtcctcctgcatatgcccaagaggattgggagtggaatggacaccagcagaagcaccacagttattcctgtagagattagaaacaaggagcttattgccctgcttgtcaaggctcaggacagacaggaggaagaaacaagtataaaggttttggttttggaaagaagttggaatctccagaccctgggaccttaagatccacaaaattgctgaaagagaaagtactaccttattgaaaggatgaagaaacacgaaaagattatgattacatgctggatcatccagaagagtactacagccattactaccactactatagcaggcgcttggcccctaaggtggatgttagagtagtgattttggccactgagtgagctatttcggtggtggagtgcttcaagggggagacaatactcactagcgtgatcccttacctaaccagagtggccaggccgctggatccagaccctacacttggctaagaaaccatggagtgctcaaacacgctgctcaccatgggcaactgttgtgctcttgaataaatcagggaaacggtcactcc

SEQ ID NO: 92829 - DNA, 740 bp, Homo sapiens
  misc_feature (1)...(740): n = a,t,c or g
aagcagtgcggtattccgcacgaggtggtacgcgatgagaacagcagcgtctacgccgaggtctcccggctgctcctcgccaccggccactggaagaggctgcggcgagacaaccccagattcaacctgatgctgggagagaggaatcggctgcccttcgggagactgggtcacgagcccgggctggtacagttggtgaattactacaggggtgctgacaaactgtgtcgcaaagcttctttagtgaagctaatcaagacaagccctgaactggctgagtcctgcacatggttccctgaatcttatgtgatttatccaaccaatctcaagactccagttgctccagcacagaatggaattcagccaccaatcagtaactcaaggacagatgaaagagaattctttctcgcctcttataacagaaagaaagaggatggagagggcaacgtttggattgcaaagtcatcagccggtgccaaagtgtgggtccaatggtaaatgacggatttggaagaggaaatagacatcccttctcctgtgggtttgggattggagtcagaatggccactgtgaggacacctggggatacctggaccctcactaggacacgactcagagggacacccagcagcacggggaagtcaagagagaataaaatgctaaagactttttgctttacaaaaaagatnnnnnnnnnnggggggcccgttttggaggacccattttaacttccccgtcct

SEQ ID NO: 92830 - DNA, 362 bp, Homo sapiens
aacagcaaatgagacactcccactcagtatacgtaacaggtacacagcaattacaaaaatgccatgaagttacagggatgtatgcctagcacagatacatgtaggggtatatgcagtgtctcagaagaaacggaaacaatctgaaacaggatacacaatataagggagggcagggctacagagtttgggagcagacacacagaattaaaaataccatataggcccaaataaggtacttattttcccaattagacgaatcatcccaacaccccaaaaagctgtcagaagatgtgaagaaaatggaactctcatatatttctagtgggcatgtcaaatggtgccaccactgtggaaaacggttt

SEQ ID NO: 92831 - DNA, 368 bp, Homo sapiens
ctcagcataggatgagggtagctgtcctgaaaacaatcagaaatccagagtcctgactctccagcaggtatggtcttgatcctagtgagattatcttcaaagagaaaacaaactctagtcatgcagagaagcagcattgttccatgcagatctgtgtaattctccatgctctgtctctctccctttacttatcaggtgaaatcagagcatccagtggagacgtccaaggccggtggcaaatggagacccatcatgtaggcaaaccctggttccagacgaccatgcagagtgccctctactcccaaccaatgacttgtgttgaaattagtgaaaggtcactctggctgccttgcagagaacaggaagtg

SEQ ID NO: 92832 - DNA, 709 bp, Homo sapiens
gaggctgaatagtactccatggtatgtatataccacatattgtctaccccttcatccactgatgggcatttagttgtttccacatcttggttttactctttgaggaacctgcatactcttttccacagcagctgctccattttacattctcataaacagtgcacaaaagttccagtttctctacatcctcaccaatacttgctgtcctttgattttttggtaatagtcatcctgacaatgtgcgttctgttcattttaagtctctagcaactaatgggatatttgaacagggtgtctgaaacttttagtctagcagatagggaatttcacattagcagagtcagaatataaaaatgtaactttacctctctatacatgatcataacttcactctctagccattgtttttcactaaaggcagtgaagagtctttggggatgagggttctggccccgtcactgatgctttcattggccatgaaggctttgctggttgttggtgccatccatttctctgtgttcccttttctctttatgttagtcccactgggccccctccgttctgactgtgagagttctccaggcttgcaggcttgtgctcagctgtttcagtgcctctctggagcatgcaccttgggaagtgctatgtggggtctcagacccaccctcctgggtgcaggggcctgctttagggctgagcctctttaagg

SEQ ID NO: 92833 - DNA, 392 bp, Homo sapiens
ccatgaaccctgggtacgagaggaaagagtgagggcgaggaaaagaaagaaactgagatgagtcaaaaggaaaagaaaaccaggagagtgatatcacaattccccaaactcctatgcccttttatgcttctcatgactttctcccttcacttaaaaaaaactcgactcatgtttcatccagatcaaatgccaccacctcctgaaagcctttctggacttacccaagtaaaacttattagccccctctccgtgcctctacaagtttcttttgttgttactattaggtaagatttgactcagacaatagtttcattagtactgttaaggcacttactgcagtccgctctgtactacacctggcgtgaggggctgccctattacacttggaactc

SEQ ID NO: 92834 - DNA, 2432 bp, Homo sapiens
taaaaaatgaaaaaaatcaaatggttgatatcataaaaacaactggtctctaaatttaagattgagacaagaatagaaatcaggagaaatgaggaatctttaatttcaactgactgaatgctcacaggactcaaaccagttggtgcattcaactgagaaaaagaacaaatgagaacatgcagaaaacactggaaataaattatctaaaattatgtctaaaaattgaagcataattaggaattccagaatgatttaagatctctacaactcctctctacttttttagtccattatcttttacagaaccaatgttcaaatacatttttaggaatgtatttagtaggatataagaggacttcttgtgctgaaaatgaagaaaaaaattgacccaacattagttttttaatcgcatctactgaatgattccctaagattagaaaaaattgccttagcaatcaacaaatgcaagccaagaaattaagcactaatctacagtaaaaggtgctacacaagagatatttattaatgttctgttgtatttacagttttaacatagcaaaccaagatgaattaccacttgggcagaaagcacatcattctacattataacccactggtttctgctaacacattgtaaaagcaagtagtacagtatgttagggatcatctcaaaagttccaagctacttctttctttgctcctaagtacctaatcctctccttactcccagactttggcctaatcaccaggagacaaaaggaaaataaggggggtgggggtgggggtgggggtgaagaacgctaattatagaaagagtgtcaagaattacattttagtaattaagcttcatttgtatcctagtgctttctgttttatacagtgacaacacctttagaatcccttaggtacaataaggtaccgcagaattgtgaatacaggctataaaaaattaatgcttattatttaccaattaaagacttatttttgaccacaccttaaatgtatttttgcactatgattttgcttccaggtgttcatacagaattgaataaatttctagattaacttgaacagcaaatatggattatgtgcaaaaacacagtcataacaaaagtttaacttttgagaaaacccctttaaaatggccagcattatacatatcttacaatatttaattccaagttcattttgagatggaggatgaataaagcaagactgccccctaccgactacagggacatggctcatgctacttaaaatgactacaaacaatatataaggcattattaatacatcacagacttgattgcaagagctttttcaaacattaaccactaatgattcaatgattacagaattctgcattaactattaaaattttacacctaggaacaaatagagagaaatgatcttttcaacagtactttatttttttaaagcaggtgattattcctctgtgttctgcatcttgattcacttcctgcaggtgttctcttgcttcttgagagagaattcataaatgcaggaaggcctttgccagaaaacatctttaataaataaagagaactctggtcctggggagatttgagaaagtttctggcatcttccgaacttttgcataattgataaatcctctgagaaacaggagaaagcctaaaacaaggaacacccaccagagccagtactgaccatcaaaatatccagggaaataggtggaaaacctgacaatcaggatccatttaattagagagagaccaaatcctgaaatggccccataccttcctgcagctgaagtggtcaggcaaaaagacaggaaaaacccaatccagttaaagaggaatgccatgaaaaaagttaacatgaaaatcccatcatttcctatcctcagctggtcagcatcatcaaaatcatcccgacccacaaaatcctcatctctcccaggaaccaaagggatagtagcttcagccttggtcctctccgcttcatcataactgggcagtgttgtagctacattgtaagatgggggctttggaaacccagactcatccttgtagtcaaaatatgctgcgctctctgcagaaatgctgctgtaaggtggaggagcatcacctgcagcctgttcaggttctccagactcttcttcattctgcaactgctggtaccggctgccgcaggccggctcgaccgccgccagcgccgccaacgccaacgccatggcgcagccggcagtcagggaagcagagcgagcgagcgagctagctgaaggggcgcggccgctacggcttgggagcgctgggaggccgagggggacgcgccttgggtgggtctcgatggccgccgccgctcccgggcgagacgctcttctcaggctgtaagcaccgccgccgccgccgaggctccgacgcggcccctggggaagaggcggggactac

SEQ ID NO: 92835 - DNA, 1014 bp, Homo sapiens
tcggcctgacttcccgggtcgacgatttcgtcttccggctgtcaagctcccggccgggctgactcaagcggaggcgcgcggaacagtcgccgaggcgattcccgcccaggctcctgtaaccgccaggcagtggccccgccatgtcccagccccggaccccagagcaggcactggatacaccgggggactgccccccaggcaggagagacgaggacgctggggaggggatccagtgctcccaacgcatgctcagcttcagtgacgccctgctgtccatcatcgccaccgtcatgatcctgcctgtgacccacacggagatctccccagaacagcagttcgacagaagtgtacagaggcttctggcaacacggattgccgtctacctgatgacctttctcatcgtgacagtggcctgggcagcacacacaaggttgttccaagttgttgggaaaacagacgacacacttgccctgctcaacctggcctgcatgatgaccatcaccttcctgccttacacgttttcgttaatggtgaccttccctgatgtgcctctgggcatcttcttgttctgtgtgtgtgtgatcgccatcggggtcgtgcaggcactgattgtggggtacgcattccacttcccgcacctgctgagcccgcagatccagcgctctgcccacagggctctgtaccgacgacacgtcctgggcatcgtcctccaaggcccggccctgtgctttgcagcggccatcttctctctcttctttgtccccttgtcttacctgctgatggtgactgtcatcctcctcccctatgtcagcaaggtcaccggctggtgcagagacaggctcctgggccacagggagccctcggctcacccagtggaagtcttctcgtttgacctccacgagccactcagcaaggagcgcgtggaagccttcagcgacggagtctacgccatcgtggccacgcttctcatcctggacatctggtgaggaccccgcgtcacctgccccagctatt

SEQ ID NO: 92836 - DNA, 440 bp, Homo sapiens
  misc_feature (1)...(440): n = a,t,c or g
acgcgtcgttgcttgatcctctagagcggccgcatacatggcgttggctgtggtctggccgaagatgaaggctcccagggtgaccaagaggactccgtagctgaccagcacccaccagctggctggtttgacctcttccatctcagagagtttggcttgaatgaggcacagccctgggaagacgaagatgaagcaggcggccaggcctccaatgactgagatcaccttgccgatgtcagggatgaagagcgccagcagcagggtgagcaggaaccagaccagcgtctgcagcactcgccgccgccgctcccgccccacgtcctcctccactggcaccccctggtagcgcagccacaggccttncaccaccggccgcccacagaagtgcaggatagggtaggaggtgagcacgctcaggatgatgaaggctcgggcaacgg

SEQ ID NO: 92837 - DNA, 405 bp, Homo sapiens
cccacgcgtccgcccgagctctactgtctcccaacttatcgcccaacaacaaaatggccataagtggaggccctgtgctaggatttttcatcatagctgtgctgatgagcgctcaggaaccatgggctatcaaagaagaacatgtgatcatccaggccgagttctatctgaatcctgaccaatcaggcgagtttatgttagactttgaaggggaagacactttccatggggatatggcaaaaaaggagacggtctggcggcttgaataattggctcgattagacaactttgaggctcaacgtgcattggccaacatagctgcggaccaagccgccctggaaatcatggacatgggctccgactatactctgatccccaatgtacctccaaaggtaactgtgctcg

SEQ ID NO: 92838 - DNA, 479 bp, Homo sapiens
gctactcgaaccggacttccctggtcgacgatttcgtctgccgcgggcagaaagttgccggaggtctccgggtggtatcgtccttttctctttgccagcccgctggcgagccgagccggggcaagatgaggtcgtcctgtgtcctgctcaccgccctggtggcgctggccgcctattacgtctacatcccgctgcctggctccgtgtccgacccctggaagctgatgctgctggacgccactttccggggtgcacagcaagtgagtaacctgatccactacctgggactgagccatcacctgctggcactgaattttatcattgtttcttttggcaaaaaaagcgcgtggtcttctgcccaagtgaaggtgaccgacccagactttgatggggaggaacgcccactgtctcgtaggccttcctaaccccgacgagctcctttaacctttgctgtctgtaatttctacctgcaagccctc

SEQ ID NO: 92839 - DNA, 787 bp, Homo sapiens
gcgaagaggcaggaagacaagaccatgtcgaagggccccgggcccggcggctccgcagcttcctcggcgcccccggccgctaccgctcaggtgctgcaggcacagcccgagaaaccgcagcactacacgtacctgaaagaattccgcacagagcagtgcccactctttgtgcaacacaaatgcacgcagcatcggccctacacctgcttccactggcacttcgtgaaccagcggcgccgccggtccatccgccgtcgggacggcaccttcaattacagccctgacgtctactgcaccaagtacgacgaggctacaggcctctgcccggagggcgacgagtgcccattcctgcacagaaccacaggggacactgagcgcaggtaccaccttcgttactacaaaactggaatctgcatccacgagacagactcgaaaggcaactgcaccaaaaacggcctgcactgcgcttttgcccacgggccccatgacctccgctcccctgtctacaacatcaggtgggctgggtgctgggctgggctgatggcagtaggctggggtccagggcaggggcctggcggctaatgatgggagcttcaggccatggaggccttgcagaatggccagaccacggtagaggggagcatagagggccagtcggctggggctgcgagccatgccatgatagaaaagatcctcagcgaggagcctcggtggcaagagactgcttatgtgctggggaactataagacggagccttgcaagaagcccccgcggctgtgccgccaag

SEQ ID NO: 92840 - DNA, 253 bp, Homo sapiens
gcaaatggaaatgacgccacttggccctgagggaagaaaaggctcagaatattaaaagcatgtctgatgaaatgctaatttgtttcgagaaacacgccgggatggcagcaacctggggcctatggagctttgtgaagctgaggcaggaatggaaaaaacagcattggtggaggctggcctggatccctctgtgatcttttcccttctttaacctatctcctgggctctgagcaacctcaatatttaggatagg

SEQ ID NO: 92841 - DNA, 284 bp, Homo sapiens
ctcctgactggacagagaagagaaaaatgcaggacactggctcaatactgcctttgcattggtttggctttggctacgcagcactggttgcttatggtgggatcattggctatgtaaaagcaggcagcgtgccgtccctggctgcagggctgctctttggcagtctatccggcctgggtgcttaccaactgtctcaggatccaaggaacgtttgggttttcctagctacatctgggaccttggctggcattatgggaatgaggttctaccactctggaaaatta

SEQ ID NO: 92842 - DNA, 1457 bp, Homo sapiens
ggcacgaggcggggtccaggtggaggtcttgaggctatcagatcggtatggcattggcgtccgggcccgcaaggcgggcgctagctggctccgggcagctcggccttgggggcttcggggccccgagacgcggggcgtatgagtggggcgtgcgctccacgcggaagtcggagcctcctcccctggatagggtgtacgagatccctggactggagcccatcacctttgcggggaagatgcacttcgtgccctggctggcgcggccgatctttccgccctgggaccgcggctacaaggacccaaggttctaccgctcgccccctcttcacgagcatccgctgtacaaagaccaggcctgctatatctttcaccaccgttgccgccttctcgagggtgtaaagcaggccctctggctcaccaagaccaagttaatagaaggccttcccgagaaagtgcttagccttgttgatgatccaaggaaccacatagagaaccaagacgagtgcgttctgaatgtgatctctcacgcccgtctctggcagaccactgaggaaatccccaagagagagacctactgcccggtcatcgtggacaacctaatacagctgtgtaaatctcagattctcaagcatccttctctggccaggaggatctgtgtccaaaactccacgttttctgctacctggaaccgagagtctcttctccttcaagtccgtggttctggtggagcccgactgagcactaaggatcctctgcccaccatcgcctccagagaggagattgaagctactaagaatcatgttctagagaccttctaccccatatcacccatcatcgatcttcatgaatgcaatatttatgatgtgaaaaatgacacaggattccaggaaggctatccttacccctatccccataccctgtacttactggacaaagccaatttacgaccacaccgccttcaaccagatcagctgcgggccaagatgatcctgtttgcttttggcagtgccctggctcaggcccggctcctctatgggaatgatgccaaggtcttggagcagcccgtggtggtgcagagcgtgggcacggatggacgtgtcttccatttcctagtgtttcaactgaataccacagacctggactctaacgagggtgtcaagaatttggcctgggtggactcagaccagctcctctatcagcatttttggtgtctcccagtgatcaaaaagagagtggttgtggaacctgttggcccagttggtttcaagccagagacattcagaaagtttttagctctatatttgcatggtgctgcgtgagcggaggacccctctgaatcctgaaacccctcttgcctctcttccacggaagagggcctgggccccgtggagcctcagtgcccgtttggcctgctgctctcgctgacaataaagagcccttgcgttgcaaaaaaaaaa

SEQ ID NO: 92843 - DNA, 355 bp, Homo sapiens
ggtgccttcagcagagagtctccagtagaaccgtgggttgaaacaatggggagtgaagaggacagggtgttcaagatagcctcgagctgtgtccatcattagcacgtcgtctacggtcaaaagagggaaacacatcagtagatagtcacagtgagcactcatgctccaaaaagctttccagaatttcctgaggcaaaaccacctttcccttttgagaaacctaggggcacattggcttcaagtgaaaagccatggattgtgcctacagctaaaatatctgaagattccaaagttctgcagcctcaaactgcaactcatgatgtcccctcaagccctacaacgtcagatgagcctg

SEQ ID NO: 92844 - DNA, 451 bp, Homo sapiens
ggttcgtgtgctagttagatgggcgccaggggtcgccggggggaagcatggaggggtctttgggggcctttgggaacatggagtcctattctgttccgcctggggcctcggtggcggcttgcacgccccgagatgacggccgctgccctaggcagggccggcgggcgattgcgcgtgtcctgctcctcttaggcccgggaccgcgggatgggtgtcggcgtgaccaggcctgagctccctgtctctcctcagtgacatcgtctttaaaccctgcgtggcaatccctgacgcaccgccgtgatgcccagggaagacagggcgacctggaagtccaactacttccttaagatcatccaactattggatgattatccgaaatgtttcattgtgggaacagacaatgggggctccaagcagatgcagcagatccgcatgtcccttcgcgggaagg

SEQ ID NO: 92845 - DNA, 356 bp, Homo sapiens
aactggaagaacagggggctagctagctgtgtctggggaccagggataccctcgtgcccctccggtgtgaggcggcctcacagggcctgctggactggcgagccgactcgtcggccgaggatgctgtgaggagtgtgtggatcaggacccgagtcagaggaaccatggtttcggataacctgatcaccttttgcctgatgctgctatacctcatcggagcggtgattgccggacgagatttctatatgatcttgtgggtgcctcgaaatgcctctattatggatattaccatggcctataggaaactatccctgcagcttcatcccgaccggagccctgatgatccacaagctcag

SEQ ID NO: 92846 - DNA, 361 bp, Homo sapiens
ctggaattttctgtttcattgtcggtgtcctctgctccgtgagaccatatgctctgtggggaggaactgtgtgacacactgtataccatgcaacttcaagggaaatcaatcatgttaggccactgctgaatacctccaagggtttcccatagcactgaaaccccaaacttaggaccctgcttacaaaggtgggtctggtggtagatgccacccacctcagccctccctaggacaccaattgcactggcctaccttctgccccagggcctttgcaccaaccaggccctaagcctgctgtgttccctgccttcttcaaggtcaagtcaggtcacagcctaaatgttaccaccttaaagattta

SEQ ID NO: 92847 - DNA, 408 bp, Homo sapiens
tctgtctataaaagagaagatatgcagaggaacgaacccatcattactatggaaaaccaagcattaatgctaacaaaaggcttgaaaaattgagacaacttttcagacaatatagttctaaagttttccataaaggatgaccgtggggagctccaaattggtctaccttctaattctgcctggttattgataattataagcccaattgtgatccaattttattcttggttttcaatacacactcaagaaacagatcctgtcctcttacattaagattgacaattacaatacgcactgtaagttaaaaagatgctttaacaaaatcagcactttctcccctgactgatttgacgttcaacgatttccttgagaaattaacgccctcttcaatttttcttcttggttttt

SEQ ID NO: 92848 - DNA, 699 bp, Homo sapiens
ggcttactcactatagggctcgagcggccgcccgggcaggtgcagaacagaacactttctcatgtccagggtcagattacaagagcactcaagactttactgacgaaaactcaggaaatcctctatcacaaagaggtttggcaactaaactaagacattaaaaggaaaataccagatgccactctgcaggctgcaataactactacttactggatacattcaaaccctccagaatcaacagttatcaggtaaccaacaagaaatgcaagccgtcgacaatctcacctctgcgcctgggaacaccagtctgtgcaccagagactacaaaatcacccaggtcctcttcccactgctctacactgtcctgttttttgttggacttatcacaaatggcctggcgatgaggattttctttcaaatccggagtaaatcaaactttattatttttcttaagaacacagtcatttctgatcttctcatgattctgacttttccattcaaaattcttagtgatgccaaactgggaacaggaccactgagaacttttgtgtgtcaagttacctccgtcatattttatttcacaatgtatatcagtatttcattcctgggactgataactatcgatcgctaccagaagaccaccaggccatttaaaacatccaaccccaaaaatctcttgggggctaagattctcaagcc

SEQ ID NO: 92849 - DNA, 105 bp, Homo sapiens
gcctgatgctaggaagaggggctgagtatggggaatctggaggctttaccctatgcatcgctggtatagccttcattttattttcctattccttttctatttatt

SEQ ID NO: 92850 - DNA, 334 bp, Homo sapiens; identical to SEQ ID NO: 38880

SEQ ID NO: 92851 - DNA, 340 bp, Homo sapiens
ttaaggtaacctatacatgttaatgtaattccattaagaattaacggattatctgaatctgtaaagtcacatttatgaagggaagtcaaaatctacttttattcagtgttaataataacctggtaaatgttttagagtaaatgaactaataaaatggttgaagctaatttaaatgatgcaaaatgaggttgtttcttacaattcaaagtaaagatagtaaatgtaagcattatgtgaaaccaagaaaatgcagaaggaagagtaattttgtggaaagatatctggttaatgctgcatgagagttcatttagctataccctctgtatcctctttaaggtat

SEQ ID NO: 92852 - DNA, 348 bp, Homo sapiens
cacgcaatgacacctaagtcatgaacccacacctttggctttaaatcttgaaacaaatcaagaaaccttttgttaaccaaaccagaaaagttccagcttactgggagacttctcaaatttgtcatttttccatgaattcagtttgtgctgtttaagaccttcctggtccacgaattcagtttgtgctgtttaagacctggttatttcccatgagccacacatgcttccaatctttcttgaagtagtgcacatgttccttcccagagctagtttctatttgcccatcttagttaagctccatatacatagaattgcattcattgacaccatttcgtattttataaattg

SEQ ID NO: 92853 - DNA, 101 bp, Homo sapiens
ggccccccccgccccataaaaaaaaaaaaaatttttggggcggattttccacccccccttaaaagacgctctccttggcccgcccccccaaaaaaaaaaaa

SEQ ID NO: 92854 - DNA, 1520 bp, Homo sapiens
  misc_feature (1)...(1520): n = a,t,c or g
atggccatcggcaacaaggggtcgagatcaggaggtcgctcgccgcccagttgcgtcgctcaccaccggccggccaccagaaccctcggcttccgatccagaaaccgtattttgttcttgcacccagaccgcaagaagcctcagccctcggggacagaccgaaggccagggctgtacctggctcacaaccaggcgccaagcggcacgggactctccttctgcactcgcagcgcgtctctgcagttcccagcgactctcttgggggtcggacctggtcactgcggcacttatctaggtggcggggcccgtggacggcggcgacctggatcctgtggcctgcttcctgagctggtgccggcgggtggggctggagctgagtcccaaggtgagcgagcgagccggcgggcggaggacccgcggcggggcgcgggctgccctgaccagccctcctgctcaggtggcggtcagccggcagggcacggtggccggctacggcatggtggcccgggagagcgtgcaggccggagagctgctgttcgtggtgccgcgggccgcgctcctgtcgcagcacacctgctccatcggcggcctgctggagcgagagcgagttgcgctgcaaagccagtcgggctgggtgccactgctgctggcgctgctccacgagctgcaggccccggcctcacgctggaggccctactttgcgctctggcccgagctgggccgcttggagcacccgatgttctggccagaggaggagcgccggtgcctgctccagggcacaggcgtacctgaggccgtggagaaggatttggccaacatccgcagcgagtaccagtccatcgtgctgcccttcatggaagcccaccccgatctcttcagcctcagggttcgctccctagaactctaccaccagctggtggcccttgtgatggcctatagctttcaggaaccactggaggaagaagaggatgaaaaggagcccaactcccccgtgatggtgcctgctgcagacatactaaaccacttagccaatcacaacgccaatctagaatactctgcgaattgtcttcggatggtagccactcagcccattcctaaaggccatgagattttcaacacttatgggcaaatggctaactggcaactgattcatatgtacggttttgttgaaccatatcctgacaacacagatgacacagctgacattcagatggtgacagttcgtgaggcagcattacagggtgagtgtatcattaactcaatatttgacactgatggtgtgtctatacccatgcctcaggttaaatagctttgctaaatagcagttgactttatagactgggtggcagactaaagaagaaatgaacccttgggtgtactgagactttcacattgctgtttcatctacaggaacaaaaactgaagctgaaaggcacctagtgtacgagcgctgggatttcctatgcaaactggagatggtaggggaagagggagcctttgtgatagggaggngagaggtg

SEQ ID NO: 92855 - DNA, 562 bp, Homo sapiens
ggcacgagagcagacattgcaggcctgaagaaaggtggtcacaagaggggtggaacattcctgcaaatggtttcaatatatgcagatgtctcgatataggaatgaaattacgtctttggaacaacttaaataagtcaaatatacttggagctttaaaaattaaaaggagagagattcgagcaccttttctgctgccatgacaaccatgcaaggaatggaacaggccatgccaggggctggccctggtgtgccccagctgggaaacatggctgtcatacattcacatctgtggaaaggattgcaagagaagttcttgaagggagaacccaaagtccttggggttgtgcagattctgactgccctgatgagccttagcatgggaataacaatgatgtgtatggcatctaatacttatggaagtaaccctatttccgtgtatatcgggtacacaatttgggggtcagtaatgtttattatttcaggatccttgtcaattgcagcaggaattagaactacaaaaggcctggtccgaggtagtctaggaatgaatatcaccagctct

SEQ ID NO: 92856 - DNA, 353 bp, Homo sapiens
ggcacgagtattctttctccacctcctaccctacccccacttccaaccaataagcttatatcaataaatatttgttggctagtaactatatgcctcagatactgctctcatctttgggggatacaaaaataaaagctggagacataagcattttctcaaaaatactcataatctgcatgggaagacacactgtgcacactgtggtctgcaaagtactggtatctgctgtgatagtcatatgatcaatatcctgtgggagtttgaagaacgacctcgagacttaccctacgaatattacggaaggctcaccaaggaggtaaaacttggctgatgttcaccacatgagcatgagc

SEQ ID NO: 92857 - DNA, 349 bp, Homo sapiens
cttgtgctccaagtatggcctcaaagtggtcatccgtccccgtacatgccttacttgagtggacatgcttccttaagaaggtcccagggagggatactagtagtagaacttcaggccagatgggcatgcggtgatagcagttatccagggtttcgtactggtcaatggagagttagggatgaggaatgttcagccctgttgctggtgccttgagttcgtatctagcaagagccattttagttggatctgaactctcgtctgtcggatttcgtaattggaatcgctgccattcatggtggtccaaaccctggctgaataaccgatactgaatgttcactgtgctcgtgcc

SEQ ID NO: 92858 - DNA, 342 bp, Homo sapiens
ggcacgagattgttgagtgacattcctagattaaagtgcccattataaggtgaaactgggagaaatatgattagtagcttagactcacaacacctagtttttcataattcacacagattcacagtcatggctggacgcattattcagactgagggatcgtgtgatgcagtcggtcgcacggctcttttccgtggctctgacattcgatcctgatttaatcattctggagtgttttcaactatttttggcagctgctccaagtaaggattttgacacttgctttgctttttggcttaaggaaaaaagaacacgcattatacctctcttaaataataacatgtg

SEQ ID NO: 92859 - DNA, 978 bp, Homo sapiens
  misc_feature (1)...(978): n = a,t,c or g
cacatantccttggacccgggtgaacagttcgctgtcctaacctgtgtggcctcggatgttgaaaagaaatgtttgtccttgttatgtccgggaacacaactgcccgaaaaaagcaacataacaacaacaacaaccccccacaacctgccttaggtatattcccccacttctgtctgtgggcaagccacagagatgggaagacgtgcaatgctacctttaaaattacctctatttctaactatttttttctaaaaactatagcaaagtacatatcactcagactgatgtagcatcattgcaaaggttcaattcacaaatgtattttcatatatttctaccaccctcgaacagcattcttcgaactttacaacacattcagctgacttctttaatgtaaaacgttaaatggggaggaagtacagtggagcgagactcagggacctcaaaagacctgggttctagccctactacttaattaacagtcatgtggcctaaacaaattattaagcttgtctggggctgagtttcctcatccaaaaaaagagatagtatcaattgtcctatttttcacaaaattattatttggaataaatgaaataatgtgtcaaagaggctggaacagcatcagtactgtatgaatattaagatgcaggcaaaaaatactcctccctgagataatactactaccattgtttaaatatcaatacatgaaatcatcaacctttctgatcacatttaaaacaaaaatttaaaaattcaagcttcccactacagcaaatccttactttgagacacattaattacatgacaataagaaaaactgaaaatataattcttattgcaatgttcccatacaaatttttctggtcattagatgcaacatttattttgatatgggtaaataagagaaagctcaaaacatacatcagaactcttaattttcatttatcagacttattaaaatatctgctttattt

SEQ ID NO: 92860 - DNA, 319 bp, Homo sapiens
cttatgaaccatgttccaaacctttgcgttgcttttctttccatcgtgtctatttcataacatccctgtgaggctggatgtgggaactttagcactggcgaactcttgggaaatatgtgcaaggacacccggctgagcatcggtagaaccaggacatcctcaggcatgcgcttctctgatgcaccagacccttactccactaacgatcacgcctagcgacaggggctgatgaatagcatacacatgactgagggattatatgacacacatggcttggtgtccatgtgtaataccaaaacttgggaaactataagtcttc

SEQ ID NO: 92861 - DNA, 360 bp, Homo sapiens
ggcacgaggtggcggcggtggcggacacttggggtctggacgcaacggcggcgggagcatgaacgcccctccagccttcgagtcgttcttgctcttcgagggcgagaagatcaccattaacaatgacaccattgtacccaaggcctgcttattcaccatcaacaaagaagaccacacactggtaaacatcattaatacggacggttcccgtaacaggctttcaggggctataatcactgtgcccctctgtgcacagcacatgttgaaagcattactgacgctctgtggacttctggaaaaacacttgcaaaactggatccactttattcacagagggatagagctgaccctgtcaaaccg

SEQ ID NO: 92862 - DNA, 361 bp, Homo sapiens
catgttggtattatcatgttaatgttctctgtttataaaaattgagtgcagatagatagactcggccattctgtgctctgatgagaaatctgggctatgttttacaccttaggataagatattaacgtcatcacacaactcactactaatcacactaatcctagtggtcacatatcttatgaatgccgacaatgtgtcagatatttcattcaaatggcagacttccaccgacatgagaaatgtcacactggtgaaaagtcttttgaatgcatagaatgtggaaaatacttcagatataactcattacttattcggcatcacataattcacactggaaagaaaccatttaaatgtaaagaag

SEQ ID NO: 92863 - DNA, 376 bp, Homo sapiens
ggcacgaggatcttttttttcttagcaaaaatttaatctattgggaaatgatctcagaactaaccatttctctgaaatcatagtgaaatcaggagtgtagaaagtatccattgtggagcctttgggaaactttatgttgagtaaatgggggacgtgcttttagagtctagagactttgaaggaatagggacggcatcatgggctgcccttctgtggtgtctctggctatttcccagcacagtccacaacgctgcccctattccttcaacttctcctgactctagaagcaacttcaagtttccagaaagctccaagttgcctcctgactgtgcagtctccccatttcctcagcacgctcttggtttcctgcctggct

SEQ ID NO: 92864 - DNA, 349 bp, Homo sapiens
ggcacgagcggccgcggggcggaggcactcgcgcggggggtaattcggtgtctgggttctggtgccgcgcagctttcccctatggcccactgcgtgaccttggttcagctgttcatttcctgtgaccatctcattgacccggacatcctcttcaactctgacccactctgcgtccttttacactacgggggaggcacccgcttgcctgatgtctgtccaacctcacatcttgatgccttgactatgccttccttgaaaactaggtcctccttgactacagtgatcacctatgccccgtccttatggtacccagatcacacgctatgtttccctttatttgcaaaacttc

SEQ ID NO: 92865 - DNA, 596 bp, Homo sapiens
agagctggccgggaaggatattggccatggaatgtttgtaggcttaaataggcacggtcaaagtttgccttcctctggccctgagcccgttagctgtaaagtaggcataagctaaccctaagtcaatgccccctatatgccaagcattatgttagccaatttacatgtggtaatgtataacatcattaccattagttgtaaaatgggggggagggggtaggtagaaaggataacagctttagaaatcagacaaggcttttttttctgttttaagaaaaccctgacttctagtttttacaaatcaattatgcaacagtatcaataaacataccagatttaaatctaaatcttcagagtcaagttctataaatttaacttggattgtcctacagtgggaacacatgccaggaaaaaagtttacagcggatgtttaaattatgattatgttctcatacatatagatgcactgaatcctcccataagtaccctgagtgaatggcagttctgtttggtcccatatgaactatgggaccaaacaaaaatcaaaagcctgtgtaactggcaatgcccaattactctgcaaactagctcgtgcc

SEQ ID NO: 92866 - DNA, 372 bp, Homo sapiens
ttgaagggaattctctggggctttggggaatttagtgcgtgggtgagccacgaaggtactacttaataatagcaagatgctagcgttgggtaagcaggtgttcgcacgaggtcacctatttaggccattttaaccctcgggataacctacaaggctatcacaagtacggttctacgcactctgcagaacgccacatccttaagcaccttctgaaaaatcttttcacgatattctgcctacacggggtgaagggagacctgctgattgacatcggctctggccccactatctatcagctcctctctgcttgcgaatcctttaaggagatcgccgccactgactactcataccacaacctcgctgagctgcatg

SEQ ID NO: 92867 - DNA, 412 bp, Homo sapiens
ttgacgttagtcgcagtcttcgctgctaacgttttgttatgagttgctaaaatggtgaaatgctgctccgccattggatgtgcttctcgctgcttgccaaattcgaagttaaaaggactgacatttcacgtattccccacagatgaaaacatcaaaaggaaatgggtattagcaatgaaaagacttgatgtgaatgcagccggcatttgggagcctaaaaaaggagatgtgttgtgttcgaggcactttaagaagacagattttgacagaagtgctccaaatattaaactgaaacctggagtcataccttctatctttgattctccatatcacctacaggggaaaagagaaaaacttcattgtagaaaaaacttcaccctcaaaaccgttccagccactaactacaatcacc

SEQ ID NO: 92868 - DNA, 359 bp, Homo sapiens
cgaaaaataacgaggaagaacaattaggcagatttgagtaaagaatatgagagtaacagagagtagtaattatgtcaaataatcatatcaaatctaacaacagtgattaatcaatttgttcaacatttcaagtgtaccaaagattcgctggcatgaggtgtaatagcttgagacacattttcaggagtctcatatacttcctccttctcacatacattagtgatatatgtggatgactctccaattgtagtattggccataatttcttccagctgtcctcttgcttgggtattttcatttactagaatttcaccatataaatggtcttttggtagactttcctttaccagtgcttcttg

SEQ ID NO: 92869 - DNA, 319 bp, Homo sapiens
aattcccaccgcggaaggtgtcgaccaacccccatgatggcggaagctcaccatgccggggcctggcagttcacggtgaccccagacggggtcgacttccggctcagtcgggaggccctgaaacacgtctacctgtctgggatcaactcctggaagaaacgcctgattcgcattatgaatggcatcctcaggggcgtgtaccctgggattcccaccttctgtctggtctgcattctggtaacagcgtgtttctctttctgcttctgcgcacatattacttgtttcttgttatcttctctatatattccttctcttcgtc

SEQ ID NO: 92870 - DNA, 582 bp, Homo sapiens
tggtgcctgacgcctggacacgtcggaattcctggtcgacccacgcgcccgcggacgcgtgggcggggcctttgtccctcgctgtggcctgagctccaggtctcgtcttcagcgctctgtgtcctctgctcctagaggtccaggctctgtggccctgtgacctgcaggtattgggagatctacagctaagacgccaggaacccctggaagcctagaaatggagaacctgaagtctggagtgtatcctctcaaggaagcaagtggatgccctggggctgacaggaatcttctggtgtactctttttatgaaaaggggccattgacatttagggatgtggccatagaattttctctggaggagtggcaatgcctggacactgctcagcaggatttgtatagaaaagtgatgttagagaactacagaaacctggtcttcttggcaggtattgctgtttctaagccagacctgatcacctgtctagagcaaggaaaagagccctggaatatgaagagacatgcgatggtagatcaacccccaggtaggtgagagtgaacacaacagacgacatgaatgagaggtcc

SEQ ID NO: 92871 - DNA, 198 bp, Homo sapiens
tacaacatcgtcgggaccagaatggtctcaggcctgatgcagacttttaagccatacgccgaccatggaaaactcactaccatgataattgtactgattagcttttgtctcctaagcatcacctgtgccataccagttatacaggctgattctgaaagttctgaggaaaagcaggtttacaacagatacccagatgct

SEQ ID NO: 92872 - DNA, 371 bp, Homo sapiens
ctcagccaaccgatattgctgattagcctgttaagcaggatattcattgcaactcaccatggctcacaccaggtcatacttcatgctgaactcctgcctgatgttcctgcctcagagcctaggtcaaaaggcccagacagaggtgcccaaggcccggatcaactgcccaaaaagctccactgcctatcgctcctactgctactactttagtgactaccgtgagacctgccgtgatgcctatctctattgccagaacatgagttcgagcatcctggtgtctgagctcacccatgcccagggtgcctttgaggcctcactgattaacgagaggggcactgatgacttcactgactgcattggcctccatgacc

SEQ ID NO: 92873 - DNA, 409 bp, Homo sapiens
gggagtcgcatgaggttccccatctatagttgacagacaattttacagacgtggattcgcggatagaacggtatactctaggagtagcacggcagggaggatgcagcagtccatggttcaggactctgattggtgaaggtacagtacgggagttggtgaaagaccaaggaagcgttcagacagcgcatgatacgggcatatctagcattggcgataatggggagcacagtgatggcaataaggttcatgaaataaggggataaggtgttacctgtgacttaaagcagaagaaggaagttgtgcaagaggcagaaaatggaagagacgcccctgctaacgggaatgctgagaatgaggaaaatggggagcaggagcctgccaatgaggtagacgaagaagaggaagaagg

SEQ ID NO: 92874 - DNA, 369 bp, Homo sapiens
ggcacgagagaactgtgttcactaacaacctgaaacagacaccatggtgcacctgactcctgaggagaagtctgccgttactgccctgtggggcaaggtgaacgtggatgaagatgccggtgacgatctgtgccagatactggtggacagacctaggctccgtatatgattttaacaacaggtaatctctagggagaatgattgtagggaggactatcattttcttcttttttgggcatctggattttttcttacaatgaacatattacttgagcagatttttttaatgcaggtgagaaaagcgatactaggaagaatggattcaaaggttgtgaccatgtaaccatgcatttgttaaaagccgtccag

SEQ ID NO: 92875 - DNA, 564 bp, Homo sapiens
ttaccactggcagagcaaatatgactcagaaaccggctcctcagggttgtaacattagatgatacaggcttgggtcgttacacatgacaccagtgcctttgtttcattgggctgggctctctggaaggtgtgctgctgcctgagctgctggaaaagcactgacaggtgtttgctagaaaagcactcctggagcttgccaccagcttggacttctagggactttcctctcagccaggaaggattttgatattcatcagaaatacctccagaagattcaaggagctgtagaggtgaagtaagcctgtgaaggaccagcatgggaatcctatactctgagcccatctgccaagcagcctatcagaatgactttggacaagtgtggcggtgggtgaaagaagacagcagctatgccaacgttcaagatggctttaatggagacacgcccctgatctgtgcttgcaggcgagggcatgtgagaatcgtttccttccttttaaagaaggaatgcttatgtcaacctcaaaaaccagaaagagagaacctgcttgcattatgctgtgaaaa

SEQ ID NO: 92876 - DNA, 277 bp, Homo sapiens
aaagccgaggcagcgggcagacgagcagggggcgggcggacatcttgggatccggagagtggccgggccggcagagcagggggccgaggacaccaggtctgttctcagagcgatgggccgcggagactgatctgccgccatgattggaggcttattcatctataatcacaagggggaggtgctcatctcccgagtctaccgagatgacatcgggaggaacgcagtggatgcctttcgggtcaatgttatccatgcccggcagcaggtgcgcagcccg

SEQ ID NO: 92877 - DNA, 346 bp, Homo sapiens
  misc_feature (1)...(346): n = a,t,c or g
cacgaaaggccagaggaaggagctgcgggtagctcgcagcaggtatcggagcttaagccagtggatttgggggccctgggctccctagccggctgcggtgtgagaatggagtgggcaggaaagcaccgggactttcagggctctgggtttgcagagagccgaaatgaccatgactgccaacaagaattccagcatcacccacggagctggcggcactaaagcccctcgggggactctgaccagaaaatcctttgagtttgaggatgcatccagcctccagtccctgtacccctcttctcccactgagaatggtactgacaaccaacccaagtttggatcccaaacn

SEQ ID NO: 92878 - DNA, 420 bp, Homo sapiens; identical to SEQ ID NO: 62009

SEQ ID NO: 92879 - DNA, 632 bp, Homo sapiens
cggacgcgtgggcgagcggcggggagctagggagtttatttgatcaccacgtccagagggcggtatgcgacacacgggccaaatatcgagagggacgacggcctcgtgctgtgaaggtatatacaatcaatttggaatctcagtacttattaatacaaggagttcctgctgtgggagtcatgaaggaattagttgagcgattcgctttatatggtgcaattgaacagtacaatgctctagatgaatacccagcagaagactttactgaagtttatcttattaaatttatgaacttacaaagtgcaaggacagccaagagaaaaatggatgaacagagtttcttcggtggattgcttcatgtgtgctatgctccagaatttgaaacagttgaagaaactagaaaaaaactacaaatgcggaaggcatatgtagtaaaaactactgaaaataaagaccattacgtgacaaagaagaaattggttacagagcataaagacacagaggattttagacaagacttccactcagagatgtctggattttgtaaagctgctttgaacacttctgcagggaactcaaatccttatcttccgtattcctgtgaattgcctttatgttatttctcctcaaaa

SEQ ID NO: 92880 - DNA, 405 bp, Homo sapiens
aaagtgaaaagccaggataatgtcaccaagagattggactgaattccgcctgatggtcctgaggttcctgcagttgatttttctgactcctctgttctctggtgaccggagttgagaagttcttaccctgcctgtctgtaggactcacttgaggagcctctaaaaatcctcatgtccagatcctggtccagcaagatccagttctgggggtagggcctgggcatcagcattttttatctatagctatgtaaagaacgggttcctccatgttctcacctccctccccagagtggcttcgtgctcctcagtggttctcttctggcttattccttctccagagcacctgttccttcaggccttctggcagaccatgaatcgcgagtggacgggcattgacaggctgcg

SEQ ID NO: 92881 - DNA, 449 bp, Homo sapiens
gggtcgacccacgcgtccgcctctgtgtagattaaacctgcgctccctgtttcccatttccacagccgatgtccagggtcgatacggcccttaaaatccccgcacactccaccccagaaaggtgggagacaatgccttggagctgcaaatcttctctgagtctgaagcatcctgcctgacgcgtttgctcacattgacccgtgccttccctcagtccttctcatctctactgagattccgtctcaccctgaccctgtgacatgaacttctgaagagtccactgggcatggtcctgggaagggctcacacccagacatggatggagacgggttgacattcagggacgtggccatcgaattctctcaagatgagtggaaatgcctgaactctacacagaggactttatacagggatgtgatgttggagaactacaggaacctggtctccct

SEQ ID NO: 92882 - DNA, 489 bp, Homo sapiens
  misc_feature (1)...(489): n = a,t,c or g
atgtgtccacggggatggagaggtgataataataataataatggctgaaagcgcaaggcactgtgcaaaaagcctaacacaaaaaagcttgctggagttgtgccacattacacagatttcaagatataaagcctccaaggctgtgtttgccaaaaaaaagaaaaagtaaagcaataacaataagtcatttctgcatttctgacagagtgctcttattcctgcattttccttatgattggtgggctttgccttcaagcatcccntgttcccacctattccttcccctcccctcctccctctcaccctcccctttctcctgcaaacaagtcaggggaggcagggagtgtgaacacagtacatgggagggggaggacagagttcaccctgttaaaaatcattaatcatcttgaggtccggacgcgtgggcgnacgcgtggncgnacgcgtgggtcacgccgatcagccggaccggtaccacagcgttcaaan

SEQ ID NO: 92883 - DNA, 712 bp, Homo sapiens
tttcgtctgtttctccacgagggggggttaaaggcccccaaaacatgcacacatgaaaagggcaaaaagtaaccgtccttgacagggagtcttaactagagaaggaaacgggactaaactggcgggctccgtggaagcgtggccggcagcgtcccggacgaggagagacagcgtcttgctcagtcacccaggctggagtgcagtgatcatagctcatcgcatccttgaactcctgggcttaggctatcctcccgccttagcctcctgagtggctgggaccacagatgtctttggtggacttgggaaagaggttgctagaagcagcaagaaaaggccaagatgatgaagtgagaacgttgatggcaaatggcgccccattcaccacagactgggtaagcttagaggagaggtctcttaattatttccaatgtatgcttttaccaacatttttcttaaaggctaacagactattggtttttcttcactccctttctacctcatatcccttacaagagttttattttctttgtctcatctgaatatgtggttttctttttcttttagttttccaaattgagagtctcctgtggatatataggtgataattggaaggtattatatacttgtgattttctataatggtttttagagtattttctaaaggtttaactgtctctggagtgtacttgggttataggcttctgtaattagc

SEQ ID NO: 92884 - DNA, 397 bp, Homo sapiens
aaagacagcataggagagctttacatatcccctgtcttgaaggacaggaaaacacatgtcacttctcatgttttattggcagaatcttagccacatgccacacttaatttcaaaggaacctgggaaatacagggtaggtgggaacttgttagcccagaattctactactatggacaaacaagagtctcttccacatctgattcttctcgttttgaattagtcaagggaaaaataatttgcttaacaacaaatgtattttggtaattataggttaatttttttatctctttcagttagatgtaatcatagcagatttggatggaggcactattaaaattcctgaatgtattcacctctcttccctcccagaaccacttctacatcagactcaatcagg

SEQ ID NO: 92885 - DNA, 1133 bp, Homo sapiens
acttgaatgaagcagtcccagagacagagcgcctggattcaaaagcactgaaaactcgagcccagctctctgtgaagaacagacgccagagaccctctaggacaagactgtatgatagtgttagttccacagatggggaggacagtctagagagaaagccatcaaacagtttctataaccacatgcatattaccaaattacttccacctaagggtttgagaacgtcttctccagaatcagattctggtgttccacccctcaccccggtggatagcaatgtgcccttctcgtctgaccacatagctgaatttcaagaagaaccactggacccagaaatggggcctctctcctctatgtggggagacacttcactgttttctacttcaaagtctgatcatgatgtggaagaatctccttgccatcaccaaaccaccaacaagaaaatattacgagaaaaagatgatgccaaagatcccaaatcactaagggcatccagttcattggcggtgcaaggaggaaaaattaagcggaagtttgtggatctgggggcgcctttgcgaaggaattccagcaagggaaagaagtggaaagaaaaagaaaaagaagccagtaggttttctgcaggtagcaggatcttcagaggcagactggaaaactggacacccaagccatgttcaacagctcagacctccactcgttccccttgcatgcctttctcatggtttaatgacagccggaaaggatcctattccttcaggaacctgcctgcgcctacaagttcccttcagccttctcctgagactctaatttcagataaaaaggggtccaagaattttaccttcaatgatgacttcagtcccagcagtaccagttcagcagacctcagcggcttaggagcagaacctaaaacaccagggctctctcagtccttagcactgtcatcagatgagatccttgatgatggacagtctcccaaacacagtcagtgtcagaatcgggccgttcaggaatggagtgtgcagcaggtttctcactggttaatgagcctaaatctggagcagtatgtatctgaattcagtgcccaaaacatcactggagaacagctcctgcagttggatggaaataaacttaag

SEQ ID NO: 92886 - DNA, 410 bp, Homo sapiens
tgggaattcatcggagctatgccacacttctctttatactttgcattgctgagagagacttaactttttttagatttaacattcctaaccacggtattcaataaataaatgttaagtgcctaaaatgtacacgtgttgttctaggagctgggtgtacagtagtgaaccaaaagacaaagtccacgccctgcacaaaataggaattacctccatgtagaggcgagccttcaagagctgaagtggcttgctctggtcataaaactagagggcagcaagctctgaaggcagattgctgggactccacacccctctaaccataactctgctgtgttcctcttgaccctgatgacaggtacccgcaagatggagtacaagggcagcagctggcatgagacctgcttcatctgcca

SEQ ID NO: 92887 - DNA, 991 bp, Homo sapiens
  misc_feature (1)...(991): n = a,t,c or g
catctcccccccgccctttctccccgcggcgtttccctccgtccttccttccctccttcccagtctgggcaccggagcctgtgaccgcttcgttagtggagaggtagctggcagtccgcttcggcgggcctgtgccccgcgccgttctcggggcctccctgctgagctcgcggctcacgctgagagggacacgcagtgacgagcggccgaagcagctttgcggttttgtagtgcatccctgagcatgagcacagaatgaagcggcgtttggatgaccaggagtcaccggtgtatgcagcccagcagcgtcggatccctggcagcacagaggcttttcctcaccagcaccgggtgcttgcccctgcccctcctgtgtatgaagcagtgtctgagaccatgcagtcagctacgggaattcagtactctgtaacacccagctaccaggtttcagccatgccacagagctccggcagtcatgggcccgctatagcagcagttcatagcagccatcatcacccaacagcggtgcagccccacggaggccaggtggtccagagtcatgctcatccagccccaccagttgcaccagtgcagggacagcagcaatttcagaggctgaaggtggaggatgcgctatcttatcttgaccaggtgaagctgcagtttggtagtcagcctcaggtctacaatgatttccttgacatcatgaaggaatttaaatctcagagcatcgacaccccaggagtgattagtcgtgtgtcccagctattcaaaggccaccccgatctgataatgggattcaacaccttcttgccccctggctacaaaattgaggtgcaaaccaatgacatggtgaatgtgacaactcctggccaggttcatcagattcccacccatggcatccagccacagcctcaaccaccaccccaacatccttcccagccttcagccggacgcgtgggtcgaacgaggaaggnnnntgcaacgtctg

SEQ ID NO: 92888 - DNA, 447 bp, Homo sapiens
aacctgattttcaaaagatctttaagtttccacatgtaagtttcatatggtagaacagttttttttttgactacattaaagttcctcattttatttaaaccataaaaacattgtgtcaagaagatattaacatgcattaatgttatttaaacatgattaaaaatcatggaatctggaattttgaaaatatgggtcctgaaaacttttggccatgggcttgtttttaaagaaattgcttttttcacccatgcttcccaattagcagcagatccagcaatctggaatcctcctagccaagttcacaccgatcatctcaggcttgttctttgctcccacttttgttttcatcatttgctgcattctataactatattcagcttctggtcctttattttttaaaacaatatttaattgacaataaagaattgtatatattcaaaaaaaaaa

SEQ ID NO: 92889 - DNA, 421 bp, Homo sapiens
cgctcaggctgtgttctcaggatgaccgagtgggagacaggagcaccagcggtggcagagaccccagacatcaagctctttgggaagtggagcaccgatgatgtgcatatcaatgacatttccctgcaggattacattgcaggtgtgagattaatacttttatagtcctgttatgttaatttggtattattttgttatactatttaacgtgcttctattttttgattgtatttgttataggtttattttttgttttatgtgtggtgtattatagttttattgtgatataatagattgtatttattggttctggtgtgttatgctatgtttattaactttatgtaatattgatctttttttatgtatttaagtgttgtttatcttgattttttttggtagttggtgtgttcttatttctcag

SEQ ID NO: 92890 - DNA, 398 bp, Homo sapiens
cggacgcgtgggggctcactttttgctgcgaaggatttacaggccaaggccaggaggtgactgctctccccagaggccctgtcagctggaagcagctggtttcacataacagagaccccaggcccaggtcccctggatgctggaggatttgcggctgcccttttggaagagttcctgttccaggtgctgacttttatgatctacatcgtgagcactgtgttctgcgggcacctgggcaaggtggagctggcatcggtgaccctcgcggtggcctttgtcaatgcctgcggagtttctgtaagagtcggtttgtcttcggcatgtgacaccttgatgtctcagagcttcggcagccccaacaagaagcacgtgggcgtgatcctgcagcggggcgcgct

SEQ ID NO: 92891 - DNA, 52 bp, Homo sapiens
cacagtccctgctttatttccatttgttcacacacgctttaaaaaaaaaaaa

SEQ ID NO: 92892 - DNA, 492 bp, Homo sapiens
ctccgcttgaggagaagcgccaagtgcgcatggggacgctatagcaattcgtttgctgtccttcctctccttcgaagatgacaaggcctaccatcgtttcttcctgcctttgggccgtcaggcagttggttgggacccgctccaaccctcggttcttcctgcaatacagtggatacaatttgtcatggctactctgagataagaccacttttttatctgagcttctgtgacctgctcctgggactttgctggctcacggagacacttctctatggagcttcagtagcaaataaggacatcatctgctataacctacaagcagttggacagatattctacatttcctcatttctctacaccgtcaattacatctggtatttgtacacagagctgaggatgaaacacacccagagtggacagagcacatctccactggtgatagattatacttgtcgagtttgtcaaatggcctttgttttctcaagcctgata

SEQ ID NO: 92893 - DNA, 418 bp, Homo sapiens
  misc_feature (1)...(418): n = a,t,c or g
ttccaaaccctggggttgaaggcaggctcccgggtgcagcgcacaggccccatggccagcctcctcccggcggtcagcctcctcccggcggtcagcctcctcccggcggtcagcctcctcccggcggtcagcctcctgggctcagctgcacattgtccttagctcatgctgtccccactacctgcctggccctgcctgcaaaaggggtcctggcatcccactgtctgggaccggtttccagctgtgctacttactagcaatgtgaccctgcacatcaagtcacacagcctctgtgtctcagtgcttctttggtaaactgagtttaataatactatcttcttcacaaggttgttgcgagttttaaaggaactagaaacacgagcccacgcgtccgcgnacgcgtgggcgaacgcgtggg

SEQ ID NO: 92894 - DNA, 465 bp, Homo sapiens
cagttaccaactacctgttgatgtgtgtggttacagacttctttctatgctttgtacaactctacagaccgtatcttgatactgatggacattgtgtgggccagaggcagggatggttggctatgaccccaaaccagatggcaggaataacaccaagttccaggtggcagtggctgggtctgtgtctggacttgttactcgggcgctgatcagtcccttcgacgtcatcaagatccgtttccagcttcagcatgagcgcctgtctcgcagtgaccccagcgcaaagtaccatggcatcctccaggcctctaggcagattctgcaggaggagggtccgacagctttctggaaaggacacgtcccagctcagattctctccataggctatggagctgtccaattcttgtcatttgaaatgctgacggagctggtccacagaggcagcgtgtacgacgcccgggaatt

SEQ ID NO: 92895 - DNA, 389 bp, Homo sapiens
ctaacccactgacatctcccgccttcgctacctggaggcgctggacctaaacaacaatggcctgacagccctgccatccgagagcttctccaactcacccgtgagcgacgggaaccttaaccacaaccagctccgggaggccttaccgtctgtcttcacgactcacagacagggccgggcactacacggggacctctcccacaacctcattcaccgcctgatgccccaccccacgagggccggcctgcctgctcccaccattcaaagcctaaacctggcctggaaccgtatccatgccgtgcccaccctacgagacttgcccctgcgctacctgagccgggatgggaaccctttacttgccattaggccgggagaccttctagcgatgg

SEQ ID NO: 92896 - DNA, 398 bp, Homo sapiens
ctgcttttctgctcgccttcccccatccgtcttccttcctccactgctggtctccagctctctgtggcctgagtacctggagggcggtaagaagaccttggacagcgttcctgattgacgccgagttccgacgcttcgcgctgtctcgcgcttcggtgagcggattccaggagttatcgcggttgctgcgggcggtgcaccagagcccgggcctggacgtgctactcgtgtatccggaggctcatgtcgagctgatgaccctcaccaacggcgaattgatacacggcagcctgcgatgtgcaatggcctgtgtcacgtgctaacgagctgagaacagcgccctggatggcgagataatgtgtcccgcaattctgtgtcctccctggatgaccaggacg

SEQ ID NO: 92897 - DNA, 419 bp, Homo sapiens
cccacgcgtccgcccacgcgtccggcctggggctccgagatggtcagaggatgggagacggggcagtgaaacaaggcttcttgtatcttcagcagcagcagacgtttggaaaggtaggagtgaggctgggctggggttgggcagggggcctgggaggctgctagaattcctgggttggagagggagtttcatattcaaaacccttataggtctgactgtgcacccaccaagttagacccagagctcaactttgggagggctcttttcctacccgacgctgtctcctgaaccaggccccaaccaggtcccaaactgtgctccttactgagggctgtttgccctgggtgggggtgggggatgtgctgccttcatctcttgcctcttttgctctcttgctctgtgttgacttcttttcaccg

SEQ ID NO: 92898 - DNA, 452 bp, Homo sapiens
aggacgcgtgggggaatggaaactaagatgtcattaaattacttgagcaaatcacagaaacgatctgcagtacaaaaggcaatgaatacatttttgataatttatctagaaatgcttatatctgaagctgtcatcagcactatcttgaagtatacatggcaagctgaagaaaaatgggatgaaccttggtataaccaaaaaacagaacatcaaagaattagcggtaagattctgacatttatttcacacttccttgcttttttggttctctacaatttcatcattccaacttcattatatgtgacagtcgaaatgcaaaaattccttggatcatctttcattggctgggatcttgatctgtatcatgaagaatcagatcagaaagctcatgtcaatacttccgatctgaatgaagagcttggacaggtagagtacgtgtttacagataaaac

SEQ ID NO: 92899 - DNA, 416 bp, Homo sapiens
caggaaagtggaaaagaactcaggtccccctacttggtgaagagtgcgcagacatggacctcgccagaaaagaatttctgcgtggaaatggcttagctgctgggaaaatgaacatcagtattgatttagacacaaactatgctgagctggttctaaatgtgggaagagtcactcttggagagaacaatagaaaaaaaatgaaggattgtcaactgagaaaacagcagaatgaaaatgtctcacgagctgtgtgtgctctgctgaattctggagggggagtgatcaaggctgaagttgagaataaaggctatagttataaaaaagatggaatagggctagatttggaaaattcttttagtaacatgctgccatttgttcctaatttcctggacttcatgcagaatggtaactacttt

SEQ ID NO: 92900 - DNA, 530 bp, Homo sapiens
  misc_feature (1)...(530): n = a,t,c or g
gtgagaacatacttcacatgtaaaagtgaatactggtattgacagtagtaaatacagaaataccagcattgggttgggggctttggttctctctctttcttccttcactaatgcaatgacaatgtttgtagatttttttaaaaaaatcatggcactatacctgtgagcccgagcttttggttagaagcaggtgggtgggttaatttggattggcttattgattggatgctacagtttcaaggtactggggcttctgtgggtgcttgttagggatcattggggtgtggtgggcagcgctggctattgcttaaggatgtacctgtctttatgtgccttagtccctgtgtttgtctctttctagtcaatcatatttgatgaggtggatctgacagatgccagcgtagctgaatccagtaccaaaaacgtcaacaacagttttacgggaagattcctcagacatgcctttcttgattcttcactgaaggtggctttcctttntgatctgaacatgtgtccaagcagttcaaacg

SEQ ID NO: 92901 - DNA, 782 bp, Homo sapiens
ggaacatgggaccttgaggagttccgtaaccaaaaggagaaagtaacaacagccagtggagacaaaaagaactgcttctctttctttccccctccaagttcctagtggagggctgagtccagcatcccagactcgtgtgactatataggcaagcatttggggacctacttcactttgataccctagccttcagcagctcaaggtgttggcctttggataggaggcttccaagtagtaaagctccctgctctcagcaagcccaacaccatggggaagggagatgtcttagaggcagcaccaaccaccacagcctaccattccctcatggatgaatatggttatgaggtgggcaaggccattggccatggctcctatgggtcggtatatgaggctttctacacaaagcagaaggttatggtggcagtcaagatcatctcaaagaagaaggcctctgatgactatcttaacaagttcctgccccgtgaaatacagaacctgatcctccagatcgtacgccaagccactaagcgtgccaccattctggacatcatcaaggattcctgggtgctcaagttccagcctgagcaacccacccatgagatcaggctgcttgaggccatgtgccagctccacaacaccactaaacagcaccaatccttgcaaattacgacctgaaaatggctgagggagggggctaagagaggagcaaagcaggaggtcttgggctaaaaatcttttttaccaaaaataaatctaagtctgatttagtttcatcaaaaaaa

SEQ ID NO: 92902 - DNA, 411 bp, Homo sapiens
  misc_feature (1)...(411): n = a,t,c or g
cacagcaacaagcatccctttacataaagtaccatagaaagtgctgtggccctagagagatggataaaacaaagcatctgctctcccgggataaaaagaagaaaggccattttgtgaagagatgaagactgagcggttgtggccgccttgccgaccttgagcagcagttggcttctccacatagtacccgggaataggagtctcagaatcgaatctcttctgcctgctcacttctgtgagatttttttgatcttcagctacatttttggctttgtgagaagcctcatcatccaacacagtggccagcaacgttgccgacaagacggatcctcactccatgaactcccgtgtgttcattgggaatctcaacactcttgtgctccagaaatctgatgtggaggcagtcttttn

SEQ ID NO: 92903 - DNA, 431 bp, Homo sapiens
agatcttaacaccacgctttgagcaagtcttttgagcgggaggacacagagcaggaaccgagaagggacaagcacatggaagccagcccagcatccgggcccagacacttgatggatccacacatattcacttccaactttaacaatggcattggaaggcataagacctacctgtgctacgaagtggagcgcctggacaatggcacctcggtcaagatggaccagcacaggggctttctacacaaccaggtgaccgacccagccatccgaatccaggcagggcccttccaatccagggacattcataggtagaaggttccggattgtacttgtggtttcctgcagtgtttgtcacttgtgcttcctgcagctgctgctgcttggccctggggttggggggagacttcggcttcagtgactatccatgcccg

SEQ ID NO: 92904 - DNA, 1589 bp, Homo sapiens; identical to SEQ ID NO: 61922

SEQ ID NO: 92905 - DNA, 382 bp, Homo sapiens
ccaacttacagaattcattagataataccaattttgcatctgtgactcagccacagaaacagccagcttggaaaactgggacgtacaaaggaaaaccacaagtttctatttctatcactgaaaaggtaaaatccatgcaatatgataaacagggtatagcagatacatggcaagttgttggaacagtgacttgcaaggtgagatttttctctggtacttgctttatcgttttatttaacatatggagaaaagttaaatttgctagttgtattttaaataacattttttattttcatcttaagcagcagtttttaaatgggagagtcatgtaaaattttatgttatcttttttgcattccttaccaattatattagttatctg

SEQ ID NO: 92906 - DNA, 808 bp, Homo sapiens
ggagcggctgccacggaaaacgcctggccggacggtggctggcggccctgcctgggcgcggagggcggcggtggcgggccccgcggccttctctcagcttcctttctcctcacgacggcctccacagtccggagcccggcggagcccggacctggcggggagagctgcctccacggccgggcacccagaccccaccgtcgcagtcgccaccacctcagtccatccttggtaccggcaatgggcttcgtatcctccagtgcacttgtaactgacttggacacggaatactaagaactcacttctgtcctcatcccagtcgcgccggcggtgaccatctcggctcttttgggcttaactgccgctcctctggactctgtctgactttgggggcaccatggaccaaagtgggatggagattcctgtgaccctcatcattaaagcaccgaatcagaaatacagtgaccagactattagctgcttcttgaactggaccgtggggaaactaaaaacgcatctatctaacgtttaccctagcaaaccattgacgaaggatcagagattggtgtattcgggcagactgcttcccgatcatctgcagctgaaagacattctcagaaaacaagatgagtatcatatggttcatctagtatgtacttctcggactcctcccagttctccaaaatccagcaccaatagagaaagtcatgaagcattgacatccagcagcaattctagttcagatcattcaggatcaacaactccatcatctggtcaagaaaccttgtctttagctgtggggtctttctca

SEQ ID NO: 92907 - DNA, 540 bp, Homo sapiens
gcggccgccagagcggaactcagccgctccgacctcagcctcatccaacagcagcagcagcagcagcagcagcaacaacaacaacaacagcaaaagcagctggaggaggctgaggaggagaggacagaggtgcctggggcaacctccaccttgacggttccagtgtctgtatttatgttgaaagtccaggtgaatgacatcatcagtcgtcagtacctgagccaagcagttgtagaagtgtttgtaaactacacaaagacaaattccacagtaactaaaagcaatggagcagtgctgataaaagtaccctacaaattaggacttagtttaactattattgcttacaaagatggctacgtgttgacccctctgccttggaaaaccagaagaatgccaatatattcatcagttacactttcactgttcccgcaaagccaagcaaatatatggctatttgaagacactgttttaattactggaaaattagctgatgccaagtctcaaccaagtgttcagttttcaaaagccttaattaaactt

SEQ ID NO: 92908 - DNA, 417 bp, Homo sapiens
ggtgtgatgaggtcatggggttgctgtcagttgggggggggcatttggaaggctttcagtccagtgctgctttacccccaatgtagagaattgacattgcaaaagtttattgtttttgtattggcagaggatctcaattctcagggacactccataataattaattgctacaaacagcaaaggcttaatgctaagcttggaatctggactcccatgatcacttctcataaagagcctcctctccctctgaaagctcaaaatgagatcacagaatgttagaattggaaagaagctaagtgatggttatctggctacttccatttacagcaataacacctgaagccagcgacctgtccaagttcaccaaactggtcaaccaggaaaacctgccctgaaagctggtcttttgcctttcaa

SEQ ID NO: 92909 - DNA, 694 bp, Homo sapiens
catccccaggcctgaagataaagccaaggggctggcggtcctgattgacgccaggagacagcccccacagcccggtctggtcagcgccctgcaggccacccaggctcaggtcccagcctctatccgggctattctcttcctgggggagaaggaggcggctctccagctgcagacattacctgacgtccaggtggaggtgctgacctcattgaaggccctcagccaccatgtggaccccagccagctgcccgcagtcctggaaggccccttcccctactgccacaccgagtgggttcatttcttccagaagctggaccctttccttgctgacctccaccaggcctcttccctgctacaagcttccatcgaggaattcgagaaggccgacccccctggggggatgcaggaggctaccaggtgcctgagcaagtccaaggagctgatggaggctgtgctgagggaccccggcctactgggcctccagcgggaaggtggagccaccctggccaggctgcagcatgatgccagcaggctggacttcagccctgatgtcaggagccatctggctgcagccactgccttgtacagccttgtggacgagcagcttcatgttctggtcaccgcttccaacagcctcctggggaagctggagctccgtgtccgcctgggccgcctggaagctgccattcaccag

SEQ ID NO: 92910 - DNA, 910 bp, Homo sapiens
ctgcgctactgccggagcggggcggttatggcggctccatattaacagcctcctcctcctccgccgccgccgccgtctcctcctcctcctcctttccctcccgcccgcgctctaagccatctccgccttcaccctgacgcctgcctcttcccctcacctttccccctcccctgttctaccatgcccggcatgatggagaaagggcccgagttactggggaagaaccgatcggccaacggcagcgccaagagcccggcaggcggcggcggcagcggcgcctcgtccaccaacggcgggctgcactactcagagcccgagagcggctgcagcagcgacgacgagcacgatgttgggatgagagtcggagccgaataccaagctcggatccctgaatttgatccaggtgctacaaagtacacagataaagacaatggagggatgcttgtatggtctccatatcacagtatcccagatgccaaattggatgaatacattgcaattgcaaaggaaaagcatggctacaatgtggaacaggcacttggcatgttgttctggcataaacataacattgagaagtcccttgctgatctccctaatttcactccctttccggatgagtggacagtggaagataaagtcctatttgaacaagcctttagttttcatggaaagagctttcacaggattcagcaaatgcttccagataagacaattgcaagccttgtaaaatattactattcttggaaaaaaactcgctctaggacaagtttgatggatcgccaggctcgtaaactagctaatagacataatcagggtgacagtgatgatgatgtagaagaaacacatccaatggatgggaatgatagtgattatgatcccaaaaaagaagccaaaaaagagggaatgtctt

SEQ ID NO: 92911 - DNA, 2918 bp, Homo sapiens
gcggcgccgtcggctgggcccggattcccctgcggcttcgatccctttccactgggatgcagaaagcctcagtgttgctcttcctggcctgggtctgcttcctcttctacgctggcattgccctcttcaccagtggcttcctgctcacccgtttggagctcaccaaccatagcagctgccaagagcccccaggccctgggtccctgccatgggggagccaagggaaacctggggcctgctggatggcttcccgattttcgcgggttgtgttggtgctgatagatgctctgcgatttgacttcgcccagccccagcattcacacgtgcctagagagcctcctgtctccctacccttcctgggcaaactaagctccttgcagaggatcctggagattcagccccaccatgcccggctctaccgatctcaggttgaccctcctaccaccaccatgcagcgcctcaaggccctcaccactggctcactgcctacctttattgatgctggtagtaacttcgccagccacgccatagtggaagacaatctcattaagcagctcaccagtgcaggaaggcgtgtagtcttcatgggagatgatacctggaaagaccttttccctggtgctttctccaaagctttcttcttcccatccttcaatgtcagagacctagacacagtggacaatggcatcctggaacacctctaccccaccatggacagtggtgaatgggacgtgctgattgctcacttcctgggtgtggaccactgtggccacaagcatggccctcaccaccctgaaatggccaagaaacttagccagatggaccaggtgatccagggacttgtggagcgtctggagaatgacacactgctggtagtggctggggaccatgggatgaccacaaatggagaccatggaggggacagtgagctggaggtctcagctgctctctttctgtatagccccacagcagtcttccccagcaccccaccagaggagccagaggtgattcctcaagttagccttgtgcccacgctggccctgctgctgggcctgcccatcccatttgggaatatcggggaagtgatggctgagctattctcagggggtgaggactcccagccccactcctctgctttagcccaagcctcagctctccatctcaatgctcagcaggtgtcccgattttttcatacctactcagctgctactcaggaccttcaagctaaggagcttcatcagctgcagaacctcttctccaaggcctctgctgactaccagtggcttctccagagccccaagggggctgaggcgacactgccgactgtgattgctgagctgcagcagttcctgcggggagctcgggccatgtgcatcgagtcttgggctcgtttctctctggtccgcatggcggggggtactgctctcttggctgcttcctgctttatctgcctgctggcatctcagtgggcaatatccccaggctttccattctgccctctactcctgacacctgtggcctggggcctggttggggccatagcgtatgctggactcctgggaactattgagctgaagctagatctagtgcttctaggggctgtggctgcagtgagctcattcctcccttttctgtggaaagcctgggctggctgggggtccaagaggcccctggcaaccctgtttcccatccctgggcccgtcctgttactcctgctgtttcgcttggctgtgttcttctctgatagttttgttgtagctgaggccagggccacccccttccttttgggctcattcatcctgctcctggttgtccagcttcactgggagggccagctgcttccacctaagctactcacaatgccccgccttggcacttcagccacaacaaaccccccacggcacaatggtgcatatgccctgaggcttggaattgggttgcttttatgtacaaggctagctgggctttttcatcgttgccctgaagagacacctgtttgccactcctctccctggctgagtcctctggcatccatggtgggtggtcgagccaagaatttgtggtatggagcttgtgtggcggcgctggtggccctgttagctgccgtgcgcttgtggcttcgccgctatggtaatctcaagagccccgagccacccatgctctttgtgcgctggggactgcccctaatggcattgggtactgctgcctactgggcattggcgtcgggggcagatgaggctcccccccgtctccgggtcctggtctctggggcatccatggtgctgcctcgggctgtagcagggctggctgcttcagggctcgcgctgctgctctggaagcctgtgacagtgctggtgaaggctggggcaggcgctccaaggaccaggactgtcctcactcccttctcaggcccccccacttctcaagctgacttggattatgtggtccctcaaatctaccgacacatgcaggaggagttccggggccggttagagaggaccaaatctcagggtcccctgactgtggctgcttatcagttggggagtgtctactcagctgctatggtcacagccctcaccctgttggccttcccacttctgctgttgcatgcggagcgcatcagccttgtgttcctgcttctgtttctgcagagcttccttctcctacatctgcttgctgctgggatacccgtcaccacccctggtaaatatctcagctctgattcacttaaagacaatagtgatagtcaagggctgcggaagagacagcagcccccagggaatgaagctgatgccagagtcagacccgaggaggaagaggagccactgatggagatgcggctccgggatgcgcctcagcacttctatgcagcactgctgcagctgggcctcaagtacctctttatccttggtattcag

SEQ ID NO: 92912 - DNA, 513 bp, Homo sapiens
gaaagtctgtaactgctgcagccaggaattagaaacttcttttacctatgtggacaaaaacatcaacttggagcagcggaaccggagctcgccatcagcaaaagggcataatcaccctggggagcttggctgggaaaatccaaatgagtggtcccaagaggctgccatatctttgatatctgaagaggaggatgatacaagttcagaagccacgtcttcagggaagtctatagactatggtttcatcagcgccatcttgttcttggtcactgggatcctgctcgtgatcatctcttacatcgtcccacgggaagtgactgtggaccccaacactgtggcagcccgggagatggagcgcctggagaaggagagtgcgaggctgggggctcacctggaccgctgtgtgattgcggggctctgcctcctcacgctggggggcgtcatcctgtcctgcttgttaatgatgtccatgtggaagggggagctctatcgtcgaaacagatttgcctcttc

SEQ ID NO: 92913 - DNA, 1029 bp, Homo sapiens
atgggtcggggaggggatgttgccactactagggatggggaagctgtttcttttggcaaaaaagtaggccagctgcaagctgaggagcaaggagagcctatccaagtcccaaaactgaagaactcagagtccgatgttcaagggcaggaagcatccagcatgggagaaaaatctgttatttcaagaaaccaagaagggccaggagaaatgggaaaagctgtgttgattcctaaagatgaccaggagaaaatgaaagagctgtttaaaatcaatcagtttaaccttatggccagtgatttgattgcccttaatagaagtctgccagatgtaagattagaaggatgtaagacaaaagtctaccctgatgaacttccaaacacaagtgtagtcattgtgtttcataatgaagcttggagcactctccttagaactgtttacagtgtgataaatcgttccccacactatctactctcagaggtcatcttggtagatgatgccagtgaaagagattttctcaagttgacattagagaattacgtgaaaaatttagaagtgccagtaaaaattattaggatggaagaacgctctgggttaatacgtgcccgtcttcgaggagcagctgcttcaaaagggcaggtcataacttttcttgatgcacactgtgaatgcacgttaggatggctggagcctttgctggcaagaataaaggaagacaggaaaacggttgtctgccctatcattgatgtgattagtgatgatacttttgaatatatggctgggtcagacatgacttatgggggttttaactggaagctgaatttccgctggtatcctgttccccaaagagaaatggacaggaggaaaggagacagaacattacctgtcaggacccctactatggctggtggcctattttctattgacagaaactactttgaagagataggaacttacgatgcaggaatggatatctggggtggagagaatcttgaaatgtcttttagggctatagcctctaatggaagataa

SEQ ID NO: 92914 - DNA, 1266 bp, Homo sapiens
aaagtataggtcttaaagctatggaacttgatgggggccaaagaatgtactatttttaagtaatgtggtattgtaccacaaagtagatctaaataagctttatgctgtatttgaactaattggggcatgttattgggaggaggttggggggatttttggttatgttaaatgtttgatgtttaaattgttgcatgttgaattcaaactttttaacaagtccttgatgtttcaatttgaaagtgaccaatggggctgaggctgtgtccactgaggctaagatgactgcctttcctgattggccttggcttttccatacattgtgtgacccttgccctatgaccctttggctgaccttaccggaagccatgacgacagcagccttttgccattagacgcagggtgatggtgaggattccaagggttagacaaaactggttaatctgaactaggtgactgttaccttgcgtgttttgtggccaaaccaccaccaaaaacctcacactgtgatgtggtggaggtggatacagcagtcggagaacatctggcagagacaaatacggaccacctgttcgtacagaatacaggcttattgtagaaaatctttctagtcggtgcagttggcaagatttaaaggattttatgcgacaagcaggtgaagtaacctatgcggatgcccacaaggaacgaacaaatgagggtgtaattgagtttcgctcctactctgacatgaagcgtgctttggacaaactggatggcacagaaataaatggcagaaatattaggcttattgaagataagccacgcacaagccataggcgatcttactctggaagcagatccaggtctcgatctagaagacggtcacgaagtaggagtcgcaggagcagccgcagtagatctcgaagtatctcaaaaagtcgctcccgttccaggtcgcggagcaaaggtcgatcacgttctcgatcaaaaggcaggaaatctagatcaaagagcaaatctaagcccaagtctgatcggggctcccattcacattctcgaagcagatctaaggatgagtatgagaaatctcgaagcaggtctcggtcccgatcccccaaagaaaatggaaagggtgatataaagtcaaaatccagatcaaggagccagtcccgttccaattcgccgctacctgttccaccctcaaaggcccgttctgtgtcccctccaccaaaaagagctacttcaagatcccgttctagatctcgctcaaagtcaagatcaaggtcc

SEQ ID NO: 92915 - DNA, 565 bp, Homo sapiens
catgtacacggtataagacttggaggaaatgcagggacccttctgttttctcctgcaaagttgaaaaagctgcatgcagttggaagggatcttcagatggtgctggtgactttctgttccttttggagttgacatgcatgtggattggaggaaaaataatcaacatatattctcctttcgtactgtttaaatcacaggaagaagcggctttaagacaaagatcaaaccaaaatgacaactgctcacttttactgtcaatactgcacagcatcacttcttgggaagaaatatgtactaaaggatgacagtccatactgtgttacatgttatgatcgtgtattttctaactattgcgaggaatgcaaaaaaccaattgaatctgattctaaggatctttgttacaaagaccggcactggcatgaaggatgcttcaagtgcaccaaatgcaatcactctttggtggaaaagccttttgctgccaaggatgagcgcctgctgtgcacggagtgctattctaacgagtgctcctccaagtgcttccactgcaagaggaccatcatgcctg

SEQ ID NO: 92916 - DNA, 353 bp, Homo sapiens
ttgacccgaaacagggcagtgttcgcccgttatcatacggctttatttcgcaggacgacctggcaaaacagttcctgaacgtttctgaagattttaaacccaatttttaatcgcggatttgatttatgagtgaagattatttgaaaatgtttacaggtgttgttctgttaatatttgtcattattgccggttatttcttttctgagcgtaatgacaggaaaatgtttctcctgagctcactggttttccttgttgttaatatcgcgtgtttatatgtgcttaccgccagtctctggtttctgtgtggtgcaattatgagtcagggcgcagcactggttggttcaatagttgcg

SEQ ID NO: 92917 - DNA, 379 bp, Homo sapiens
taaaaagaaaacctttactgaatcagctgagtgttaataatacgaatttccttttcttgccaattctgatctgaacagaaaatccaagaacagggatatgtgtggattacagttttctctgccttgcctacgactgtttctggttgttacctgttatcttttattattactccacaaagaaatacttggatgttcgtctgtttgtcagctctgcactgggagacaaattaactgccgtaacttaggcctttcgagtattcctaagaattttcctgaaagtacagtttttctgtatctgactgggaataatatatcttatataaatgaaagtgaattaacaggacttcattctcttgtagcattgtatttggataattct

SEQ ID NO: 92918 - DNA, 381 bp, Homo sapiens
aaaatcctgaacatttgtcttgaacatgaacactccaaaagaagaattccaggactggcccatagtcagaatagcagctcatttaccagacctcattgtctatggacatttctccccagagcgaccctttatggattattttgacggagtcctgatgtttgttgatatttcaggcaagtgcaaaagggatgtttgtttaatgtggatgagcaacaggctcgcgtgggaattcacatgcagagcttgattgcagagtagggaggccattctggagcccttgggctgtcacagcagatgtgctccactgagaacacaagagggaggaaatagcttgtggccctggctctctctcatcctcccttactcaggactgccagtcat

SEQ ID NO: 92919 - DNA, 611 bp, Homo sapiens
tttcgttgaggcggccaccgcgactccggctctgcgctcggctgcctgacttcttcctgctgctgcttttcaggggctgtctgataggggctgtaaatctcaaatccagcaatcgaaccccagtggtacaggaatttgaaagtgtggaactgtcttgcatcattacggattcgcagacaagtgaccccaggatcgagtggaagaaaattcaagatgaacaaaccacatatgtgttttttgacaacaaaattcagggagacttggcgggtcgtgcagaaatactggggaagacatccctgaagatctggaatgtgacacggagagactcagccctttatcgctgtgagggcgttgctcgaaatgaccgcaaggaaattgatgagattgtgatcgagttaactgtgcaagtgaagccagtgacccctgtctgtagagtgccgaaggctgtaccagtaggcaagatggcaacactgcactgccaggagagtgagggccacccccggcctcactacagctggtatcgcaatgatgtaccactgcccacggattccagagccaatcccagatttcgcaattcttctttccacttaaactctgaaacaggcactttg

SEQ ID NO: 92920 - DNA, 366 bp, Homo sapiens
gtaagagaagactggaagcatgtcggagttttggttaatttctgcccctggcgataaggaaaatttgcaagctctggagaggatgaatactgtaacctccaagtccaacctgtcttataataccaaattcgctattcctgacttcaaggtggggaccttggattccctggttggcctctctgatgagttggggaaactcgacacctttgctgaaagcctcataaggagaatggctcaaagcgtggtggaagtcatggaggactcaaaggggaaggtccaggagcacctcctggcaaacggagttgacttaacatcctttgtgacccactttgaatgggacatggccaaatatcctgtcaagcagcc

SEQ ID NO: 92921 - DNA, 977 bp, Homo sapiens
taggttgatgaaccaccctaccttccacagaaacctgagactggggatcttacagaactgatctacattcttctagaaccagtctgcaggctcatagccagaagggacttggctcgtctcagatgagactttggactgaagacttttgcattaatgctgaaatgagttaagactttggggggactactggcctggacctcaatccccaggtgtctgcaactcttacttgatatacacacaatggataatcaataatgattcagctaagtatggaaatagagcagagaagagcccctccaggtgtgagcagaaccttgaaggagacagggagcagccatgtggctctcaaaggaacagcatttccaggaggaattgtgattgtatttctgggaacacatcttggcagggtcgaagaagggggcaaagcagacaccctgagctccaaactgcaggctggggatgaggttgtgcacatcaatgaggtgactctgagcagctccagaaaggaggcagtttccctggtgaaaggatcctacaagaccctcaggctggtagtgcgcagaggttcctttataattttttgagaagaaggctatgctcaggatctttaaaagctggtggtaacttcacaatcactggctccatcaggcaacgagagacttgctgaaggagaaacaaactgtgaagagatgtgtgcacagacccaggccatgcagatactggtgcctctaacttcgtcagcccagaacacctcacctctggcccccagcacaggaaagcagcgtggtcaggaggggttaaacttcggctgaagcacaggcgcagtgagcctgcaggccgacctcactcgtggcacacaactaaatctgggggagaagcaacccgatgccagcatgatgcagatatctcagggtatgatcggccctccttggcaccaaagctaccattccagctcctctactagtgacctctccaac

SEQ ID NO: 92922 - DNA, 2485 bp, Homo sapiens
tgtgttgctcgctaaccagtcccccataacagtagactggagcccagagcctgcttacttgtcaggtgtttattttgtcttgcttttttttttttttaaatgaagtcaaaatgccaataagaccagatctccagcagttggaaaaatgcattgatgatgctttaagaaaaaatgatttcaaacctttgaaaacacttttgcaaattgatatttgtgaagatgtgaagattaaatgcagcaaacagtttttccacaaggtggacaaccttatatgcagggaacttaataaagaggatatccacaatgtttcagccattttggtttctgttggaagatgtggcaaaaatatcagtgtattggggcaagctggacttctaacgatgataaaacaaggactaatacaaaagatggttgcctggtttgaaaaatccaaggacattattcagagtcaaggaaattcaaaagatgaagctgttctaaatatgatagaagacttagttgatcttctgctggtcatacatgatgtcagtgatgaaggtaaaaaacaagtagtggaaagtttcgtacctcgcatttgttccctggttattgactcaagagtgaatatttgtattcagcaagagattataaaaaaaatgaatgctatgcttgacaaaatgcctcaagatgcccggaaaatactctctaaccaagaaatgttaattctcatgagtagtatgggagaaaggattttagatgctggagattatgacttacaggtagccattgtagaagctttgtgtagaatgaccacagaaaaacaaagacaagaactggcacatcagtggttttcaatggattttattgctaaggcatttaaaagaattaaggactctgaatttgaaacagattgcaggatatttctcaaccttgtaaatggcatgcttggagacaaaagaagggtctttacatttccttgtttatcagcatttcttgataaatatgagctgcaaataccatcagatgaaaaacttgaggaattttggattgattttaatcttgggagtcagactctctcattctacattgctggagataatgatgatcatcaatgggaagcagttactgtgccagaggaaaaagtacaaatatacagcattgaagtgagagaatcaaagaagctactgacaataattctgaaaaatacagtaaaaattagcaaaagagaagggaaagaattgcttttgtattttgacgcatcactagaaatcactaatgtaactcaaaaaatttttggtgcaactaaacatagggaatctatcagaaaacaaggtatttcagttgccaaaacgtcgctgcatatactttttgacgcaagtggatcacagattctagtgccagaaagtcaaatctcaccagtcggagaagagctcgttagtttaaaggaaaaatcaaagtccccaaaggaatttgctaaaccttcaaaatatatcaaaaacagtgacaaagggaatagaaataatagtcagcttgagaaaactactcctagcaaaagaaaaatgtctgaagcatcaatgattgtttctggtgcagatagatacactatgagaagtccagtgcttttcagcaacacatcaataccaccacgaagaagaagaattaaaccaccactgcaaatgacgagctctgcagagaaacctagtgtttctcaaacatcagaaaatagagtggataatgctgcatcactgaaatctagatcatcagaaggaagacatagaagagataatatagacaaacatatcaaaactgctaagtgtgtagaaaacacagaaaataagaatgttgaattcccaaaccaaaattttagtgaactccaggatgttataccagattcacaggcagcggaaaaaagagatcatactatattacctggtgttttagacaacatctgtggaaataaaatacacagcaaatgggcatgttggacacctgtaacaaacattgaactatgtaataaccaaagagcaagtacttcgtcaggagacacattgaatcaagatattgttataaataaaaaacttactaaacaaaaatcatcctcttcaatatctgatcataattctgaaggaacaggaaaagtgaaatataagaaagaacaaaccgaccatatcaaaatagataaagcagaagtagaagtttgcaagaaacacaatcagcaacaaaatcatcctaaatattcagggcagaaaaatactgaaaatgccaagcagagtgattggcctgttgaatctgaaactacttttaaatcggttctcctaaataagacaattgaagaatcgctgatatataggaagaaatacatattgtcaaaagatgtgaatactgctacttgcgataaaaatccatctgctagcaaaaatgtgcaaagtcatagaaaagcagagaaagaattgacttctgagcttaattcctgggattcgaaacaaaaaaaaatgagagaaaagtc

SEQ ID NO: 92923 - DNA, 1100 bp, Homo sapiens
ggccctgccctgaaggctggtcacttgcagaggtaaactcccctctttgacttctggccagggtttgtgctgagctggctgcagccgctctcagcctcgctccgggcacgtcgggcagcctcgggccctcctgcctgcaggatcatgcccaccaccgtggacgatgtcctggagcatggaggggagtttcactttttccagaagcaaatgtttttcctcttggctctgctctcggctaccttcgcgcccatctacgtgggcatcgtcttcctgggcttcacccctgaccaccgctgccggagccccggagtggccgagctgagtctgcgctgcggctggagtcctgcagaggaactgaactacacggtgccgggcccaggacctgcgggcgaagcctccccaagacagtgtaggcgctacgaggtggactggaaccagagcacctttgactgcgtggaccccctggccagcctggacaccaacaggagccgcctgccactgggcccctgccgggacggctgggtgtacgagacgcctggctcgtccatcgtcaccgagtttaacctggtatgtgccaactcctggatgttggacctattccagtcatcagtgaatgtaggattctttattggctctatgagtatcggctacatagcagacaggtttggccgtaagctctgcctcctaactacagtcctcataaatgctgcagctggagttctcatggccatttccccaacctatacgtggatgttaatttttcgcttaatccaaggactggtcagcaaagcaggctggttaataggctacatcctgattacagaatttgttgggcggagatatcggagaacagtggggattttttaccaagttgcctatacagttgggctcctggtgctagctggggtggcttacgcacttcctcactggaggtggttgcagttcacagttgctctgcccaacttcttcttcttgctctattactggtgcatacctgagtctcccaggtggctgatctcccagaataagaatgctgaagccatgagaatcattaagcacatcgcaaagaaaaatggaaaatctctacccgcctcccttca

SEQ ID NO: 92924 - DNA, 385 bp, Homo sapiens
actagatgttgattcaataaaaaaatgcggcatacttttaataacagattctctacatcactaaaggaacttatgtatggatgttaaaaacatttttctaccattcgtccagacccaaccatacttgctcgtttgcaaccgcaaccatgtccttgtcaaaagaatgtggaggttttcccgatctgccatgtattccagaaaggccatgtacaagaggaagtactcaaccgctagctccaaggctgaaaagaaaaagaaggagaaggttctcgcaactgttacaaaaccagttggtggtgacaagaacggcggcacccggttggttagccttcccacactgcctaaatattatcctactgaagatgtgcctcgaaagctgttgagc

SEQ ID NO: 92925 - DNA, 390 bp, Homo sapiens
ctcagaagcagagttctggggtgtctccaccatggcctggacccctctctggctcactctcctcactctttgcataggttctgtggtttcttctgagttgactcaggaccctgctgtgtctgtggccttgggacagacagccaggatcacatgccgaggagacagcgtccgcaactattttgcagcctggtaccagaagaagccagggcaggcccctctacttgtcttctatggtaaaattcatcggccctcagggatcccacaccgattctctgcctccagatcaggaggcacatctttcttgaccatcacaggggctcagccggaagatgaggctgactattattgtggctcccgagacagccatgtagacccctggattttcggcgg

SEQ ID NO: 92926 - DNA, 455 bp, Homo sapiens
  misc_feature (1)...(455): n = a,t,c or g
gctgcgnnaatacactaaagagaaccgtnccggaattcccgggaagacccgggcggacccacgcggccgcccaagcgttcgactgattctgttttttcactattccagacccccaagaaataaactgttatgaccatgctaagtttaatatctatgctcaaatcttattaaattgccttcaaaaaaaataaaaataagaaacacttcctacaagcctggtaaagctaaagccctatccaatgtatgctgcagaatttttctctcagttcaaaggattataaagcccgcctaaaaaaggcaagttccagacactctgcaaaataaaatggccaaagtttaaagtcaagtggccccctgaagggtcattgaacctcacaattgttcaagctgtgtggcaggttgttactgaaactcctagtcaccctgatcagcttccctacattagctacgtttag

SEQ ID NO: 92927 - DNA, 370 bp, Homo sapiens
cgacctacctatacgcggtcccttacagctgttttgatttcctgtcgtaagatttttccttttcattttctccggggagggtaaatgcaatatagcctcttctctagaaaggaggtggttaggttggccttaagcagtgttagaagatctattttttttcaaaccctgtgtctgaactgggtgaattccagcctggggagaggactttgatcaccacacgtttttttggtgtgcgtgctgtcttatggttgcgtggcgagtttctgctttagatgagcactgtccagagcttcctccagtggacattaccatatttgtcgcaaaggaggtggaaggacagattctgtggacttacgttttgatcaagggg

SEQ ID NO: 92928 - DNA, 390 bp, Homo sapiens
  misc_feature (1)...(390): n = a,t,c or g
cccacgcgtgcggtggcctgccggacgattgctttcctcagccggttttatgccttggggaacctccggtcccgagggtatatatgccgcaattgtacagcgccttttgctttgctgaccaaaacccatattatctatggagtcaaaggggatggggcagaggctcaaattaactctccccattcgccgggaaaaacactgaggaaagagctacattcagagatctcagaagttatgaatgaaatctgggctagcgatcaaagcagaagtgccggccttatctcatcaaagccaggctgctttattagaggggctgatatcaacatgttaggcgcttgcaagacccttcaagatgtatcagaggtatgtcacgaagcacagagaccagcn

SEQ ID NO: 92929 - DNA, 413 bp, Homo sapiens
atgcgaaggcggtgtcaggaacacgacctggccaggattctgatgccgttcctgtcccaggaacttgcgtaaaagccacaagatctgaagagggggagattatctcgtgggtaacgagagcagccgctcctcctggagaggggatctctgctgctcctacagttgagcccacttccggggaggctgaaggcggggaggcaaacttggtcaatgtaagcggcggcttggagacagaatcatctaatggaaaagatacactacaaggtgctggggatacatcacaggtgatggatactcaggcgggctccgtggatgaaaagaaaggccgacagttgggtgaggtacagctgcaatgtgggatttgtacaaaatggttcacggctgacacatttggcatagatacctcatcctgt

SEQ ID NO: 92930 - DNA, 369 bp, Homo sapiens
ctgctccccatctgcccacccactaaagcccatgtggcatgccatctctcgaacatccaggatgtcccagagtggatgtccatcaggtctgctggcagacaaaaatatctcttcaagtgccactcgagtgatagtgaagactgcaggcaaccagaaagactttatggtagctgatgacatctcggtaaggcagttcaaggagatgctattggctcacttccaatgccagatggaccaactagtgctggtcttcatgggttgccttctcaaagaccatgacacactgagccagaggggcatcatggatggccacaccatctacttggtcatcaagtccaagcagggctccagatctctatgccattcctt

SEQ ID NO: 92931 - DNA, 174 bp, Homo sapiens
  misc_feature (1)...(174): n = a,t,c or g
atatgannnnggcttggcatacctactgatgtatctgtaatatccggtactgccaggcacacagcaggtgctcagtagcaactgatggaatgactaattctaagagccttcaattcccacaactttccttataacaagaaagatccacaaaactaatgaactattccctccacc

SEQ ID NO: 92932 - DNA, 517 bp, Homo sapiens
  misc_feature (1)...(517): n = a,t,c or g
tagttgaaaccataaggacactcgttgtatcagtcgtacaacacgctgacgtaacacatataccaaatgtctaaaggccggggnnnnnnnnatttgaaaccttggttagaccccctgaaanccgcgncgacccacgcgnccgggaggactgcagggccagnccccagggccaggcatgcaggggccccctcccatcacgcccacctcctggagcctgcccccgtggagggcctacgtggctgccgccgtgctctgctacatcaacctcctgaattacatgaactggttcatcattgcaggagtgctgctggatatacaggaggttttccagatcagtgacaaccatgctggtttgcttcaaactgtcttcgttagctgcctgctgctgtctgcacctgtgtttggctacctgggcgaccgacatagccgcaaggctaccatgagcttcggtatcttgctgtggtcaggagctggcctctctagctccttcatctccccccggtattcttggctcttt

SEQ ID NO: 92933 - DNA, 1818 bp, Homo sapiens
accggtaccgtggtggaagcgcgccctgggctgccgggggcgcggccgcggtggcacttggacccgaggaggcggcaggtgagaggttccggagctttccaggcgctctggggtccagcaggagctggtgcccgggccggttgggtctcaggcctgagaagaacgcagacgtctcgcctcatcgtcgctctgtggctttaccggcgtgagactacatttcccgccggccctcgcggcgtgcgctttctggcgccccctttctgcttccagcctcatagcccaggtgcatggaccccttagctctaccgtcgcaggactctgcccttccccaagagaggaaccagaaggaggacctatcagcccttgaaattctaaaagtcatgtcccttgggtcagaattgttcagggatgtggccatagtcttctcccaagaagaatggcagtggttggcacctgctcagagggatttgtacagagacgtgatgttggagacctacagcaacctggtctcactgggtcttgccgtttccaaacctgatgtgatctccttcctagagcaaggcaaagagccctggatggtggagagagtggtgtctggaggcctgtgtccagtattggagtccagatatgataccaaggaattatttccaaagcagcatgtttatgaagtcgaatcaccccaatgggagataatggaaagccttacaagttatggtcttgagtgttcaagtttccaagatgattgggaatgcagaaaccagtttgacagacaacagggaaatccagacagacatttccatcagatgatcatcagacatgaagaaatgcccacttttgaccagcatgcatcccttactttttatcagaaaattcatactagagaaaaaccttttgggtataataaatgtagaaaagacttctggcaaaaggaactccttattaatcatcaaggaatttatactaatgagaaaccctataaatgtaaggaatgtgggaaggcctttaaatatggctcacgactaattcaacatgagaatattcattctggtaagaaaccatatgaatgtaaggaatgtggaaaggccttcaattctggttcaaattttatacaacatcagagagttcatactggtgagaaaccgtatgaatgtaaagattgtgagaaggcctttagtcgaagctcacagttgattgaacatcagcgaactcacacaggcgagaaaccctatcagtgtaaggaatgtggcaaggccttcaatcggatctcacatcttaaagtacattatagaattcatactggtgaaaaaccctatgcatgcaaggaatgtgggaaaacctttagtcatcgttctcagttgattcaacatcagactgttcatactggcaggaaactctatgaatgtaaggaatgtgggaaggcttttaatcaaggctcaactcttatacgacatcagagaattcataccggtgagaaaccctatgagtgcaaagtatgtggaaaggcctttagagtgagctcacaactcaagcaacatcagagaattcacactggagagaaaccctaccaatgtaaggtatgtggtagggccttcaaacgggtctcacatcttactgtacattacagaattcatacaggtgaaaagccatatgaatgtaaggaatgtgggaaggcttttagtcattgctcacaattgattcatcatcaggttattcacactgagaaaaagccctatgaatataaggaatgtgagaagaccttgagtcatgattcaactaccgttcaacctcagagaatgcataatagagaaacacacgaaa

SEQ ID NO: 92934 - DNA, 814 bp, Homo sapiens
atagtagactttagtcagtgcggaggaattctcggcgcgctcctgctgagggtcgccggagatgtcgctcggccgccttctaccaggagcctgatccgtgccgcccgccgcccggatgggaccaccagagtgctctaaagtctccagtgaatattgaattgctgaggattttgggaaaagacaaatcaaagttcccattccatggatcccttaggtgcaccttcccagtttgtggatgtggatacactaccaagctggggtgactcatgccaagatgaattaaattcctctgatactacagctgaaatatttcaggaagacactgttcgatcaccttttctttataataaggacgtcaatggaaaagtggttctttggaaaggagatgtggcattactgaactgtacagccattgtgaataccagcaatgaaagtctcacagataagaatcctgtgtcagaaagtatcttcatgcttgcagggcctgatttgaaggaagatctccagaaacttaaagggtgccgaacaggtgaagcacaattgacaaaaggattcaatctagctgcccggttcatcattcacacagtgggacctaaatataaaagccgctatcgcacagcagctgagagttccctttatagctgctacagaaacgtacttcaactagcaaaagagcagtcaatgtcttctgttggcttctgcgtcatcaattctgcaaaacgtggttatcctttaaaggatgcaacacacatagcacttcgcactgtaagaagattcctagagattcatggggaaaccattgaaaaagtagtat

SEQ ID NO: 92935 - DNA, 445 bp, Homo sapiens
ggcacgagggaagaattaataaagatctttttttctagagacaaatggtttgcaagcttattttaactcaacattcactgcttataggggtagtgattcttaacggtggggggtaggttggtggtaggttatgcctagtttaaaattgttcctaggtaattgtgagacaccccaaaagaagtttctcttcttgcttccgccacccaagttgaaatccctactcttactcattttcccaggacagcttcctactctcatgactctggcctctacccagctagtatttcccaaatccataggctttggcctgaaccactcaccacatagcaggcttttgtttatcatgatctgtgacacagatccattcagcatgtttgaaatcttttcttttggaactttcccctttctgcctctgccatcttgcctaaaagttactttaaaatgt

SEQ ID NO: 92936 - DNA, 419 bp, Homo sapiens
ggcacgaggctctccctgtgctaactgcctgcaccttggacagagcgggtgcgcaaatcagaaggattagttgggacctgccttggcgaccccatggcatcccccagaaccgtaactattgtggccctctcagtggccctgggactcttctttgttttcatggggactatcaagctgacccccaggctcagcaaggatgcctacagtgagatgaaacgtgcttacaagagctatgttcgagccctccctctgctgaagaaaatggggatcaattccattctcctccgaaaaagcattggtgcccttgaagtggcctgtggcatcgtcatgacccttgtgcctgggcgtcccaaagatgtggccaacttcttcctactgttgctggtgttggctgtgctcttcttccaccagctggtcgg

SEQ ID NO: 92937 - DNA, 398 bp, Homo sapiens
ggccgcagggcctccgtccgaggtggtgaatcaagattccttgtttcctgagcccgagccgggccccgccccccaggtgcttctggggcctcagggccccggcctcatcaaaggggttgcacctcccaccctcatcaccgactccacagggacccaccttgtcctcaccgtgaccaataaaaatgcacacagccctggcctgtccagagggagcccccaacagccctcgtcccagcctggctctccagcgcctgccccctctgcccagatggacctggagcacccactgcagcccctctttgggacccccacttctctgctgaagaaggaaccacctggctatgaggaagccatgagccagcagcccaaacagcaggaaaatggttcctcaagcccac

SEQ ID NO: 92938 - DNA, 404 bp, Homo sapiens
acgccagcttggacgaggatataagagtcgggatccagtggaggccaggggaccctggcttggcctagccttggcttcttcctcctgctgggtggggaggccctcctggaggagaggcaccaagcagggcctggggggcaggggtggcgtgtggttggcttctaagcaagcgacacgtccccacccaactgcctcccatggcactgctgaggtgccaccctggtttccttggcaggcccactattccacagggaaggtcagcgcttccttcacctccaccgcgatggtcccggagaccacacatgaagcaggtagccaccttggcctctgtagccacctgccatgtgacccaaaagtggcagggggtgggtgtgctccccgactcccactttattggtctgtca

SEQ ID NO: 92939 - DNA, 1505 bp, Homo sapiens
tttcgtggagacgactgtgagcgtgcaaagcgcagagtcctctgatgccctgagctggtccaggctgcccagggccctggcctccgtaggccctgaggaggcccgaagtggggcccccgtgggcggggggcgttggcagctctccgacagagtggagggagggtccccaacgctgggcttgcttgggggcagcccctcagcacagccggggaccgggaatgtggaggcgggaattccttctggcagaatgctggagcctttgccctgttgggacgctgcgaaagatctgaaagaacctcagtgccctcctggggacagggtgggtgtgcagcctgggaactccagggtttggcagggcaccatggagaaagccggtttggcttggacgcgtggcacaggggtgcaatcagaggggacttgggaaagccagcggcaggacagtgatgccctcccaagtccggagctgctaccccaagatcaggacaagcctttcctgaggaaggcctgcagccccagcaacatacctgctgtcatcattacagacatgggcacccaggaggatggggccttggaggagacgcagggaagccctcggggcaacctgcccctgaggaaactgtcctcttcctcggcctcctccacgggcttctcctcatcctacgaagactcagaggaggacatctccagtgaccctgagcgcaccctggaccccaactcagccttcctgcataccctggaccagcagaaacctagagtgagcaaatcatggaggaagataaaaaacatggtgcactggtctcccttcgtcatgtccttcaagaagaagtacccctggatccagctggcaggacacgcagggagtttcaaggcagctgccaatggcaggatcctgaagaagcactgtgagtcagagcagcgctgcctggaccggctgatggtggatgtgctgaggcccttcgtacctgcctaccatggggatgtggtgaaggacggggagcgctacaaccagatggacgacctgctggccgacttcgactcgccctgtgtgatggactgcaagatgggaatcaggacctacctggaggaggagctcacgaaggcccggaagaagcccagcctgcggaaggacatgtaccagaagatgatcgaggtggaccccgaggcccccaccgaggaggaaaaagcacagcgggctgtgaccaagccacggtacatgcagtggcgggagaccatcagctccacggccaccctggggttcaggatcgagggaatcaagaaagaagacggcaccgtgaaccgggacttcaagaagaccaaaacgagggagcaggtcaccgaggccttcagagagttcactaaaggaaaccataacatcctgatcgcctatcgggaccggctgaaggccattcgaaccactctagaagtttctcccttcttcaagtgccacgaggtcattggcagctccctcctcttcatccacgacaagaaggaacaggccctgtatt

SEQ ID NO: 92940 - DNA, 387 bp, Homo sapiens
  misc_feature (1)...(387): n = a,t,c or g
nttgancccccttaggtaccgctgaggaacttctcggtcgacccacgcgttcggggtctgcacgatggagttcttccggtctggcgtgctcctgatcagagttactctgatctgaacattttggcgctcaaggcattaagataatagcctgagttgttcatggagctcttcatcagtatgtctgaaaccattaaatataatgacgatgaccataagactctgtttctgataacactaaatgaacaacgcctggaaggagaattttgggaccttgctattgtggatgaggatgtgaaattcagacctcacagatgtgttcttgctcactgcaacacctactttaacatgcttttcaaagaaaccttgaaggttgtggattaaggtctc

SEQ ID NO: 92941 - DNA, 1109 bp, Homo sapiens
tttcgtcgcggggcgtggtttgccgctttccgagcgccaaggagcggagcgcgctcagctgcgcccagagccttcggccggacctgaaaaagcgagagggagagcgagcaaaaggcgcgatccagagagccagttcacttcttcaactgagatggacatgatataatctccattgagtcaaagaatggcatctagtcctgagcttcccaccgaagatgaacagggttcctggggcatcgacgatctccatatttcattgcaagctgaacaggaagacacccagaagaaagccttcacgtgctggataaactcacagttggccaggcacacttctccctcagttatatccgacctattcacagacattaaaaaggggcatgtcctcctggatctgctagaagtactttctgggcaacagttgcctcgggataaaggatctaataccttccagtgtagaatcaatatagaacatgccttgacattcctaagaaaccgatcaattaagctaataaatattcatgttactgatatcattgatggaaacccatccattatccttggcctaattgggacaattatcctgcactttcatattgagaagcttgcccagactctttcttgcaattacaatcagccttccctggatgatgtgagtgtggttgactcatctcctgcctcaagtcctccagctaagaaatgctctaaagtgcaagcaagatggcaaatgtctgcaagaaaggcccttcttttgtgggctcaggaacaatgcgccacctatgagtctgtcaatgtgaccgattttaagtcaagttggagaaatgggatggcttttttggccatcattcatgccttgcgaccagacctaattgacatgaagagtgtgaagcatagatccaacaaagacaatctgagagaggccttcagaattgcagaacaagaattaaaaatccccagattgctggaaccagaagatgtggatgttgttgatcctgatgaaaagtccatcatgacctatgtggcacagtttctgcagtattccaaagatgcccctgggactggagaggaggctcagggaaaggtgaaagatgctatgggctggttaactctgc

SEQ ID NO: 92942 - DNA, 552 bp, Homo sapiens
ggaggctggtttcttgccttaaggagcccattgcctttcccgctgaagtctagatgttgacatgtaataaagcgggcagcaggatggtggtggatgcggccaactccaatgggcctttccagcccgtggtccttctccatattcgagttgaggctgtgaagctgggcagggtttcagctgagctgaggttggaagtccctgaccttcagctgtggccgcctacggagcagcagggagagcaaacccatggagaaccccgcggcccccaaagcatggacggagctgccagccttctcccctgcccttcttcctctactcccgacctgccagccttctcccctgcccttctgcctctactcccgacctgccaaccttagcctaaaatcagagctgctagaatcacacacactgtcgtagctggttttgtattgtaaatgagtcattctgttattttggaaacttatgtctcatgccaggatctgcagatagttctttttcaaaatattgtttagacaaaataaatattctttaaatataatatctctacttcaa

SEQ ID NO: 92943 - DNA, 383 bp, Homo sapiens
agatattgctactggaaatggaaaccctttttacctgaaatttttgcagcccgaaccttcttgggaggacaaatgcctaactttttacttttggtcaggctgatgaggagtgcacatctccgtacatggatattttgccacactgcaccaccttacaaacgagcaaaatttgaaactagccatccattatgactaccctaactcctgcaaggattatcctcatccaattggaagaactgatggcatgaccaaaccaggcacaggatacactttctttacacctaataacataacgcatgtgagcgaccttatctctgtgcttcaggaagctaatcaagcaattaatcccaacttgcttcagttgggccaagacaaaggctcag

SEQ ID NO: 92944 - DNA, 456 bp, Homo sapiens
aaaggaaagtggaagttggattctgaaagatcgaggtgcccataggaattttatggtcgtcggattttgaagacttgaactagactgggggttctccttgcatttcttgcctgttgcctatctttgtcctctctcttccggcttcgagatgaatgtgcagccctgttctaggtgtgggtatggggtttatcctgccgagaagatcagctgtatagatcagatatggcataaagcctgttttcactgtgaagtttgcaagatgatgctgtctgttaataactttgtgagtcaccagaaaaagccgtactgtcacgcccataaccctaagaacaacactttcaccagtgtctatcacactccattaaatctaaatgtgaggacatttccagaggccatcagtgggatccatgaccaagaagatggtgaacagtgtaaatcagtttttcattgggacat

SEQ ID NO: 92945 - DNA, 1255 bp, Homo sapiens; identical to SEQ ID NO: 62656

SEQ ID NO: 92946 - DNA, 835 bp, Homo sapiens
cgttgctgtcgggaggctgctgcggcgccggggctccgtggcctggattgaatccgatcgggagccatgagcgtggacaaagctgagctatgcgggtctctgctcacctggttacagacgttccacgttccgtctccctgtgccagccctcaggacctgagcagcggccttgccgtagcctatgtgctgaaccagatagacccctcctggttcaacgaggcatggctccagggcatctcggaagatccaggtcccaactggaagctgaaggtgacaagtggactcctgattagaggacagactggtgaagagatgaccagggacgggccagctaggcacatgtcctgggtgatgggcaggaagagggacagatgtctggtgatcaaccatttgttcatccattcatctatggagtactcaccctgtgccaggcctgggcattcagcaaggaataacacagacaaaaacctgccccacacagccatcattctagtgacaagcaacacatacacaaccataaaaattaacttccaggctgggcgcagtggctcatgcctgtaatcccaacactttgagaggctaaagtgggtggatcacctggggccaggagttcaagaccagcctggccaacaagttgaaaccccatctctactaaaaatacaaaaattagctgggtggggtggtgtgcacctgtaatcccagttacttgggaggctgagacatgagaatcacttgaacctgggaggtggaggatgcagtgagctgagattgagccattgcactccagcctgggcaacagagcgagactcttgtctcaagaagaagaaaaaaaaaa

SEQ ID NO: 92947 - DNA, 1088 bp, Homo sapiens
ggcacgaggagtcaaggacagttcagggaggagttctccaaggatgggaaatgcgacttgaaacccagtggtctatacttcagcaggactttttgaggggtcagacatccattgggatacaattggaaggaaaacacaatggaagggaactctgtgactgtgagcaatgtggagaagtcttcagtgaacactcatgccttaagacgcacgtgagaactcaaagtacagggaacactcatgactgtaatcagtatggaaaagatttccttaccctgtgtgagaaaacctctactggtgagaaactttctgagtttaatcagagtgaaaaaatcttcagcctgacaccaaatattgtataccagagaactagcacacaagaaaagtcatttgaatgtagtcactgtggaaaatccttcattaatgagtcataccttcaggcacatatgagaactcacaatggagaaaaactctacgaatggaggaattatgggccaggttttattgactctacaagcctttctgtgcttatagaaaccctcaatgcaaaaaagccctacaaatgtaaggaatgtggaaaaggctatagatacccagcctacctcagtattcacatgcgaacccacactggggagaaaccatatgaatgtaaggaatgtgggaaagccttcaattattccaactcatttcagatacatggaagaactcacactggagagaaaccctatgtatgcaaggaatgtgggaaagccttcactcagtactcgggccttagtatgcatgtacgatctcacagtggagacaagccctatgaatgtaaggaatgtgggaaatccttccttacatcctcacgccttattcaacatataagaactcacactggagagaagccttttgtatgtgttgaatgtgggaaagcctttgcagtttcctcaaatcttagtggacatttgagaactcacactgaagaaaaggcctgtgagtgtaagatatgtgggaaagtatttgggtatccctcatgtcttaataatcacatgcgaacgcacagtgcccagaaaccatacacctgtaaggaatgtgggaaggctttt

SEQ ID NO: 92948 - DNA, 412 bp, Homo sapiens
gtcatcgcccccgactgtggagaagtgtccggggtagccccgttacaggaatgtgtttctgatcatctgaatcttaatcatgtccaactgcctgcaaaatttcctgaaaattacaagcactcgtcttctatgttcaagattatgccaacagttaagaagtaaaaggaagtttttcggaactgtgccaatatccagattgcataggcgagttgtcattacaggcattggcttagtgactcctcttggtgttggaactcacctggtttgggatcgtcttatcggaggagagagtggaattgtttcactggttggtgaagagtataagagtatcccttgcagtgttgctgcttatgtgccaagaggtagtgatgaaggtcagttcaatgaacaaaactttgtgtccaaatcagat

SEQ ID NO: 92949 - DNA, 608 bp, Homo sapiens
gtcggtacactgaggacctagggagtcgacccacgcgtccgaaagattgcacctagtttcttttgtatccattcagagatgttctatgcaattgcactcaagatattctgttactgcagcaccaatggatgaggatagggaatgactgagccataagatgaaaggattctggaaatatatagctaaaatagaaatatttgaaaagaggaaaacctgaagatcagtaatctaaattaacagcaaaatataatcaaagaaaacaaaagaagaaaaataataaagatctcaactgagatcctcccattgtcagattttgacctaggaccatcttggaaagggattcttctgtgattcagaggtgaagcccttacagtgaggtttcttactaagcgattcattggagaatatgcttctaattttgaatctatctataagaagcacttgtgtttggaaaggaaacaactaaatctagaaatatatgacccttgttctcaaacacagaaagcaaaattctccctcacaagtgagcttcactgggcagatgggtttgttattgtgtatgacatcagtgataggtcttcatttgcttttgcaaaagcgctgatcta

SEQ ID NO: 92950 - DNA, 271 bp, Homo sapiens
gcacgaggagaagacctggctctggccacgggtgggggcccggacacagtgactcattctaacatgccctgccctaacagcttggtttatgattgctggctgaacatcaaagaatgttctgtgggtgaacatacctttgaggacttaggactttgccccggccgaaaccaacgagagaaaaaacgttcttacaaagattttttaagggaagaggaaaaaattgctgctcaggtcaggaattcttccaagaagaagttgaaggatagtgaac

SEQ ID NO: 92951 - DNA, 368 bp, Homo sapiens
ggcacgagcaacactccagagtcgtaggagtgaacactgcacaggaatctctgcccatctcaggagaaaccaaacttggggaaaatgtttgcggtccacttgatggcattttacttcagcaagctgaaggaggaccagatcaagaaggtggacaggttcctgtatcacatgcggctctccgatgacacccttttggacatcatgaggcggttccgggctgagatggagaagggcctggcaaaggacaccaaccccacggctgcagtgaagatgttgcccaccttcgtcagggccattcccgatggttccgaaaatggggagttcctttccctggatctcggagggtccaagttccgagtgctgaaggt

SEQ ID NO: 92952 - DNA, 349 bp, Homo sapiens
ggcacgaggatgttgttgctgtgtatgtcccacttattttgcttccttaatgaacaatgcaactttgagacagaagtatttgagaacatttttatcagttgcgacattttgatagtgaacattttatatcttctgtcaacttaaaatgtttgcatcttctgtcagcttaaaatgtttaattggttatagccaaataatttggctataattgataagttaatttatcaaattaaattgctttttttccctttagactttcttcagtcacatctgaataaatcacttagaagtaagctagatgtaatataatgaaatgcttaaaagggctgtgtatcttcatattacactt

SEQ ID NO: 92953 - DNA, 352 bp, Homo sapiens
  misc_feature (1)...(352): n = a,t,c or g
ggcacgagggtgctgtctcctgccgacaagaccaacgtcaaggccgcctggggtaaggtcggcgcgcacgctggcgagtatggtgcggaggccctggagaggatgttcctgtccttccccatgccccgacccctatttaatcccatttagcttatttactcctgtgaaatgtccatcttctttttgctttccctaattccctgtctggactctttggaaccatgaaccttattaatcgtgaccaattttatgatatatgcttttccccaaaatgccgtatgtcttatgtttatttttaaataattaggccatgatttgtttggggataagactttttctatagtaccagtgn

SEQ ID NO: 92954 - DNA, 344 bp, Homo sapiens
ggcacgagcctagaaattccaagtagaattctactggtcattagaaaaacttttgataagactaaaatttctttacctagctgtacttagtactttgtgaatcctgtacctcatttatggaaacacattcagcttttaaactaaatccattgagtagatctaaacttaatcattatctgcagataatgattctagcagcaatgtctgttttaggattgcatgaataacaaactacatgttagggttggcattttatttttaagtgctagtttatataattaaacatacataaattttaacatcttaggggacagaagactattataaaaaataattttatgaat

SEQ ID NO: 92955 - DNA, 393 bp, Homo sapiens
ggcacgagggtatattattgatgatggatattgcaatatcagattttaaaagaactcttaaaaccacaaagttaataatttatgccagtcaaaatactgaaaagaagaagctgctgaaccagaaactgggcatgtaatcttttgtaatgaagactgagtctcacctgtttcagttaaacttacttccagttggcagtagcacactggacttgatgacactcaattccttcaattattttatcattttggtaattcctcttgttggttcaaaagatcatatgccattagcatataaccatagaagccaagtaagcaggctgattaggaaaacactttttccttcaaacttgttttatagccactttgagccagtttttgcagggaggagctaag
